(19) United States
(12) Patent Application Publication
(10) Pub. No.: US 2006/0248617 A1
(43) Pub. Date: Nov. 2, 2006

(54) Method of targeted gene disruption, genome of hyperthermostable bacterium and genome chip using the same

(75) Inventors: Tadayuki Imanaka, Osaka (JP); Haruyuki Atomi, Kyoto (JP)

Correspondence Address: SEED INTELLECTUAL PROPERTY LAW GROUP PLLC, 701 FIFTH AVE, SUITE 6300, SEATTLE, WA, 98104-7092, US

(73) Assignee: Japan Science and Technology Corporation, Saitama (JP)

(21) Appl. No.: 10/526,324

(22) PCT Filed: Aug. 29, 2003
(86) PCT No.: PCT/IB03/03597

§ 371 Date: Apr. 19, 2006

(30) Foreign Application Priority Data
Aug. 30, 2002 (JP) 2002-319011

(51) Int. Cl. G06F 19/00; C12Q 1/68; C07H 21/02; C12N 15/82; A01H 1/00

(52) U.S. Cl. 800/289; 435/6; 702/20; 536/23.1

(57) ABSTRACT

It is intended to provide an efficient and sure gene targeting method embodied at an arbitrary position in the genome of an organism and a kit therefor. It is also intended to provide a method for targeted-disruption of an arbitrary gene in the genome of an organism which comprises: 1) the step of providing the whole sequencial data of the genome of the organism; 2) the step of selecting at least one arbitrary region in the sequence; 3) the step of providing a vector containing a sequence homologous with the region selected above and a marker gene; 4) the step of transforming the organism by the vector; and 5) the step of providing the organism under such conditions as allowing homologous recombination. Moreover, the genome of a hyperthermostable bacterium and its array are provided.

### TECHNICAL FIELD

[0001] The present invention relates to genomics. More specifically, the present invention relates to a genome of a hyperthermostable bacterium and a genome chip thereof. The present invention relates to a novel method for targeted disruption.

### BACKGROUND ART

[0002] Hyperthermostable bacteria survive in high temperature environments, proteins (such as enzymes) produced by the bacteria are generally thermostable, i.e., structurally stable. Further, archaebacteria, to which the hyperthermostable bacteria belong, are living organisms different from conventionally known prokaryotic or eukaryotic organisms. Therefore, it is clear that the hyperthermostable bacteria are evolutionally different from these organisms. Accordingly, even if an enzyme derived from the hyperthermostable bacteria has similar functions to those already known derived from prokaryotic or eukaryotic cells, the enzymes derived from the hyperthermostable bacteria are often structurally and/or enzymatically different from conventional enzymes. For example, chaperonin isolated from the KOD-1 strain (Thermococcus kodakaraensis KOD1, hereinafter also called KOD1 or KOD1 strain; Morikawa, M. et al., Appl. Environ. Microbiol. 60(12), 4559-4566(1994)), a hyperthermostable bacterium, has similar functions to GroEL from Escherichia coli. However, GroEL forms a 14-mer and further complexes with GroES, which forms a 7-mer, in order to achieve its functions, whereas the chaperonin from KOD-1 strain functions alone (Yan, Z. et al., Appl. Environ. Microbiol. 63: 785-789).

[0003] Gene disruption using a plasmid is conventionally known as a method for targeted disruption of a gene in thermostable bacteria (Bartolucci S., Third International Congress on Extremophiles Hamburg, Germany, Sep. 3-7, 2000). The method of Bartolucci utilizes a homogeneous or heterogeneous expression system with a recombinant protein using a thermostable bacterium. However, it is unclear as to whether targeted genes are definitely disrupted by this method, and therefore it cannot be said that effecient targeted disruption is achieved.

[0004] Accordingly, there is a limitation in gene targeting based on information of some of the genes.

[0005] Therefore, it is an object of the invention to provide a method for gene targeting in an efficient and definite manner in an arbitrary site of a genome of a living organism, and a kit therefor.

[0006] Further, there is no method as of this date for analysing a genome as a whole in an efficient and/or global manner by the genome of a hyperthermostable bacterium onto a chip. Therefore, it is another object of the invention to develop a technology for analysing such a genome as a whole in an efficient and/or global manner.

### SUMMARY OF INVENTION

[0007] The above identified problem has been solved by using an entire sequence of a genome of a living organism for targeting a portion of chromosomes thereof. In particular, the present invention demonstrates that the above-mentioned method has been carried out in an efficient and definite manner by sequencing the whole genome of Thermococcus kodakaraensis KOD1 strain, a strain of thermostable bacteria, as an example of genomic sequence.

[0008] The present invention also provides for the first time a technology for analyzing an entire genome in an efficient and/or global manner by sequencing the entire genomic sequence of Thermococcus kodakaraensis KOD1 strain, a strain of the thermostable bacteria as an example of the genomic sequence. Therefore, it is now possible to simulate gene expression of the organism per se on a chip.

[0009] Accordingly, the present invention provides the following:
[0010] 1) A method for targeted-disuption of an arbitrary gene in the genome of a living organism comprising the steps of:

[0011] A) providing information of the entire sequence of the genome of the living organism;

[0012] B) selecting at least one arbitrary region of the sequence;

[0013] C) providing a vector comprising a sequence complementary to the selected region and a marker gene;

[0014] D) transforming the living organism with the vector; and

[0015] E) placing the living organism in a condition allowing homologous recombination.
[0016] (2) The method accoding to Item 1 wherein in the step B), the region comprises at least two regions.
[0017] (3) The method according to Item 1, wherein the vector further comprises a promoter.
[0018] (4) The method according to Item 1 further comprising the step of detecting an expression product of the marker gene.
[0019] (5) The method according to Item 1 wherein the marker gene is located in the selected region.
[0020] (6) The method according to Item 1, wherein the marker is located outside of the selected region.
[0021] (7) The method according to Item 1, wherein the genome is the genome of Thermococcus kodakaraensis KOD1.
[0022] (8) The method according to Item 1, wherein the genome has a sequence set forth in SEQ ID NO: 1 or 1087.
[0023] (9) The method according to Item 1, wherein the region comprises a sequence encoding at least one sequence selected from the group consisting of SEQ ID NOs: 2-341, 343-722, 724-1086, 1088-1468, 1470-1837 and 1839-2157.
[0024] (10) A nucleic acid molecule having a sequence set forth in SEQ ID NO: 1 or 1087.
[0025] (11) A nucleic acid molecule comprising at least eight contiguous nucleic acid sequence of a sequence set forth in SEQ ID NO: 1 or 1087.
[0026] (12) A nucleic acid molecule comprising a sequence encoding an amino acid sequence encoding at least one sequence selected from the group consisting of SEQ ID NOs: 2-341, 343-722, 724-1086, 1088-1468, 1470-1837 and 1839-2157; or a sequence having 70 % homology thereto.
[0027] (13) A nucleic acid molecule wherein when the reading frame of Table 2 is f-1, f-2 or f-3, the nucleic acid molecule has a sequence from the position of nucleic acid number (sense strand, start) of SEQ ID NO: 1 of Table 2, to the position of nucleic acid number (sense strand, stop) or a sequence having at least 70% homology thereto, or when the reading frame of Table 2 is r-1, r-2 or r-3, the nucleic acid molecule has a a sequence from the position of nucleic acid number (antisense strand, start) of SEQ ID NO: 1087 of Table 2, to the position of nucleic acid number (antisense strand, stop) or a sequence having at least 70% homology thereto.
[0028] (14) A polypeptide comprising at least one amino acid sequence selected from the group consisting of SEQ ID NO: 2-341, 343-722, 724-1086, 1088-1468, 1470-1837 and 1839-2157, or a sequence having at least 70% homology thereto.
[0029] (15) A polypeptide comprising at least three contiguous amino acids of an amino acid sequence selected from the group consisting of SEQ ID NO: 2-341, 343-722, 724-1086, 1088-1468, 1470-1837 and 1839-2157, or a sequence having at least 70% homology thereto.
[0030] (16) A polypeptide comprising at least eight contiguous amino acids of an amino acid sequence selected from the group consisting of SEQ ID NO: 2-341, 343-722, 724-1086, 1088-1468, 1470-1837 and 1839-2157, or a sequence having at least 70% homology thereto.
[0031] (17) A polypeptide comprising at least three contiguous amino acids of an amino acid sequence selected from the group consisting of SEQ ID NO: 2-341, 343-722, 724-1086, 1088-1468, 1470-1837 and 1839-2157, or a sequence having at least 70% homology thereto, wherein the polypeptide has biological activity.
[0032] (18) The polypeptide according to Item 17, wherein the biological activity comprises a function set foth in Table 2.
[0033] (19) A method for screening for a heat resistant protein, comprising the steps of:

[0034] A) providing the entire sequence of the genome of a thermoresistant living organism;

[0035] B) selecting at least one arbitrary region of the sequence;

[0036] C) providing a vector comprising a sequence complementary to the selected region and a gene encoding a candidate for the heat resistance protein;

[0037] D) transforming the living organism with the vector;

[0038] E) placing the thermoresistant living organism in a condition allowing to cause homologous recombination;

[0039] F) selecting the thermoresistant living organism in which homologous recombination has occurred; and

[0040] G) assaying to identify the thermoresistant protein.
[0041] (20) A kit for screening for a thermoresistant protein, comprising:

[0042] A) a thermoresistant living organism; and

[0043] B) a vector comprising a sequence complementary to the selected region and a gene encoding a candidate for the thermoresistant protein.
[0044] (21) The kit according to Item 20, further comprising an assay system for identifying the thermoresistant protein.
[0045] (22) The kit according to Item 20, wherein the thermoresistant living organism is hyperthermophilic bacteria.
[0046] (23) The kit according to Item 20, wherein the thermoresistant living organism is Thermococcus kodakaraensis KOD1.
[0047] (24) A biomolecule chip having at least one nucleic acid molecule having at least eight contiguous or non-contiguous nucleotides of the sequences set forth in SEQ ID NOs: 1 or 1087, or a variant thereof located therein.
[0048] (25) The biomolecule chip according to Item 24, wherein the nucleic acid molecule or the variant thereof is located to cover the sequences set forth in SEQ ID NO: 1 or 1087.
[0049] (26) The biomolecule chip according to Item 24, wherein the nucleic acid molecule or the variant thereof comprises any open reading frame of the sequences set forth in SEQ ID NO: 1 or 1087.
[0050] (27) The biomolecule chip according to Item 24, wherein the nucleic acid molecule or the variant thereof comprises substantially all open reading frames of the sequences set forth in SEQ ID NO: 1 or 1087.
[0051] (28) The biomolecule chip according to Item 24, wherein the nucleic acid molecule or the variant thereof comprises a sequence encoding at least one sequence selected from the group consisting of SEQ ID NOs: 2-341, 343-722, 724-1086, 1088-1468, 1470-1837 and 1839-2157.
[0052] (29) The biomolecule chip according to Item 24, wherein the nucleic acid molecule or the variant thereof comprises substantially all the sequences encoding sequences selected from the group consisting of SEQ ID NOs: 2-341, 343-722, 724-1086, 1088-1468, 1470-1837 and 1839-2157.
[0053] (30) The biomolecule chip according to Item 24, wherein the nucleic acid molecule or the variant thereof comprises at least eight contiguous nucleotide lengths of substantially all the sequences encoding sequences selected from the group consisting of SEQ ID NOs: 2-341, 343-722, 724-1086, 1088-1468, 1470-1837 and 1839-2157.
[0054] (31) The biomolecule chip according to Item 24, wherein the nucleic acid molecule or the variant thereof comprises at least fifteen contiguous nucleotide lengths of substantially all the sequences encoding sequences selected from the group consisting of SEQ ID NOs: 2-341, 343-722, 724-1086, 1088-1468, 1470-1837 and 1839-2157.
[0055] (32) The biomolecule chip according to Item 24, wherein the nucleic acid molecule or the variant thereof comprises at least thirty contiguous nucleotide lengths of substantially all the sequences encoding sequences selected from the group consisting of SEQ ID NOs: 2-341, 343-722, 724-1086, 1088-1468, 1470-1837 and 1839-2157.
[0056] (33) The biomolecule chip according to Item 24, wherein the nucleic acid molecule or the variant thereof, comprises substantially all the sequences encoding sequences selected from the group consisting of SEQ ID NOs: 2-341, 343-722, 724-1086, 1088-1468, 1470-1837 and 1839-2157, or sequences with one or more amino acid substitution, addition and/or deletion thereto.
[0057] (34) The biomolecule chip according to Item 24, wherein the nucleic acid molecule or the variant thereof, comprises at least eight contiguous nucleotide lengths of substantially all the sequences encoding sequences selected from the group consisting of SEQ ID NOs: 2-341, 343-722, 724-1086, 1088-1468, 1470-1837 and 1839-2157, or sequences with one or more amino acid substitution, addition and/or deletion thereto.
[0058] (35) The biomolecule chip according to Item 24, wherein when the reading frame of Table 2 is f-1, f-2 or f-3, the nucleic acid molecule or the variant thereof, has a sequence from the position of nucleic acid number (sense strand, start) of SEQ ID NO: 1 of Table 2, to the position of nucleic acid number (sense strand, stop) or a sequence having at least 70% homology thereto, or when the reading frame of Table 2 is r-1, r-2 or r-3, the nucleic acid molecule has a sequence from the position of nucleic acid number (antisense strand, start) of SEQ ID NO: 1087 of Table 2, to the position of nucleic acid number (antisense strand, stop) or a sequence having at least 70% homology thereto.
[0059] (36) The biomoleculeip to Item 24, wherein the substrate is addressable.
[0060] (37) A biomolecule chip with a polypeptide or a variant thereof, having at least one amino acid sequence selected from the group consisting of SEQ ID NO: 2-341, 343-722, 724-1086, 1088-1468, 1470-1837 and 1839-2157, or a sequence having at least 70% homology thereto, located therein.
[0061] (38) The biochip according to Item 37, wherein the polypeptide or the variant thereof, has at least three contiguous amino acid lengths of at least one amino acid sequence selected from the group consisting of SEQ ID NO: 2-341, 343-722, 724-1086, 1088-1468, 1470-1837 and 1839-2157, or a sequence having at least 70% homology thereto, located therein.
[0062] (39) The biochip according to Item 37, wherein the polypeptide or the variant thereof, has at least eight contiguous amino acid lengths of at least one amino acid sequence selected from the group consisting of SEQ ID NO: 2-341, 343-722, 724-1086, 1088-1468, 1470-1837 and 1839-2157, or a sequence having at least 70% homology thereto, located therein.
[0063] (40) The biochip according to Item 37, wherein the polypeptide or the variant thereof, has at least three contiguous or non-contiguous amino acid lengths of at least an amino acid sequence selected from the group consisting of SEQ ID NO: 2-341, 343-722, 724-1086, 1088-1468, 1470-1837 and 1839-2157, or a sequence having at least 70% homology thereto, and having a biological function, located therein.
[0064] (41) The biomolecule chip according to Item 40, wherein the biological activity comprises a function set forth in Table 2.
[0065] (42) The biomolecule chip according to Item 40, wherein the biological activity comprises epitope activity.
[0066] (43) A recording medium having stored therein information of a nucleic acid sequence of a nucleic acid molecule having at least eight contiguous or non-contiguous nucleotide sequences of the sequences set forth in SEQ ID NOs: 1 or 1087, or a variant thereof.
[0067] (44) The storing medium according to Item 43 wherein the nucleic acid molecule or the variant thereof comprises at least eight contiguous nucleotide lengths of substantially all the sequences selected from the group consisting of SEQ ID NOs: 2-341, 343-722, 724-1086, 1088-1468, 1470-1837 and 1839-2157, or sequences with one or more amino acid substitution, addition and/or deletion thereto.
[0068] (45) The storage medium according to Item 43, wherein when the reading frame of Table 2 is f-1, f-2 or f-3, the nucleic acid molecule or the variant thereof has a sequence from the position of nucleic acid number (sense strand, start) of SEQ ID NO: 1 of Table 2, to the position of nucleic acid number (sense strand, stop) or a sequence having at least 70% homology thereto, or when the reading frame of Table 2 is r-1, r-2 or r-3, the nucleic acid molecule has a sequence from the position of nucleic acid number (antisense strand, start) of SEQ ID NO: 1087 of Table 2, to the position of nucleic acid number (antisense strand, stop) or a sequence having at least 70% homology thereto.
[0069] (46) A storage medium comprising information of a polpeptide or a variant thereof having at least one amino acid sequence selected from the group consisting of SEQ ID NO: 2-341, 343-722, 724-1086, 1088-1468, 1470-1837 and 1839-2157, or a sequence having at least 70% homology thereto, located therein.
[0070] (47) The storage medium according to Item 46, wherein the polypeptide or the variant thereof has at least three contiguous amino acid lengths of at least one amino acid sequence selected from the group consisting of SEQ ID NO: 2-341, 343-722, 724-1086, 1088-1468, 1470-1837 and 1839-2157, or a sequence having at least 70% homology thereto, located therein.
[0071] (48) The storage medium according to Item 46, wherein the polypeptide or the variant thereof ahs at least eight contiguous amino acid lengths of at least one amino acid sequence selected from the group consisting of SEQ ID NO: 2-341, 343-722, 724-1086, 1088-1468, 1470-1837 and 1839-2157, or a sequence having at least 70% homology thereto, located therein.
[0072] (49) The storage medium according to Item 46, wherein the polypeptide or the variant thereof has at least three contiguous or non-contiguous amino acid lengths of at least one amino acid sequence selected from the group consisting of SEQ ID NO: 2-341, 343-722, 724-1086, 1088-1468, 1470-1837 and 1839-2157, or a sequence having at least 70% homology thereto, and having a biological function, located therein.
[0073] (50) The storage medium according to Item 49, wherein the biological activity comprises a function set forth in Table 2.
[0074] (51) A biomolecule chip having at least one antibody against a polypeptide or a variant thereof, located on a substrate, the polypeptide or the variant thereof comprises at least one amino acid sequence of sequences selected from the group consisting of SEQ ID NOs: 2-341, 343-722, 724-1086, 1088-1468, 1470-1837 and 1839-2157, or a sequence having at least 70% homology thereto.
[0075] (52) An RNAi molecule having a sequence homologous to a reading frame sequence wherein, when the reading frame of Table 2 is f-1, f-2 or f-3, the reading frame sequence has a sequence from the position of nucleic acid number (sense strand, start) of SEQ ID NO: 1 of Table 2, to the position of nucleic acid number (sense strand, stop) or a sequence having at least 70% homology thereto, or when the reading frame of Table 2 is r-1, r-2 or r-3, the reading frame sequence has a sequence from the position of nucleic acid number (antisense strand, start) of SEQ ID NO: 1087 of Table 2, to the position of nucleic acid number (antisense strand, stop) or a sequence having at least 70% homology thereto.
[0076] (53) The RNAi molecule according to Item 52, which is an RNA or a variant thereof comprising a double-stranded portion of at least 10 nucleotides in length.
[0077] (54) The RNAi molecule according to Item 52, comprising a 3′ overhang terminus.
[0078] (55) The RNAi molecule according to Item 54, wherein the 3′ overhang terminus is a DNA of at least 2 nucleotides in length.
[0079] (56) The RNAi molecule according to Item 54, wherein the 3′ overhang terminus is a DNA of two to four nucleotides in length.

[0080] The prsent biomolecule chip may be DNA chip, protein chip or the like.

[0081] Hereinafter the preferable embodiments of the present invention are described. However, it should be appreciated that those skilled in the art can readily and appropriately carry out such embodiments of the invention from the description of the present invention and the well-known technology and common general knowledge of the art, and readily understand the effects and advantages of the present invention therefrom.

### BRIEF DESCRIPTION OF THE DRAWINGS

[0082] FIG. 1 is a schematic diagram of double-cross over disruption.

[0083] FIG. 2 is a schematic diagram of linear DNA using double cross-over disruption.

[0084] FIG. 3 is a schematic diagram of single cross-over disruption.

[0085] FIG. 4 is a diagram showing a genome structure of the present invention.

[0086] FIG. 5 is another diagram showing a genome structure of the present invention.

[0087] FIG. 6 is another diagram showing a genome structure of the present invention.

[0088] FIG. 7 is an exemplary schematic diagram showing a genomic biomolecule chip.

[0089] The description of the sequence listings is set forth in another Table (Table 2).

### DETAILED DESCRIPTION OF THE INVENTION

[0090] Heterinafter the best modes of the present invention are described. It should be understood throughout the present specification that expression of a singular form includes the concept of their plurality unless otherwise mentioned. Specifically, articles for a singular form (e.g., “a”, “an”, “the”, etc. in English; “ein”, “der”, “das”, “die”, etc. and their inflections in German; “un”, “une”, “le”, “la”, etc. in French; “un”, “una”, “el”, “la”, etc. in Spanish, and articles, adjectives, etc. in other languages) include the concept of their plurality unless otherwise mentioned. It should be also understood that the terms as used herein have definitions typically used in the art unless otherwise mentioned. Thus, unless otherwise defined, all scientific and technical terms have the same meanings as those generally used by those skilled in the art to which the present invention pertain. If there is contradiction, the present specification (including the definition) precedes.

[0091] The embodiments provided hereinafter are provided for better understanding of the present invention, and should be understood that the the scope of the present invention should not be limited to the following description. Accordingly, it is apparant that those skilled in the art can appropriately modify the present invention within the scope thereof upon reading the description of the present specification.

[0092] (Definition of Terms)

[0093] The definitions of terms used herein are described below.

[0094] As used herein the term “organism” is used in the widest sense in the art and refers to a living entity haveing a genome. An organism comprises prokaryotes (for example, E. coli, hyperthermophillic bacteria and the like) and eukaryotes (for example, plants, animals and the like) and the like.

[0095] As used herein, the term “genome” refers to a group of genes of a set of chromosomes which is indispensable for supporting living activity of a living organism. In monoploidic organisms such as bacteria, phages, viruses and the like, one DNA or RNA molecule per se is responsible for the genetic information defining these species and is considered the genome. On the other hand, in diploidic organisms such as many eukaryotic organisms, a set of chromosomes (for example, a human has 23 pairs of chromosomes, a mouse has 20 pairs of chromosomes) in a germ cell, and two sets of chromosomes in a somatic cell comprise the genome.

[0096] As used herein, the term “gene” refers to an element defining a genetic trait. A gene is typically arranged in a given sequence on a chromosome. A gene which defines the primary structure of a protein is called a structural gene. A gene which regulates the expression of a structural gene is called a regulatory gene. As used herein, the term “gene” may refer to “polynucleotide”, “oligonucleotide”, “nucleic acid”, and “nucleic acid molecule” and/or “protein”, “polypeptide”, “oligopeptide” and “peptide”.

[0097] The terms “protein”, “polypeptide”, “oligopeptide” and “peptide” as used herein have the same meaning and refer to an amino acid polymer having any length. This polymer may be a straight, branched or cyclic chain. An amino acid may be a naturally-occurring or non-naturally-occurring amino acid, or a variant amino acid. The term may include those assembled into a composite or a plurality of polypeptide chains. The term also includes a naturally-occurring or artificially modified amino acid polymer. Such modification includes, for example, disulfide bond formation, glycosylation, lipidation, acetylation, phosphorylation, or any other manipulation or modification (e.g., conjugation with a labeling moiety). This definition encompasses a polypeptide containing at least one amino acid analog (e.g., non-naturally-occurring amino acid, etc.), a peptide-like compound (e.g., peptoid), and other variants known in the art, for example. Gene products comprising a sequence listed in the Sequence Listing usually take a polypeptide form. As used herein, the polypeptide of the present invention has a specific sequence (a sequence set forth in Sequence Listings or a variant thereof). A sequence having a variant may be used for a varitey of purposes, such as diagnostic use, in the present invention.

[0098] The terms “polynucleotide”, “oligonucleotide”, and “nucleic acid” as used herein have the same meaning and refer to a nucleotide polymer having any length. This term also includes an “oligonucleotide derivative” or a “polynucleotide derivative”. An “oligonucleotide derivative” or a “polynucleotide derivative” includes a nucleotide derivative, or refers to an oligonucleotide or a polynucleotide having different linkages between nucleotides from typical linkages, which are interchangeably used. Examples of such an oligonucleotide specifically include 2′-O-methyl-ribonucleotide, an oligonucleotide derivative in which a phosphodiester bond in an oligonucleotide is converted to a phosphorothioate bond, an oligonucleotide derivative in which a phosphodiester bond in an oligonucleotide is converted to a N3′-P5′ phosphoroamidate bond, an oligonucleotide derivative in which a ribose and a phosphodiester bond in an oligonucleotide are converted to a peptide-nucleic acid bond, an oligonucleotide derivative in which uracil in an oligonucleotide is substituted with C-5 propynyl uracil, an oligonucleotide derivative in which uracil in an oligonucleotide is substituted with C-5 thiazole uracil, an oligonucleotide derivative in which cytosine in an oligonucleotide is substituted with C-5 propynyl cytosine, an oligonucleotide derivative in which cytosine in an oligonucleotide is substituted with phenoxazine-modified cytosine, an oligonucleotide derivative in which ribose in DNA is substituted with 2′-O-propyl ribose, and an oligonucleotide derivative in which ribose in an oligonucleotide is substituted with 2′-methoxyethoxy ribose. Unless otherwise indicated, a particular nucleic acid sequence also implicitly encompasses conservatively-modified variants thereof (e.g. degenerate codon substitutions) and complementary sequences as well as the sequence explicitly indicated. Specifically, degenerate codon substitutions may be produced by generating sequences in which the third position of one or more selected (or all) codons is substituted with mixed-base and/or deoxyinosine residues (Batzer et al., Nucleic Acid Res. 19:5081(1991); Ohtsuka et al., J. Biol. Chem. 260:2605-2608 (1985); Rossolini et al., Mol. Cell. Probes 8:91-98(1994)). The gene of the present invention usually takes this polynucleotide form.

[0099] As used herein, the term “nucleic acid molecule” is used interchangeably with “nucleic acid”, “oligonucleotide”, and “polynucleotide”, including cDNA, mRNA, genomic DNA, and the like. As used herein, nucleic acid and nucleic acid molecule may be included by the concept of the term “gene”. A nucleic acid molecule encoding the sequence of a given gene includes “splice mutant (variant)”. Similarly, a particular protein encoded by a nucleic acid encompasses any protein encoded by a splice variant of that nucleic acid. “Splice mutants”, as the name suggests, are products of alternative splicing of a gene. After transcription, an initial nucleic acid transcript may be spliced such that different (alternative) nucleic acid splice products encode different polypeptides. Mechanisms for the production of splice variants vary, but include alternative splicing of exons. Alternative polypeptides derived from the same nucleic acid by read-through transcription are also encompassed by this definition. Any products of a splicing reaction, including recombinant forms of the splice products, are included in this definition. Such variants are useful for a variety of assays.

[0100] As used herein, the term “amino acid” may refer to a naturally-occurring or non-naturally-occurring amino acid as long as the object of the present invention is satisfied.

[0101] As used herein, the term “amino acid derivative” or “amino acid analog” refers to an amino acid which is different from a naturally-occurring amino acid and has a function similar to that of the original amino acid. Such amino acid derivatives and amino acid analogs are well known in the art.

[0102] The term “naturally-occurring amino acid” refers to an L-isomer of a naturally-occurring amino acid. The naturally-occurring amino acids are glycine, alanine, valine, leucine, isoleucine, serine, methionine, threonine, phenylalanine, tyrosine, tryptophan, cysteine, proline, histidine, aspartic acid, asparagine, glutamic acid, glutamine, γ-carboxyglutamic acid, arginine, ornithine, and lysine. Unless otherwise indicated, all amino acids as used herein are L-isomers. An embodiment using a D-isomer of an amino acid falls within the scope of the present invention.

[0103] The term “non-naturally-occurring amino acid” refers to an amino acid which is ordinarily not found in nature. Examples of non-naturally-occurring amino acids include D-forms of an amino acid as described above, norleucine, para-nitrophenylalanine, homophenylalanine, para-fluorophenylalanine, 3-amino-2-benzyl propionic acid, D- or L-homoarginine, and D-phenylalanine.

[0104] As used herein, the term ““amino acid analog” refers to a molecule having a physical property and/or function similar to that of amino acids, but is not an amino acid. Examples of amino acid analogs include, for example, ethionine, canavanine, 2-methylglutamine, and the like. An amino acid mimic refers to a compound which has a structure different from that of the general chemical structure of amino acids but which functions in a manner similar to that of naturally-occurring amino acids.

[0105] As used herein, the term “nucleotide” may be either naturally-occurring or non-naturally-occurring. The term “nucleotide derivative” or “nucleotide analog” refers to a nucleotide which is different from naturally-occurring nucleotides and has a function similar to that of the original nucleotide. Such nucleotide derivatives and nucleotide analogs are well known in the art. Examples of such nucleotide derivatives and nucleotide analogs include, but are not limited to, phosphorothioate, phosphoramidate, methylphosphonate, chiral-methylphosphonate, 2-O-methyl ribonucleotide, and peptide-nucleic acid (PNA).

[0106] Amino acids may be referred to herein by either their commonly known three letter symbols or by the one-letter symbols recommended by the IUPAC-IUB Biochemical Nomenclature Commission. Nucleotides, likewise, may be referred to by their commonly accepted single-letter codes.

[0107] As used herein, the term “corresponding” amino acid or nucleic acid refers to an amino acid or nucleotide in a given polypeptide or polynucleotide molecule, which has, or is anticipated to have, a function similar to that of a predetermined amino acid or nucleotide in a polypeptide or polynucleotide as a reference for comparison. Particularly, in the case of enzyme molecules, the term refers to an amino acid which is present at a similar position in an active site and similarly contributes to catalytic activity. For example, in the case of an antisense molecule, a corresponding antisense molecule may be a similar portion in an ortholog corresponding to a particular portion of the antisense molecule.

[0108] As used herein, the term “corresponding” gene (e.g., a polypeptide or polynucleotide molecule) refers to a gene in a given species, which has, or is expected to have, a function similar to that of a predetermined gene in a species as a reference for comparison. When there are a plurality of genes having such a function, the term refers to a gene having the same evolutionary origin. Therefore, a gene corresponding to a given gene may be an ortholog of the given gene. Thus, a gene corresponding to each gene can be found in other organisms. Such a corresponding gene can be identified by techniques well known in the art. For example, a corresponding gene in a given organism can be found by searching a sequence database of the organism (e.g., hyperthermophillic bacteria) using the sequence of a reference gene (e.g., gene comprising a sequence set forth in Sequence Listing etc.) as a query sequence.

[0109] As used herein, the term “fragment” with respect to a polypeptide or polynucleotide refers to a polypeptide or polynucleotide having a sequence length ranging from 1 to n-1 with respect to the full length of the reference polypeptide or polynucleotide (of length n). The length of the fragment can be appropriately changed depending on the purpose. For example, in the case of polypeptides, the lower limit of the length of the fragment includes 3, 4, 5, 6, 7, 8, 9, 10, 15, 20, 25, 30, 40, 50 or more nucleotides. Lengths represented by integers which are not herein specified (e.g., 11 and the like) may be appropriate as a lower limit. For example, in the case of polynucleotides, the lower limit of the length of the fragment includes 5, 6, 7, 8, 9, 10, 15, 20, 25, 30, 40, 50, 75, 100 or more nucleotides. Lengths represented by integers which are not herein specified (e.g., 11 and the like) may be appropriate as a lower limit. As used herein, the length of polypeptides or polynucleotides can be represented by the number of amino acids or nucleic acids, respectively. However, the above-described numbers are not absolute. The above-described numbers, as the upper or lower limit, are intended to include some greater or smaller numbers (e.g., ±10%), as long as the same function is maintained. For this purpose, “about” may be herein put ahead of the numbers. However, it should be understood that the interpretation of numbers is not affected by the presence or absence of “about” in the present specification.

[0110] As used herein, the term “agent specifically interacting with” a biological agent, or “specific agent”, such as a polynucleotide, a polypeptide or the like, are used interchangeably and refer to an agent which has an affinity for the biological agent, such as a polynucleotide, a polypeptide or the like, which is representatively higher than or equal to the affinity for other non-related biological agents, such as polynucleotides, polypeptides or the like (particularly, those with identity of less than 30%; in a specific embodiment, less than 99% identity), and preferably significantly (e.g., statistically significantly) higher. Such affinity may be measured by hybridizatin assay, binding assay and the like. When a biologial agent is a polypeptide, a specific agent to the polypeptide includes a specific antibody, and it should be understood that in a particular embodiment, the specific agents of the present invention may include an agent specific to the specific antibodies. It should be understood that such specific agents to the specific andibodies include the polypeptide of interest per se.

[0111] As used herein, the “agent” may be any substance or other agent (e.g., energy) as long as the intended purpose can be achieved. Examples of such a substance include, but are not limited to, proteins, polypeptides, oligopeptides, peptides, polynucleotides, oligonucleotides, nucleotides, nucleic acids (e.g., DNA such as cDNA, genomic DNA, or the like, and RNA such as mRNA), polysaccharides, oligosaccharides, lipids, low molecular weight organic molecules (e.g., hormones, ligands, information transfer substances, molecules synthesized by combinatorial chemistry, low molecular weight molecules, and the like (e.g., pharmaceutically acceptable low molecular weight ligands and the like)), and combinations of these molecules. Examples of an agent specific to a polynucleotide include, but are not limited to, a polynucleotide having complementarity to the sequence of the polynucleotide with a predetermined sequence homology (e.g., 70% or more sequence identity), a polypeptide such as a transcriptional agent binding to a promoter region, and the like. Examples of an agent specific to a polypeptide include, but are not limited to, an antibody specifically directed to the polypeptide or derivatives or analogs thereof (e.g., single chain antibody), a specific ligand or receptor when the polypeptide is a receptor or ligand, a substrate when the polypeptide is an enzyme, and the like.

[0112] As used herein, the term “low molecular weight organic molecule” refers to an organic molecule having a relatively small molecular weight. Usually, the low molecular weight organic molecule refers to a molecular weight of about 1,000 or less, or may refer to a molecular weight of more than 1,000. Low molecular weight organic molecules can be ordinarily synthesized by methods known in the art or combinations thereof. These low molecular weight organic molecules may be produced by organisms. Examples of the low molecular weight organic molecule include, but are not limited to, hormones, ligands, information transfer substances, molecules synthesized by combinatorial chemistry, pharmaceutically acceptable low molecular weight molecules (e.g., low molecular weight ligands and the like), and the like.

[0113] As used herein, the term “antibody” encompasses polyclonal antibodies, monoclonal antibodies, human antibodies, humanized antibodies, polyfunctional antibodies, chimeric antibodies, and anti-idiotype antibodies, and fragments thereof (e.g., F(ab′)2 and Fab fragments), and other recombinant conjugates. These antibodies may be fused with an enzyme (e.g., alkaline phosphatase, horseradish peroxidase, α-galactosidase, and the like) via a covalent bond or by recombination.

[0114] As used herein, the term “monoclonal antibody” refers to an antibody composition having a group of homologous antibodies. This term is not limited by the production manner thereof. This term encompasses all immunoglobulin molecules and Fab molecules, F(ab′)2 fragments, Fv fragments, and other molecules having an immunological binding property of the original monoclonal antibody molecule. Methods for producing polyclonal antibodies and monoclonal antibodies are well known in the art, and will be more sufficiently described below.

[0115] Monoclonal antibodies are prepared by using a standard technique well known in the art (e.g., Kohler and Milstein, Nature, 1975, 256:495) or a modification thereof (e.g., Buck et al., In Vitro, 18, 1982:377). Representatively, a mouse or rat is immunized with a protein bound to a protein carrier, and boosted. Subsequently, the spleen (and optionally several large lymph nodes) is removed and dissociated into single cells. If desired, the spleen cells may be screened (after removal of nonspecifically adherent cells) by applying a cell suspension to a plate or well coated with a protein antigen. B-cells that express membrane-bound immunoglobulin specific for the antigen bind to the plate, and are not rinsed away with the rest of the suspension. Resulting B-cells, or all dissociated spleen cells, are then induced to fuse with myeloma cells to form hybridomas. The hybridomas are used to produce monoclonal antibodies.

[0116] As used herein, the term “antigen” refers to any substrate to which an antibody molecule may specifically bind. As used herein, the term “immunogen” refers to an antigen initiating activation of the antigen-specific immune response of a lymphocyte.

[0117] As used herein, the term 'single chain antibody” refers to a single chain polypeptide formed by linking a heavy chain fragment and the light chain fragment of the Fv region via a peptide crosslinker.

[0118] As used herein, the term “composite molecule” refers to a molecule in which a plurality of molecules, such as polypeptides, polynucleotides, lipids, sugars, small molecules, or the like, are linked together. Examples of a composite molecule include, but are not limited to, glycolipids, glycopeptides, and the like. Such composite molecules can be herein used as a DICS1 gene or a product thereof, or an agent of the present invention, as long as they have a similar function to that of the gene or the product thereof, or the agent of the present invention.

[0119] As used herein, the term “isolated” biological agent (e.g., nucleic acid, protein, or the like) refers to a biological agent that is substantially separated or purified from other biological agents in cells of a naturally-occurring organism (e.g., in the case of nucleic acids, agents other than nucleic acids and a nucleic acid having nucleic acid sequences other than an intended nucleic acid; and in the case of proteins, agents other than proteins and proteins having an amino acid sequence other than an intended protein). The “isolated” nucleic acids and proteins include nucleic acids and proteins purified by a standard purification method. The isolated nucleic acids and proteins also include chemically synthesized nucleic acids and proteins.

[0120] As used herein, the term “purified” biological agent (e.g., nucleic acids, proteins, and the like) refers to one from which at least a part of the naturally accompanying agents are removed. Therefore, ordinarily, the purity of a purified biological agent is higher than that of the biological agent in a normal state (i.e., concentrated).

[0121] As used herein, the terms “purified” and “isolated” mean that the same type of biological agent is present preferably at least 75% by weight, more preferably at least 85% by weight, even more preferably at least 95% by weight, and most preferably at least 98% by weight.

[0122] As used herein, the term “expression” of a gene, a polynucleotide, a polypeptide, or the like, indicates that the gene or the like is affected by a predetermined action in vivo to be changed into another form. Preferably, the term “expression” indicates that genes, polynucleotides, or the like are transcribed and translated into polypeptides. In one embodiment of the present invention, genes may be transcribed into mRNA. More preferably, these polypeptides may have post-translational processing modifications.

[0123] Therefore, as used herein, the term “reduction” of “expression” of a gene, a polynucleotide, a polypeptide, or the like indicates that the level of expression is significantly reduced in the presence of or under the action of the agent of the present invention as compared to when the action of the agent is absent. Preferably, the reduction of expression includes a reduction in the amount of expression of a polypeptide. As used herein, the term “increase” of “expression” of a gene, a polynucleotide, a polypeptide, or the like indicates that the level of expression is significantly increased in the presence of the action of the agent of the present invention as compared to when the action of the agent is absent. Preferably, the increase of expression includes an increase in the amount of expression of a polypeptide. As used herein, the term “induction” of “expression” of a gene indicates that the amount of expression of the gene is increased by applying a given agent to a given cell. Therefore, the induction of expression includes allowing a gene to be expressed when expression of the gene is not otherwise observed, and increasing the amount of expression of the gene when expression of the gene is observed.

[0124] As used herein, the term “specifically expressed” in relation to a gene indicates that the gene is expressed in a specific site or for a specific period of time, at a level different from (preferably higher than) that in other sites or for other periods of time. The term “specifically expressed” indicates that a gene may be expressed only in a given site (specific site) or may be expressed in other sites. Preferably, the term “specifically expressed” indicates that a gene is expressed only in a given site.

[0125] As used herein, the term “biological activity” refers to activity possessed by an agent (e.g., a polynucleotide, a protein, etc.) within an organism, including activities exhibiting various functions (e.g., transcription promoting activity, etc.). For example, when two agents interact with each other (the gene product of the present invention and the receptor therefor), the biological activity thereof includes the binding of the gene product of the present invention and the receptor therefor and a biological change (e.g., apoptosis) caused thereby. In another example, when a certain factor is an enzyme, the biological activity thereof includes its enzyme activity. In still another example, when a certain factor is a ligand, the biological activity thereof includes the binding of the ligand to a receptor corresponding thereto. The above-described biological activity can be measured by techniques well-known in the art. Alternatively, in the present invention, the cases of a modified molecule having similar activity in the living organism may be included in the definition of having biological activity.

[0126] As used herein, the term “antisense (activity) ” refers to activity which permits specific suppression or reduction of expression of a target gene. The antisense activity is ordinarily achieved by a nucleic acid sequence having a length of at least 8 contiguous nucleotides, which is complementary to the nucleic acid sequence of a target gene (e.g., genes of the present invention, etc.). A molecule having such antisense activity is called an antisense molecule. Such a nucleic acid sequence preferably has a length of at least 9 contiguous nucleotides, more preferably a length of at least 10 contiguous nucleotides, and even more preferably a length of at least 11 contiguous nucleotides, a length of at least 12 contiguous nucleotides, a length of at least 13 contiguous nucleotides, a length of at least 14 contiguous nucleotides, a length of at least 15 contiguous nucleotides, a length of at least 20 contiguous nucleotides, a length of at least 30 contiguous nucleotides, a length of at least 40 contiguous nucleotides, and a length of at least 50 contiguous nucleotides. These nucleic acid sequences include nucleic acid sequences having at least 70% homology thereto, more preferably at least 80%, even more preferably at least 90%, and still even more preferably at least 95%. The antisense activity is preferably complementary to a 5′ terminal sequence of the nucleic acid sequence of a target gene. Such an antisense nucleic acid sequence includes the above-described sequences having one or several, or at least one, nucleotide substitutions, additions, and/or deletions.

[0127] As used herein, the term “RNAi” is an abbreviation of RNA interference and refers to a phenomenon where an agent for causing RNAi, such as double-stranded RNA (also called dsRNA), is introduced into cells and mRNA homologous thereto is specifically degraded, so that synthesis of gene products is suppressed, and also referes to a technique using the phenomenon. As used herein, RNAi may have the same meaning as that of an agent which causes RNAi.

[0128] As used herein, the term “an agent causing RNAi” refers to any agent causing RNAi. As used herein, “an agent causing RNAi for a gene” indicates that the agent causes RNAi relating to the gene and the effect of RNAi is achieved (e.g., suppression of expression of the gene, and the like). Examples of such an agent causing RNAi include, but are not limited to, a sequence having at least about 70% homology to the nucleic acid sequence of a target gene or a sequence hybridizable under stringent conditions, RNA containing a double-stranded portion having a length of at least 10 nucleotides or variants thereof. Herein, this agent may be preferably DNA containing a 3′ protruding end, and more preferably the 3′ protruding end has a length of 2 or more nucleotides (e.g., 2-4 nucleotides in length).

[0129] Though not wishing to be bound by any theory, a mechanism which causes RNAi is considered as follows. When a molecule which causes RNAi, such as dsRNA, is introduced into a cell, an RNase III-like nuclease having a helicase domain (called dicer) cleaves the molecule on about a 20 base pair basis from the 3′ terminus in the presence of ATP in the case where the RNA is relatively long (e.g., 40 or more base pairs). As used herein, the term “siRNA” is an abbreviation of short interfering RNA and refers to short double-stranded RNA of 10 or more base pairs which are artificially chemically or biochemically synthesized, synthesized in the organism body, or produced by double-stranded RNA of about 40 or more base pairs being degraded within the body. siRNA typically has a structure having 5′-phosphate and 3′-OH, where the 3′ terminus projects by about 2 bases. A specific protein is bound to siRNA to form RISC (RNA-induced-silencing-complex). This complex recognizes and binds to mRNA having the same sequence as that of siRNA and cleaves mRNA at the middle of siRNA due to RNase III-like enzymatic activity. It is preferable that the relationship between the sequence of siRNA and the sequence of mRNA to be cleaved as a target is a 100% match. However, base mutation at a site away from the middle of siRNA does not completely remove the cleavage activity by RNAi, leaving partial activity, while base mutation in the middle of siRNA has a large influence and the mRNA cleavage activity by RNAi is considerably lowered. By utilizing this nature, mRNA having a mutation can be specifically degraded. Specifically, siRNA in which the mutation is provided in the middle thereof is synthesized and is introduced into a cell. Therefore, in the present invention, siRNA per se as well as an agent capable of producing siRNA (e.g., representatively dsRNA of about 40 or more base pairs) can be used as an agent capable of eliciting RNAi.

[0130] Also, though not wishing to be bound by any theory, apart from the above-described pathway, the antisense strand of siRNA binds to mRNA and siRNA functions as a primer for RNA-dependent RNA polymerase (RdRP), so that dsRNA is synthesized. This dsRNA is a substrate for a dicer again, leading to production of new siRNA. It is intended that such an action is amplified. Therefore, in the present invention, siRNA per se as well as an agent capable of producing siRNA, are useful. In fact, in insects and the like, for example, 35 dsRNA molecules can substantially completely degrade 1000 or more copies of intracellular mRNA, and therefore, it will be understood that siRNA per se, as well as an agent capable of producing siRNA, is useful.

[0131] In the present invention, double-stranded RNA having a length of about 20 bases (e.g., representatively about 21 to 23 bases) or less than about 20 bases, which is called siRNA, can be used. Expression of siRNA in cells can suppress expression of a pathogenic gene targeted by the siRNA. Therefore, siRNA can be used for treatment of diseases as a prophylaxis, prognosis, and the like.

[0132] The siRNA of the present invention may be in any form as long as it can elicit RNAi.

[0133] In another embodiment, an agent capable of causing RNAi may have a short hairpin structure having a sticky portion at the 3′ terminus (shRNA; short hairpin RNA). As used herein, the term “shRNA” refers to a molecule of about 20 or more base pairs in which a single-standed RNA partially contains a palindromic base sequence and forms a double-strand structure therein (i.e., a hairpin structure). shRNA can be artificially synthesized chemically. Alternatively, shRNA can be produced by linking sense and antisense strands of a DNA sequence in reverse directions and synthesizing RNA in vitro with T7 RNA polymerase using the DNA as a template. Though not wishing to be bound by any theory, it should be understood that after shRNA is introduced into a cell, the shRNA is degraded in the cell into a length of about 20 bases (e.g., representatively 21, 22, 23 bases), and causes RNAi as with siRNA, leading to the treatment effect of the present invention. It should be understood that such an effect is exhibited in a wide range of organisms, such as insects, plants, animals (including mammals), and the like. Thus, shRNA elicits RNAi as with siRNA and therefore can be used as an effective component of the present invention. shRNA may preferably have a 3′ protruding end. The length of the double-stranded portion is not particularly limited, but is preferably about 10 or more nucleotides, and more preferably about 20 or more nucleotides. Here, the 3′ protruding end may be preferably DNA, more preferably DNA of at least 2 nucleotides in length, and even more preferably DNA of 2-4 nucleotides in length.

[0134] An agent capable of causing RNAi used in the present invention may be artificially synthesized (chemically or biochemically) or naturally occurring. There is substantially no difference therebetween in terms of the effect of the present invention. A chemically synthesized agent is preferably purified by liquid chromatography or the like.

[0135] An agent capable of causing RNAi used in the present invention can be produced in vitro. In this synthesis system, T7 RNA polymerase and T7 promoter are used to synthesize antisense and sense RNAs from template DNA. These RNAs are annealed and thereafter are introduced into a cell. In this case, RNAi is caused via the above-described mechanism, thereby achieving the effect of the present invention. Here, for example, the introduction of RNA into cell can be carried out by a calcium phosphate method.

[0136] Another example of an agent capable of causing RNAi according to the present invention is a single-stranded nucleic acid hybridizable to mRNA or all nucleic acid analogs thereof. Such agents are useful for the method and composition of the present invention.

[0137] As used herein, “polynucleotides hybridizing under stringent conditions” refers to conditions commonly used and well known in the art. Such a polynucleotide can be obtained by conducting colony hybridization, plaque hybridization, Southern blot hybridization, or the like using a polynucleotide selected from the polynucleotides of the present invention. Specifically, a filter on which DNA derived from a colony or plaque is immobilized is used to conduct hybridization at 65° C. in the presence of 0.7 to 1.0 M NaCl. Thereafter, a 0.1 to 2-fold concentration SSC (saline-sodium citrate) solution (1-fold concentration SSC solution is composed of 150 mM sodium chloride and 15 mM sodium citrate) is used to wash the filter at 65° C. Polynucleotides identified by this method are referred to as “polynucleotides hybridizing under stringent conditions”. Hybridization can be conducted in accordance with a method described in, for example, Molecular Cloning 2nd ed., Current Protocols in Molecular Biology, Supplement 1-38, DNA Cloning 1: Core Techniques, A Practical Approach, Second Edition, Oxford University Press (1995), and the like. Here, sequences hybridizing under stringent conditions exclude, preferably, sequences containing only A or T. “Hybridizable polynucleotide” refers to a polynucleotide which can hybridize other polynucleotides under the above-described hybridization conditions. Specifically, the hybridizable polynucleotide includes at least a polynucleotide having a homology of at least 60% to the base sequence of DNA encoding a polypeptide having an amino acid sequence specifically herein disclosed, preferably a polynucleotide having a homology of at least 80%, and more preferably a polynucleotide having a homology of at least 95%.

[0138] The term “highly stringent conditions” refers to those conditions that are designed to permit hybridization of DNA strands whose sequences are highly complementary, and to exclude hybridization of significantly mismatched DNAs. Hybridization stringency is principally determined by temperature, ionic strength, and the concentration of denaturing agents such as formamide. Examples of “highly stringent conditions” for hybridization and washing are 0.0015 M sodium chloride, 0.0015 M sodium citrateat 65-68° C. or 0.015 M sodium chloride, 0.0015 M sodium citrate, and 50% formamide at 42° C. See Sambrook, Fritsch & Maniatis, Molecular Cloning: A Laboratory Manual (2nd ed., Cold Spring Harbor Laboratory, N.Y., 1989); Anderson et al., Nucleic Acid Hybridization: A Practical Approach Ch. 4 (IRL Press Limited) (Oxford Express). More stringent conditions (such as higher temperature, lower ionic strength, higher formamide, or other denaturing agents) may be optionally used. Other agents may be included in the hybridization and washing buffers for the purpose of reducing non-specific and/or background hybridization. Examples are 0.1% bovine serum albumin, 0.1% polyvinylpyrrolidone, 0.1% sodium pyrophosphate, 0.1% sodium dodecylsulfate (NaDodSO₄ or SDS), Ficoll, Denhardt's solution, sonicated salmon sperm DNA (or another noncomplementary DNA), and dextran sulfate, although other suitable agents can also be used. The concentration and types of these additives can be changed without substantially affecting the stringency of the hybridization conditions. Hybridization experiments are ordinarily carried out at pH 6.8-7.4; however, at typical ionic strength conditions, the rate of hybridization is nearly independent of pH. See Anderson et al., Nucleic Acid Hybridization: A Practical Approach Ch. 4 (IRL Press Limited, Oxford UK).

[0139] Factors affecting the stability of DNA duplex include base composition, length, and degree of base pair mismatch. Hybridization conditions can be adjusted by those skilled in the art in order to accommodate these variables and allow DNAs of different sequence relatedness to form hybrids. The melting temperature of a perfectly matched DNA duplex can be estimated by the following equation:
Tm(° C.)=81.5+16.6(log [Na⁺])+0.41(% G+C)−600/N−0.72(% formamide)
where N is the length of the duplex formed, [Na⁺] is the molar concentration of the sodium ion in the hybridization or washing solution, % G+C is the percentage of (guanine+cytosine) bases in the hybrid. For imperfectly matched hybrids, the melting temperature is reduced by approximately 1° C. for each 1% mismatch.

[0140] The term “moderately stringent conditions” refers to conditions under which a DNA duplex with a greater degree of base pair mismatching than could occur under “highly stringent conditions” is able to form. Examples of typical “moderately stringent conditions” are 0.015 M sodium chloride, 0.0015 M sodium citrate at 50-65° C. or 0.015 M sodium chloride, 0.0015 M sodium citrate, and 20% formamide at 37-50° C. By way of example, “moderately stringent conditions” of 50° C. in 0.015 M sodium ion will allow about a 21% mismatch.

[0141] It will be appreciated by those skilled in the art that there may be no absolute distinction between “highly stringent conditions” and “moderately stringent conditions”. For example, at 0.015 M sodium ion (no formamide), the melting temperature of perfectly matched long DNA is about 71° C. With a wash at 65° C. (at the same ionic strength), this would allow for approximately a 6% mismatch. To capture more distantly related sequences, those skilled in the art can simply lower the temperature or raise the ionic strength.

[0142] A good estimate of the melting temperature in 1 M NaCl for oligonucleotide probes up to about 20 nucleotides is given by:
Tm=(2° C. per A-T base pair)+(4° C. per G-C base pair).
Note that the sodium ion concentration in 6× salt sodium citrate (SSC) is 1 M. See Suggs et al., Developmental Biology Using Purified Genes 683 (Brown and Fox, eds., 1981).

[0143] A naturally-occurring nucleic acid encoding a protein (e.g., Pep5, p75, Rho GDI, MAG, p21, Rho, Rho kinase, or variants or fragments thereof, or the like) may be readily isolated from a cDNA library having PCR primers and hybridization probes containing part of a nucleic acid sequence indicated in the sequence listing. A preferable nucleic acid, or variants or fragments thereof, or the like is hybridizable to the whole or part of a sequence as set forth in SEQ ID NO: 1 or 1087 under low stringent conditions defined by hybridization buffer essentially containing 1% bovine serum alubumin (BSA); 500 mM sodium phosphate (NaPO₄); 1 mM EDTA; and 7% SDS at 42° C., and wash buffer essentially containing 2×SSC (600 mM NaCl; 60 mM sodium citrate); and 0.1% SDS at 50° C., more preferably under low stringent conditions defined by hybridization buffer essentially containing 1% bovine serum alubumin (BSA); 500 mM sodium phosphate (NaPO₄); 15% formamide; 1 mM EDTA; and 7% SDS at 50° C., and wash buffer essentially containing 1×SSC (300 mM NaCl; 30 mM sodium citrate); and 1% SDS at 50° C., and most preferably under low stringent conditions defined by hybridization buffer essentially containing 1% bovine serum alubumin (BSA); 200 mM sodium phosphate (NaPO₄); 15% formamide; 1 mM EDTA; and 7% SDS at 50° C., and wash buffer essentially containing 0.5×SSC (150 mM NaCl; 15 mM sodium citrate); and 0.1% SDS at 65° C.

[0144] As used herein, the term “probe” refers to a substance for use in searching, which is used in a biological experiment, such as in vitro and/or in vivo screening or the like, including, but not being limited to, for example, a nucleic acid molecule having a specific base sequence or a peptide containing a specific amino acid sequence.

[0145] Examples of a nucleic acid molecule as a usual probe include one having a nucleic acid sequence having a length of at least 8 contiguous nucleotides, which is homologous or complementary to the nucleic acid sequence of a gene of interest. Such a nucleic acid sequence may be preferably a nucleic acid sequence having a length of at least 9 contiguous nucleotides, more preferably a length of at least 10 contiguous nucleotides, and even more preferably a length of at least 11 contiguous nucleotides, a length of 12 contiguous nucleotides, a length of at least 13 contiguous nucleotides, a length of at least 14 contiguous nucleotides, a length of at least 15 contiguous nucleotides, a length of at least 20 contiguous nucleotides, a length of at least 25 contiguous nucleotides, a length of 30 contiguous nucleotides, a length of at least 40 contiguous nucleotides, or a length of at least 50 contiguous nucleotides. A nucleic acid sequence used as a probe includes a nucleic acid sequence having at least 70% homology to the above-described sequence, more preferably at least 80%, and even more preferably at least 90%, or at least 95%.

[0146] As used herein, the term “search” indicates that a given nucleic acid base sequence is utilized to find other nucleic acid base sequences having a specific function and/or property electronically or biologically, or other methods. Examples of electronic search include, but are not limited to, BLAST (Altschul et al., J. Mol. Biol. 215:403-410 (1990)), FASTA (Pearson & Lipman, Proc. Natl. Acad. Sci., USA 85:2444-2448 (1988)), Smith and Waterman method (Smith and Waterman, J. Mol. Biol. 147:195-197 (1981)), and Needleman and Wunsch method (Needleman and Wunsch, J. Mol. Biol. 48:443-453 (1970)), and the like. Examples of biological search include, but are not limited to, a macroarray in which genomic DNA is attached to a nylon membrane or the like or a microarray (microassay) in which genomic DNA is attached to a glass plate under stringent hybridization, PCR and in situ hybridization, and the like. It is herein intended that the genes used in the present invention include corresponding genes identified by such an electronic or biological search.

[0147] As used herein, the term “primer” refers to a substance required for initiation of a reaction of a macromolecule compound to be synthesized in a macromolecule synthesis enzymatic reaction. In a reaction for synthesizing a nucleic acid molecule, a nucleic acid molecule (e.g., DNA, RNA, or the like) which is complementary to part of a macromolecule compound to be synthesized may be used.

[0148] A nucleic acid molecule which is ordinarily used as a primer includes one that has a nucleic acid sequence having a length of at least 8 contiguous nucleotides, which is complementary to the nucleic acid sequence of a gene of interest. Such a nucleic acid sequence preferably has a length of at least 9 contiguous nucleotides, more preferably a length of at least 10 contiguous nucleotides, even more preferably a length of at least 11 contiguous nucleotides, a length of at least 12 contiguous nucleotides, a length of at least 13 contiguous nucleotides, a length of at least 14 contiguous nucleotides, a length of at least 15 contiguous nucleotides, a length of at least 16 contiguous nucleotides, a length of at least 17 contiguous nucleotides, a length of at least 18 contiguous nucleotides, a length of at least 19 contiguous nucleotides, a length of at least 20 contiguous nucleotides, a length of at least 25 contiguous nucleotides, a length of at least 30 contiguous nucleotides, a length of at least 40 contiguous nucleotides, and a length of at least 50 contiguous nucleotides. A nucleic acid sequence used as a primer includes a nucleic acid sequence having at least 70% homology to the above-described sequence, more preferably at least 80%, even more preferably at least 90%, and at least 95%. An appropriate sequence as a primer may vary depending on the property of a sequence to be synthesized (amplified). Those skilled in the art can design an appropriate primer depending on a sequence of interest. Such a primer design is well known in the art and may be performed manually or using a computer program (e.g., LASERGENE, Primer Select, DNAStar).

[0149] As used herein, the term “epitope” refers to a basic structure constituting an antigenic determinant. Therefore, the term “epitope” includes a set of amino acid residues which is involved in recognition by a particular immunoglobulin, or in the context of T cells, those residues necessary for recognition by T cell receptor proteins and/or Major Histocompatibility Complex (MHC) receptors. This term is also used interchangeably with “antigenic determinant” or“antigenic determinant site”. In the field of immunology, in vivo or in vitro, an epitope is the features of a molecule (e.g., primary, secondary and tertiary peptide structure, and charge) that form a site recognized by an immunoglobulin, T cell receptor or HLA molecule. An epitope including a peptide comprises 3 or more amino acids in a spatial conformation which is unique to the epitope. Generally, an epitope consists of at least 5 such amino acids, and more ordinarily, consists of at least 6, 7, 8, 9 or 10 such amino acids. The greater the length of an epitope, the more the similarity of the epitope to the original peptide, i.e., longer epitopes are generally preferable. This is not necessarily the case when the conformation is taken into account. Methods of determining the spatial conformation of amino acids are known in the art, and include, for example, X-ray crystallography and 2-dimensional nuclear magnetic resonance spectroscopy. Furthermore, the identification of epitopes in a given protein is readily accomplished using techniques well known in the art. See, also, Geysen et al., Proc. Natl. Acad. Sci. USA (1984) 81: 3998 (general method of rapidly synthesizing peptides to determine the location of immunogenic epitopes in a given antigen); U. S. Pat. No. 4,708,871 (procedures for identifying and chemically synthesizing epitopes of antigens); and Geysen et al., Molecular Immunology (1986) 23: 709 (technique for identifying peptides with high affinity for a given antibody). Antibodies that recognize the same epitope can be identified in a simple immunoassay. Thus, methods for determining epitopes including a peptide are well known in the art. Such an epitope can be determined using a well-known, common technique by those skilled in the art if the primary nucleic acid or amino acid sequence of the epitope is provided.

[0150] Therefore, an epitope including a peptide requires a sequence having a length of at least 3 amino acids, preferably at least 4 amino acids, more preferably at least 5 amino acids, at least 6 amino acids, at least 7 amino acids, at least 8 amino acids, at least 9 amino acids, at least 10 amino acids, at least 15 amino acids, at least 20 amino acids, and 25 amino acids. Epitopes may be linear or conformational.

[0151] As used herein, “homology” of a gene (e.g., a nucleic acid sequence, an amino acid sequence, or the like) refers to the proportion of identity between two or more gene sequences. As used herein, the identity of a sequence (a nucleic acid sequence, an amino acid sequence, or the like) refers to the proportion of the identical sequence (an individual nucleic acid, amino acid, or the like) between two or more comparable sequences. Therefore, the greater the homology between two given genes, the greater the identity or similarity between their sequences. Whether or not two genes have homology is determined by comparing their sequences directly or by a hybridization method under stringent conditions. When two gene sequences are directly compared with each other, these genes have homology if the DNA sequences of the genes have representatively at least 50% identity, preferably at least 70% identity, more preferably at least 80%, 90%, 95%, 96%, 97%, 98%, or 99% identity with each other.

[0152] The similarity, identity and homology of base sequences are herein compared using BLAST (sequence analyzing tool) with the default parameters. The similarity, identity and homology of amino acid sequences are herein compared using BLASTX (sequence analyzing tool) with the default parameters.

[0153] Amino acids may be referred to herein by either their commonly known three letter symbols or by the one-letter symbols recommended by the IUPAC-IUB Biochemical Nomenclature Commission. Nucleotides, likewise, may be referred to by their commonly accepted single-letter codes.

[0154] As used herein, the “percentage of (amino acid, nucleotide, or the like) sequence identity, homology or similarity” is determined by comparing two optimally aligned sequences over a window of comparison, wherein the portion of a polynucleotide or polypeptide sequence in the comparison window may comprise additions or deletions (i.e. gaps), as compared to the reference sequences (which does not comprise additions or deletions (if the other sequence includes an addition, a gap may occur)) for optimal alignment of the two sequences. The percentage is calculated by determining the number of positions at which the identical nucleic acid bases or amino acid residues occur in both sequences to yield the number of matched positions, dividing the number of matched positions by the total number of positions in the reference sequence (i.e. the window size) and multiplying the results by 100 to yield the percentage of sequence identity. When used in a search, homology is evaluated by an appropriate technique selected from various sequence comparison algorithms and programs well known in the art. Examples of such algorithms and programs include, but are not limited to, TBLASTN, BLASTP, FASTA, TFASTA and CLUSTALW (Pearson and Lipman, 1988, Proc. Natl. Acad. Sci. USA 85(8):2444-2448, Altschul et al., 1990, J. Mol. Biol. 215(3) :403-410, Thompson et al., 1994, Nucleic Acids Res. 22(2):4673-4680, Higgins et al., 1996, Methods Enzymol. 266:383-402, Altschul et al., 1990, J. Mol. Biol. 215(3):403-410, Altschul et al., 1993, Nature Genetics 3:266-272). In a particularly preferable embodiment, the homology of a protein or nucleic acid sequence is evaluated using a Basic Local Alignment Search Tool (BLAST) well known in the art (e.g., see Karlin and Altschul, 1990, Proc. Natl. Acad. Sci. USA 87:2267-2268, Altschul et al., 1990, J. Mol. Biol. 215:403-410, Altschul et al., 1993, Nature Genetics 3:266-272, Altschul et al., 1997, Nuc. Acids Res. 25:3389-3402). Particularly, 5 specialized-BLAST programs may be used to perform the following tasks to achieve comparison or search:
[0155] (1) comparison of an amino acid query sequence with a protein sequence database using BLASTP and BLAST3;
[0156] (2) comparison of a nucleotide query sequence with a nucleotide sequence database using BLASTN;
[0157] (3) comparison of a conceptually translated product in which a nucleotide query sequence (both strands) is converted over 6 reading frames with a protein sequence database using BLASTX;
[0158] (4) comparison of all protein query sequences converted over 6 reading frames (both strands) with a nucleotide sequence database using TBLASTN; and
[0159] (5) comparison of nucleotide query sequences converted over 6 reading frames with a nucleotide sequence database using TBLASTX.

[0160] The BLAST program identifies homologous sequences by specifying analogous segments called “high score segment pairs” between amino acid query sequences or nucleic acid query sequences and test sequences obtained from preferably a protein sequence database or a nucleic acid sequence database. A large number of the high score segment pairs are preferably identified (aligned) using a scoring matrix well known in the art. Preferably, the scoring matrix is the BLOSUM62 matrix (Gonnet et al., 1992, Science 256:1443-1445, Henikoff and Henikoff, 1993, Proteins 17:49-61). The PAM or PAM250 matrix may be used, although they are not as preferable as the BLOSUM62 matrix (e.g., see Schwartz and Dayhoff, eds., 1978, Matrices for Detecting Distance Relationships: Atlas of Protein Sequence and Structure, Washington: National Biomedical Research Foundation). The BLAST program evaluates the statistical significance of all identified high score segment pairs and preferably selects segments which satisfy a threshold level of significance independently defined by a user, such as a user set homology. Preferably, the statistical significance of high score segment pairs is evaluated using Karlin's formula (see Karlin and Altschul, 1990, Proc. Natl. Acad. Sci. USA 87:2267-2268).

[0161] As used hererin, a sequence is “homologous” refers to that the homology thereof is so high that homologous recombination occurs. Accordingly, those skilled in the art can determine whether a sequence is “homologous” by introducing a DNA capable of completing a variation in a chromosome, and causing in vivo gene recombination. There is a method for confirming such a homologous state by determining incorporation of a DNA capable of complementation by a phenotype thereof (for example, if a green fluorescence protein is used, green fluorescence is used). Accordingly, in order that a sequence be homologous, homology between two sequences may be typically at least about 70%, preferably at least about 80%, more preferably at least about 90%, still more preferably at least about 95%, and most preferably, at least about 99%.

[0162] As used herein the term “region” of a sequence, is a portion having a certain-length in the sequence. Such a region usually has a function. When used for targeting disruption of the present invention, the “region” of a sequence, is at least about 10 nucleotides in length, preferably at least about 15 nucleotides in length, more preferably at least about 20 nucleotides in length, still more preferably at least about 30 nucleotides in length, yet more preferably at least about 50 nucleotides in length. Preferably, such a region may include a portion responsible for genetic function. In a preferable embodiment, the “region” of a sequence may be one or more genes.

[0163] As used herein the term “targeting” refers to to target a certain gene when used in the targeting disruption of a gene.

[0164] As used herein the term “biological activity” refers to an activity which an agent (for example, a polypeptide or protein) may have in the living body, and includes those attaining a variety of functions. For example, when an agent is an enzyme, the biological activity thereof includes the enzymatic activity thereof. In another example, when an agent is a ligand, the binding thereof to the receptor therefor is included. In the present invention, each gene product has the biological activities described in Table 2. Alternatively, the polypeptide of the present invention has an epitope activity.

[0165] As used herein the term “marker gene” refers to a gene used as a label (or marker) in genetic analysis. Typically, marker genes are those having a clear variant phenotype and are easily detectable rather than having a detailed function. In addition to genes for drug resistance, genes of biochemical property (such as auxotrophic) are often used in microorganism. Genes for morphological properties may also be used. Drug resistance genes include, but are not limited to, for example, kanamycin resistance gene, hygromycin resistance gene, ampicillin resistance gene, chloramphenicol resistance gene, streptomycin resistance gene, and the like.

[0166] As used herein the term “vector” refers to one which can transfer a polynucleotide of interest into a cell of interest. Such a vector includes, but is not limited to, for example, one which allows autonomous replication in a host cell such as a prokaryotic cell, yeast cell, animal cell, plant cell, insect cell, animal individual or plant individual or the like, or one which can be incorporated into the chromosome, and comprises a promoter at an appropriate position for trascription of the polynucleotide of the present invention. Preferably, such a vector includes one which can autonomously replicate in Thermococcus kodakarensis KOD1.

[0167] As used herein the term “expression vector” refers to a nucleic acid sequence which comprises a structural gene and a promoter regulating the expression thereof, and a number of regulatory elements operably linked in the host cell. Preferably, regulatory elements may comprise a terminator, a selective marker such as a drug resistance gene (for example, kanamycin resistance gene, hygromycin resistance gene and the like), and an enhancer. It is well known in the art that the,types of expression vectors used in an organism (for example, plant), and the regulatory elements used may vary depending on the host cell used. In a plant, plant expression vectors used in the present invention may further have a T-DNA region. The T-DNA region enhances the efficiency of introduction of a gene when, in particular, Agrobacterium is used to transform the plant.

[0168] As used herein the term “recombinant vector” refers to a vector which can transfer a polynucleotide of interest into a cell of interest. Such a vector includes, but is not limited to, for example, one which allows autonomous replication in a host cell such as a prokaryotic cell, yeast cell, animal cell, plant cell, insect cell, animal individual or plant individual or the like, or one which can be incorporated into the chromosome, and comprises a promoter at an appropriate position for trascription of the polynucleotide of the present invention.

[0169] “Recombinant vectors” for prokaryotic cells include pBTrp2, pBTac1, pBTac2 (both available from Roche Molecular Biochemicals), pKK233-2(Pharmacia), pSE280 (Invitrogen), pGEMEX-1 (Promega), pQE-8 (QIAGEN), pKYP10 (Japanese Laid-Open Publication No.: 58-110600), pKYP200 (Agric. Biol. Chem., 48,669(1984)), pLSA1 (Agric. Biol. Chem., 53, 277 (1989)), pGEL1 (Proc. Natl. Acad. Sci. USA, 82, 4306 (1985)), pBluescript II SK+(Stratagene), pBluescript II SK(−) (Stratagene), pTrs30 (FERM BP-5407), pTrs32 (FERM BP-5408), pGHA2 (FERM BP-400), pGKA2 (FERM B-6798), pTerm2(Japanese Laid-Open Publication No.: 3-22979, U.S. Pat. No. 4,686,191, U.S. Pat. No. 4,939,094, U.S. Pat. No. 5,160,735), pEG400 (J. Bacteriol., 172, 2392 (1990)), pGEX (Pharmacia), pET systems (Novagen), psupex, pUB110, pTP5, pC194, pTrxFus (Invitrogen), pMAL-c2 (New England Biolabs), pUC19 (Gene, 33, 103 (1985)), pSTV28 (TaKaRa), pUC118 (TaKaRa), pPA1 (Japanese Laid-Open Publication No.: 63-233798), and the like.

[0170] As used herein, the term “promoter” refers to a base sequence which determines the initiation site of transcription of a gene and is a DNA region which directly regulates the frequency of transcription. Transcription is started by RNA polymerase binding to a promoter. A promoter region is usually located within about 2 kbp upstream of the first exon of a putative protein coding region. Therefore, it is possible to estimate a promoter region by predicting a protein coding region in a genomic base sequence using DNA analysis software. A putative promoter region is usually located upstream of a structural gene, but depending on the structural gene, a putative promoter region may be located downstream of a structural gene. Preferably, a putative promoter region is located within about 2 kbp upstream of the translation initiation site of the first exon, but such a putative promoter region is not limited to this and may be located in an intron or downstream of 3′ terminus.

[0171] As used herein, the term “terminator” refers to a sequence which is located downstream of a protein-encoding region of a gene and which is involved in the termination of transcription when DNA is transcribed into mRNA, and the addition of a poly-A sequence.

[0172] When using the present invention, any method for introducing a nucleic acid into a cell may be used as methods for introducing a vector, and includes, for example, transfection, transduction, transformation (calcium chloride method, electroporation method (Japanese Laid-Open Publication 60-251887), particle gun (gene gun) method (Japanese Patent Nos. 2606856, and 2517813) As used herein, the term “transformant” refers to the whole or a part of an organism, such as a cell, which is produced by transformation. Examples of a transformant include prokaryotic cells, yeast cells, animal cells, plant cells, insect cells and the like. Transformants may be referred to as transformed cells, transformed tissue, transformed hosts, or the like, depending on the subject. As used herein, all of the forms are encompassed, however, a particular form may be specified in a particular context.

[0173] As used herein the term “homologous recombination” refers to a recombination in the portion having a homologous base sequence in a pair of double stranded DNA. In a living organism, such homologous recombinations are observed in a form of chromosomal crossover and the like.

[0174] As used herein the phrase “conditions under which homologous recombination occurs” refers to conditions under which homologous recombination occurs when an organism having a genome and a nucleic acid molecule having a sequence homologous to at least any one region of the genomic sequence thereof, are present. Such conditions may differ depending on the organism, and are well known for those skilled in the art. Such conditions include, but are not limited to, for example:
[0175] Tk-pyrF deleted strain No. 25, No. 27 are cultured in 20 ml of ASW-YT liquid medium.
[0176] ↓
[0177] Collect the bacteria from the culture medium (3 ml) per one sample (No. 25, No. 27, five samples for each)
[0178] ↓
[0179] Suspend the cells in 0.8×ASW+80 mM CaCl₂ 2001 μl, and let stand on ice for 30 minutes
[0180] ↓
[0181] 3 μg pUC118/DS and 3 μg pUC118/DD are mixed and let stand on ice for 1 hour (two samples for each. Equivalent volume of TE buffer added sample was used as a control)
[0182] ↓
[0183] heat shock at 85° C., 45 s
[0184] ↓
[0185] let stand on ice for 10 minutes
[0186] ↓
[0187] Preculture in Ura-ASW-AA liquid medium (proliferation occurs based on the incorporated uracil)
[0188] ↓
[0189] Culture on Ura-ASW-AA liquid medium (enriched for PyrF+strain)
[0190] ↓
[0191] Culture on Ura-ASW-AA solid medium
[0192] The present invention is not limited to the above conditions. As used herein the composition of ASW (artificial sea water) is as follows: 1×Artificial sea water (ASW) (/L): NaCl 20 g; MgCl₂.6H₂O 3 g; MgSO₄.7H₂O 6 g; (NH₄)₂SO₄ 1 g; NaHCO₃0.2 g; CaCl₂.2H₂O 0.3 g; KCl 0.5 g; NaBr 0.05 g; SrCl₂.6H₂O 0.02 g; and Fe(NH₄) citric acid 0.01 g.

[0193] Homologous recombination may occur when there is at least one homologous region between a genome and a vector, and preferably, when there are two homologous regions between the genome and the vector.

[0194] As used herein the term “cross-over” or “crossover”, when used for a chromosome, refers to a pair of homologous chromosomes is crossed in this way, resulting in a new combination of nucleic acid sequences.

[0195] As used herein the term “single cross over”, when used for chromosome, refers to that there is one homologous region causing the cross-over between the nucleic acid molecules, and cross-over occurs only in that particular region, resulting in one nucleic acid sequence thereof that is incorporated in the other sequence.

[0196] As used herein the term “double cross-over”, when used for chromosome, refers to that there are two homologous regions between two nucleic acid molecules for cross-over, and the nucleic acid sequence is replaced with each other between the homologous regions.

[0197] As used herein, the term “expression” of a gene, a polynucleotide, a polypeptide, or the like, indicates that the gene or the like is affected by a predetermined action in vivo to be changed into another form. Preferably, the term “expression” indicates that genes, polynucleotides, or the like are transcribed and translated into polypeptides. In one embodiment of the present invention, genes may be transcribed into mRNA. More preferably, these polypeptides may have post-translational processing modifications.

[0198] As used herein the term “expression product” of a gene, refers to a substance resulting from expression of the gene, and includes mRNA which is a transcription product, a polypeptide which is a translation product, and a polypeptide which is a post-translational product, and the like. Detection of such expression products maybe directly or indirectly performed, and may be performed using a well known technology in the art (for example, Southern blotting, Northern blotting and the like). These technologies are described elsewhere herein, as well as in the references cited elsewhere herein.

[0199] Polypeptides used in the present invention may be produced by, for example, cultivating primary culture cells producing the peptides or cell lines thereof, followed by separation or purification of the peptides from culture supernatant. Alternatively, genetic manipulation techniques can be used to incorporate a gene encoding a polypeptide of interest into an appropriate expression vector, transform an expression host with the vector, and collect recombinant polypeptides from the culture supernatant of the transformed cells. The above-described host cell may be any host cells conventionally used in genetic manipulation techniques as long as they can express a polypeptide of interest while keeping the physiological activity of the peptide (e.g., E. coli, yeast, an animal cell, etc.). Conditions for culturing recombinant host cells may be appropriately selected depending on the type of host cell used. Any host cells which may be used in a recombinant DNA technology may be used as a host cell in the present invention, including bacterial cells, yeast cells, animal cells, plant cells, insect cells, and the like. Preferable host cell is a bacterial cell. Polypeptides derived from the thus-obtained cells may have at least one amino acid substitution, addition, and/or deletion or at least one sugar chain substitution, addition, and/or deletion as long as they have substantially the same function as that of naturally-occurring polypeptides. When an expression product is secreted extracellularly, for example, the supernatant is obtained by centrifuging or filtering a culture, and directly purifying the same or concentrating by precipitation or ultra filtration for purification. When an expression product is accumulated intracellularly, cells may be disrupted by a cell wall lysis enzyme, change in osmolarity, use of glass beads, homogenizer, or sonication or the like, to obtain cellular extract for purification. Purification may be performed by combining known methods in the art, such as ion exchange chromatography, gel filtration, affinity chromatography, electrophoresis and the like.

[0200] A given amino acid may be substituted with another amino acid in a protein structure, such as a cationic region or a substrate molecule binding site, without a clear reduction or loss of interactive binding ability. A given biological function of a protein is defined by the interactive ability or other property of the protein. Therefore, a particular amino acid substitution may be performed in an amino acid sequence, or at the DNA code sequence level, to produce a protein which maintains the original property after the substitution. Therefore, various modifications of peptides as disclosed herein and DNA encoding such peptides may be performed without clear losses of biological usefulness.

[0201] When the above-described modifications are designed, the hydrophobicity indices of amino acids may be taken into consideration. Hydrophobic amino acid indices play an important role in providing a protein with an interactive biological function, which is generally recognized in the art (Kyte, J. and Doolittle, R. F., J. Mol. Biol. 157(1):105-132, 1982). The hydrophobic property of an amino acid contributes to the secondary structure of a protein and then regulates interactions between the protein and other molecules (e.g., enzymes, substrates, receptors, DNA, antibodies, antigens, etc.). Each amino acid is given a hydrophobicity index based on the hydrophobicity and charge properties thereof as follows: isoleucine (+4.5); valine (+4.2); leucine (+3.8); phenylalanine (+2.8); cysteine/cystine (+2.5); methionine (+1.9); alanine (+1.8); glycine (−0.4); threonine (−0.7); serine (−0.8); tryptophan (−0.9); tyrosine (−1.3); proline (−1.6); histidine (−3.2); glutamic acid (−3.5); glutamine (−3.5); aspartic acid (−3.5); asparagine (−3.5); lysine (−3.9); and arginine (−4.5).

[0202] It is well known that if a given amino acid is substituted with another amino acid having a similar hydrophobicity index, the resultant protein may still have a biological function similar to that of the original protein (e.g., a protein having an equivalent enzymatic activity). For such an amino acid substitution, the hydrophobicity index is preferably within ±2, more preferably within ±1, and even more preferably within ±0.5. It is understood in the art that such an amino acid substitution based on hydrophobicity is efficient.

[0203] A hydrophilicity index is also useful for modification of an amino acid sequence of the present invention. As described in U.S. Pat. No. 4,554,101, amino acid residues are given the following hydrophilicity indices: arginine (+3.0); lysine (+3.0); aspartic acid (+3.0±1); glutamic acid (+3.0±1); serine (+0.3); asparagine (+0.2); glutamine (+0.2); glycine (0); threonine (−0.4); proline (−0.5±1); alanine (−0.5); histidine (−0.5); cysteine (−1.0); methionine (−1.3); valine (−1.5); leucine (−1.8); isoleucine (−1.8); tyrosine (−2.3); phenylalanine (−2.5); and tryptophan (−3.4). It is understood that an amino acid may be substituted with another amino acid which has a similar hydrophilicity index and can still provide a biological equivalent. For such an amino acid substitution, the hydrophilicity index is preferably within ±2, more preferably ±1, and even more preferably ±0.5.

[0204] The term “conservative substitution” as used herein refers to amino acid substitution in which a substituted amino acid and a substituting amino acid have similar hydrophilicity indices or/and hydrophobicity indices. For example, the conservative substitution is carried out between amino acids having a hydrophilicity or hydrophobicity index of within ±2, preferably within ±1, and more preferably within ±0.5. Examples of the conservative substitution include, but are not limited to, substitutions within each of the following residue pairs: arginine and lysine; glutamic acid and aspartic acid; serine and threonine; glutamine and asparagine; and valine, leucine, and isoleucine, which are well known to those skilled in the art.

[0205] As used herein the term “silent substitution” refers to a substitution in which there are nucleotide sequence substitutions but no amino acid change is encoded by the substituted nucleotides. Such silent substitutions may be performed using genetic code degeneracy. Such degeneracy is well known in the art, and is also described in the references cited herein.

[0206] As used herein, the term “variant” refers to a substance, such as a polypeptide, polynucleotide, or the like, which differs partially from the original substance. Examples of such a variant include a substitution variant, an addition variant, a deletion variant, a truncated variant, an allelic variant, and the like. Examples of such a variant include, but are not limited to, a nucleotide or polypeptide having one or several substitutions, additions and/or deletions or a nucleotide or polypeptide having at least one substitution, addition and/or deletion. The term “allele” as used herein refers to a genetic variant located at a locus identical to a corresponding gene, where the two genes are distinguished from each other. Therefore, the term “allelic variant” as used herein refers to a variant which has an allelic relationship with a given gene. Such an allelic variant ordinarily has a sequence the same as or highly similar to that of the corresponding allele, and ordinarily has almost the same biological activity, though it rarely has different biological activity. The term “species homolog” or “homolog” as used herein refers to one that has an amino acid or nucleotide homology with a given gene in a given species (preferably at least 60% homology, more preferably at least 80%, at least 85%, at least 90%, and at least 95% homology). A method for obtaining such a species homolog is clearly understood from the description of the present specification. The term “orthologs” (also called orthologous genes) refers to genes in different species derived from a common ancestry (due to speciation) For example, in the case of the hemoglobin gene family having multigene structure, human and mouse α-hemoglobin genes are orthologs, while the human α-hemoglobin gene and the human β-hemoglobin gene are paralogs (genes arising from gene duplication). Orthologs are useful for estimation of molecular phylogenetic trees. Usually, orthologs in different species may have a function similar to that of the original species. Therefore, orthologs of the present invention may be useful in the present invention.

[0207] As used herein, the term “conservative (or conservatively modified) variant” applies to both amino acid and nucleic acid sequences. With respect to particular nucleic acid sequences, conservatively modified variants refer to those nucleic acids which encode identical or essentially identical amino acid sequences. Because of the degeneracy of the genetic code, a large number of functionally identical nucleic acids encode any given protein. For example, the codons GCA, GCC, GCG and GCU all encode the amino acid alanine. Thus, at every position where an alanine is specified by a codon, the codon can be altered to any of the corresponding codons described without altering the encoded polypeptide. Such nucleic acid variations are “silent variations” which represent one species of conservatively modified variation. Every nucleic acid sequence herein which encodes a polypeptide also describes every possible silent variation of the nucleic acid. Those skilled in the art will recognize that each codon in a nucleic acid (except AUG, which is ordinarily the only codon for methionine, and TGG, which is ordinarily the only codon for tryptophan) can be modified to yield a functionally identical molecule. Accordingly, each silent variation of a nucleic acid which encodes a polypeptide is implicit in each described sequence. Preferably, such modification may be performed while avoiding substitution of cysteine which is an amino acid capable of largely affecting the higher-order structure of a polypeptide. Such a conservative modification or silent modification is also within the scope of the present invention.

[0208] The above-described nucleic acid can be obtained by a well-known PCR method, i.e., chemical synthesis. This method may be combined with, for example, site-specific mutagenesis, hybridization, or the like.

[0209] As used herein, the term “substitution, addition or deletion” for a polypeptide or a polynucleotide refers to the substitution, addition or deletion of an amino acid or its substitute, or a nucleotide or its substitute, with respect to the original polypeptide or polynucleotide, respectively. This is achieved by techniques well known in the art, including a site directed mutagenesis technique and the like. A polypeptide or a polynucleotide may have any number (>0) of substitutions, additions, or deletions. The number can be as large as a variant having such a number of substitutions, additions or deletions which maintains an intended function (e.g., the cancer marker, nervous disorder marker, etc.). For example, such a number may be one or several, and preferably within 20% or 10% of the full length, or no more than 100, no more than 50, no more than 25, or the like.

[0210] As used herein, the term “specifically expressed” in the case of genes indicates that a gene is expressed in a specific site or in a specific period of time at a level different from (preferably higher than) that in other sites or periods of time. The term “specifically expressed” includes that a gene may be expressed only in a given site (specific site) or may be expressed in other sites. Preferably, the term “specifically expressed” indicates that a gene is expressed only in a given site.

[0211] General molecular biological technologies which may be used in the present invention may be readily performed by those skilled in the art by referring to for example, Ausubel F. A. et al., ed. (1988), Current Protocols in Molecular Biology, Wiley, New York, N.Y.; Sambrook J et al. (1987) Molecular Cloning:A Laboratory Manual, 2nd Ed., Cold Spring Harbor Laboratory Press, Cold Spring Harbor, N.Y.

[0212] As used herein the term “thermostable” refers to a property having resistance against a temperture which is higher than circumstancial temperature in which a usual organism survives, and includes resistance against temperature higher than 37° C. More usually, the thermostable refers to resistance against temperature higher than 50° C. Thermostable, when used for a living organism, may refer to a property thereof in which an organism can survive at lower and higher temperatures. On the other hand, thermostable, when used for a polypeptide, refers to resistance against higher temperature, for example a temperature higher than 37° C., a temperature higher than 50° C. Amongst them, the property of having resistance to temperatures higher than 90° C. refers to “hyperthermostable”.

[0213] As used herein, an organism which can survive at higher temperature is often called “thermophillic bacteria”. Thermophillic bacteria usually have survival optimum temperatures of 50-105° C. and do not grow at 30° C. or lower. Amongst them, those having an optimum temperature of 90° C. or higher are called “hyperthermophillic bacteria”.

[0214] As used herein the term “hyperthermophillic archeabacteria” and “hyperthermostable bacteria” are interchangeably used to refer to a microorganism growing at 90° C. or higher. Preferably, the hyperthermophillic archeabacteria is Thermococcus kodakaraensis KOD1 strain, a thermostable DNA ligase producing, thermostable thiol protease producing bacteria isolated by the present inventors (Morikawa, M. et al., Appl. Environ. Microbiol. 60(12), 4559-4566(1994)). KOD-1 strains were deposited in the International Patent Organism Depositary (Chuo No. 6, Higashi 1-Chome, 1-1, Tsukuba-shi, Ibaraki, 305-8566), and the accession number there of FERM P-15007. KOD-1 strains were originally classified as a Pyrococcus bacteria, as described in the above-mentioned reference. However, when we compared the sequence of 16S rRNA using the registered data in GenBank R91.0 October, 1995+Daily Update inputted in DNASIS (Hitachi Software Engineering), it was revealed y that KOD-1 strains belongs to the Thermococcus genus, rather than the Pyrococcus genus, and thus is presently classified as Thermococcus kodakaraensis KOD-1.

[0215] As used herein, culturing hyperthermophillic archeabateria producing hyperthermostable proteins may be performed under any culture conditions, for example, those described in Appl. Environ. Microbiol. 60(12), 4559-4566 (1994) (ibid). Culture may be either static culture or jar fermentation culture by nitrogen gas, and may be either in a continuous or batch manner.

[0216] The chromosomal DNA of a hyperthermophillic archeabacteria may be obtained by solubilizing the cultured bacterial cells with detergent (for example, N-lauryl sarcosin), and fractionating the resultant soluent by cesium chloride ethidium bromide equilibrium density-gradient centrifugation (see, for example, Imanaka et al., J. Bacteriol. 147:776-786 (1981)). Libraries may be obtained by digesting the resultant chromosomal DNA by a variety of restriction enzymes, followed by ligating the same into a vector (such as a phage or plasmid), which has been digested with the same restriction enzyme or similar restriction enzyme resulting in the same digestion terminus, with an enzyme such as T4 DNA ligase or the like.

[0217] Libraries may be screened by selecting a clone comprising a DNA encoding a thermophilic DNA ligase of interest therefrom. Selection may be performed using an oligonucleotide designed based on a partial amino acid sequence of the predetermined hyperthermophillic DNA ligase and a cloned DNA deduced to have homology with the DNA of interest as a probe. Alternatively, selection may be performed by expressing the enzyme of interest. Detection of expression may be performed, for example, when the activity of the enzyme of interest may be readily detected, by detecting the activity of expression product against the substrate added to the plate, or alternatively when an antibody against the enzyme of interest is available, using the reactivity between the expression product and the antibody.

[0218] Analysis of the resultant cloned DNA may be performed by, for example, isolating a selected DNA, producing a restriction map therefor, and determining the nucleotide sequence, and the like. Technologies such as preparation of a cloned DNA, restriction enzyme processing, subcloning, nucleotide sequencing and the like are well known in the art, and may be performed by referring to “Molecular Cloning: A Laboratory Manual Second Edition, ” (Sambrook, Fritsch and Maniatis ed., Cold Spring Harbor Laboratory Press, 1989) Next, the resultant cloned DNA may be expressed by operably inserting the same into an expression vector applicable to a host cell used, transforming a host cell with the expression vector, and culturing the transformed host cell.

[0219] (Biomolecule Chip)

[0220] The genomic information of the present invention may be used for providing a biomolecule chip (for example, DNA chip, protein chip, glycoprotein chip, antibody chip and the like).

[0221] The analysis of expression control of the genes of the present invention may be performed by genetic analysis method using a DNA array. The present invention also provides a virtual genome DNA array (also called as “hyperthermophillic genomic array”) using the genomic sequence which has first identified in the present invention.

[0222] The nucleotides of the present invention may be used in a gene analysis method using a DNA array. A DNA array is widely reviewed (Shujunsha Ed., Saibo-kogaku (Cellular Engineering), Special issue, “DNA-maikuro-arei-to-saisin-PCR-ho [DNA microarray and Up-to-date PCR Method”). Further, plant analysis using a DNA array has been recently used (Schenk P M et al. (2000) Proc. Natl. Acad. Sci. (USA) 97: 11655-11660). Hereinafter, a DNA array and a gene analysis method using the same will be briefly described.

[0223] “DNA array” refers to a device in which DNAs are arrayed and immobilized on a plate. DNA arrays are divided into DNA macroarrays, DNA microarrays, and the like according to the size of a plate or the density of DNA placed on the plate, however, the use of these terms are not strict as used herein.

[0224] The border between macro and micro is not strictly determined. However, generally, “DNA macroarray” refers to a high density filter in which DNA is spotted on a membrane, while “DNA microarray” refers to a plate of glass, silicon, and the like which carries DNA on a surface thereof. There are a cDNA array, an oligo DNA array, and the like according to the type of DNA placed.

[0225] A certain high density oligo DNA array, in which a photolithography technique for production of semiconductor integrated circuits is applied and a plurality of oligo DNAs are simultaneously synthesized on a plate, is particularly called “DNA chip”, an adaptation of the term “semiconductor chip”. Examples of the DNA chip prepared by this method include GeneChip® (Affymetrix, Calif.), and the like (Marshall A et al., (1998) Nat. Biotechnol. 16: 27-31 and Ramsay G et al., (1998) Nat. Biotechnol. 16 40-44). Preferably, GeneChip® may be used in gene analysis using a microarray according to the present invention. The DNA chip is defined as described above in a narrow sense, but may refer to all types of DNA arrays or DNA microarrays.

[0226] Thus, DNA microarrays are a device in which several thousands to several ten thousands or more of gene DNAs are arrayed on a glass plate in high density. Therefore, it is possible to analyze gene expression profiles or gene polymorphism at a genomic scale by hybridization of cDNA, cDNA or genomic DNA. With this technique, it has been made possible to analyze a signal transfer system and/or a transcription control pathway (Fambrough D et al. (1999), Cell 97, 727-741); the mechanism of tissue repair (Iyer V R et al., (1999), Science 283: 83-87); the action mechanism of medicaments (Marton M J, (1999), Nat. Med. 4: 1293-1301); fluctuations in gene expression during development and differentiation processes in a wide scale, and the like; identify a gene group whose expression is fluctuated according to pathologic conditions; find a novel gene involved in a signal transfer system or a transcription control; and the like. Further, as to gene polymorphism, it has been made possible to analyze a number of SNP with a single DNA microarray (Cargill Met al., (1999), Nat. Genet. 22:231-238).

[0227] The principle of an assay using a DNA microarray will be described. DNA microarrays are prepared by immobilizing a number of different DNA probes in high density on a solid-phase plate, such as a slide glass, whose surface is appropriately processed. Thereafter, labeled nucleic acids (targets) are subjected to hybridization under appropriate hybridization conditions, and a signal from each probe is detected by an automated detector. The resultant data is subjected to massive analysis by a computer. For example, in the case of gene monitoring, target cDNAs integrated with fluorescent labels by reverse transcription from mRNA are allowed to hybridize to oligo DNAs or cDNAs as a probe on a microarray, and are detected with a fluorescence image analyzer. In this case, T7 polymerase may be used to carry out other various signal amplification reactions, such as cRNA synthesis reactions or via enzymatic reactions.

[0228] Fodor et al. has developed a technique for synthesizing polymers on a plate using a combination of combinatorial chemistry and photolithography for semiconductor production (Fodor S P et al., (1991) Science 251: 767-773). This is called the synthesized DNA chip. Photolithography allows for extremely minute surface processing, thereby making it possible to produce a DNA microarray having a packing density of as high as 10 μm²/DNA sample. In this method, generally, about 25 to about 30 DNAs are synthesized on a glass plate.

[0229] Gene expression using a synthesized DNA chip was reported by Lockart et al. (Lockart D J et al. (1996) Nat. Biotechnol.: 14: 1675-1680). This method overcomes a drawback of the chip of this type in that the specificity is low since the length of synthesized DNA is short. This problem was solved by preparing perfect match (PM) oligonucleotide probes corresponding to from about 10 to about 20 regions and mismatch (MM) oligonucleotide probes having a one base mutation in the middle of the PM probes for the purpose of monitoring the expression of one gene. Here, the MM probes are used as an indicator for the specificity of hybridization. Based on the signal ratio between the PM probe and the MM probe, the level of gene expression may be determined. When the signal ratio between the PM probe and the MM probe is substantially 1:1, the result is called cross hybridization, which is not interpreted as a significant signal.

[0230] A so-called attached DNA microarray is prepared by attaching DNAs onto a slide glass, and fluorescence is detected (see also http://cmgm.stanford.edu/pbrown). In this method, no gigantic semiconductor production machine is required, and only a DNA array machine and a detector are used to perform the assay in a laboratory. This method has the advantage that it is possible to select DNAs to be attached. A high density array can be obtained by spotting spots having a diameter of 100 μm at intervals of 100 μm, for example. It is mathematically possible to spot 2500 DNAs per cm². Therefore, a usual slide glass (the effective area is about 4 cm²) can carry about 10,000 DNAs.

[0231] As a labeling method for synthesized DNA arrays, for example, double fluorescence labeling is used. In this method, two different mRNA samples are labeled by different fluorescent dyes respectively. The two samples are subjected to competitive hybridization on the same microarray, and both fluorescences are measured. A difference in gene expression is detected by comparing the fluorescences. Examples of the fluorescent dye include, but are not limited to, Cy5 and Cy3, which are most often used, and the like. The advantage of Cy3 and Cy5 is that the wavelengths of fluorescences do not overlap substantially. Double fluorescence labeling maybe used to detect mutations or morphorisms in addition to differences in gene expression.

[0232] An array machine may be used for assays using a DNA array. In the array machine, basically, a pin tip or a slide holder is moved in directions along the X, Y and Z axes in combination with a high-performance servo motor under the control of a computer so that DNA samples are transferred from a microtiter plate to the surface of a slide glass. The pin tip is processed into various shapes. For example, a DNA solution is retained in a cloven pen tip like a crow's bill and spotted onto a plurality of slide glasses. After washing and drying cycles, a DNA sample is then placed on the slide glasses. The above-described steps are repeated. In this case, in order to prevent contamination of the pin tip by a different sample, the pin tip has to be perfectly washed and dried. Examples of such an array machine include SPBIO2000 (Hitachi Software Engineering Co., Ltd.; single strike type), GMS417 Arrayer (Takara Shuzo Co., Ltd.; pin ring type), Gene Tip Stamping (Nippon Laser & Electronics Lab.; fountain pen type), and the like.

[0233] There are various DNA immobilizing methods for use in assays using a DNA array. Glass as a material for a plate has a small effective area for immobilization and electrical charge amount as compared to membranes, and therefore is given various coatings such as poly L-lysine coating (Reference 55), silane finishing (Reference 56), or the like. Further, a commercially available precoated slide glass exclusive to DNA microarrays (e.g., polycarboimide glass (Nissin Spinning Co., Ltd.) and the like) may also be used. In the case of oligo DNA, a method of aminating a terminal of the DNA and crosslinking the DNA to silane-finished glass is available.

[0234] DNA microarrays may carry mainly cDNA fragments amplified by PCR. When the concentration of cDNA is insufficient, signals cannot be sufficiently detected in some cases. In a case when a sufficient amount of cDNA fragments is not obtained by one PCR operation, PCR is repeated. The resultant overall PCR products may be purified and condensed at one time. A probe cDNA may generally carry a number of random cDNAs, but may carry a group of selected genes (e.g., the gene or promoter groups of the present invention) or candidate genes for gene expression changes obtained by RDA (representational differential analysis) according to the purpose of an experiment. It is preferable to avoid overlapping clones. Clones may be prepared from a stock cDNA library, or cDNA clones may be purchased.

[0235] In assays using a DNA array, a fluorescent signal indicating hybridization on the DNA microarray is detected by a fluorescence detector or the like. There are various conventionally available detectors for this purpose. For example, a research group at the Stanford University has developed an original scanner which is a combination of a fluorescence microscope and a movable stage (see http://cmgm.stanford.edu/pbrown). A conventional fluorescence image analyzer for gel, such as FMBIO (Hitachi Software Engineering), Storm (Molecular Dynamics), and the like, can read a DNA microarray if the spots are not arrayed in very high density. Examples of other available detectors include ScanArray 4000 and 5000 (General Scanning; scan type (confocal type)), GMS418 Array Scanner (Takara Shuzo; scan type (confocal type)), Gene Tip Scanner (Nippon Laser & Electronics Lab.; scan type (non-confocal type)), Gene Tac 2000 (Genomic Solutions; CCD camera type)), and the like.

[0236] The amount of data obtained from DNA microarrays is huge. Software for managing correspondences between clones and spots, analyzing data, and the like is important. Such software attached to each detection system is available (Ermolaeva O et al. (1998) Nat. Genet. 20:19-23). Further, an example of a database format is GATC (genetic analysis technology consortium) proposed by Affymetrix.

[0237] The present invention may also be used in gene analysis using a differential display technique.

[0238] The differential display technique is a method for detecting or identifying a gene whose expression fluctuates. In this method, cDNA is prepared from each of at least two samples, and amplified by PCR using a set of any primers. Thereafter, a plurality of generated PCR products are separated by gel electrophoresis. After the electrophoresis pattern is produced, expression-fluctuating genes are cloned based on a relative signal strength change between each band.

[0239] The term “support” as used herein refers to a material for an array construction of the present invention. Examples of a material for the substrate include any solid material having a property of binding to a biomolecule used in the present invention either by covalent bond or noncovalent bond, or which can be derived in such a manner as to have such a property.

[0240] Such a material for the substrate may be any material capable of forming a solid surface, for example, including, but being not limited to, glass, silica, silicon, ceramics, silica dioxide, plastics, metals (including alloys), naturally-occurring and synthetic polymer (e.g., polystyrene, cellulose, chitosan, dextran, and nylon). The substrate may be formed of a plurality of layers made of different materials. For example, an inorganic insulating material, such as glass, silica glass, alumina, sapphire, forsterite, silicon carbide, silicon oxide, silicon nitride, or the like, can be used. Moreover, an organic material, such as polyethylene, ethylene, polypropylene, polyisobutylene, polyethylene terephthalate, unsaturated polyester, fluorine-containing resin, polyvinyl chloride, polyvinylidene chloride, polyvinyl acetate, polyvinyl alcohol, polyvinyl acetal, acrylic resin, polyacrylonitrile, polystyrene, acetal resin, polycarbonate, polyamide, phenol resin, urea resin, epoxy resin, melamine resin, styrene·acrylonitrile copolymer, acrylonitrilebutadienestyrene copolymer, silicone resin, polyphenylene oxide, or polysulfone, can be used. In the present invention, a film used for nucleic acid blotting, such as a nitrocellulose film, a PVDF film, or the like, can also be used. When material constituting the substrate is a solid phase, it is specifically referred to as “solid (phase) substrate” as used herein. As used herein such a substrate may be a form of plate, microwell plate, chip, glass slide, film, bead, metal (surface) and the like. Substrates may or may not be coated.

[0241] “Chip” as used herein refers to an ultramicro-integrated circuit having various functions, which constitutes a part of a system. “Biomolecule chip” as used herein refers to a chip comprising a substrate and a biomolecule, in which at least one biomolecule as set forth herein is disposed on the substrate.

[0242] The term “address” as used herein refers to a unique position on a substrate which can be distinguished from other unique positions. An address is suitably used to access a biomolecule associated with the address. Any entity present at each address can have an arbitrary shape which allows the entity to be distinguished from entities present at other addresses (e.g., in an optical manner). The shape of an address may be, for example, a circle, an ellipse, a square, or a rectangle, or alternatively an irregular shape.

[0243] The size of each address varies depending on, particularly, the size of a substrate, the number of addresses on the specific substrate, the amount of samples to be analyzed and/or an available reagent, the size of a biomolecule, and the magnitude of a resolution required for any method in which the array is used. The size of an address may range from 1-2 nm to several centimeters (e.g., 1-2 mm to several centimeters, etc., 125×80 mm, 10×10 mm, etc.). Any size of an address is possible as long as it matches the array to which it is applied. In such a case, a substrate material is formed into a size and a shape suitable for a specific production process and application of an array. For example, in the case of analysis where a large amount of samples to be measured are available, an array may be more economically constructed on a relatively large substrate (e.g., 1 cm×1 cm or more). Here, a detection system which does not require much sensitivity and is therefore economical may be further advantageously used. On the other hand, when the amount of an available sample to be analyzed and/or reagent is limited, an array may be designed so that consumption of the sample and reagent is minimized.

[0244] The spatial arrangement and forms of addresses are designed in such a manner as to match a specific application in which the microarray is used. Addresses may be densely loaded, widely distributed, or divided into subgroups in a pattern suitable for a specific type of sample to be analyzed. “Array” as used herein refers to a pattern of solid substances fixed on a solid phase surface or a film, or a group of molecules having such a pattern. Typically, an array comprises biomolecules (e.g., DNA, RNA, protein-RNA fusion molecules, proteins, low-weight organic molecules, etc.) conjugated to nucleic acid sequences fixed on a solid phase surface or a film as if the biomolecule captured the nucleic sequence. “Spots” of biomolecules may be arranged on an array. “Spot” as used herein refers to a predetermined set of biomolecules.

[0245] Any number of addresses may be arranged on a substrate, typically up to 10⁸ addresses, in other embodiments up to 10⁷ addresses, up to 10⁶ addresses, up to 10⁵ addresses, up to 10⁴ addresses, up to 10³ addresses, or up to 10² addresses. Therefore, when one biomolecule is placed on one address, up to 10⁸ biomolecules can be placed on a substrate, and in other embodiment up to 10⁷ biomolecules, up to 10⁶ biomolecules, up to 10⁵ biomolecules, up to 10⁴ biomolecules, up to 10³ biomolecules, or up to 10² biomolecules can be placed on a substrate. In these cases, a smaller size of substrate and a smaller size of address are suitable. In particular, the size of an address may be as small as the size of a single biomolecule (i.e., this size may be of the order of 1-2 nm). In some cases, the minimum area of a substrate is determined based on the number of addresses on the substrate.

[0246] The term “biomolecule” as used herein refers to a molecule related to an organism. An “organism (or “bio-”)” as used herein refers to a biological organic body, including, but being limited to, an animal, a plant, a fungus, a virus, and the like. A biomolecule includes a molecule extracted from an organism, but is not so limited. A biomolecule is any molecule capable of having an influence on an organism. Therefore, a biomolecule also includes a molecule synthesized by combinatorial chemistry, and a low weight molecule capable of being used as a medicament (e.g., a low molecular weight ligand, etc.) as long as they are intended to have an influence on an organism. Examples of such a biomolecule include, but are not limited to, proteins, polypeptides, oligopeptides, peptides, polynucleotides, oligonucleotides, nucleotides, nucleic acids (e.g., including DNA (such as cDNA and genomic DNA) and RNA (such as mRNA)), polysaccharides, oligosaccharides, lipids, low weight molecules (e.g., hormones, ligands, signal transduction substances, low-weight organic molecules, etc.), and complex molecules thereof, and the like. A biomolecule also includes a cell itself, and a part or the whole of a tissue, and the like as long as they can be coupled to a substrate of the present invention. Preferably, a biomolecule includes a nucleic acid or a protein. In a preferable embodiment, a biomolecule is a nucleic acid (e.g., genomic DNA or cDNA, or DNA synthesized by PCR or the like). In another preferable embodiment, a biomolecule may be a protein. Preferably, one type of biomolecule may be provided for each address on a substrate of the present invention. In another embodiment, a sample containing two or more types of biomolecules may be provided for each address.

[0247] As used herein the term “liquid phase” is used to mean as usually used in the art, and usually refers to a state in a solution.

[0248] As used herein the term “solid phase” is used to mean as usually used in the art, and usually refers to a state in a solid. As used herein liquid and solid collectively refer to “fluid”.

[0249] As used herein the term “contact” refers to existing in a sufficient vicinity distance for interaction between two matters (for example, a composition and a cell) to each other.

[0250] As used herein the term “interaction” refers, when referring to two matters, to that the two matters exert a force to each other. Such interaction includes, but is not limited to, for example, covalent bonding, hydrpgen bonding, van der Waals forces, ionic interaction, non-ionic interaction, hydrophobic interaction, electrostatic interaction and the like. Preferably, the interaction may be normal interaction caused in a living body such as hydrogen bonding, hydrophobic interaction, and the like.

[0251] In one embodiment, the present invention may produce a micoarray for screening for a molecule, by binding a library of biomolecules (for example, organic low-molecular weight moleculre, combinatorial chemistory products) to a substrate, and using the same. Chemical library used in the present invention, may be produced or obtained by any means including, but is not limited to, for example, by the use of combinatorial chemistry technology, fermentation technology, plant and cell extraction procedures and the like. Production of a combinatorial library is well known in the art. For example, E. R. Felder, Chimia 1994, 48, 512-541; Gallop et al., J. Med. Chem. 1994, 37, 1233-1251; R. A. Houghten, Trends Genet. 1993, 9, 235-239; Houghtenet al., Nature 1991, 354, 84-86; Lam et al., Nature 1991, 354, 82-84; Carell et al., Chem. Biol. 1995, 3, 171-183; Madden et al., Perspectives in Drug Discovery and Design 2, 269-282; Cwirla et al., Biochemistry 1990, 87, 6378-6382; Brenner et al., Proc. Natl. Acad. Sci. USA 1992, 89, 5381-5383; Gordon et al., J. Med. Chem. 1994,37, 1385-1401; Lebl et al., Biopolymers 1995, 37177-198 ; and references cited therein. These references are incorporated by reference for their entireties

[0252] Methods, biomolecule chips and apparatuses of the present invention may be used for, for example, diagnosis, forensic medicine, drug discovery (screening for drugs) and development, molecular biological analysis (for example, nucleotide sequencing based array and gene sequence analysis based on array), analysis of protein properties and functions, pharmacogenomics, proteomics, environmental search, and additional biological and chemical analyses.

[0253] The present invention can also be applied to polymorphism analysis, such as RFLP analysis, SNP (snipp, single nucleotide polymorphism) analysis, or the like, analysis of base sequences, and the like. The present invention can also be used for screening of a medicament.

[0254] The present invention can be applied to any situation requiring a biomolecule test other than medical applications, such as food testing, quarantine, medicament testing, forensic medicine, agriculture, husbandry, fishery, forestry, and the like.

[0255] The present invention can also be used for detection of a gene amplified by PCR, SDA, NASBA, or the like, other than a sample directly collected from an organism. In the present invention, a target gene can be labeled in advance with an electrochemically active substance, a fluorescent substance (e.g., FITC, rhodamine, acridine, Texas Red, fluorecein, etc.), an enzyme (e.g., alkaline phosphatase, peroxidase, glucose oxidase, etc.), a colloid particle (e.g., a hapten, a light-emitting substance, an antibody, an antigen, gold colloid, etc.), a metal, a metal ion, a metal chelate (e.g., trisbipyridine, trisphenanthroline, hexamine, etc.), or the like.

[0256] In one embodiment, a nucleic acid component is extracted from these samples in order to test the nucleic acid. The extraction is not limited to a particular method. A liquid-liquid extraction method, such as phenol-chloroform method and the like, or a liquid-solid extraction method using a carrier can be used. Alternatively, a commercially available nucleic acid extraction method such as QIAamp (QIAGEN, Germany) or the like can be used. Next, a sample containing an extracted nucleic acid component is subjected to a hybridization reaction on a biomolecule chip of the present invention. The reaction is conducted in a buffer solution having an ionic strength of 0.01 to 5 and a pH of 5 to 10. To this solution may be added dextran sulfate (hybridization accelerating agent), salmon sperm DNA, bovine thymus DNA, EDTA, a surfactant, or the like. The extracted nucleic acid component is added to the solution, followed by heat denaturation at 90° C. or more. Insertion of a biomolecule chip can be carried out immediately after denaturation or after rapid cooling to 0° C. Alternatively, a hybridization reaction can be conducted by dropping a solution on a substrate. The rate of a reaction can be increased by stirring or shaking during the reaction. The temperature of a reaction is in the range of 10° C. to 90° C. The time of a reaction is in the range of one minute to about one night. After a hybridization reaction, an electrode is removed and then washed. For washing, a buffer solution having an ionic strength of 0.01 to 5 and a pH of 5 to 10 can be used. “Label” as used herein refers to an entity which distinguishes an intended molecule or substance from other substances (e.g., asubstance, energy, electromagnetic wave, etc.). Examples of such a labeling method include an RI (radioisotope) method, a fluorescence method, a biotin method, a chemiluminescence method, and the like. When both a nucleic acid fragment and its complementary oligonucleotide are labeled by a fluorescence method, they are labeled with fluorescence substances having different maximum wavelengths of fluoresence. The difference in the maximum wavelength of fluorescence is preferably at least 10 nm. Any fluorescence substance which can bind to a base portion of nucleic acid can be used. Preferable fluorescence substances include cyanine dye (e.g., Cy3, Cy5, etc. in Cy Dye™ series), a rhodamine 6G reagent, N-acetoxy-N2-acetylaminofluorene (AAF), AAIF (an iodine derivative of AAF), and the like. Examples of a combination of fluorescence substances having a difference in the maximum wavelength of fluorescence of at least 10 nm, include a combination of Cy5 and a rhodamine 6G reagent, a combination of Cy3 and fluorescein, a combination of a rhodamine 6G reagent and fluorescein, and the like.

[0257] “Chip attribute data” as used herein refers to data associated with some information relating to a biomolecule chip of the present invention. Chip attribute data includes information associated with a biomolecule chip, such as a chip ID, substrate data, and biomolecule attribute data. “Chip ID” as used herein refers to a code for identification of each chip. “Substrate data” or “substrate attribute data” as used herein refers to data relating to a substrate used in a biomolecule chip of the present invention. Substrate data may contain information relating to an arrangement or pattern of a biomolecule. “Biomolecule attribute data” refers to information relating to a biomolecule, inclding, for example, the gene sequence of the biomolecule (a nucleotide sequence in the case of nucleic acid, and an amino acid sequence in the case of protein), information relating to a gene sequence (e.g., a relationship between the gene and a specific disease or condition), a function in the case of a low weight molecule or a hormone, library information in the case of a combinatorial library, molecular information relating to affinity for a low weight molecule, and the like. “Personal information data” as used herein refers to data associated with information for identifying an organism or subject to be measured by a method, chip or apparatus of the present invention. When the organism or subject is a human, personal information data includes, but is not limited to, age, sex, health condition, medical history (e.g., drug history), educational background, the company of your insurance, personal genome information, address, name, and the like. When the personal information data is for a domestic animal, the information may include data about the production company of the animal. “Measurement data” as used herein refers to raw data as a result of measurement by a biomolecule substrate, apparatus and system of the present invention and specific processed data derived therefrom. Such raw data may be represented by the intensity of an electric signal. Such processed data may be specific biochemical data, such as a blood sugar level or a gene expression level.

[0258] “Recording region” as used herein refers to a region in which data may be recorded. In a recording region, measurement data as well as the above-described chip attribute data can be recorded.

[0259] Techniques as used herein are well known techniques commonly used in microfluidics, micromachining, organic chemistry, biochemistry, genetic engineering, molecular biology, genetics, and their related fields within the technical scope of the art, unless otherwise specified. These techniques are sufficiently described in, for example, literature listed below and described elsewhere herein.

[0260] Micromachining is described in, for example, Campbell, S. A. (1996). The Science and Engineering of Microelectronic Fabrication, Oxford University Press; Zaut, P. V. (1996). Microarray Fabrication: a Practical Guide to Semiconductor Processing, Semiconductor Services; Madou, M. J. (1997). Fundamentals of Microfabrication, CRC15 Press; Rai-Choudhury, P. (1997). Handbook of Microlithography, Micromachining, & Microfabrication: Microlithography; and the like, related portions of which are herein incorporated by reference.

[0261] Photolithography is a technique developed by Fodor et al., in which a photoreactive protecting group is utilized (see Science, 251, 767(1991)). A protecting group for a base inhibits a base monomer of the same or different type from binding to that base. Thus, a base terminus to which a protecting group is bound has no new base-binding reaction. A protecting group can be easily removed by irradiation. Initially, amino groups having a protecting group are immobilized throughout a substrate. Thereafter, only spots to which a desired base is to be bound are selectively irradiated by a method similar to a photolithography technique usually used in a semiconductor process, so that another base can be introduced by subsequent binding into only the bases in the irradiated portion. Now, desired bases having the same protecting group at a terminus thereof are bound to such bases. Thereafter, the pattern of a photomask is changed, and other spots are selectively irradiated. Thereafter, bases having a protecting group are similarly bound to the spots. This process is repeated until a desired base sequence is obtained in each spot, thereby preparing a DNA array. Photolithography techniques may be herein used.

[0262] An ink jet method (technique) is a technique of projecting considerably small droplets onto a predetermined position on a two-dimensional plane using heat or a piezoelectric effect. This technique is widely used mainly in printers. In production of a DNA array, an ink jet apparatus is used, which has a configuration in which a piezoelectric device is combined with a glass capillary. A voltage is applied to the piezoelectric device which is connected to a liquid chamber, so that the volume of the piezoelectric device is changed and the liquid within the chamber is expelled as a droplet from the capillary connected to the chamber. The size of the expelled droplet is determined by the diameter of the capillary, the volume variation of the piezoelectric device, and the physical property of the liquid. The diameter of the droplet is generally 30 μm. An ink jet apparatus using such a piezoelectric device can expel droplets at a frequency of about 10 KHz. In a DNA array fabricating apparatus using such an ink jet apparatus, the ink jet apparatus and a DNA array substrate are relatively moved so that droplets can be dropped onto desired spots on the DNA array. DNA array fabricating apparatuses using an ink jet apparatus are roughly divided into two categories. One category includes a DNA array fabricating apparatus using a single ink jet apparatus, and the other includes a DNA array fabricating apparatus using a multi-head ink jet apparatus. The DNA array fabricating apparatus with a single ink jet apparatus has a configuration in which a reagent for removing a protecting group at a terminus of an oligomer is dropped onto desired spots. A protecting group is removed from a spot, to which a desired base is to be introduced, by using the ink jet apparatus so that the spot is activated. Thereafter, the desired base is subjected to a binding reaction throughout a DNA array. In this case, the desired base is bound only to spots having an oligomer whose terminus is activated by the reagent dropped from the ink jet apparatus. Thereafter, the terminus of a newly added base is protected. Thereafter, a spot from which a protecting group is removed is changed and the procedures are repeated until desired nucleotide sequences are obtained. On the other hand, in a DNA array fabricating apparatus using a multi-head ink jet apparatus, an ink jet apparatus is provided for each reagent containing a different base, so that a desired base can be bound directly to each spot. A DNA array fabricating apparatus using a multi-head ink jet apparatus can have a higher throughput than that of a DNA array fabricating apparatus using a single ink jet apparatus. Among methods for fixing a presynthesized oligonucleotide to a substrate is a mechanical microspotting technique in which liquid containing an oligonucleotide, which is attached to the tip of a stainless pin, is mechanically pressed against a substrate so that the oligonucleotide is immobilized on the substrate. The size of a spot obtained by this method is 50 to 300 μm. After microspotting, subsequent processes, such as immobilization using UV light, are carried out.

### DESCRIPTION OF PREFERRED EMBODIMENTS

[0263] Hereinafter, preferred embodiments of the present invention will be described. The following embodiments are provided for a better understanding of the present invention and the scope of the present invention should not be limited to the following description. It will be clearly appreciated by those skilled in the art that variations and modifications can be made without departing from the scope of the present invention with reference to the specification.

[0264] Next, a novel gene targeted-disruption technique, a feature of the present invention, is described.

[0265] In one aspect, the present invention provides a method for targeted-disuption of an arbitrary gene in a genome of a living organism. The subject method comprises the steps of: A) providing information of the entire sequence of the genome of the living organism; B) selecting at least one arbitrary region of the sequence; C) providing a vector comprising a sequence complementary to the selected region and a marker gene; D) transforming the living organism with the vector; and E) placing the living organism in a condition allowing to cause homologous recombination. The method is first attained by clarifying the entire genomic sequence, and is different from the conventional technology in that, for example, a model system using Sulfolobus solfataricus, by Bartolucci S., cannot disrupt a desired gene, and can merely utilize the result from accidental disruption. In the present invention, this difference has attained effects which can rapidly disrupt a desired gene in an efficient manner, and allow functional anlaysis.

[0266] Preferably, in the step B) of the present invention, the region comprises at least two regions. By having two such regions, targeted-disruption of genes by double cross-over may be available. As demonstrated in the present invention, targeted-disruption of a gene by double cross-over is generally more efficient than targeted-disruption of a gene by single cross-over. Accordingly, it is preferable to have two such regions.

[0267] Vectors used in the present invention, are also called disruption vectors, and may further comprise an additional gene regulatory element such as a promoter.

[0268] The gene targeting method of the present invention may further comprise the step of detecting an expression product of the marker gene. As used herein, the expression product may be for example an mRNA, a polypeptide, or a post-translationally modified polypeptide.

[0269] In one embodiment, the marker gene is located in or outside the selected region.

[0270] As used herein, the genome used in the present invention, may be any genome as long as the entire genomic sequence is substantially sequenced. Examples of such a genome include, but are not limited to, for example, archeabacteria such as Aeropyrum pernix, Archaeoglobus fulgidus, Methanobacterium thermoautorophicum, Methanococcus jannaschii, Pyurococcus abyssi, Pyrococcus furiosus, Pyrococcus horikoshii, Sulfolobus solfataricus, Sulfolobus tokodaii, Thermoplasma acidophilum, Thermoplasma volcanium; bacteria such as Aquifex aeolicus, Thermotoga maritima, and the like. In one embodiment, the genome used may be the genome of Thermococcus kodakaraensis KOD1, because the entire genome of Thermococcus kodakaraensis KOD1 has now been sequenced. As used herein, that the entire sequence has been sequenced or substantially sequenced, refers to that sequences are clarified so that for any regional sequence selected, a sufficiently homologous region for causing homologous recombination may be provided. Accordingly, it is preferable that the entire sequence is sequenced without lack of a single base, however, it is permissible to have one, two, or three bases unclarified in a sequences. A plurality of such unclarified sequences may be present as long as for any regional sequence selected, a region sufficiently homologous for causing homologous recombination may be provided.

[0271] Preferably, the genome of the present invention has a sequence set forth in SEQ ID NO: 1.

[0272] Preferably, in the method of the present invention, the above-mentioned region selected, is an open reading frame of SEQ ID NO; 1, which are selected from the group of sequences of gene Numbers (1) to (2151) in the following Table in the sequence of SEQ ID NO: 1, 342, 723, 1087, 1469 or 1838.

TABLE 1

| | Nucleic acid | | | | |
|---|---|---|---|---|---|
| | No. (sense | Nucleic acid | Nucleic acid | Nucleic acid | |
| | chain | No. (sense | No. (antisense | No. (antisense | |
| | (corresponding | chain | chain | chain | |
| | to SEQ | (corresponding | (corresponding | (corresponding | |
| | ID NO: 1, | to SEQ ID | to SEQ ID NO: | to SEQ ID NO: | |
| | 342, 723), | NO: 1, 342, | 1087, 1469, | 1087, 1469, | Corresponding |
| gene | starting | 723), ending | 1838), ending | 1838), starting | SEQ |
| No. | nucleotide | nucleotide | nucleotide | nucleotide | ID NO. |
| 1 | 1 | 5016 | 2089377 | 2084362 | 2 |
| 2 | 5134 | 5733 | 2084244 | 2083645 | 3 |
| 3 | 6079 | 6543 | 2083299 | 2082835 | 1468 |
| 4 | 6586 | 7014 | 2082792 | 2082364 | 4 |
| 5 | 7152 | 7391 | 2082226 | 2081987 | 1837 |
| 6 | 7399 | 7614 | 2081979 | 2081764 | 1467 |
| 7 | 7655 | 8755 | 2081723 | 2080623 | 2157 |
| 8 | 8843 | 10093 | 2080535 | 2079285 | 343 |
| 9 | 10095 | 10379 | 2079283 | 2078999 | 724 |
| 10 | 10376 | 10807 | 2079002 | 2078571 | 344 |
| 11 | 10808 | 11416 | 2078570 | 2077962 | 2156 |
| 12 | 11406 | 11726 | 2077972 | 2077652 | 725 |
| 13 | 11723 | 12286 | 2077655 | 2077092 | 345 |
| 14 | 12338 | 13411 | 2077040 | 2075967 | 346 |
| 15 | 13392 | 13841 | 2075986 | 2075537 | 1836 |
| 16 | 13808 | 14056 | 2075570 | 2075322 | 2155 |
| 17 | 14153 | 14896 | 2075225 | 2074482 | 347 |
| 18 | 15239 | 15964 | 2074139 | 2073414 | 348 |
| 19 | 16151 | 16699 | 2073227 | 2072679 | 349 |
| 20 | 16696 | 17697 | 2072682 | 2071681 | 5 |
| 21 | 17780 | 18793 | 2071598 | 2070585 | 2154 |
| 22 | 18786 | 19280 | 2070592 | 2070098 | 1835 |
| 23 | 19290 | 20183 | 2070088 | 2069195 | 1834 |
| 24 | 20183 | 21187 | 2069195 | 2068191 | 2153 |
| 25 | 21266 | 21919 | 2068112 | 2067459 | 2152 |
| 26 | 21913 | 22569 | 2067465 | 2066809 | 1466 |
| 27 | 22597 | 24195 | 2066781 | 2065183 | 1465 |
| 28 | 23947 | 24834 | 2065431 | 2064544 | 6 |
| 29 | 24813 | 25451 | 2064565 | 2063927 | 726 |
| 30 | 25413 | 25811 | 2063965 | 2063567 | 1833 |
| 31 | 25813 | 27396 | 2063565 | 2061982 | 1464 |
| 32 | 27565 | 28620 | 2061813 | 2060758 | 7 |
| 33 | 28591 | 29334 | 2060787 | 2060044 | 1463 |
| 34 | 29782 | 30681 | 2059596 | 2058697 | 8 |
| 35 | 31102 | 31266 | 2058276 | 2058112 | 9 |
| 36 | 31414 | 32235 | 2057964 | 2057143 | 10 |
| 37 | 32367 | 33251 | 2057011 | 2056127 | 727 |
| 38 | 33291 | 35033 | 2056087 | 2054345 | 728 |
| 39 | 35048 | 35824 | 2054330 | 2053554 | 350 |
| 40 | 35882 | 36541 | 2053496 | 2052837 | 351 |
| 41 | 36553 | 37380 | 2052825 | 2051998 | 11 |
| 42 | 37394 | 37870 | 2051984 | 2051508 | 352 |
| 43 | 37874 | 39298 | 2051504 | 2050080 | 353 |
| 44 | 39760 | 40332 | 2049618 | 2049046 | 12 |
| 45 | 40360 | 41070 | 2049018 | 2048308 | 13 |
| 46 | 41072 | 42694 | 2048306 | 2046684 | 354 |
| 47 | 42696 | 44444 | 2046682 | 2044934 | 729 |
| 48 | 44441 | 46435 | 2044937 | 2042943 | 355 |
| 49 | 46470 | 46991 | 2042908 | 2042387 | 730 |
| 50 | 47171 | 47416 | 2042207 | 2041962 | 356 |
| 51 | 47317 | 47799 | 2042061 | 2041579 | 14 |
| 52 | 47937 | 49139 | 2041441 | 2040239 | 1832 |
| 53 | 49153 | 49329 | 2040225 | 2040049 | 1462 |
| 54 | 49393 | 49731 | 2039985 | 2039647 | 15 |
| 55 | 49728 | 50297 | 2039650 | 2039081 | 731 |
| 56 | 50278 | 50559 | 2039100 | 2038819 | 1461 |
| 57 | 50693 | 51412 | 2038685 | 2037966 | 357 |
| 58 | 51483 | 52061 | 2037895 | 2037317 | 1831 |
| 59 | 52063 | 52605 | 2037315 | 2036773 | 1460 |
| 60 | 52602 | 53792 | 2036776 | 2035586 | 1830 |
| 61 | 54169 | 55020 | 2035209 | 2034358 | 16 |
| 62 | 55058 | 55606 | 2034320 | 2033772 | 358 |
| 63 | 55746 | 56018 | 2033632 | 2033360 | 732 |
| 64 | 56132 | 56263 | 2033246 | 2033115 | 359 |
| 65 | 56244 | 56708 | 2033134 | 2032670 | 733 |
| 66 | 56674 | 57267 | 2032704 | 2032111 | 17 |
| 67 | 57264 | 57584 | 2032114 | 2031794 | 1829 |
| 68 | 57599 | 58276 | 2031779 | 2031102 | 2151 |
| 69 | 58855 | 59703 | 2030523 | 2029675 | 18 |
| 70 | 59704 | 59868 | 2029674 | 2029510 | 1459 |
| 71 | 59898 | 61799 | 2029480 | 2027579 | 1828 |
| 72 | 62830 | 63723 | 2026548 | 2025655 | 19 |
| 73 | 64226 | 65992 | 2025152 | 2023386 | 360 |
| 74 | 66045 | 67382 | 2023333 | 2021996 | 734 |
| 75 | 67399 | 68973 | 2021979 | 2020405 | 20 |
| 76 | 69117 | 69374 | 2020261 | 2020004 | 735 |
| 77 | 69583 | 69795 | 2019795 | 2019583 | 21 |
| 78 | 69792 | 70511 | 2019586 | 2018867 | 736 |
| 79 | 70504 | 71112 | 2018874 | 2018266 | 22 |
| 80 | 71117 | 71245 | 2018261 | 2018133 | 361 |
| 81 | 71679 | 72593 | 2017699 | 2016785 | 737 |
| 82 | 72764 | 73339 | 2016614 | 2016039 | 362 |
| 83 | 73336 | 74643 | 2016042 | 2014735 | 23 |
| 84 | 74603 | 75760 | 2014775 | 2013618 | 363 |
| 85 | 75753 | 76025 | 2013625 | 2013353 | 738 |
| 86 | 76022 | 77458 | 2013356 | 2011920 | 364 |
| 87 | 77735 | 79045 | 2011643 | 2010333 | 365 |
| 88 | 79622 | 79726 | 2009756 | 2009652 | 2150 |
| 89 | 79968 | 80129 | 2009410 | 2009249 | 739 |
| 90 | 80246 | 80428 | 2009132 | 2008950 | 366 |
| 91 | 80432 | 83176 | 2008946 | 2006202 | 367 |
| 92 | 83431 | 83628 | 2005947 | 2005750 | 24 |
| 93 | 83908 | 84267 | 2005470 | 2005111 | 25 |
| 94 | 84264 | 84440 | 2005114 | 2004938 | 740 |
| 95 | 84461 | 85018 | 2004917 | 2004360 | 368 |
| 96 | 84999 | 85340 | 2004379 | 2004038 | 741 |
| 97 | 85421 | 85948 | 2003957 | 2003430 | 369 |
| 98 | 86333 | 87139 | 2003045 | 2002239 | 2149 |
| 99 | 87211 | 87663 | 2002167 | 2001715 | 26 |
| 100 | 87663 | 88265 | 2001715 | 2001113 | 742 |
| 101 | 88266 | 89279 | 2001112 | 2000099 | 743 |
| 102 | 89307 | 90059 | 2000071 | 1999319 | 744 |
| 103 | 90079 | 90267 | 1999299 | 1999111 | 27 |
| 104 | 90276 | 90560 | 1999102 | 1998818 | 745 |
| 105 | 90583 | 91056 | 1998795 | 1998322 | 1458 |
| 106 | 91178 | 91366 | 1998200 | 1998012 | 370 |
| 107 | 91363 | 92979 | 1998015 | 1996399 | 28 |
| 108 | 93072 | 94550 | 1996306 | 1994828 | 746 |
| 109 | 94552 | 95712 | 1994826 | 1993666 | 29 |
| 110 | 96185 | 97636 | 1993193 | 1991742 | 371 |
| 111 | 97620 | 98147 | 1991758 | 1991231 | 747 |
| 112 | 98417 | 99583 | 1990961 | 1989795 | 372 |
| 113 | 99648 | 100892 | 1989730 | 1988486 | 748 |
| 114 | 100915 | 101205 | 1988463 | 1988173 | 1457 |
| 115 | 101224 | 101733 | 1988154 | 1987645 | 1456 |
| 116 | 101796 | 102347 | 1987582 | 1987031 | 749 |
| 117 | 102393 | 102563 | 1986985 | 1986815 | 750 |
| 118 | 102986 | 103432 | 1986392 | 1985946 | 2148 |
| 119 | 103476 | 104318 | 1985902 | 1985060 | 751 |
| 120 | 104398 | 106101 | 1984980 | 1983277 | 30 |
| 121 | 106210 | 106779 | 1983168 | 1982599 | 31 |
| 122 | 106834 | 107454 | 1982544 | 1981924 | 32 |
| 123 | 107637 | 108455 | 1981741 | 1980923 | 752 |
| 124 | 108482 | 109099 | 1980896 | 1980279 | 2147 |
| 125 | 109092 | 111035 | 1980286 | 1978343 | 1827 |
| 126 | 111643 | 113019 | 1977735 | 1976359 | 1455 |
| 127 | 113205 | 114563 | 1976173 | 1974815 | 753 |
| 128 | 114668 | 115351 | 1974710 | 1974027 | 373 |
| 129 | 115397 | 116401 | 1973981 | 1972977 | 374 |
| 130 | 116482 | 116634 | 1972896 | 1972744 | 1454 |
| 131 | 116676 | 117494 | 1972702 | 1971884 | 1826 |
| 132 | 117475 | 118242 | 1971903 | 1971136 | 1453 |
| 133 | 118178 | 118711 | 1971200 | 1970667 | 2146 |
| 134 | 119061 | 119939 | 1970317 | 1969439 | 1825 |
| 135 | 119973 | 120485 | 1969405 | 1968893 | 754 |
| 136 | 120479 | 120952 | 1968899 | 1968426 | 2145 |
| 137 | 121121 | 121192 | 1968257 | 1968186 | 2144 |
| 138 | 121404 | 121856 | 1967974 | 1967522 | 755 |
| 139 | 122007 | 122438 | 1967371 | 1966940 | 756 |
| 140 | 122431 | 122667 | 1966947 | 1966711 | 33 |
| 141 | 122668 | 123594 | 1966710 | 1965784 | 34 |
| 142 | 123578 | 123868 | 1965800 | 1965510 | 2143 |
| 143 | 123932 | 126157 | 1965446 | 1963221 | 2142 |
| 144 | 126306 | 128561 | 1963072 | 1960817 | 757 |
| 145 | 128631 | 130013 | 1960747 | 1959365 | 1824 |
| 146 | 130150 | 131154 | 1959228 | 1958224 | 1452 |
| 147 | 131148 | 133049 | 1958230 | 1956329 | 1823 |
| 148 | 132745 | 133890 | 1956633 | 1955488 | 35 |
| 149 | 133885 | 134547 | 1955493 | 1954831 | 1451 |
| 150 | 134544 | 134834 | 1954834 | 1954544 | 1822 |
| 151 | 134978 | 135754 | 1954400 | 1953624 | 2141 |
| 152 | 137477 | 138172 | 1951901 | 1951206 | 2140 |
| 153 | 138521 | 138676 | 1950857 | 1950702 | 2139 |
| 154 | 139365 | 140972 | 1950013 | 1948406 | 758 |
| 155 | 141078 | 141311 | 1948300 | 1948067 | 759 |
| 156 | 141335 | 141856 | 1948043 | 1947522 | 375 |
| 157 | 141853 | 142707 | 1947525 | 1946671 | 1450 |
| 158 | 142732 | 143793 | 1946646 | 1945585 | 1449 |
| 159 | 143756 | 144931 | 1945622 | 1944447 | 2138 |
| 160 | 144924 | 145235 | 1944454 | 1944143 | 1821 |
| 161 | 145334 | 145951 | 1944044 | 1943427 | 376 |
| 162 | 146007 | 146603 | 1943371 | 1942775 | 1820 |
| 163 | 147207 | 149273 | 1942171 | 1940105 | 1819 |
| 164 | 149293 | 149697 | 1940085 | 1939681 | 1448 |
| 165 | 149699 | 150874 | 1939679 | 1938504 | 2137 |
| 166 | 150876 | 151928 | 1938502 | 1937450 | 1818 |
| 167 | 152076 | 152471 | 1937302 | 1936907 | 760 |
| 168 | 152417 | 152743 | 1936961 | 1936635 | 377 |
| 169 | 152801 | 153490 | 1936577 | 1935888 | 2136 |
| 170 | 153487 | 154752 | 1935891 | 1934626 | 1447 |
| 171 | 154844 | 155881 | 1934534 | 1933497 | 2135 |
| 172 | 156044 | 157309 | 1933334 | 1932069 | 378 |
| 173 | 157368 | 158228 | 1932010 | 1931150 | 761 |
| 174 | 158158 | 159018 | 1931220 | 1930360 | 1446 |
| 175 | 158982 | 159464 | 1930396 | 1929914 | 762 |
| 176 | 159517 | 160083 | 1929861 | 1929295 | 1445 |
| 177 | 160206 | 160256 | 1929172 | 1929122 | 763 |
| 178 | 160526 | 160744 | 1928852 | 1928634 | 2134 |
| 179 | 160787 | 161719 | 1928591 | 1927659 | 2133 |
| 180 | 161795 | 163255 | 1927583 | 1926123 | 2132 |
| 181 | 163362 | 164405 | 1926016 | 1924973 | 764 |
| 182 | 164398 | 165393 | 1924980 | 1923985 | 1444 |
| 183 | 165390 | 167531 | 1923988 | 1921847 | 1817 |
| 184 | 168881 | 170377 | 1920497 | 1919001 | 2131 |
| 185 | 170457 | 171128 | 1918921 | 1918250 | 1816 |
| 186 | 171130 | 171381 | 1918248 | 1917997 | 1443 |
| 187 | 171383 | 172534 | 1917995 | 1916844 | 2130 |
| 188 | 172527 | 173834 | 1916851 | 1915544 | 1815 |
| 189 | 173896 | 173985 | 1915482 | 1915393 | 1442 |
| 190 | 174404 | 174601 | 1914974 | 1914777 | 379 |
| 191 | 174585 | 175349 | 1914793 | 1914029 | 765 |
| 192 | 175740 | 177038 | 1913638 | 1912340 | 1814 |
| 193 | 177138 | 178151 | 1912240 | 1911227 | 766 |
| 194 | 178184 | 178348 | 1911194 | 1911030 | 380 |
| 195 | 178320 | 179039 | 1911058 | 1910339 | 1813 |
| 196 | 179195 | 180553 | 1910183 | 1908825 | 381 |
| 197 | 180543 | 181031 | 1908835 | 1908347 | 1812 |
| 198 | 181028 | 181288 | 1908350 | 1908090 | 2129 |
| 199 | 181345 | 183324 | 1908033 | 1906054 | 1441 |
| 200 | 183436 | 184935 | 1905942 | 1904443 | 1440 |
| 201 | 185362 | 185955 | 1904016 | 1903423 | 1439 |
| 202 | 185988 | 187004 | 1903390 | 1902374 | 1811 |
| 203 | 187111 | 187953 | 1902267 | 1901425 | 1438 |
| 204 | 188074 | 189315 | 1901304 | 1900063 | 36 |
| 205 | 189865 | 190278 | 1899513 | 1899100 | 37 |
| 206 | 190253 | 190621 | 1899125 | 1898757 | 382 |
| 207 | 190630 | 191799 | 1898748 | 1897579 | 1437 |
| 208 | 191874 | 192509 | 1897504 | 1896869 | 767 |
| 209 | 192535 | 192981 | 1896843 | 1896397 | 38 |
| 210 | 192971 | 193486 | 1896407 | 1895892 | 383 |
| 211 | 193701 | 194033 | 1895677 | 1895345 | 1810 |
| 212 | 194152 | 194358 | 1895226 | 1895020 | 1436 |
| 213 | 195097 | 195405 | 1894281 | 1893973 | 39 |
| 214 | 195742 | 195846 | 1893636 | 1893532 | 1435 |
| 215 | 195995 | 196111 | 1893383 | 1893267 | 384 |
| 216 | 196138 | 196959 | 1893240 | 1892419 | 1434 |
| 217 | 197032 | 197625 | 1892346 | 1891753 | 1433 |
| 218 | 197747 | 198367 | 1891631 | 1891011 | 385 |
| 219 | 198495 | 199754 | 1890883 | 1889624 | 1809 |
| 220 | 199748 | 200686 | 1889630 | 1888692 | 2128 |
| 221 | 200742 | 201098 | 1888636 | 1888280 | 768 |
| 222 | 201067 | 201738 | 1888311 | 1887640 | 40 |
| 223 | 201692 | 202102 | 1887686 | 1887276 | 386 |
| 224 | 202103 | 202924 | 1887275 | 1886454 | 387 |
| 225 | 202929 | 203372 | 1886449 | 1886006 | 769 |
| 226 | 203585 | 204475 | 1885793 | 1884903 | 388 |
| 227 | 204472 | 205083 | 1884906 | 1884295 | 41 |
| 228 | 205070 | 206200 | 1884308 | 1883178 | 389 |
| 229 | 206280 | 206813 | 1883098 | 1882565 | 770 |
| 230 | 206810 | 207397 | 1882568 | 1881981 | 390 |
| 231 | 207399 | 208100 | 1881979 | 1881278 | 771 |
| 232 | 208082 | 208840 | 1881296 | 1880538 | 391 |
| 233 | 208850 | 209479 | 1880528 | 1879899 | 392 |
| 234 | 209476 | 210486 | 1879902 | 1878892 | 42 |
| 235 | 210470 | 211198 | 1878908 | 1878180 | 393 |
| 236 | 211296 | 211982 | 1878082 | 1877396 | 772 |
| 237 | 211979 | 212956 | 1877399 | 1876422 | 394 |
| 238 | 212938 | 214239 | 1876440 | 1875139 | 43 |
| 239 | 214236 | 214814 | 1875142 | 1874564 | 773 |
| 240 | 214807 | 215433 | 1874571 | 1873945 | 44 |
| 241 | 215426 | 216595 | 1873952 | 1872783 | 395 |
| 242 | 216588 | 217343 | 1872790 | 1872035 | 774 |
| 243 | 217325 | 218095 | 1872053 | 1871283 | 2127 |
| 244 | 218020 | 219114 | 1871358 | 1870264 | 1432 |
| 245 | 219077 | 219253 | 1870301 | 1870125 | 2126 |
| 246 | 219407 | 220474 | 1869971 | 1868904 | 2125 |
| 247 | 220471 | 221718 | 1868907 | 1867660 | 1431 |
| 248 | 221676 | 222236 | 1867702 | 1867142 | 1808 |
| 249 | 222472 | 222852 | 1866906 | 1866526 | 1430 |
| 250 | 222879 | 223259 | 1866499 | 1866119 | 1807 |
| 251 | 223282 | 223923 | 1866096 | 1865455 | 1429 |
| 252 | 223877 | 225022 | 1865501 | 1864356 | 2124 |
| 253 | 224890 | 225804 | 1864488 | 1863574 | 1428 |
| 254 | 225801 | 226844 | 1863577 | 1862534 | 1806 |
| 255 | 226718 | 227377 | 1862660 | 1862001 | 2123 |
| 256 | 227370 | 227741 | 1862008 | 1861637 | 1805 |
| 257 | 227931 | 228242 | 1861447 | 1861136 | 775 |
| 258 | 228257 | 228718 | 1861121 | 1860660 | 396 |
| 259 | 228710 | 229147 | 1860668 | 1860231 | 2122 |
| 260 | 229347 | 229745 | 1860031 | 1859633 | 1804 |
| 261 | 229732 | 230820 | 1859646 | 1858558 | 1427 |
| 262 | 230826 | 231581 | 1858552 | 1857797 | 1803 |
| 263 | 231591 | 232583 | 1857787 | 1856795 | 1802 |
| 264 | 232580 | 233410 | 1856798 | 1855968 | 2121 |
| 265 | 233428 | 233589 | 1855950 | 1855789 | 1426 |
| 266 | 233684 | 234727 | 1855694 | 1854651 | 2120 |
| 267 | 234715 | 235206 | 1854663 | 1854172 | 1425 |
| 268 | 235203 | 236345 | 1854175 | 1853033 | 1801 |
| 269 | 236342 | 237427 | 1853036 | 1851951 | 2119 |
| 270 | 237653 | 238216 | 1851725 | 1851162 | 2118 |
| 271 | 238509 | 239528 | 1850869 | 1849850 | 776 |
| 272 | 239489 | 239686 | 1849889 | 1849692 | 397 |
| 273 | 239677 | 240426 | 1849701 | 1848952 | 1424 |
| 274 | 240560 | 243028 | 1848818 | 1846350 | 398 |
| 275 | 243977 | 244525 | 1845401 | 1844853 | 399 |
| 276 | 244591 | 245055 | 1844787 | 1844323 | 45 |
| 277 | 245052 | 245747 | 1844326 | 1843631 | 777 |
| 278 | 245738 | 246229 | 1843640 | 1843149 | 2117 |
| 279 | 246239 | 246340 | 1843139 | 1843038 | 2116 |
| 280 | 247226 | 248134 | 1842152 | 1841244 | 2115 |
| 281 | 248197 | 249606 | 1841181 | 1839772 | 1423 |
| 282 | 251161 | 251265 | 1838217 | 1838113 | 46 |
| 283 | 251394 | 251477 | 1837984 | 1837901 | 778 |
| 284 | 251557 | 251760 | 1837821 | 1837618 | 47 |
| 285 | 254653 | 255162 | 1834725 | 1834216 | 1422 |
| 286 | 255227 | 256987 | 1834151 | 1832391 | 2114 |
| 287 | 257124 | 258452 | 1832254 | 1830926 | 1800 |
| 288 | 258556 | 259233 | 1830822 | 1830145 | 1421 |
| 289 | 260703 | 261923 | 1828675 | 1827455 | 779 |
| 290 | 262176 | 262484 | 1827202 | 1826894 | 1799 |
| 291 | 262544 | 263830 | 1826834 | 1825548 | 2113 |
| 292 | 264065 | 265165 | 1825313 | 1824213 | 2112 |
| 293 | 264895 | 266262 | 1824483 | 1823116 | 1420 |
| 294 | 266696 | 266977 | 1822682 | 1822401 | 2111 |
| 295 | 267002 | 268075 | 1822376 | 1821303 | 2110 |
| 296 | 268109 | 269197 | 1821269 | 1820181 | 2109 |
| 297 | 269297 | 270064 | 1820081 | 1819314 | 400 |
| 298 | 270052 | 270306 | 1819326 | 1819072 | 48 |
| 299 | 270301 | 271278 | 1819077 | 1818100 | 1419 |
| 300 | 271361 | 272119 | 1818017 | 1817259 | 401 |
| 301 | 272121 | 272429 | 1817257 | 1816949 | 780 |
| 302 | 272525 | 274057 | 1816853 | 1815321 | 2108 |
| 303 | 274244 | 274963 | 1815134 | 1814415 | 402 |
| 304 | 275340 | 275564 | 1814038 | 1813814 | 781 |
| 305 | 276688 | 277758 | 1812690 | 1811620 | 49 |
| 306 | 277759 | 278526 | 1811619 | 1810852 | 50 |
| 307 | 278454 | 278981 | 1810924 | 1810397 | 782 |
| 308 | 278969 | 279736 | 1810409 | 1809642 | 403 |
| 309 | 279859 | 280521 | 1809519 | 1808857 | 1418 |
| 310 | 280629 | 281072 | 1808749 | 1808306 | 783 |
| 311 | 281104 | 282072 | 1808274 | 1807306 | 51 |
| 312 | 282069 | 282467 | 1807309 | 1806911 | 784 |
| 313 | 282544 | 283272 | 1806834 | 1806106 | 1417 |
| 314 | 283421 | 284416 | 1805957 | 1804962 | 2107 |
| 315 | 284413 | 285099 | 1804965 | 1804279 | 1416 |
| 316 | 285104 | 285292 | 1804274 | 1804086 | 2106 |
| 317 | 285716 | 286492 | 1803662 | 1802886 | 2105 |
| 318 | 286543 | 287079 | 1802835 | 1802299 | 52 |
| 319 | 287046 | 287645 | 1802332 | 1801733 | 1798 |
| 320 | 287758 | 288153 | 1801620 | 1801225 | 1415 |
| 321 | 288150 | 288437 | 1801228 | 1800941 | 1797 |
| 322 | 288505 | 289047 | 1800873 | 1800331 | 1414 |
| 323 | 289173 | 289493 | 1800205 | 1799885 | 1796 |
| 324 | 289490 | 289948 | 1799888 | 1799430 | 2104 |
| 325 | 290136 | 291029 | 1799242 | 1798349 | 1795 |
| 326 | 290939 | 291157 | 1798439 | 1798221 | 2103 |
| 327 | 291353 | 292696 | 1798025 | 1796682 | 404 |
| 328 | 292703 | 293509 | 1796675 | 1795869 | 405 |
| 329 | 293510 | 293593 | 1795868 | 1795785 | 2102 |
| 330 | 293627 | 294415 | 1795751 | 1794963 | 406 |
| 331 | 294346 | 294663 | 1795032 | 1794715 | 53 |
| 332 | 294750 | 295001 | 1794628 | 1794377 | 785 |
| 333 | 295115 | 296626 | 1794263 | 1792752 | 407 |
| 334 | 296627 | 297139 | 1792751 | 1792239 | 2101 |
| 335 | 297204 | 297731 | 1792174 | 1791647 | 1794 |
| 336 | 297773 | 298702 | 1791605 | 1790676 | 408 |
| 337 | 298699 | 300825 | 1790679 | 1788553 | 54 |
| 338 | 300795 | 301748 | 1788583 | 1787630 | 786 |
| 339 | 301803 | 303251 | 1787575 | 1786127 | 1793 |
| 340 | 303305 | 303766 | 1786073 | 1785612 | 2100 |
| 341 | 303750 | 304688 | 1785628 | 1784690 | 1792 |
| 342 | 304698 | 305126 | 1784680 | 1784252 | 1791 |
| 343 | 305339 | 306193 | 1784039 | 1783185 | 409 |
| 344 | 306190 | 306858 | 1783188 | 1782520 | 55 |
| 345 | 307473 | 307700 | 1781905 | 1781678 | 787 |
| 346 | 308311 | 308886 | 1781067 | 1780492 | 1413 |
| 347 | 308930 | 309406 | 1780448 | 1779972 | 2099 |
| 348 | 309492 | 310637 | 1779886 | 1778741 | 1790 |
| 349 | 310642 | 311016 | 1778736 | 1778362 | 1412 |
| 350 | 311017 | 311625 | 1778361 | 1777753 | 1411 |
| 351 | 312108 | 312536 | 1777270 | 1776842 | 1789 |
| 352 | 312637 | 312903 | 1776741 | 1776475 | 56 |
| 353 | 312953 | 313306 | 1776425 | 1776072 | 410 |
| 354 | 313344 | 314120 | 1776034 | 1775258 | 788 |
| 355 | 314205 | 314447 | 1775173 | 1774931 | 789 |
| 356 | 314429 | 315589 | 1774949 | 1773789 | 411 |
| 357 | 315618 | 316058 | 1773760 | 1773320 | 1788 |
| 358 | 316245 | 316973 | 1773133 | 1772405 | 1787 |
| 359 | 317124 | 318272 | 1772254 | 1771106 | 790 |
| 360 | 318265 | 319239 | 1771113 | 1770139 | 1410 |
| 361 | 319807 | 319851 | 1769571 | 1769527 | 1409 |
| 362 | 320239 | 320928 | 1769139 | 1768450 | 57 |
| 363 | 321374 | 321511 | 1768004 | 1767867 | 412 |
| 364 | 321508 | 321696 | 1767870 | 1767682 | 58 |
| 365 | 322012 | 322365 | 1767366 | 1767013 | 59 |
| 366 | 322265 | 324256 | 1767113 | 1765122 | 413 |
| 367 | 324261 | 326399 | 1765117 | 1762979 | 791 |
| 368 | 326552 | 326935 | 1762826 | 1762443 | 414 |
| 369 | 327013 | 327282 | 1762365 | 1762096 | 60 |
| 370 | 327284 | 327514 | 1762094 | 1761864 | 415 |
| 371 | 327518 | 328321 | 1761860 | 1761057 | 416 |
| 372 | 328333 | 328815 | 1761045 | 1760563 | 61 |
| 373 | 328812 | 329288 | 1760566 | 1760090 | 792 |
| 374 | 329290 | 330090 | 1760088 | 1759288 | 62 |
| 375 | 330224 | 331687 | 1759154 | 1757691 | 417 |
| 376 | 331691 | 332452 | 1757687 | 1756926 | 418 |
| 377 | 332449 | 332736 | 1756929 | 1756642 | 63 |
| 378 | 334175 | 334945 | 1755203 | 1754433 | 419 |
| 379 | 335068 | 335664 | 1754310 | 1753714 | 64 |
| 380 | 337045 | 337260 | 1752333 | 1752118 | 65 |
| 381 | 337711 | 338295 | 1751667 | 1751083 | 1408 |
| 382 | 339363 | 339788 | 1750015 | 1749590 | 793 |
| 383 | 340641 | 340727 | 1748737 | 1748651 | 794 |
| 384 | 341558 | 341995 | 1747820 | 1747383 | 420 |
| 385 | 342397 | 343461 | 1746981 | 1745917 | 66 |
| 386 | 343454 | 343891 | 1745924 | 1745487 | 421 |
| 387 | 343888 | 344076 | 1745490 | 1745302 | 67 |
| 388 | 344090 | 344401 | 1745288 | 1744977 | 422 |
| 389 | 345281 | 345472 | 1744097 | 1743906 | 423 |
| 390 | 345566 | 345622 | 1743812 | 1743756 | 2098 |
| 391 | 345615 | 345740 | 1743763 | 1743638 | 795 |
| 392 | 346174 | 346356 | 1743204 | 1743022 | 68 |
| 393 | 346528 | 346881 | 1742850 | 1742497 | 69 |
| 394 | 346606 | 346668 | 1742772 | 1742710 | 1407 |
| 395 | 347138 | 348463 | 1742240 | 1740915 | 424 |
| 396 | 348567 | 350417 | 1740811 | 1738961 | 1786 |
| 397 | 350537 | 351598 | 1738841 | 1737780 | 425 |
| 398 | 351592 | 352155 | 1737786 | 1737223 | 70 |
| 399 | 352419 | 352985 | 1736959 | 1736393 | 796 |
| 400 | 353923 | 354102 | 1735455 | 1735276 | 71 |
| 401 | 354174 | 355334 | 1735204 | 1734044 | 797 |
| 402 | 355393 | 355872 | 1733985 | 1733506 | 72 |
| 403 | 355856 | 356452 | 1733522 | 1732926 | 2097 |
| 404 | 356449 | 357381 | 1732929 | 1731997 | 1406 |
| 405 | 357378 | 358037 | 1732000 | 1731341 | 1785 |
| 406 | 358034 | 359329 | 1731344 | 1730049 | 2096 |
| 407 | 359407 | 360171 | 1729971 | 1729207 | 73 |
| 408 | 360168 | 361466 | 1729210 | 1727912 | 798 |
| 409 | 361497 | 363407 | 1727881 | 1725971 | 799 |
| 410 | 366699 | 367151 | 1722679 | 1722227 | 1784 |
| 411 | 367290 | 368240 | 1722088 | 1721138 | 1783 |
| 412 | 368237 | 369289 | 1721141 | 1720089 | 2095 |
| 413 | 370634 | 371449 | 1718744 | 1717929 | 426 |
| 414 | 371481 | 372920 | 1717897 | 1716458 | 800 |
| 415 | 374488 | 374550 | 1714890 | 1714828 | 74 |
| 416 | 374583 | 374840 | 1714795 | 1714538 | 801 |
| 417 | 374833 | 375534 | 1714545 | 1713844 | 1405 |
| 418 | 375535 | 376308 | 1713843 | 1713070 | 1404 |
| 419 | 376000 | 376092 | 1713378 | 1713286 | 75 |
| 420 | 376298 | 376771 | 1713080 | 1712607 | 2094 |
| 421 | 379177 | 380310 | 1710201 | 1709068 | 1403 |
| 422 | 380366 | 381109 | 1709012 | 1708269 | 2093 |
| 423 | 381111 | 382313 | 1708267 | 1707065 | 1782 |
| 424 | 382310 | 382675 | 1707068 | 1706703 | 2092 |
| 425 | 382850 | 383839 | 1706528 | 1705539 | 2091 |
| 426 | 384244 | 384471 | 1705134 | 1704907 | 1402 |
| 427 | 384528 | 385040 | 1704850 | 1704338 | 1781 |
| 428 | 385030 | 386139 | 1704348 | 1703239 | 1401 |
| 429 | 389056 | 390132 | 1700322 | 1699246 | 1400 |
| 430 | 390129 | 391328 | 1699249 | 1698050 | 1780 |
| 431 | 391570 | 392187 | 1697808 | 1697191 | 1399 |
| 432 | 392614 | 393321 | 1696764 | 1696057 | 1398 |
| 433 | 393449 | 394750 | 1695929 | 1694628 | 427 |
| 434 | 394894 | 398109 | 1694484 | 1691269 | 76 |
| 435 | 398178 | 398471 | 1691200 | 1690907 | 1779 |
| 436 | 398502 | 399011 | 1690876 | 1690367 | 802 |
| 437 | 399050 | 404185 | 1690328 | 1685193 | 428 |
| 438 | 404484 | 405290 | 1684894 | 1684088 | 803 |
| 439 | 405419 | 405631 | 1683959 | 1683747 | 2090 |
| 440 | 405628 | 405963 | 1683750 | 1683415 | 1397 |
| 441 | 405960 | 406709 | 1683418 | 1682669 | 1778 |
| 442 | 406835 | 408055 | 1682543 | 1681323 | 429 |
| 443 | 408052 | 408807 | 1681326 | 1680571 | 77 |
| 444 | 408809 | 409462 | 1680569 | 1679916 | 430 |
| 445 | 409459 | 409647 | 1679919 | 1679731 | 78 |
| 446 | 409647 | 410459 | 1679731 | 1678919 | 804 |
| 447 | 410460 | 411080 | 1678918 | 1678298 | 805 |
| 448 | 411176 | 411688 | 1678202 | 1677690 | 431 |
| 449 | 411878 | 413293 | 1677500 | 1676085 | 432 |
| 450 | 413415 | 413915 | 1675963 | 1675463 | 806 |
| 451 | 413926 | 414252 | 1675452 | 1675126 | 79 |
| 452 | 414877 | 415209 | 1674501 | 1674169 | 80 |
| 453 | 417109 | 417270 | 1672269 | 1672108 | 81 |
| 454 | 417291 | 417929 | 1672087 | 1671449 | 807 |
| 455 | 418636 | 419175 | 1670742 | 1670203 | 82 |
| 456 | 419247 | 420563 | 1670131 | 1668815 | 808 |
| 457 | 420627 | 422132 | 1668751 | 1667246 | 809 |
| 458 | 422333 | 422719 | 1667045 | 1666659 | 433 |
| 459 | 422876 | 424030 | 1666502 | 1665348 | 2089 |
| 460 | 426547 | 426711 | 1662831 | 1662667 | 83 |
| 461 | 426747 | 427742 | 1662631 | 1661636 | 810 |
| 462 | 427799 | 429064 | 1661579 | 1660314 | 434 |
| 463 | 429065 | 430390 | 1660313 | 1658988 | 2088 |
| 464 | 430394 | 430633 | 1658984 | 1658745 | 2087 |
| 465 | 430618 | 430785 | 1658760 | 1658593 | 1396 |
| 466 | 430883 | 432259 | 1658495 | 1657119 | 2086 |
| 467 | 432397 | 432738 | 1656981 | 1656640 | 84 |
| 468 | 432751 | 433449 | 1656627 | 1655929 | 85 |
| 469 | 433446 | 434621 | 1655932 | 1654757 | 1777 |
| 470 | 434530 | 435735 | 1654848 | 1653643 | 86 |
| 471 | 435779 | 436300 | 1653599 | 1653078 | 2085 |
| 472 | 436300 | 436812 | 1653078 | 1652566 | 1395 |
| 473 | 437409 | 438209 | 1651969 | 1651169 | 811 |
| 474 | 438222 | 439658 | 1651156 | 1649720 | 1776 |
| 475 | 439696 | 440403 | 1649682 | 1648975 | 1394 |
| 476 | 440578 | 441444 | 1648800 | 1647934 | 87 |
| 477 | 441511 | 441882 | 1647867 | 1647496 | 88 |
| 478 | 441887 | 442267 | 1647491 | 1647111 | 435 |
| 479 | 442358 | 442873 | 1647020 | 1646505 | 436 |
| 480 | 442922 | 444142 | 1646456 | 1645236 | 437 |
| 481 | 444220 | 444681 | 1645158 | 1644697 | 89 |
| 482 | 444972 | 445310 | 1644406 | 1644068 | 812 |
| 483 | 446197 | 448899 | 1643181 | 1640479 | 1393 |
| 484 | 448945 | 450294 | 1640433 | 1639084 | 1392 |
| 485 | 450481 | 450996 | 1638897 | 1638382 | 90 |
| 486 | 451077 | 451238 | 1638301 | 1638140 | 813 |
| 487 | 451250 | 451597 | 1638128 | 1637781 | 438 |
| 488 | 452770 | 453123 | 1636608 | 1636255 | 91 |
| 489 | 453183 | 454601 | 1636195 | 1634777 | 814 |
| 490 | 454835 | 455341 | 1634543 | 1634037 | 439 |
| 491 | 455338 | 455502 | 1634040 | 1633876 | 92 |
| 492 | 456330 | 456662 | 1633048 | 1632716 | 815 |
| 493 | 456623 | 456835 | 1632755 | 1632543 | 440 |
| 494 | 456838 | 457587 | 1632540 | 1631791 | 93 |
| 495 | 457618 | 458184 | 1631760 | 1631194 | 94 |
| 496 | 458476 | 459126 | 1630902 | 1630252 | 95 |
| 497 | 459138 | 459680 | 1630240 | 1629698 | 1775 |
| 498 | 459718 | 460674 | 1629660 | 1628704 | 96 |
| 499 | 460667 | 461935 | 1628711 | 1627443 | 2084 |
| 500 | 462618 | 463808 | 1626760 | 1625570 | 1774 |
| 501 | 464266 | 464421 | 1625112 | 1624957 | 1391 |
| 502 | 464460 | 464972 | 1624918 | 1624406 | 1773 |
| 503 | 465336 | 466562 | 1624042 | 1622816 | 816 |
| 504 | 466632 | 466847 | 1622746 | 1622531 | 1772 |
| 505 | 466975 | 467631 | 1622403 | 1621747 | 97 |
| 506 | 467628 | 468806 | 1621750 | 1620572 | 1771 |
| 507 | 471018 | 472637 | 1618360 | 1616741 | 1770 |
| 508 | 472691 | 474145 | 1616687 | 1615233 | 2083 |
| 509 | 474239 | 475240 | 1615139 | 1614138 | 441 |
| 510 | 475250 | 475708 | 1614128 | 1613670 | 442 |
| 511 | 475702 | 477042 | 1613676 | 1612336 | 98 |
| 512 | 477049 | 477657 | 1612329 | 1611721 | 99 |
| 513 | 477738 | 478031 | 1611640 | 1611347 | 817 |
| 514 | 477971 | 479050 | 1611407 | 1610328 | 2082 |
| 515 | 478881 | 479639 | 1610497 | 1609739 | 818 |
| 516 | 479629 | 480162 | 1609749 | 1609216 | 1390 |
| 517 | 480198 | 480755 | 1609180 | 1608623 | 1769 |
| 518 | 480843 | 481127 | 1608535 | 1608251 | 1768 |
| 519 | 481315 | 482679 | 1608063 | 1606699 | 100 |
| 520 | 484981 | 485445 | 1604397 | 1603933 | 101 |
| 521 | 485442 | 486008 | 1603936 | 1603370 | 1767 |
| 522 | 486065 | 486484 | 1603313 | 1602894 | 443 |
| 523 | 486481 | 488979 | 1602897 | 1600399 | 1389 |
| 524 | 489517 | 490644 | 1599861 | 1598734 | 1388 |
| 525 | 490744 | 491844 | 1598634 | 1597534 | 102 |
| 526 | 491922 | 493376 | 1597456 | 1596002 | 819 |
| 527 | 493561 | 495408 | 1595817 | 1593970 | 103 |
| 528 | 495410 | 496480 | 1593968 | 1592898 | 444 |
| 529 | 497090 | 499186 | 1592288 | 1590192 | 445 |
| 530 | 499596 | 499949 | 1589782 | 1589429 | 1766 |
| 531 | 500938 | 501252 | 1588440 | 1588126 | 1387 |
| 532 | 501249 | 501479 | 1588129 | 1587899 | 1765 |
| 533 | 501658 | 502464 | 1587720 | 1586914 | 1386 |
| 534 | 502547 | 502792 | 1586831 | 1586586 | 2081 |
| 535 | 502785 | 502967 | 1586593 | 1586411 | 1764 |
| 536 | 503187 | 503354 | 1586191 | 1586024 | 820 |
| 537 | 504971 | 505099 | 1584407 | 1584279 | 446 |
| 538 | 506242 | 506664 | 1583136 | 1582714 | 1385 |
| 539 | 507506 | 507592 | 1581872 | 1581786 | 447 |
| 540 | 508803 | 509420 | 1580575 | 1579958 | 1763 |
| 541 | 510163 | 510879 | 1579215 | 1578499 | 1384 |
| 542 | 511923 | 512477 | 1577455 | 1576901 | 1762 |
| 543 | 513104 | 513481 | 1576274 | 1575897 | 448 |
| 544 | 513710 | 514261 | 1575668 | 1575117 | 2080 |
| 545 | 514843 | 515223 | 1574535 | 1574155 | 1383 |
| 546 | 515543 | 515791 | 1573835 | 1573587 | 2079 |
| 547 | 517003 | 517803 | 1572375 | 1571575 | 1382 |
| 548 | 517805 | 518281 | 1571573 | 1571097 | 2078 |
| 549 | 518278 | 518760 | 1571100 | 1570618 | 1381 |
| 550 | 518772 | 519575 | 1570606 | 1569803 | 1761 |
| 551 | 519579 | 519809 | 1569799 | 1569569 | 1760 |
| 552 | 520158 | 520541 | 1569220 | 1568837 | 1759 |
| 553 | 520694 | 522628 | 1568684 | 1566750 | 2077 |
| 554 | 522837 | 524828 | 1566541 | 1564550 | 1758 |
| 555 | 524728 | 525042 | 1564650 | 1564336 | 1380 |
| 556 | 525397 | 525585 | 1563981 | 1563793 | 1379 |
| 557 | 525884 | 526483 | 1563494 | 1562895 | 2076 |
| 558 | 527199 | 527468 | 1562179 | 1561910 | 821 |
| 559 | 527689 | 528324 | 1561689 | 1561054 | 104 |
| 560 | 528364 | 528969 | 1561014 | 1560409 | 105 |
| 561 | 528984 | 529217 | 1560394 | 1560161 | 822 |
| 562 | 529214 | 529528 | 1560164 | 1559850 | 449 |
| 563 | 529509 | 529739 | 1559869 | 1559639 | 823 |
| 564 | 529736 | 529981 | 1559642 | 1559397 | 450 |
| 565 | 529978 | 530385 | 1559400 | 1558993 | 106 |
| 566 | 530659 | 532146 | 1558719 | 1557232 | 107 |
| 567 | 532123 | 532530 | 1557255 | 1556848 | 1378 |
| 568 | 532615 | 533754 | 1556763 | 1555624 | 108 |
| 569 | 533789 | 534916 | 1555589 | 1554462 | 451 |
| 570 | 534917 | 535363 | 1554461 | 1554015 | 2075 |
| 571 | 535366 | 536694 | 1554012 | 1552684 | 1377 |
| 572 | 536818 | 536871 | 1552560 | 1552507 | 1376 |
| 573 | 536998 | 537846 | 1552380 | 1551532 | 109 |
| 574 | 537847 | 538209 | 1551531 | 1551169 | 110 |
| 575 | 538230 | 539297 | 1551148 | 1550081 | 824 |
| 576 | 539304 | 540950 | 1550074 | 1548428 | 825 |
| 577 | 540986 | 541681 | 1548392 | 1547697 | 452 |
| 578 | 541671 | 542294 | 1547707 | 1547084 | 826 |
| 579 | 542291 | 542914 | 1547087 | 1546464 | 453 |
| 580 | 542904 | 545159 | 1546474 | 1544219 | 827 |
| 581 | 545191 | 545688 | 1544187 | 1543690 | 111 |
| 582 | 545706 | 546455 | 1543672 | 1542923 | 828 |
| 583 | 546468 | 547502 | 1542910 | 1541876 | 829 |
| 584 | 547499 | 547759 | 1541879 | 1541619 | 454 |
| 585 | 547830 | 548183 | 1541548 | 1541195 | 830 |
| 586 | 548218 | 548553 | 1541160 | 1540825 | 112 |
| 587 | 548531 | 549514 | 1540847 | 1539864 | 455 |
| 588 | 549515 | 549850 | 1539863 | 1539528 | 456 |
| 589 | 550080 | 551150 | 1539298 | 1538228 | 831 |
| 590 | 551249 | 552460 | 1538129 | 1536918 | 457 |
| 591 | 552309 | 553043 | 1537069 | 1536335 | 832 |
| 592 | 553133 | 553699 | 1536245 | 1535679 | 458 |
| 593 | 553745 | 554734 | 1535633 | 1534644 | 2074 |
| 594 | 554855 | 555676 | 1534523 | 1533702 | 459 |
| 595 | 555783 | 556910 | 1533595 | 1532468 | 1757 |
| 596 | 556879 | 558105 | 1532499 | 1531273 | 1375 |
| 597 | 558125 | 558196 | 1531253 | 1531182 | 2073 |
| 598 | 558864 | 559322 | 1530514 | 1530056 | 1756 |
| 599 | 559506 | 560798 | 1529872 | 1528580 | 833 |
| 600 | 560838 | 562364 | 1528540 | 1527014 | 834 |
| 601 | 562361 | 563395 | 1527017 | 1525983 | 460 |
| 602 | 563371 | 564303 | 1526007 | 1525075 | 113 |
| 603 | 564310 | 565311 | 1525068 | 1524067 | 1374 |
| 604 | 565409 | 567541 | 1523969 | 1521837 | 461 |
| 605 | 567556 | 567786 | 1521822 | 1521592 | 1373 |
| 606 | 567865 | 568512 | 1521513 | 1520866 | 1372 |
| 607 | 568711 | 570129 | 1520667 | 1519249 | 114 |
| 608 | 570172 | 570729 | 1519206 | 1518649 | 1371 |
| 609 | 570898 | 570957 | 1518480 | 1518421 | 115 |
| 610 | 571031 | 571738 | 1518347 | 1517640 | 462 |
| 611 | 571735 | 572070 | 1517643 | 1517308 | 1370 |
| 612 | 572149 | 574656 | 1517229 | 1514722 | 1369 |
| 613 | 574653 | 575411 | 1514725 | 1513967 | 1755 |
| 614 | 575490 | 576503 | 1513888 | 1512875 | 1754 |
| 615 | 576540 | 577586 | 1512838 | 1511792 | 1753 |
| 616 | 577750 | 578565 | 1511628 | 1510813 | 116 |
| 617 | 578612 | 579025 | 1510766 | 1510353 | 463 |
| 618 | 579392 | 579454 | 1509986 | 1509924 | 464 |
| 619 | 580461 | 580553 | 1508917 | 1508825 | 1752 |
| 620 | 581070 | 581168 | 1508308 | 1508210 | 1751 |
| 621 | 582573 | 583445 | 1506805 | 1505933 | 1750 |
| 622 | 583582 | 585228 | 1505796 | 1504150 | 1368 |
| 623 | 585396 | 586382 | 1503982 | 1502996 | 835 |
| 624 | 587383 | 587667 | 1501995 | 1501711 | 1367 |
| 625 | 588220 | 589968 | 1501158 | 1499410 | 1366 |
| 626 | 590029 | 591039 | 1499349 | 1498339 | 1365 |
| 627 | 591078 | 592301 | 1498300 | 1497077 | 1749 |
| 628 | 592190 | 593191 | 1497188 | 1496187 | 465 |
| 629 | 593214 | 593957 | 1496164 | 1495421 | 836 |
| 630 | 593914 | 594495 | 1495464 | 1494883 | 117 |
| 631 | 594739 | 594795 | 1494639 | 1494583 | 1364 |
| 632 | 595329 | 595610 | 1494049 | 1493768 | 837 |
| 633 | 595427 | 597550 | 1493951 | 1491828 | 466 |
| 634 | 597520 | 597798 | 1491858 | 1491580 | 1363 |
| 635 | 598695 | 599399 | 1490683 | 1489979 | 1748 |
| 636 | 599396 | 600097 | 1489982 | 1489281 | 2072 |
| 637 | 600094 | 600945 | 1489284 | 1488433 | 1362 |
| 638 | 600958 | 600999 | 1488420 | 1488379 | 1361 |
| 639 | 601388 | 601828 | 1487990 | 1487550 | 467 |
| 640 | 601912 | 602571 | 1487466 | 1486807 | 1360 |
| 641 | 602643 | 603974 | 1486735 | 1485404 | 1747 |
| 642 | 603976 | 605406 | 1485402 | 1483972 | 1359 |
| 643 | 605506 | 605823 | 1483872 | 1483555 | 118 |
| 644 | 605856 | 606749 | 1483522 | 1482629 | 1746 |
| 645 | 606746 | 607678 | 1482632 | 1481700 | 2071 |
| 646 | 607678 | 608625 | 1481700 | 1480753 | 1358 |
| 647 | 608720 | 609349 | 1480658 | 1480029 | 468 |
| 648 | 609665 | 611200 | 1479713 | 1478178 | 469 |
| 649 | 611281 | 612924 | 1478097 | 1476454 | 119 |
| 650 | 612921 | 613868 | 1476457 | 1475510 | 838 |
| 651 | 613855 | 614616 | 1475523 | 1474762 | 120 |
| 652 | 614613 | 615374 | 1474765 | 1474004 | 839 |
| 653 | 615379 | 616116 | 1473999 | 1473262 | 121 |
| 654 | 616117 | 616626 | 1473261 | 1472752 | 1357 |
| 655 | 616713 | 617375 | 1472665 | 1472003 | 840 |
| 656 | 617430 | 618005 | 1471948 | 1471373 | 1745 |
| 657 | 617873 | 619891 | 1471505 | 1469487 | 2070 |
| 658 | 619888 | 620115 | 1469490 | 1469263 | 1356 |
| 659 | 620116 | 620346 | 1469262 | 1469032 | 1355 |
| 660 | 620526 | 621581 | 1468852 | 1467797 | 841 |
| 661 | 621554 | 622366 | 1467824 | 1467012 | 470 |
| 662 | 622338 | 623402 | 1467040 | 1465976 | 842 |
| 663 | 623814 | 624353 | 1465564 | 1465025 | 1744 |
| 664 | 624301 | 624510 | 1465077 | 1464868 | 1354 |
| 665 | 624735 | 625205 | 1464643 | 1464173 | 1743 |
| 666 | 625223 | 625891 | 1464155 | 1463487 | 471 |
| 667 | 625916 | 626170 | 1463462 | 1463208 | 472 |
| 668 | 626202 | 626936 | 1463176 | 1462442 | 1742 |
| 669 | 626909 | 627853 | 1462469 | 1461525 | 2069 |
| 670 | 627832 | 628989 | 1461546 | 1460389 | 1353 |
| 671 | 629061 | 629687 | 1460317 | 1459691 | 1741 |
| 672 | 629684 | 631024 | 1459694 | 1458354 | 2068 |
| 673 | 631021 | 631839 | 1458357 | 1457539 | 1352 |
| 674 | 631871 | 632350 | 1457507 | 1457028 | 473 |
| 675 | 632430 | 632630 | 1456948 | 1456748 | 843 |
| 676 | 632617 | 633099 | 1456761 | 1456279 | 122 |
| 677 | 633112 | 633933 | 1456266 | 1455445 | 123 |
| 678 | 633964 | 634764 | 1455414 | 1454614 | 124 |
| 679 | 634815 | 635330 | 1454563 | 1454048 | 1740 |
| 680 | 635934 | 636071 | 1453444 | 1453307 | 1739 |
| 681 | 637143 | 637451 | 1452235 | 1451927 | 844 |
| 682 | 637487 | 638062 | 1451891 | 1451316 | 474 |
| 683 | 638134 | 639000 | 1451244 | 1450378 | 1351 |
| 684 | 639553 | 639651 | 1449825 | 1449727 | 125 |
| 685 | 639626 | 640396 | 1449752 | 1448982 | 2067 |
| 686 | 640393 | 641181 | 1448985 | 1448197 | 1350 |
| 687 | 641204 | 641923 | 1448174 | 1447455 | 2066 |
| 688 | 641972 | 642490 | 1447406 | 1446888 | 475 |
| 689 | 642511 | 643098 | 1446867 | 1446280 | 1349 |
| 690 | 643209 | 643670 | 1446169 | 1445708 | 845 |
| 691 | 644598 | 646496 | 1444780 | 1442882 | 1738 |
| 692 | 647573 | 650017 | 1441805 | 1439361 | 476 |
| 693 | 650078 | 650584 | 1439300 | 1438794 | 477 |
| 694 | 650587 | 651087 | 1438791 | 1438291 | 126 |
| 695 | 651198 | 652340 | 1438180 | 1437038 | 846 |
| 696 | 652343 | 653548 | 1437035 | 1435830 | 2065 |
| 697 | 653784 | 655079 | 1435594 | 1434299 | 847 |
| 698 | 655937 | 657688 | 1433441 | 1431690 | 2064 |
| 699 | 657722 | 658642 | 1431656 | 1430736 | 2063 |
| 700 | 658773 | 659825 | 1430605 | 1429553 | 1737 |
| 701 | 659850 | 660155 | 1429528 | 1429223 | 1736 |
| 702 | 660246 | 664418 | 1429132 | 1424960 | 848 |
| 703 | 664498 | 665586 | 1424880 | 1423792 | 127 |
| 704 | 665627 | 665995 | 1423751 | 1423383 | 478 |
| 705 | 666332 | 666616 | 1423046 | 1422762 | 2062 |
| 706 | 666618 | 667169 | 1422760 | 1422209 | 1735 |
| 707 | 667123 | 667176 | 1422255 | 1422202 | 128 |
| 708 | 667218 | 667724 | 1422160 | 1421654 | 1734 |
| 709 | 667824 | 669488 | 1421554 | 1419890 | 849 |
| 710 | 669735 | 671918 | 1419643 | 1417460 | 850 |
| 711 | 673707 | 673985 | 1415671 | 1415393 | 851 |
| 712 | 674033 | 674911 | 1415345 | 1414467 | 479 |
| 713 | 674957 | 675970 | 1414421 | 1413408 | 480 |
| 714 | 676425 | 677294 | 1412953 | 1412084 | 852 |
| 715 | 677302 | 678150 | 1412076 | 1411228 | 1348 |
| 716 | 678143 | 679063 | 1411235 | 1410315 | 2061 |
| 717 | 679100 | 679813 | 1410278 | 1409565 | 2060 |
| 718 | 679850 | 679924 | 1409528 | 1409454 | 481 |
| 719 | 680156 | 680470 | 1409222 | 1408908 | 482 |
| 720 | 680606 | 681754 | 1408772 | 1407624 | 483 |
| 721 | 682401 | 682496 | 1406977 | 1406882 | 853 |
| 722 | 682446 | 682799 | 1406932 | 1406579 | 1733 |
| 723 | 682717 | 684711 | 1406661 | 1404667 | 129 |
| 724 | 684698 | 685174 | 1404680 | 1404204 | 2059 |
| 725 | 686253 | 686873 | 1403125 | 1402505 | 1732 |
| 726 | 686863 | 687633 | 1402515 | 1401745 | 1347 |
| 727 | 687638 | 688447 | 1401740 | 1400931 | 2058 |
| 728 | 688516 | 689571 | 1400862 | 1399807 | 130 |
| 729 | 689568 | 690029 | 1399810 | 1399349 | 854 |
| 730 | 690316 | 690513 | 1399062 | 1398865 | 1346 |
| 731 | 690550 | 691353 | 1398828 | 1398025 | 1345 |
| 732 | 691387 | 692820 | 1397991 | 1396558 | 1344 |
| 733 | 692817 | 694928 | 1396561 | 1394450 | 1731 |
| 734 | 694986 | 695405 | 1394392 | 1393973 | 1730 |
| 735 | 695410 | 696654 | 1393968 | 1392724 | 1343 |
| 736 | 696651 | 697808 | 1392727 | 1391570 | 1729 |
| 737 | 697801 | 699510 | 1391577 | 1389868 | 1342 |
| 738 | 699507 | 700274 | 1389871 | 1389104 | 1728 |
| 739 | 700228 | 701004 | 1389150 | 1388374 | 1341 |
| 740 | 701037 | 701399 | 1388341 | 1387979 | 1727 |
| 741 | 701550 | 702359 | 1387828 | 1387019 | 855 |
| 742 | 702356 | 703177 | 1387022 | 1386201 | 484 |
| 743 | 703152 | 703868 | 1386226 | 1385510 | 856 |
| 744 | 703837 | 705249 | 1385541 | 1384129 | 1340 |
| 745 | 705309 | 706460 | 1384069 | 1382918 | 857 |
| 746 | 706455 | 706655 | 1382923 | 1382723 | 1726 |
| 747 | 706739 | 708556 | 1382639 | 1380822 | 485 |
| 748 | 708558 | 711569 | 1380820 | 1377809 | 858 |
| 749 | 711859 | 712440 | 1377519 | 1376938 | 131 |
| 750 | 712445 | 713191 | 1376933 | 1376187 | 2057 |
| 751 | 713142 | 713633 | 1376236 | 1375745 | 859 |
| 752 | 713693 | 714955 | 1375685 | 1374423 | 2056 |
| 753 | 715024 | 715470 | 1374354 | 1373908 | 1339 |
| 754 | 715543 | 716427 | 1373835 | 1372951 | 1338 |
| 755 | 716424 | 718136 | 1372954 | 1371242 | 1725 |
| 756 | 718317 | 719339 | 1371061 | 1370039 | 860 |
| 757 | 719507 | 719788 | 1369871 | 1369590 | 486 |
| 758 | 719790 | 720593 | 1369588 | 1368785 | 1724 |
| 759 | 720689 | 721426 | 1368689 | 1367952 | 2055 |
| 760 | 721789 | 722304 | 1367589 | 1367074 | 132 |
| 761 | 722344 | 722481 | 1367034 | 1366897 | 1337 |
| 762 | 722592 | 723116 | 1366786 | 1366262 | 861 |
| 763 | 723142 | 724314 | 1366236 | 1365064 | 1336 |
| 764 | 724419 | 725573 | 1364959 | 1363805 | 1723 |
| 765 | 725704 | 726249 | 1363674 | 1363129 | 133 |
| 766 | 726458 | 726643 | 1362920 | 1362735 | 487 |
| 767 | 728745 | 728798 | 1360633 | 1360580 | 862 |
| 768 | 729082 | 729786 | 1360296 | 1359592 | 1335 |
| 769 | 729844 | 730989 | 1359534 | 1358389 | 134 |
| 770 | 730961 | 731485 | 1358417 | 1357893 | 488 |
| 771 | 731586 | 733985 | 1357792 | 1355393 | 863 |
| 772 | 734016 | 734336 | 1355362 | 1355042 | 864 |
| 773 | 734349 | 734939 | 1355029 | 1354439 | 1722 |
| 774 | 735215 | 735760 | 1354163 | 1353618 | 489 |
| 775 | 735762 | 735941 | 1353616 | 1353437 | 865 |
| 776 | 735965 | 737146 | 1353413 | 1352232 | 2054 |
| 777 | 737210 | 737683 | 1352168 | 1351695 | 490 |
| 778 | 737822 | 739696 | 1351556 | 1349682 | 2053 |
| 779 | 739687 | 740523 | 1349691 | 1348855 | 1334 |
| 780 | 740584 | 741294 | 1348794 | 1348084 | 135 |
| 781 | 741329 | 741541 | 1348049 | 1347837 | 491 |
| 782 | 741920 | 742084 | 1347458 | 1347294 | 492 |
| 783 | 742684 | 743376 | 1346694 | 1346002 | 136 |
| 784 | 743424 | 743609 | 1345954 | 1345769 | 866 |
| 785 | 743587 | 744603 | 1345791 | 1344775 | 1333 |
| 786 | 744560 | 745372 | 1344818 | 1344006 | 493 |
| 787 | 745369 | 746826 | 1344009 | 1342552 | 137 |
| 788 | 746823 | 747761 | 1342555 | 1341617 | 1721 |
| 789 | 747766 | 748353 | 1341612 | 1341025 | 1332 |
| 790 | 748338 | 749033 | 1341040 | 1340345 | 1720 |
| 791 | 749030 | 749443 | 1340348 | 1339935 | 2052 |
| 792 | 749440 | 749877 | 1339938 | 1339501 | 1331 |
| 793 | 750208 | 750714 | 1339170 | 1338664 | 1330 |
| 794 | 751954 | 752967 | 1337424 | 1336411 | 138 |
| 795 | 753046 | 754110 | 1336332 | 1335268 | 139 |
| 796 | 754166 | 755410 | 1335212 | 1333968 | 2051 |
| 797 | 755496 | 756431 | 1333882 | 1332947 | 867 |
| 798 | 756477 | 756968 | 1332901 | 1332410 | 868 |
| 799 | 756958 | 757629 | 1332420 | 1331749 | 1329 |
| 800 | 757712 | 758458 | 1331666 | 1330920 | 2050 |
| 801 | 758689 | 759645 | 1330689 | 1329733 | 140 |
| 802 | 759762 | 760691 | 1329616 | 1328687 | 869 |
| 803 | 760688 | 761674 | 1328690 | 1327704 | 2049 |
| 804 | 762327 | 763418 | 1327051 | 1325960 | 870 |
| 805 | 763396 | 764058 | 1325982 | 1325320 | 141 |
| 806 | 765200 | 765316 | 1324178 | 1324062 | 2048 |
| 807 | 765637 | 766047 | 1323741 | 1323331 | 142 |
| 808 | 766138 | 766683 | 1323240 | 1322695 | 143 |
| 809 | 766685 | 767974 | 1322693 | 1321404 | 494 |
| 810 | 767976 | 768434 | 1321402 | 1320944 | 871 |
| 811 | 768477 | 769343 | 1320901 | 1320035 | 872 |
| 812 | 769459 | 769962 | 1319919 | 1319416 | 144 |
| 813 | 769950 | 771269 | 1319428 | 1318109 | 873 |
| 814 | 771283 | 771807 | 1318095 | 1317571 | 1328 |
| 815 | 771820 | 773541 | 1317558 | 1315837 | 145 |
| 816 | 773543 | 774817 | 1315835 | 1314561 | 495 |
| 817 | 774838 | 775089 | 1314540 | 1314289 | 146 |
| 818 | 775493 | 776422 | 1313885 | 1312956 | 496 |
| 819 | 776480 | 777643 | 1312898 | 1311735 | 497 |
| 820 | 778176 | 778346 | 1311202 | 1311032 | 874 |
| 821 | 778362 | 779411 | 1311016 | 1309967 | 875 |
| 822 | 779336 | 780247 | 1310042 | 1309131 | 498 |
| 823 | 780438 | 782276 | 1308940 | 1307102 | 876 |
| 824 | 782329 | 783108 | 1307049 | 1306270 | 147 |
| 825 | 783098 | 784927 | 1306280 | 1304451 | 2047 |
| 826 | 785382 | 786104 | 1303996 | 1303274 | 1719 |
| 827 | 786218 | 786838 | 1303160 | 1302540 | 2046 |
| 828 | 786930 | 787286 | 1302448 | 1302092 | 1718 |
| 829 | 787283 | 787609 | 1302095 | 1301769 | 2045 |
| 830 | 787749 | 788930 | 1301629 | 1300448 | 1717 |
| 831 | 788975 | 789268 | 1300403 | 1300110 | 499 |
| 832 | 789317 | 789460 | 1300061 | 1299918 | 2044 |
| 833 | 789852 | 790022 | 1299526 | 1299356 | 1716 |
| 834 | 790438 | 791058 | 1298940 | 1298320 | 1327 |
| 835 | 790672 | 790737 | 1298706 | 1298641 | 148 |
| 836 | 791117 | 792469 | 1298261 | 1296909 | 500 |
| 837 | 792505 | 792675 | 1296873 | 1296703 | 149 |
| 838 | 792665 | 793114 | 1296713 | 1296264 | 501 |
| 839 | 793111 | 795000 | 1296267 | 1294378 | 150 |
| 840 | 795038 | 795544 | 1294340 | 1293834 | 502 |
| 841 | 796310 | 797536 | 1293068 | 1291842 | 2043 |
| 842 | 797552 | 798316 | 1291826 | 1291062 | 2042 |
| 843 | 798473 | 799534 | 1290905 | 1289844 | 503 |
| 844 | 799610 | 799858 | 1289768 | 1289520 | 504 |
| 845 | 799848 | 800327 | 1289530 | 1289051 | 877 |
| 846 | 800324 | 800425 | 1289054 | 1288953 | 2041 |
| 847 | 800450 | 800518 | 1288928 | 1288860 | 2040 |
| 848 | 800919 | 802424 | 1288459 | 1286954 | 878 |
| 849 | 802436 | 802672 | 1286942 | 1286706 | 505 |
| 850 | 802669 | 802890 | 1286709 | 1286488 | 151 |
| 851 | 802887 | 803297 | 1286491 | 1286081 | 879 |
| 852 | 803294 | 805027 | 1286084 | 1284351 | 506 |
| 853 | 805220 | 806068 | 1284158 | 1283310 | 507 |
| 854 | 806024 | 807415 | 1283354 | 1281963 | 2039 |
| 855 | 807366 | 808745 | 1282012 | 1280633 | 880 |
| 856 | 808746 | 809576 | 1280632 | 1279802 | 1715 |
| 857 | 810847 | 811266 | 1278531 | 1278112 | 1326 |
| 858 | 811367 | 811606 | 1278011 | 1277772 | 508 |
| 859 | 811608 | 812351 | 1277770 | 1277027 | 881 |
| 860 | 812635 | 813648 | 1276743 | 1275730 | 152 |
| 861 | 813652 | 814113 | 1275726 | 1275265 | 153 |
| 862 | 814077 | 816419 | 1275301 | 1272959 | 882 |
| 863 | 816501 | 816650 | 1272877 | 1272728 | 883 |
| 864 | 816754 | 817728 | 1272624 | 1271650 | 154 |
| 865 | 817725 | 818519 | 1271653 | 1270859 | 884 |
| 866 | 818623 | 819468 | 1270755 | 1269910 | 155 |
| 867 | 819475 | 820395 | 1269903 | 1268983 | 156 |
| 868 | 820410 | 821180 | 1268968 | 1268198 | 1714 |
| 869 | 821146 | 822570 | 1268232 | 1266808 | 1325 |
| 870 | 822810 | 823514 | 1266568 | 1265864 | 1713 |
| 871 | 823599 | 824021 | 1265779 | 1265357 | 885 |
| 872 | 824015 | 825196 | 1265363 | 1264182 | 2038 |
| 873 | 825266 | 826294 | 1264112 | 1263084 | 2037 |
| 874 | 826379 | 827413 | 1262999 | 1261965 | 2036 |
| 875 | 827435 | 828904 | 1261943 | 1260474 | 2035 |
| 876 | 828985 | 829728 | 1260393 | 1259650 | 1324 |
| 877 | 829725 | 830471 | 1259653 | 1258907 | 1712 |
| 878 | 830551 | 832368 | 1258827 | 1257010 | 157 |
| 879 | 832337 | 833035 | 1257041 | 1256343 | 509 |
| 880 | 836010 | 837260 | 1253368 | 1252118 | 1711 |
| 881 | 837335 | 837601 | 1252043 | 1251777 | 2034 |
| 882 | 837647 | 839638 | 1251731 | 1249740 | 2033 |
| 883 | 839649 | 839885 | 1249729 | 1249493 | 1710 |
| 884 | 840097 | 840471 | 1249281 | 1248907 | 158 |
| 885 | 840503 | 841321 | 1248875 | 1248057 | 510 |
| 886 | 841293 | 842288 | 1248085 | 1247090 | 886 |
| 887 | 842275 | 842628 | 1247103 | 1246750 | 159 |
| 888 | 842986 | 844059 | 1246392 | 1245319 | 1323 |
| 889 | 844320 | 844517 | 1245058 | 1244861 | 1709 |
| 890 | 844597 | 845652 | 1244781 | 1243726 | 1322 |
| 891 | 845725 | 846387 | 1243653 | 1242991 | 160 |
| 892 | 846422 | 846727 | 1242956 | 1242651 | 511 |
| 893 | 846773 | 847903 | 1242605 | 1241475 | 512 |
| 894 | 847896 | 848990 | 1241482 | 1240388 | 887 |
| 895 | 848774 | 848884 | 1240604 | 1240494 | 2032 |
| 896 | 848987 | 849100 | 1240391 | 1240278 | 2031 |
| 897 | 849375 | 849638 | 1240003 | 1239740 | 1708 |
| 898 | 849669 | 851036 | 1239709 | 1238342 | 1707 |
| 899 | 851134 | 851325 | 1238244 | 1238053 | 1321 |
| 900 | 851346 | 851582 | 1238032 | 1237796 | 1706 |
| 901 | 851738 | 854035 | 1237640 | 1235343 | 513 |
| 902 | 851818 | 851883 | 1237560 | 1237495 | 1320 |
| 903 | 854126 | 855841 | 1235252 | 1233537 | 514 |
| 904 | 855888 | 856652 | 1233490 | 1232726 | 888 |
| 905 | 856637 | 856798 | 1232741 | 1232580 | 2030 |
| 906 | 857151 | 858227 | 1232227 | 1231151 | 889 |
| 907 | 858728 | 858934 | 1230650 | 1230444 | 515 |
| 908 | 860080 | 860340 | 1229298 | 1229038 | 161 |
| 909 | 860404 | 861084 | 1228974 | 1228294 | 1319 |
| 910 | 861133 | 862545 | 1228245 | 1226833 | 1318 |
| 911 | 862729 | 864021 | 1226649 | 1225357 | 1317 |
| 912 | 864121 | 864819 | 1225257 | 1224559 | 1316 |
| 913 | 865002 | 865454 | 1224376 | 1223924 | 890 |
| 914 | 865387 | 866304 | 1223991 | 1223074 | 162 |
| 915 | 866496 | 868313 | 1222882 | 1221065 | 891 |
| 916 | 868296 | 868430 | 1221082 | 1220948 | 1705 |
| 917 | 868444 | 870222 | 1220934 | 1219156 | 163 |
| 918 | 870263 | 870547 | 1219115 | 1218831 | 516 |
| 919 | 870532 | 870840 | 1218846 | 1218538 | 164 |
| 920 | 870842 | 871846 | 1218536 | 1217532 | 517 |
| 921 | 871836 | 872120 | 1217542 | 1217258 | 892 |
| 922 | 871942 | 872775 | 1217436 | 1216603 | 165 |
| 923 | 872833 | 873117 | 1216545 | 1216261 | 166 |
| 924 | 873524 | 874306 | 1215854 | 1215072 | 518 |
| 925 | 874707 | 874940 | 1214671 | 1214438 | 893 |
| 926 | 875022 | 875840 | 1214356 | 1213538 | 894 |
| 927 | 875837 | 876856 | 1213541 | 1212522 | 2029 |
| 928 | 877020 | 877235 | 1212358 | 1212143 | 895 |
| 929 | 877271 | 878197 | 1212107 | 1211181 | 519 |
| 930 | 878209 | 878658 | 1211169 | 1210720 | 1315 |
| 931 | 878718 | 878765 | 1210660 | 1210613 | 896 |
| 932 | 878886 | 879182 | 1210492 | 1210196 | 897 |
| 933 | 879211 | 880500 | 1210167 | 1208878 | 167 |
| 934 | 880506 | 881387 | 1208872 | 1207991 | 898 |
| 935 | 881550 | 881654 | 1207828 | 1207724 | 899 |
| 936 | 882812 | 882925 | 1206566 | 1206453 | 2028 |
| 937 | 885694 | 886539 | 1203684 | 1202839 | 1314 |
| 938 | 886567 | 887178 | 1202811 | 1202200 | 1313 |
| 939 | 887275 | 887487 | 1202103 | 1201891 | 168 |
| 940 | 887717 | 887920 | 1201661 | 1201458 | 520 |
| 941 | 887924 | 890701 | 1201454 | 1198677 | 521 |
| 942 | 891114 | 891398 | 1198264 | 1197980 | 900 |
| 943 | 891434 | 895009 | 1197944 | 1194369 | 522 |
| 944 | 895013 | 895678 | 1194365 | 1193700 | 523 |
| 945 | 895675 | 896097 | 1193703 | 1193281 | 1312 |
| 946 | 896626 | 899040 | 1192752 | 1190338 | 169 |
| 947 | 899156 | 900004 | 1190222 | 1189374 | 2027 |
| 948 | 900134 | 900385 | 1189244 | 1188993 | 524 |
| 949 | 901696 | 902574 | 1187682 | 1186804 | 1311 |
| 950 | 902700 | 903458 | 1186678 | 1185920 | 1704 |
| 951 | 903912 | 904115 | 1185466 | 1185263 | 1703 |
| 952 | 904127 | 904555 | 1185251 | 1184823 | 2026 |
| 953 | 904610 | 905026 | 1184768 | 1184352 | 525 |
| 954 | 905105 | 906898 | 1184273 | 1182480 | 526 |
| 955 | 906982 | 907974 | 1182396 | 1181404 | 170 |
| 956 | 907975 | 908217 | 1181403 | 1181161 | 1310 |
| 957 | 908370 | 909260 | 1181008 | 1180118 | 1702 |
| 958 | 909301 | 910116 | 1180077 | 1179262 | 171 |
| 959 | 910097 | 910516 | 1179281 | 1178862 | 527 |
| 960 | 910513 | 912024 | 1178865 | 1177354 | 172 |
| 961 | 912021 | 912893 | 1177357 | 1176485 | 1701 |
| 962 | 912890 | 914188 | 1176488 | 1175190 | 2025 |
| 963 | 914305 | 914493 | 1175073 | 1174885 | 173 |
| 964 | 914711 | 915121 | 1174667 | 1174257 | 528 |
| 965 | 915118 | 916428 | 1174260 | 1172950 | 174 |
| 966 | 916589 | 917257 | 1172789 | 1172121 | 529 |
| 967 | 917348 | 918352 | 1172030 | 1171026 | 530 |
| 968 | 918655 | 918705 | 1170723 | 1170673 | 1309 |
| 969 | 918719 | 919171 | 1170659 | 1170207 | 2024 |
| 970 | 919305 | 923264 | 1170073 | 1166114 | 901 |
| 971 | 924116 | 924814 | 1165262 | 1164564 | 2023 |
| 972 | 925010 | 927244 | 1164368 | 1162134 | 531 |
| 973 | 927249 | 927578 | 1162129 | 1161800 | 1700 |
| 974 | 928257 | 929309 | 1161121 | 1160069 | 1699 |
| 975 | 929424 | 929705 | 1159954 | 1159673 | 1698 |
| 976 | 930480 | 931013 | 1158898 | 1158365 | 1697 |
| 977 | 931103 | 931576 | 1158275 | 1157802 | 532 |
| 978 | 931594 | 932070 | 1157784 | 1157308 | 175 |
| 979 | 932526 | 933086 | 1156852 | 1156292 | 902 |
| 980 | 933128 | 933430 | 1156250 | 1155948 | 533 |
| 981 | 933728 | 933904 | 1155650 | 1155474 | 534 |
| 982 | 933919 | 934392 | 1155459 | 1154986 | 1308 |
| 983 | 934564 | 935379 | 1154814 | 1153999 | 176 |
| 984 | 935513 | 936664 | 1153865 | 1152714 | 2022 |
| 985 | 936666 | 936944 | 1152712 | 1152434 | 1696 |
| 986 | 936987 | 938822 | 1152391 | 1150556 | 1695 |
| 987 | 938954 | 940192 | 1150424 | 1149186 | 535 |
| 988 | 940239 | 940469 | 1149139 | 1148909 | 903 |
| 989 | 940803 | 940937 | 1148575 | 1148441 | 904 |
| 990 | 940934 | 942055 | 1148444 | 1147323 | 536 |
| 991 | 942591 | 942917 | 1146787 | 1146461 | 905 |
| 992 | 942914 | 943306 | 1146464 | 1146072 | 2021 |
| 993 | 943357 | 943545 | 1146021 | 1145833 | 1307 |
| 994 | 943533 | 943778 | 1145845 | 1145600 | 1694 |
| 995 | 943889 | 944536 | 1145489 | 1144842 | 2020 |
| 996 | 944542 | 944994 | 1144836 | 1144384 | 1306 |
| 997 | 944996 | 945436 | 1144382 | 1143942 | 2019 |
| 998 | 945433 | 945741 | 1143945 | 1143637 | 1305 |
| 999 | 945755 | 946939 | 1143623 | 1142439 | 2018 |
| 1000 | 946932 | 948164 | 1142446 | 1141214 | 1693 |
| 1001 | 948079 | 949662 | 1141299 | 1139716 | 1304 |
| 1002 | 949659 | 953030 | 1139719 | 1136348 | 1692 |
| 1003 | 953048 | 953296 | 1136330 | 1136082 | 2017 |
| 1004 | 953495 | 954190 | 1135883 | 1135188 | 2016 |
| 1005 | 954301 | 955020 | 1135077 | 1134358 | 177 |
| 1006 | 955204 | 956391 | 1134174 | 1132987 | 178 |
| 1007 | 956375 | 956533 | 1133003 | 1132845 | 2015 |
| 1008 | 957270 | 957638 | 1132108 | 1131740 | 906 |
| 1009 | 957640 | 961329 | 1131738 | 1128049 | 1303 |
| 1010 | 961407 | 962324 | 1127971 | 1127054 | 907 |
| 1011 | 962372 | 962575 | 1127006 | 1126803 | 537 |
| 1012 | 962593 | 963804 | 1126785 | 1125574 | 1302 |
| 1013 | 964168 | 964827 | 1125210 | 1124551 | 179 |
| 1014 | 964831 | 965430 | 1124547 | 1123948 | 1301 |
| 1015 | 965603 | 965896 | 1123775 | 1123482 | 538 |
| 1016 | 965901 | 966098 | 1123477 | 1123280 | 908 |
| 1017 | 966166 | 967002 | 1123212 | 1122376 | 180 |
| 1018 | 967002 | 967181 | 1122376 | 1122197 | 909 |
| 1019 | 967184 | 967987 | 1122194 | 1121391 | 539 |
| 1020 | 968134 | 968757 | 1121244 | 1120621 | 181 |
| 1021 | 968754 | 969002 | 1120624 | 1120376 | 910 |
| 1022 | 968995 | 969663 | 1120383 | 1119715 | 182 |
| 1023 | 969660 | 970463 | 1119718 | 1118915 | 911 |
| 1024 | 970555 | 971892 | 1118823 | 1117486 | 183 |
| 1025 | 971952 | 973340 | 1117426 | 1116038 | 1691 |
| 1026 | 973366 | 974772 | 1116012 | 1114606 | 1300 |
| 1027 | 974823 | 976277 | 1114555 | 1113101 | 1690 |
| 1028 | 976234 | 976803 | 1113144 | 1112575 | 1299 |
| 1029 | 976871 | 977053 | 1112507 | 1112325 | 2014 |
| 1030 | 977082 | 977765 | 1112296 | 1111613 | 1689 |
| 1031 | 977762 | 978706 | 1111616 | 1110672 | 2013 |
| 1032 | 978776 | 979747 | 1110602 | 1109631 | 540 |
| 1033 | 979826 | 981100 | 1109552 | 1108278 | 541 |
| 1034 | 981159 | 981425 | 1108219 | 1107953 | 1688 |
| 1035 | 981762 | 981815 | 1107616 | 1107563 | 1687 |
| 1036 | 982136 | 982483 | 1107242 | 1106895 | 542 |
| 1037 | 982480 | 982953 | 1106898 | 1106425 | 1298 |
| 1038 | 983025 | 983486 | 1106353 | 1105892 | 912 |
| 1039 | 983483 | 983821 | 1105895 | 1105557 | 543 |
| 1040 | 983802 | 984371 | 1105576 | 1105007 | 1686 |
| 1041 | 984359 | 985399 | 1105019 | 1103979 | 2012 |
| 1042 | 985204 | 986352 | 1104174 | 1103026 | 1297 |
| 1043 | 986349 | 986912 | 1103029 | 1102466 | 1685 |
| 1044 | 986851 | 987246 | 1102527 | 1102132 | 1296 |
| 1045 | 987243 | 987566 | 1102135 | 1101812 | 1684 |
| 1046 | 987517 | 988383 | 1101861 | 1100995 | 1295 |
| 1047 | 988383 | 989573 | 1100995 | 1099805 | 1683 |
| 1048 | 989577 | 989894 | 1099801 | 1099484 | 1682 |
| 1049 | 990762 | 991511 | 1098616 | 1097867 | 913 |
| 1050 | 991803 | 991991 | 1097575 | 1097387 | 914 |
| 1051 | 992036 | 993010 | 1097342 | 1096368 | 2011 |
| 1052 | 994241 | 995020 | 1095137 | 1094358 | 544 |
| 1053 | 995047 | 995112 | 1094331 | 1094266 | 184 |
| 1054 | 995380 | 995844 | 1093998 | 1093534 | 185 |
| 1055 | 995878 | 996558 | 1093500 | 1092820 | 1294 |
| 1056 | 997037 | 998464 | 1092341 | 1090914 | 545 |
| 1057 | 998525 | 999265 | 1090853 | 1090113 | 2010 |
| 1058 | 999750 | 1000229 | 1089628 | 1089149 | 915 |
| 1059 | 1000226 | 1001212 | 1089152 | 1088166 | 546 |
| 1060 | 1001217 | 1001987 | 1088161 | 1087391 | 916 |
| 1061 | 1002002 | 1003240 | 1087376 | 1086138 | 2009 |
| 1062 | 1003253 | 1005466 | 1086125 | 1083912 | 547 |
| 1063 | 1005467 | 1006087 | 1083911 | 1083291 | 2008 |
| 1064 | 1006202 | 1007890 | 1083176 | 1081488 | 2007 |
| 1065 | 1007979 | 1010192 | 1081399 | 1079186 | 1681 |
| 1066 | 1010189 | 1010956 | 1079189 | 1078422 | 2006 |
| 1067 | 1011011 | 1011949 | 1078367 | 1077429 | 2005 |
| 1068 | 1012013 | 1012879 | 1077365 | 1076499 | 548 |
| 1069 | 1012961 | 1013278 | 1076417 | 1076100 | 549 |
| 1070 | 1013371 | 1013883 | 1076007 | 1075495 | 186 |
| 1071 | 1013995 | 1014411 | 1075383 | 1074967 | 1293 |
| 1072 | 1014829 | 1017228 | 1074549 | 1072150 | 187 |
| 1073 | 1017331 | 1020711 | 1072047 | 1068667 | 188 |
| 1074 | 1020821 | 1020970 | 1068557 | 1068408 | 2004 |
| 1075 | 1021424 | 1022338 | 1067954 | 1067040 | 550 |
| 1076 | 1022319 | 1023311 | 1067059 | 1066067 | 1680 |
| 1077 | 1023301 | 1023780 | 1066077 | 1065598 | 1292 |
| 1078 | 1023781 | 1024785 | 1065597 | 1064593 | 1291 |
| 1079 | 1024877 | 1025692 | 1064501 | 1063686 | 551 |
| 1080 | 1025682 | 1026086 | 1063696 | 1063292 | 1679 |
| 1081 | 1026083 | 1026376 | 1063295 | 1063002 | 2003 |
| 1082 | 1026357 | 1026986 | 1063021 | 1062392 | 1678 |
| 1083 | 1026983 | 1027579 | 1062395 | 1061799 | 2002 |
| 1084 | 1027657 | 1029558 | 1061721 | 1059820 | 189 |
| 1085 | 1029517 | 1030068 | 1059861 | 1059310 | 1290 |
| 1086 | 1030276 | 1030950 | 1059102 | 1058428 | 1289 |
| 1087 | 1031013 | 1031807 | 1058365 | 1057571 | 1677 |
| 1088 | 1031814 | 1032344 | 1057564 | 1057034 | 1676 |
| 1089 | 1032406 | 1032792 | 1056972 | 1056586 | 190 |
| 1090 | 1032841 | 1034373 | 1056537 | 1055005 | 191 |
| 1091 | 1034458 | 1035498 | 1054920 | 1053880 | 192 |
| 1092 | 1035541 | 1036101 | 1053837 | 1053277 | 193 |
| 1093 | 1036098 | 1036649 | 1053280 | 1052729 | 917 |
| 1094 | 1036636 | 1037469 | 1052742 | 1051909 | 194 |
| 1095 | 1037390 | 1038229 | 1051988 | 1051149 | 2001 |
| 1096 | 1038226 | 1039704 | 1051152 | 1049674 | 1288 |
| 1097 | 1039796 | 1040683 | 1049582 | 1048695 | 552 |
| 1098 | 1041012 | 1041071 | 1048366 | 1048307 | 918 |
| 1099 | 1041624 | 1041935 | 1047754 | 1047443 | 919 |
| 1100 | 1042133 | 1042384 | 1047245 | 1046994 | 553 |
| 1101 | 1042526 | 1043701 | 1046852 | 1045677 | 554 |
| 1102 | 1043676 | 1044812 | 1045702 | 1044566 | 1675 |
| 1103 | 1044809 | 1046068 | 1044569 | 1043310 | 2000 |
| 1104 | 1047016 | 1048092 | 1042362 | 1041286 | 195 |
| 1105 | 1048209 | 1048610 | 1041169 | 1040768 | 1674 |
| 1106 | 1048684 | 1048761 | 1040694 | 1040617 | 1287 |
| 1107 | 1048718 | 1049599 | 1040660 | 1039779 | 555 |
| 1108 | 1049596 | 1051275 | 1039782 | 1038103 | 1286 |
| 1109 | 1051307 | 1051711 | 1038071 | 1037667 | 1999 |
| 1110 | 1051708 | 1051995 | 1037670 | 1037383 | 1285 |
| 1111 | 1052192 | 1052701 | 1037186 | 1036677 | 556 |
| 1112 | 1052753 | 1053022 | 1036625 | 1036356 | 557 |
| 1113 | 1053032 | 1053793 | 1036346 | 1035585 | 558 |
| 1114 | 1053859 | 1055274 | 1035519 | 1034104 | 196 |
| 1115 | 1055358 | 1055663 | 1034020 | 1033715 | 920 |
| 1116 | 1056285 | 1056395 | 1033093 | 1032983 | 921 |
| 1117 | 1056392 | 1057381 | 1032986 | 1031997 | 1998 |
| 1118 | 1057362 | 1057835 | 1032016 | 1031543 | 1673 |
| 1119 | 1057832 | 1058302 | 1031546 | 1031076 | 1997 |
| 1120 | 1058495 | 1059043 | 1030883 | 1030335 | 559 |
| 1121 | 1059047 | 1059307 | 1030331 | 1030071 | 1996 |
| 1122 | 1059399 | 1059863 | 1029979 | 1029515 | 1672 |
| 1123 | 1059921 | 1060517 | 1029457 | 1028861 | 922 |
| 1124 | 1060582 | 1061310 | 1028796 | 1028068 | 197 |
| 1125 | 1061307 | 1061768 | 1028071 | 1027610 | 1671 |
| 1126 | 1061878 | 1063221 | 1027500 | 1026157 | 198 |
| 1127 | 1063298 | 1064599 | 1026080 | 1024779 | 560 |
| 1128 | 1064656 | 1065000 | 1024722 | 1024378 | 1284 |
| 1129 | 1065370 | 1066023 | 1024008 | 1023355 | 1283 |
| 1130 | 1066020 | 1067213 | 1023358 | 1022165 | 1670 |
| 1131 | 1067215 | 1067811 | 1022163 | 1021567 | 1282 |
| 1132 | 1067793 | 1068392 | 1021585 | 1020986 | 1669 |
| 1133 | 1068394 | 1069287 | 1020984 | 1020091 | 1281 |
| 1134 | 1069288 | 1071138 | 1020090 | 1018240 | 1280 |
| 1135 | 1070858 | 1070965 | 1018520 | 1018413 | 561 |
| 1136 | 1071135 | 1072622 | 1018243 | 1016756 | 1668 |
| 1137 | 1072619 | 1072963 | 1016759 | 1016415 | 1995 |
| 1138 | 1072960 | 1073688 | 1016418 | 1015690 | 1279 |
| 1139 | 1073670 | 1073954 | 1015708 | 1015424 | 1667 |
| 1140 | 1073951 | 1074343 | 1015427 | 1015035 | 1994 |
| 1141 | 1074340 | 1074594 | 1015038 | 1014784 | 1278 |
| 1142 | 1074591 | 1075124 | 1014787 | 1014254 | 1666 |
| 1143 | 1075360 | 1075860 | 1014018 | 1013518 | 1277 |
| 1144 | 1076013 | 1077278 | 1013365 | 1012100 | 923 |
| 1145 | 1077432 | 1077986 | 1011946 | 1011392 | 924 |
| 1146 | 1078071 | 1079189 | 1011307 | 1010189 | 1665 |
| 1147 | 1079201 | 1080472 | 1010177 | 1008906 | 1993 |
| 1148 | 1080723 | 1081862 | 1008655 | 1007516 | 925 |
| 1149 | 1082285 | 1084639 | 1007093 | 1004739 | 562 |
| 1150 | 1082363 | 1082779 | 1007015 | 1006599 | 1992 |
| 1151 | 1084640 | 1085716 | 1004738 | 1003662 | 1991 |
| 1152 | 1085820 | 1086698 | 1003558 | 1002680 | 926 |
| 1153 | 1086762 | 1086986 | 1002616 | 1002392 | 927 |
| 1154 | 1087256 | 1088512 | 1002122 | 1000866 | 1990 |
| 1155 | 1088568 | 1088813 | 1000810 | 1000565 | 1664 |
| 1156 | 1088815 | 1089384 | 1000563 | 999994 | 1276 |
| 1157 | 1089160 | 1089210 | 1000218 | 1000168 | 199 |
| 1158 | 1089484 | 1089639 | 999894 | 999739 | 1275 |
| 1159 | 1089909 | 1090604 | 999469 | 998774 | 1663 |
| 1160 | 1091118 | 1091525 | 998260 | 997853 | 1662 |
| 1161 | 1091646 | 1092197 | 997732 | 997181 | 928 |
| 1162 | 1092206 | 1093522 | 997172 | 995856 | 1989 |
| 1163 | 1093556 | 1093957 | 995822 | 995421 | 1988 |
| 1164 | 1093967 | 1095127 | 995411 | 994251 | 1987 |
| 1165 | 1096375 | 1096839 | 993003 | 992539 | 200 |
| 1166 | 1096870 | 1098303 | 992508 | 991075 | 201 |
| 1167 | 1098281 | 1098538 | 991097 | 990840 | 563 |
| 1168 | 1098554 | 1099156 | 990824 | 990222 | 564 |
| 1169 | 1099220 | 1099486 | 990158 | 989892 | 565 |
| 1170 | 1099468 | 1099908 | 989910 | 989470 | 202 |
| 1171 | 1099954 | 1100991 | 989424 | 988387 | 203 |
| 1172 | 1101073 | 1101510 | 988305 | 987868 | 1274 |
| 1173 | 1101868 | 1102326 | 987510 | 987052 | 1273 |
| 1174 | 1102786 | 1103181 | 986592 | 986197 | 1272 |
| 1175 | 1103673 | 1104461 | 985705 | 984917 | 1661 |
| 1176 | 1104585 | 1106492 | 984793 | 982886 | 929 |
| 1177 | 1106686 | 1107264 | 982692 | 982114 | 1271 |
| 1178 | 1107524 | 1108015 | 981854 | 981363 | 1986 |
| 1179 | 1108559 | 1110253 | 980819 | 979125 | 1985 |
| 1180 | 1110347 | 1111819 | 979031 | 977559 | 566 |
| 1181 | 1111862 | 1112080 | 977516 | 977298 | 1984 |
| 1182 | 1112624 | 1113001 | 976754 | 976377 | 1983 |
| 1183 | 1113459 | 1114217 | 975919 | 975161 | 930 |
| 1184 | 1114407 | 1117082 | 974971 | 972296 | 931 |
| 1185 | 1117577 | 1118029 | 971801 | 971349 | 567 |
| 1186 | 1118086 | 1119738 | 971292 | 969640 | 1270 |
| 1187 | 1119840 | 1120178 | 969538 | 969200 | 932 |
| 1188 | 1120172 | 1120504 | 969206 | 968874 | 568 |
| 1189 | 1120505 | 1121407 | 968873 | 967971 | 569 |
| 1190 | 1121408 | 1122520 | 967970 | 966858 | 1982 |
| 1191 | 1122517 | 1123746 | 966861 | 965632 | 1269 |
| 1192 | 1123810 | 1124472 | 965568 | 964906 | 204 |
| 1193 | 1124569 | 1125114 | 964809 | 964264 | 1268 |
| 1194 | 1125170 | 1125637 | 964208 | 963741 | 1981 |
| 1195 | 1125727 | 1126902 | 963651 | 962476 | 205 |
| 1196 | 1128262 | 1128495 | 961116 | 960883 | 1267 |
| 1197 | 1128535 | 1128972 | 960843 | 960406 | 1266 |
| 1198 | 1129034 | 1130476 | 960344 | 958902 | 1980 |
| 1199 | 1130532 | 1131944 | 958846 | 957434 | 1660 |
| 1200 | 1132006 | 1132422 | 957372 | 956956 | 1265 |
| 1201 | 1132432 | 1132659 | 956946 | 956719 | 1264 |
| 1202 | 1132744 | 1135125 | 956634 | 954253 | 1263 |
| 1203 | 1135154 | 1135213 | 954224 | 954165 | 570 |
| 1204 | 1135255 | 1137741 | 954123 | 951637 | 1262 |
| 1205 | 1138634 | 1138867 | 950744 | 950511 | 571 |
| 1206 | 1139159 | 1142494 | 950219 | 946884 | 572 |
| 1207 | 1142537 | 1142836 | 946841 | 946542 | 573 |
| 1208 | 1142873 | 1144054 | 946505 | 945324 | 574 |
| 1209 | 1144054 | 1145121 | 945324 | 944257 | 206 |
| 1210 | 1145177 | 1146514 | 944201 | 942864 | 575 |
| 1211 | 1146553 | 1148040 | 942825 | 941338 | 207 |
| 1212 | 1148086 | 1149231 | 941292 | 940147 | 208 |
| 1213 | 1150093 | 1151094 | 939285 | 938284 | 209 |
| 1214 | 1151091 | 1154534 | 938287 | 934844 | 1659 |
| 1215 | 1155108 | 1155464 | 934270 | 933914 | 933 |
| 1216 | 1155466 | 1155999 | 933912 | 933379 | 1261 |
| 1217 | 1157418 | 1157627 | 931960 | 931751 | 1658 |
| 1218 | 1157624 | 1157836 | 931754 | 931542 | 1979 |
| 1219 | 1157916 | 1158293 | 931462 | 931085 | 1657 |
| 1220 | 1158361 | 1159554 | 931017 | 929824 | 1260 |
| 1221 | 1159686 | 1160306 | 929692 | 929072 | 1656 |
| 1222 | 1161299 | 1161634 | 928079 | 927744 | 1978 |
| 1223 | 1161690 | 1163606 | 927688 | 925772 | 1655 |
| 1224 | 1163703 | 1164656 | 925675 | 924722 | 934 |
| 1225 | 1164663 | 1165082 | 924715 | 924296 | 935 |
| 1226 | 1165121 | 1165714 | 924257 | 923664 | 576 |
| 1227 | 1165724 | 1165948 | 923654 | 923430 | 577 |
| 1228 | 1165959 | 1166231 | 923419 | 923147 | 936 |
| 1229 | 1166259 | 1166948 | 923119 | 922430 | 937 |
| 1230 | 1167001 | 1167234 | 922377 | 922144 | 210 |
| 1231 | 1167503 | 1168657 | 921875 | 920721 | 1977 |
| 1232 | 1168678 | 1169472 | 920700 | 919906 | 1259 |
| 1233 | 1169576 | 1171024 | 919802 | 918354 | 1976 |
| 1234 | 1171021 | 1171905 | 918357 | 917473 | 1258 |
| 1235 | 1172047 | 1172277 | 917331 | 917101 | 211 |
| 1236 | 1172264 | 1173025 | 917114 | 916353 | 1975 |
| 1237 | 1173022 | 1173636 | 916356 | 915742 | 1257 |
| 1238 | 1173687 | 1174022 | 915691 | 915356 | 938 |
| 1239 | 1174023 | 1174274 | 915355 | 915104 | 1654 |
| 1240 | 1174284 | 1174388 | 915094 | 914990 | 1653 |
| 1241 | 1174493 | 1177870 | 914885 | 911508 | 578 |
| 1242 | 1178296 | 1178862 | 911082 | 910516 | 212 |
| 1243 | 1178840 | 1179322 | 910538 | 910056 | 579 |
| 1244 | 1179335 | 1180606 | 910043 | 908772 | 1974 |
| 1245 | 1180603 | 1181361 | 908775 | 908017 | 1256 |
| 1246 | 1181719 | 1181916 | 907659 | 907462 | 1255 |
| 1247 | 1182281 | 1182673 | 907097 | 906705 | 1973 |
| 1248 | 1182899 | 1183855 | 906479 | 905523 | 580 |
| 1249 | 1184435 | 1184731 | 904943 | 904647 | 1972 |
| 1250 | 1184832 | 1185752 | 904546 | 903626 | 1652 |
| 1251 | 1186264 | 1186524 | 903114 | 902854 | 1254 |
| 1252 | 1187372 | 1187653 | 902006 | 901725 | 1971 |
| 1253 | 1188250 | 1188906 | 901128 | 900472 | 1253 |
| 1254 | 1188962 | 1189906 | 900416 | 899472 | 1970 |
| 1255 | 1189940 | 1190062 | 899438 | 899316 | 1969 |
| 1256 | 1191309 | 1191941 | 898069 | 897437 | 1651 |
| 1257 | 1195773 | 1195841 | 893605 | 893537 | 939 |
| 1258 | 1196421 | 1196939 | 892957 | 892439 | 1650 |
| 1259 | 1197121 | 1197330 | 892257 | 892048 | 1252 |
| 1260 | 1197327 | 1197827 | 892051 | 891551 | 1649 |
| 1261 | 1197859 | 1198116 | 891519 | 891262 | 1251 |
| 1262 | 1198129 | 1198395 | 891249 | 890983 | 1250 |
| 1263 | 1198775 | 1198969 | 890603 | 890409 | 581 |
| 1264 | 1199210 | 1199536 | 890168 | 889842 | 1968 |
| 1265 | 1200465 | 1200542 | 888913 | 888836 | 940 |
| 1266 | 1202741 | 1204258 | 886637 | 885120 | 1967 |
| 1267 | 1204260 | 1205624 | 885118 | 883754 | 1648 |
| 1268 | 1205780 | 1207075 | 883598 | 882303 | 1966 |
| 1269 | 1207362 | 1207793 | 882016 | 881585 | 941 |
| 1270 | 1207790 | 1208482 | 881588 | 880896 | 582 |
| 1271 | 1209464 | 1210141 | 879914 | 879237 | 583 |
| 1272 | 1210174 | 1210893 | 879204 | 878485 | 213 |
| 1273 | 1210890 | 1211111 | 878488 | 878267 | 942 |
| 1274 | 1211128 | 1211787 | 878250 | 877591 | 214 |
| 1275 | 1211850 | 1212755 | 877528 | 876623 | 943 |
| 1276 | 1212760 | 1213104 | 876618 | 876274 | 1249 |
| 1277 | 1213101 | 1214369 | 876277 | 875009 | 1647 |
| 1278 | 1214366 | 1215214 | 875012 | 874164 | 1965 |
| 1279 | 1215250 | 1215861 | 874128 | 873517 | 1248 |
| 1280 | 1217374 | 1217490 | 872004 | 871888 | 215 |
| 1281 | 1219074 | 1219190 | 870304 | 870188 | 944 |
| 1282 | 1219197 | 1220690 | 870181 | 868688 | 1646 |
| 1283 | 1220740 | 1221513 | 868638 | 867865 | 1247 |
| 1284 | 1221503 | 1222201 | 867875 | 867177 | 1964 |
| 1285 | 1222282 | 1223655 | 867096 | 865723 | 216 |
| 1286 | 1223758 | 1225113 | 865620 | 864265 | 217 |
| 1287 | 1225113 | 1225991 | 864265 | 863387 | 945 |
| 1288 | 1226169 | 1226861 | 863209 | 862517 | 946 |
| 1289 | 1227076 | 1227702 | 862302 | 861676 | 1246 |
| 1290 | 1227756 | 1228466 | 861622 | 860912 | 1645 |
| 1291 | 1228622 | 1230493 | 860756 | 858885 | 584 |
| 1292 | 1230580 | 1233081 | 858798 | 856297 | 218 |
| 1293 | 1233236 | 1234546 | 856142 | 854832 | 585 |
| 1294 | 1234563 | 1236284 | 854815 | 853094 | 1644 |
| 1295 | 1236584 | 1237978 | 852794 | 851400 | 1963 |
| 1296 | 1237975 | 1238376 | 851403 | 851002 | 1245 |
| 1297 | 1238433 | 1239707 | 850945 | 849671 | 1643 |
| 1298 | 1239791 | 1239994 | 849587 | 849384 | 1962 |
| 1299 | 1240125 | 1240214 | 849253 | 849164 | 947 |
| 1300 | 1240801 | 1240896 | 848577 | 848482 | 1244 |
| 1301 | 1241592 | 1241921 | 847786 | 847457 | 1642 |
| 1302 | 1241983 | 1243014 | 847395 | 846364 | 1243 |
| 1303 | 1243011 | 1243661 | 846367 | 845717 | 1641 |
| 1304 | 1243692 | 1243778 | 845686 | 845600 | 1640 |
| 1305 | 1243775 | 1244272 | 845603 | 845106 | 1961 |
| 1306 | 1244307 | 1244765 | 845071 | 844613 | 1639 |
| 1307 | 1244788 | 1244973 | 844590 | 844405 | 1242 |
| 1308 | 1245004 | 1246125 | 844374 | 843253 | 1241 |
| 1309 | 1246241 | 1247059 | 843137 | 842319 | 1960 |
| 1310 | 1247369 | 1248709 | 842009 | 840669 | 1959 |
| 1311 | 1248621 | 1249226 | 840757 | 840152 | 948 |
| 1312 | 1250499 | 1251188 | 838879 | 838190 | 1638 |
| 1313 | 1251193 | 1251561 | 838185 | 837817 | 1240 |
| 1314 | 1251632 | 1253578 | 837746 | 835800 | 1958 |
| 1315 | 1253588 | 1253788 | 835790 | 835590 | 1957 |
| 1316 | 1254304 | 1255470 | 835074 | 833908 | 219 |
| 1317 | 1255582 | 1256436 | 833796 | 832942 | 1239 |
| 1318 | 1256379 | 1256846 | 832999 | 832532 | 1637 |
| 1319 | 1257402 | 1258961 | 831976 | 830417 | 949 |
| 1320 | 1258972 | 1259079 | 830406 | 830299 | 220 |
| 1321 | 1259124 | 1259858 | 830254 | 829520 | 950 |
| 1322 | 1259855 | 1260172 | 829523 | 829206 | 1956 |
| 1323 | 1260229 | 1262256 | 829149 | 827122 | 1238 |
| 1324 | 1262388 | 1262651 | 826990 | 826727 | 951 |
| 1325 | 1262709 | 1264661 | 826669 | 824717 | 952 |
| 1326 | 1264658 | 1265074 | 824720 | 824304 | 1955 |
| 1327 | 1265145 | 1265591 | 824233 | 823787 | 953 |
| 1328 | 1265593 | 1266390 | 823785 | 822988 | 221 |
| 1329 | 1266750 | 1267955 | 822628 | 821423 | 954 |
| 1330 | 1268130 | 1269137 | 821248 | 820241 | 1636 |
| 1331 | 1269155 | 1270042 | 820223 | 819336 | 1954 |
| 1332 | 1270062 | 1271162 | 819316 | 818216 | 1635 |
| 1333 | 1271162 | 1272181 | 818216 | 817197 | 1953 |
| 1334 | 1272174 | 1273103 | 817204 | 816275 | 1634 |
| 1335 | 1273100 | 1274158 | 816278 | 815220 | 1952 |
| 1336 | 1274151 | 1275281 | 815227 | 814097 | 1633 |
| 1337 | 1275461 | 1276135 | 813917 | 813243 | 1951 |
| 1338 | 1276120 | 1276689 | 813258 | 812689 | 1237 |
| 1339 | 1276727 | 1278301 | 812651 | 811077 | 1950 |
| 1340 | 1278636 | 1279535 | 810742 | 809843 | 1632 |
| 1341 | 1279958 | 1280587 | 809420 | 808791 | 1949 |
| 1342 | 1280661 | 1281740 | 808717 | 807638 | 955 |
| 1343 | 1281804 | 1282397 | 807574 | 806981 | 1631 |
| 1344 | 1282384 | 1283034 | 806994 | 806344 | 1236 |
| 1345 | 1283055 | 1284251 | 806323 | 805127 | 1630 |
| 1346 | 1284667 | 1285869 | 804711 | 803509 | 222 |
| 1347 | 1285975 | 1289823 | 803403 | 799555 | 223 |
| 1348 | 1290019 | 1292922 | 799359 | 796456 | 224 |
| 1349 | 1293396 | 1293860 | 795982 | 795518 | 1629 |
| 1350 | 1294892 | 1295722 | 794486 | 793656 | 586 |
| 1351 | 1295748 | 1297115 | 793630 | 792263 | 956 |
| 1352 | 1297116 | 1298444 | 792262 | 790934 | 1628 |
| 1353 | 1298625 | 1298846 | 790753 | 790532 | 957 |
| 1354 | 1299189 | 1300220 | 790189 | 789158 | 1627 |
| 1355 | 1300290 | 1301624 | 789088 | 787754 | 1626 |
| 1356 | 1301759 | 1302934 | 787619 | 786444 | 1948 |
| 1357 | 1302931 | 1303617 | 786447 | 785761 | 1235 |
| 1358 | 1303690 | 1304454 | 785688 | 784924 | 1234 |
| 1359 | 1304451 | 1305239 | 784927 | 784139 | 1625 |
| 1360 | 1305236 | 1306249 | 784142 | 783129 | 1947 |
| 1361 | 1306246 | 1306722 | 783132 | 782656 | 1233 |
| 1362 | 1306665 | 1307039 | 782713 | 782339 | 1624 |
| 1363 | 1307076 | 1307963 | 782302 | 781415 | 1623 |
| 1364 | 1307989 | 1309053 | 781389 | 780325 | 1232 |
| 1365 | 1309106 | 1309948 | 780272 | 779430 | 587 |
| 1366 | 1309950 | 1311020 | 779428 | 778358 | 958 |
| 1367 | 1311965 | 1313317 | 777413 | 776061 | 1946 |
| 1368 | 1313412 | 1314224 | 775966 | 775154 | 1622 |
| 1369 | 1315661 | 1315879 | 773717 | 773499 | 1945 |
| 1370 | 1316041 | 1316151 | 773337 | 773227 | 1231 |
| 1371 | 1316410 | 1317765 | 772968 | 771613 | 225 |
| 1372 | 1317762 | 1318001 | 771616 | 771377 | 959 |
| 1373 | 1317998 | 1318528 | 771380 | 770850 | 588 |
| 1374 | 1318585 | 1319298 | 770793 | 770080 | 226 |
| 1375 | 1319308 | 1319637 | 770070 | 769741 | 227 |
| 1376 | 1319620 | 1320078 | 769758 | 769300 | 1230 |
| 1377 | 1321326 | 1322096 | 768052 | 767282 | 960 |
| 1378 | 1322102 | 1322401 | 767276 | 766977 | 1944 |
| 1379 | 1322840 | 1323004 | 766538 | 766374 | 1943 |
| 1380 | 1323183 | 1323788 | 766195 | 765590 | 1621 |
| 1381 | 1323802 | 1324827 | 765576 | 764551 | 1229 |
| 1382 | 1325139 | 1325336 | 764239 | 764042 | 1620 |
| 1383 | 1325369 | 1325800 | 764009 | 763578 | 1942 |
| 1384 | 1325787 | 1326215 | 763591 | 763163 | 1619 |
| 1385 | 1326222 | 1326593 | 763156 | 762785 | 1618 |
| 1386 | 1326738 | 1327526 | 762640 | 761852 | 1617 |
| 1387 | 1327548 | 1327970 | 761830 | 761408 | 1616 |
| 1388 | 1327967 | 1328509 | 761411 | 760869 | 1941 |
| 1389 | 1328520 | 1329077 | 760858 | 760301 | 1615 |
| 1390 | 1329084 | 1329671 | 760294 | 759707 | 1614 |
| 1391 | 1330058 | 1330213 | 759320 | 759165 | 589 |
| 1392 | 1330540 | 1331565 | 758838 | 757813 | 1228 |
| 1393 | 1331777 | 1332007 | 757601 | 757371 | 1940 |
| 1394 | 1332043 | 1332753 | 757335 | 756625 | 1227 |
| 1395 | 1332861 | 1333112 | 756517 | 756266 | 1613 |
| 1396 | 1333113 | 1333694 | 756265 | 755684 | 1612 |
| 1397 | 1333706 | 1333999 | 755672 | 755379 | 1939 |
| 1398 | 1334020 | 1334550 | 755358 | 754828 | 1226 |
| 1399 | 1334537 | 1335136 | 754841 | 754242 | 1938 |
| 1400 | 1335210 | 1336667 | 754168 | 752711 | 1611 |
| 1401 | 1336699 | 1337145 | 752679 | 752233 | 1225 |
| 1402 | 1337157 | 1337624 | 752221 | 751754 | 1610 |
| 1403 | 1337636 | 1338343 | 751742 | 751035 | 1937 |
| 1404 | 1338340 | 1338954 | 751038 | 750424 | 1224 |
| 1405 | 1338956 | 1339411 | 750422 | 749967 | 1936 |
| 1406 | 1339413 | 1339793 | 749965 | 749585 | 1609 |
| 1407 | 1339810 | 1340373 | 749568 | 749005 | 1223 |
| 1408 | 1340375 | 1340767 | 749003 | 748611 | 1935 |
| 1409 | 1340779 | 1340949 | 748599 | 748429 | 1222 |
| 1410 | 1340951 | 1341502 | 748427 | 747876 | 1934 |
| 1411 | 1341516 | 1342247 | 747862 | 747131 | 1608 |
| 1412 | 1342247 | 1342612 | 747131 | 746766 | 1933 |
| 1413 | 1342624 | 1343049 | 746754 | 746329 | 1221 |
| 1414 | 1343053 | 1343406 | 746325 | 745972 | 1220 |
| 1415 | 1343394 | 1343660 | 745984 | 745718 | 1607 |
| 1416 | 1343657 | 1343953 | 745721 | 745425 | 1932 |
| 1417 | 1343960 | 1344160 | 745418 | 745218 | 1931 |
| 1418 | 1344147 | 1344785 | 745231 | 744593 | 1606 |
| 1419 | 1344782 | 1345252 | 744596 | 744126 | 1930 |
| 1420 | 1345263 | 1345673 | 744115 | 743705 | 1605 |
| 1421 | 1345670 | 1346398 | 743708 | 742980 | 1929 |
| 1422 | 1346403 | 1346663 | 742975 | 742715 | 1604 |
| 1423 | 1346670 | 1347437 | 742708 | 741941 | 1603 |
| 1424 | 1347448 | 1348488 | 741930 | 740890 | 1219 |
| 1425 | 1348490 | 1349344 | 740888 | 740034 | 1928 |
| 1426 | 1349882 | 1351258 | 739496 | 738120 | 1927 |
| 1427 | 1351322 | 1352506 | 738056 | 736872 | 1926 |
| 1428 | 1352613 | 1353269 | 736765 | 736109 | 1602 |
| 1429 | 1354574 | 1355740 | 734804 | 733638 | 590 |
| 1430 | 1355821 | 1356402 | 733557 | 732976 | 1218 |
| 1431 | 1356606 | 1357514 | 732772 | 731864 | 961 |
| 1432 | 1357517 | 1358350 | 731861 | 731028 | 1925 |
| 1433 | 1358441 | 1359433 | 730937 | 729945 | 1924 |
| 1434 | 1361181 | 1362461 | 728197 | 726917 | 962 |
| 1435 | 1362449 | 1362523 | 726929 | 726855 | 591 |
| 1436 | 1363010 | 1363930 | 726368 | 725448 | 1923 |
| 1437 | 1363972 | 1365465 | 725406 | 723913 | 1217 |
| 1438 | 1365589 | 1366155 | 723789 | 723223 | 228 |
| 1439 | 1366195 | 1367346 | 723183 | 722032 | 229 |
| 1440 | 1367357 | 1368481 | 722021 | 720897 | 592 |
| 1441 | 1368582 | 1369193 | 720796 | 720185 | 963 |
| 1442 | 1369248 | 1370567 | 720130 | 718811 | 964 |
| 1443 | 1370627 | 1370989 | 718751 | 718389 | 1922 |
| 1444 | 1371847 | 1372125 | 717531 | 717253 | 230 |
| 1445 | 1372322 | 1373752 | 717056 | 715626 | 593 |
| 1446 | 1373902 | 1376664 | 715476 | 712714 | 231 |
| 1447 | 1376921 | 1378402 | 712457 | 710976 | 594 |
| 1448 | 1378470 | 1379534 | 710908 | 709844 | 1601 |
| 1449 | 1379649 | 1380014 | 709729 | 709364 | 965 |
| 1450 | 1379981 | 1380445 | 709397 | 708933 | 1921 |
| 1451 | 1380532 | 1381284 | 708846 | 708094 | 1216 |
| 1452 | 1381281 | 1382687 | 708097 | 706691 | 1600 |
| 1453 | 1382767 | 1384572 | 706611 | 704806 | 232 |
| 1454 | 1384569 | 1385354 | 704809 | 704024 | 1599 |
| 1455 | 1385351 | 1385914 | 704027 | 703464 | 1920 |
| 1456 | 1386061 | 1387578 | 703317 | 701800 | 1215 |
| 1457 | 1387922 | 1388011 | 701456 | 701367 | 595 |
| 1458 | 1388004 | 1389050 | 701374 | 700328 | 1598 |
| 1459 | 1388485 | 1388589 | 700893 | 700789 | 233 |
| 1460 | 1389047 | 1389982 | 700331 | 699396 | 1919 |
| 1461 | 1390108 | 1390617 | 699270 | 698761 | 234 |
| 1462 | 1390656 | 1391165 | 698722 | 698213 | 966 |
| 1463 | 1391397 | 1391669 | 697981 | 697709 | 967 |
| 1464 | 1393980 | 1394540 | 695398 | 694838 | 968 |
| 1465 | 1396169 | 1396951 | 693209 | 692427 | 596 |
| 1466 | 1396965 | 1397522 | 692413 | 691856 | 969 |
| 1467 | 1397528 | 1397968 | 691850 | 691410 | 1918 |
| 1468 | 1398271 | 1399176 | 691107 | 690202 | 235 |
| 1469 | 1399173 | 1400693 | 690205 | 688685 | 970 |
| 1470 | 1400690 | 1401382 | 688688 | 687996 | 597 |
| 1471 | 1401502 | 1401813 | 687876 | 687565 | 236 |
| 1472 | 1401815 | 1403806 | 687563 | 685572 | 598 |
| 1473 | 1403824 | 1404309 | 685554 | 685069 | 237 |
| 1474 | 1404349 | 1404960 | 685029 | 684418 | 238 |
| 1475 | 1404957 | 1406060 | 684421 | 683318 | 971 |
| 1476 | 1406057 | 1406365 | 683321 | 683013 | 599 |
| 1477 | 1406372 | 1407382 | 683006 | 681996 | 600 |
| 1478 | 1407475 | 1408257 | 681903 | 681121 | 239 |
| 1479 | 1408254 | 1409654 | 681124 | 679724 | 972 |
| 1480 | 1409674 | 1410327 | 679704 | 679051 | 240 |
| 1481 | 1410413 | 1411189 | 678965 | 678189 | 601 |
| 1482 | 1411199 | 1411954 | 678179 | 677424 | 602 |
| 1483 | 1411938 | 1413167 | 677440 | 676211 | 973 |
| 1484 | 1413235 | 1413960 | 676143 | 675418 | 241 |
| 1485 | 1413935 | 1414642 | 675443 | 674736 | 603 |
| 1486 | 1414943 | 1415797 | 674435 | 673581 | 604 |
| 1487 | 1415800 | 1418658 | 673578 | 670720 | 1214 |
| 1488 | 1418655 | 1420457 | 670723 | 668921 | 1597 |
| 1489 | 1420450 | 1420923 | 668928 | 668455 | 1213 |
| 1490 | 1421049 | 1422080 | 668329 | 667298 | 1596 |
| 1491 | 1422217 | 1422759 | 667161 | 666619 | 242 |
| 1492 | 1422740 | 1423594 | 666638 | 665784 | 1917 |
| 1493 | 1423617 | 1424129 | 665761 | 665249 | 1595 |
| 1494 | 1424266 | 1424787 | 665112 | 664591 | 243 |
| 1495 | 1424787 | 1428260 | 664591 | 661118 | 974 |
| 1496 | 1428306 | 1428734 | 661072 | 660644 | 975 |
| 1497 | 1428842 | 1430410 | 660536 | 658968 | 605 |
| 1498 | 1430421 | 1430807 | 658957 | 658571 | 976 |
| 1499 | 1430801 | 1431283 | 658577 | 658095 | 606 |
| 1500 | 1431290 | 1432483 | 658088 | 656895 | 607 |
| 1501 | 1432547 | 1433398 | 656831 | 655980 | 608 |
| 1502 | 1433432 | 1434445 | 655946 | 654933 | 609 |
| 1503 | 1434874 | 1435398 | 654504 | 653980 | 244 |
| 1504 | 1435395 | 1436108 | 653983 | 653270 | 1594 |
| 1505 | 1436180 | 1436593 | 653198 | 652785 | 1916 |
| 1506 | 1436645 | 1436935 | 652733 | 652443 | 1915 |
| 1507 | 1436958 | 1437776 | 652420 | 651602 | 1593 |
| 1508 | 1437769 | 1438527 | 651609 | 650851 | 1212 |
| 1509 | 1438502 | 1439275 | 650876 | 650103 | 1914 |
| 1510 | 1439272 | 1439982 | 650106 | 649396 | 1211 |
| 1511 | 1439994 | 1440776 | 649384 | 648602 | 1592 |
| 1512 | 1441115 | 1441582 | 648263 | 647796 | 610 |
| 1513 | 1441557 | 1441976 | 647821 | 647402 | 1591 |
| 1514 | 1441888 | 1442184 | 647490 | 647194 | 1210 |
| 1515 | 1442268 | 1442525 | 647110 | 646853 | 977 |
| 1516 | 1442602 | 1444524 | 646776 | 644854 | 245 |
| 1517 | 1444521 | 1444967 | 644857 | 644411 | 1590 |
| 1518 | 1445288 | 1446001 | 644090 | 643377 | 1913 |
| 1519 | 1446421 | 1446744 | 642957 | 642634 | 1209 |
| 1520 | 1447018 | 1447827 | 642360 | 641551 | 246 |
| 1521 | 1447763 | 1448299 | 641615 | 641079 | 1912 |
| 1522 | 1448354 | 1448527 | 641024 | 640851 | 1911 |
| 1523 | 1448733 | 1449227 | 640645 | 640151 | 978 |
| 1524 | 1449764 | 1450072 | 639614 | 639306 | 611 |
| 1525 | 1450076 | 1451272 | 639302 | 638106 | 612 |
| 1526 | 1451362 | 1452348 | 638016 | 637030 | 247 |
| 1527 | 1452345 | 1452566 | 637033 | 636812 | 1589 |
| 1528 | 1452921 | 1453571 | 636457 | 635807 | 1588 |
| 1529 | 1453739 | 1453954 | 635639 | 635424 | 613 |
| 1530 | 1454658 | 1454753 | 634720 | 634625 | 1587 |
| 1531 | 1455780 | 1457495 | 633598 | 631883 | 1586 |
| 1532 | 1458373 | 1458516 | 631005 | 630862 | 1208 |
| 1533 | 1460859 | 1461371 | 628519 | 628007 | 1585 |
| 1534 | 1461343 | 1461726 | 628035 | 627652 | 1207 |
| 1535 | 1462494 | 1463108 | 626884 | 626270 | 1584 |
| 1536 | 1463105 | 1464283 | 626273 | 625095 | 1910 |
| 1537 | 1464255 | 1466492 | 625123 | 622886 | 1583 |
| 1538 | 1466599 | 1467609 | 622779 | 621769 | 1206 |
| 1539 | 1467655 | 1467744 | 621723 | 621634 | 248 |
| 1540 | 1467769 | 1467906 | 621609 | 621472 | 249 |
| 1541 | 1467891 | 1468676 | 621487 | 620702 | 1582 |
| 1542 | 1468498 | 1469019 | 620880 | 620359 | 1205 |
| 1543 | 1469265 | 1470533 | 620113 | 618845 | 979 |
| 1544 | 1470609 | 1471790 | 618769 | 617588 | 1581 |
| 1545 | 1471812 | 1471937 | 617566 | 617441 | 1580 |
| 1546 | 1471870 | 1472673 | 617508 | 616705 | 250 |
| 1547 | 1474731 | 1474928 | 614647 | 614450 | 1579 |
| 1548 | 1475072 | 1475983 | 614306 | 613395 | 1909 |
| 1549 | 1477107 | 1477574 | 612271 | 611804 | 980 |
| 1550 | 1477584 | 1479029 | 611794 | 610349 | 1578 |
| 1551 | 1479030 | 1479884 | 610348 | 609494 | 1577 |
| 1552 | 1480088 | 1480873 | 609290 | 608505 | 614 |
| 1553 | 1480960 | 1481781 | 608418 | 607597 | 1204 |
| 1554 | 1481753 | 1481869 | 607625 | 607509 | 1908 |
| 1555 | 1482049 | 1482780 | 607329 | 606598 | 1203 |
| 1556 | 1484422 | 1486413 | 604956 | 602965 | 251 |
| 1557 | 1486448 | 1488211 | 602930 | 601167 | 615 |
| 1558 | 1488253 | 1489308 | 601125 | 600070 | 1202 |
| 1559 | 1489417 | 1490157 | 599961 | 599221 | 252 |
| 1560 | 1490211 | 1490753 | 599167 | 598625 | 981 |
| 1561 | 1490896 | 1491087 | 598482 | 598291 | 253 |
| 1562 | 1491222 | 1491395 | 598156 | 597983 | 1576 |
| 1563 | 1491406 | 1491738 | 597972 | 597640 | 1201 |
| 1564 | 1491692 | 1492225 | 597686 | 597153 | 1907 |
| 1565 | 1492222 | 1492431 | 597156 | 596947 | 1200 |
| 1566 | 1492428 | 1493000 | 596950 | 596378 | 1575 |
| 1567 | 1493037 | 1493573 | 596341 | 595805 | 1574 |
| 1568 | 1493631 | 1494593 | 595747 | 594785 | 1573 |
| 1569 | 1494613 | 1495560 | 594765 | 593818 | 1199 |
| 1570 | 1495557 | 1496564 | 593821 | 592814 | 1572 |
| 1571 | 1496677 | 1497216 | 592701 | 592162 | 1198 |
| 1572 | 1497231 | 1497902 | 592147 | 591476 | 1571 |
| 1573 | 1498015 | 1498506 | 591363 | 590872 | 1197 |
| 1574 | 1499893 | 1500954 | 589485 | 588424 | 1196 |
| 1575 | 1500975 | 1501334 | 588403 | 588044 | 982 |
| 1576 | 1501234 | 1501755 | 588144 | 587623 | 254 |
| 1577 | 1501752 | 1502747 | 587626 | 586631 | 983 |
| 1578 | 1502782 | 1504029 | 586596 | 585349 | 255 |
| 1579 | 1503705 | 1503881 | 585673 | 585497 | 1570 |
| 1580 | 1506454 | 1507683 | 582924 | 581695 | 256 |
| 1581 | 1507680 | 1508369 | 581698 | 581009 | 984 |
| 1582 | 1508513 | 1509250 | 580865 | 580128 | 616 |
| 1583 | 1509284 | 1511584 | 580094 | 577794 | 1906 |
| 1584 | 1512986 | 1513759 | 576392 | 575619 | 617 |
| 1585 | 1513756 | 1514835 | 575622 | 574543 | 257 |
| 1586 | 1515877 | 1516842 | 573501 | 572536 | 258 |
| 1587 | 1518510 | 1518569 | 570868 | 570809 | 1569 |
| 1588 | 1519816 | 1521600 | 569562 | 567778 | 259 |
| 1589 | 1519824 | 1519925 | 569554 | 569453 | 1568 |
| 1590 | 1521735 | 1522592 | 567643 | 566786 | 985 |
| 1591 | 1523210 | 1524667 | 566168 | 564711 | 618 |
| 1592 | 1525075 | 1526076 | 564303 | 563302 | 260 |
| 1593 | 1526066 | 1526449 | 563312 | 562929 | 1905 |
| 1594 | 1529489 | 1530295 | 559889 | 559083 | 619 |
| 1595 | 1530296 | 1530733 | 559082 | 558645 | 620 |
| 1596 | 1530894 | 1536164 | 558484 | 553214 | 986 |
| 1597 | 1536298 | 1536771 | 553080 | 552607 | 261 |
| 1598 | 1536811 | 1537365 | 552567 | 552013 | 262 |
| 1599 | 1540326 | 1541702 | 549052 | 547676 | 987 |
| 1600 | 1541901 | 1543691 | 547477 | 545687 | 1567 |
| 1601 | 1543754 | 1544062 | 545624 | 545316 | 621 |
| 1602 | 1544093 | 1544920 | 545285 | 544458 | 622 |
| 1603 | 1544970 | 1545347 | 544408 | 544031 | 988 |
| 1604 | 1545432 | 1545968 | 543946 | 543410 | 1566 |
| 1605 | 1546165 | 1549362 | 543213 | 540016 | 263 |
| 1606 | 1549370 | 1549522 | 540008 | 539856 | 1904 |
| 1607 | 1550195 | 1551454 | 539183 | 537924 | 1903 |
| 1608 | 1551384 | 1551506 | 537994 | 537872 | 989 |
| 1609 | 1551637 | 1552008 | 537741 | 537370 | 1195 |
| 1610 | 1551975 | 1552217 | 537403 | 537161 | 1565 |
| 1611 | 1552330 | 1553088 | 537048 | 536290 | 264 |
| 1612 | 1553108 | 1555480 | 536270 | 533898 | 1902 |
| 1613 | 1555474 | 1556295 | 533904 | 533083 | 1194 |
| 1614 | 1556455 | 1557438 | 532923 | 531940 | 1193 |
| 1615 | 1557416 | 1558507 | 531962 | 530871 | 1901 |
| 1616 | 1558390 | 1559334 | 530988 | 530044 | 1192 |
| 1617 | 1559337 | 1560350 | 530041 | 529028 | 1564 |
| 1618 | 1560382 | 1561011 | 528996 | 528367 | 1191 |
| 1619 | 1561392 | 1562597 | 527986 | 526781 | 1563 |
| 1620 | 1562832 | 1564286 | 526546 | 525092 | 990 |
| 1621 | 1564489 | 1564938 | 524889 | 524440 | 265 |
| 1622 | 1564960 | 1565772 | 524418 | 523606 | 1190 |
| 1623 | 1565943 | 1569653 | 523435 | 519725 | 991 |
| 1624 | 1569699 | 1571144 | 519679 | 518234 | 1562 |
| 1625 | 1570858 | 1571220 | 518520 | 518158 | 266 |
| 1626 | 1571217 | 1572563 | 518161 | 516815 | 1561 |
| 1627 | 1572612 | 1573637 | 516766 | 515741 | 1560 |
| 1628 | 1573641 | 1573748 | 515737 | 515630 | 1559 |
| 1629 | 1573710 | 1575680 | 515668 | 513698 | 992 |
| 1630 | 1575753 | 1577099 | 513625 | 512279 | 993 |
| 1631 | 1577138 | 1578040 | 512240 | 511338 | 623 |
| 1632 | 1578037 | 1579284 | 511341 | 510094 | 267 |
| 1633 | 1579294 | 1582596 | 510084 | 506782 | 268 |
| 1634 | 1582707 | 1583825 | 506671 | 505553 | 994 |
| 1635 | 1583858 | 1584259 | 505520 | 505119 | 624 |
| 1636 | 1584289 | 1585641 | 505089 | 503737 | 269 |
| 1637 | 1585646 | 1586575 | 503732 | 502803 | 1900 |
| 1638 | 1586361 | 1588547 | 503017 | 500831 | 995 |
| 1639 | 1588597 | 1588962 | 500781 | 500416 | 270 |
| 1640 | 1588919 | 1590214 | 500459 | 499164 | 625 |
| 1641 | 1590298 | 1591578 | 499080 | 497800 | 271 |
| 1642 | 1591902 | 1592372 | 497476 | 497006 | 1558 |
| 1643 | 1592769 | 1593515 | 496609 | 495863 | 996 |
| 1644 | 1593682 | 1594884 | 495696 | 494494 | 1189 |
| 1645 | 1595017 | 1595325 | 494361 | 494053 | 272 |
| 1646 | 1596465 | 1597058 | 492913 | 492320 | 1557 |
| 1647 | 1597751 | 1598509 | 491627 | 490869 | 1899 |
| 1648 | 1598676 | 1599902 | 490702 | 489476 | 997 |
| 1649 | 1599886 | 1600935 | 489492 | 488443 | 273 |
| 1650 | 1601220 | 1601777 | 488158 | 487601 | 998 |
| 1651 | 1603727 | 1603786 | 485651 | 485592 | 626 |
| 1652 | 1604088 | 1604264 | 485290 | 485114 | 1556 |
| 1653 | 1604708 | 1606048 | 484670 | 483330 | 627 |
| 1654 | 1606039 | 1606902 | 483339 | 482476 | 1188 |
| 1655 | 1606912 | 1607685 | 482466 | 481693 | 1187 |
| 1656 | 1607663 | 1607971 | 481715 | 481407 | 1898 |
| 1657 | 1608213 | 1609220 | 481165 | 480158 | 1555 |
| 1658 | 1609231 | 1610190 | 480147 | 479188 | 1186 |
| 1659 | 1610202 | 1611623 | 479176 | 477755 | 1554 |
| 1660 | 1611635 | 1612684 | 477743 | 476694 | 1897 |
| 1661 | 1612865 | 1615312 | 476513 | 474066 | 1896 |
| 1662 | 1615653 | 1616882 | 473725 | 472496 | 999 |
| 1663 | 1616860 | 1617561 | 472518 | 471817 | 274 |
| 1664 | 1617558 | 1618517 | 471820 | 470861 | 1000 |
| 1665 | 1617756 | 1617815 | 471622 | 471563 | 1553 |
| 1666 | 1618578 | 1619276 | 470800 | 470102 | 1001 |
| 1667 | 1619263 | 1621227 | 470115 | 468151 | 1185 |
| 1668 | 1621305 | 1621934 | 468073 | 467444 | 1552 |
| 1669 | 1622735 | 1622920 | 466643 | 466458 | 628 |
| 1670 | 1622922 | 1624112 | 466456 | 465266 | 1002 |
| 1671 | 1624133 | 1625287 | 465245 | 464091 | 629 |
| 1672 | 1625321 | 1625563 | 464057 | 463815 | 630 |
| 1673 | 1625628 | 1625717 | 463750 | 463661 | 1003 |
| 1674 | 1625816 | 1625929 | 463562 | 463449 | 631 |
| 1675 | 1625919 | 1626824 | 463459 | 462554 | 1551 |
| 1676 | 1627009 | 1627614 | 462369 | 461764 | 1184 |
| 1677 | 1627793 | 1629337 | 461585 | 460041 | 632 |
| 1678 | 1629435 | 1630595 | 459943 | 458783 | 1004 |
| 1679 | 1630596 | 1631720 | 458782 | 457658 | 1005 |
| 1680 | 1630637 | 1630705 | 458741 | 458673 | 1895 |
| 1681 | 1631799 | 1633073 | 457579 | 456305 | 1006 |
| 1682 | 1633129 | 1633257 | 456249 | 456121 | 275 |
| 1683 | 1634125 | 1634739 | 455253 | 454639 | 276 |
| 1684 | 1634253 | 1634369 | 455125 | 455009 | 1550 |
| 1685 | 1634744 | 1635046 | 454634 | 454332 | 633 |
| 1686 | 1635049 | 1636365 | 454329 | 453013 | 1183 |
| 1687 | 1636376 | 1637356 | 453002 | 452022 | 634 |
| 1688 | 1637336 | 1638673 | 452042 | 450705 | 1894 |
| 1689 | 1638670 | 1639755 | 450708 | 449623 | 1182 |
| 1690 | 1639752 | 1640816 | 449626 | 448562 | 1549 |
| 1691 | 1640937 | 1641557 | 448441 | 447821 | 1548 |
| 1692 | 1641581 | 1643545 | 447797 | 445833 | 1893 |
| 1693 | 1643712 | 1644038 | 445666 | 445340 | 1007 |
| 1694 | 1644035 | 1644664 | 445343 | 444714 | 1892 |
| 1695 | 1644711 | 1645832 | 444667 | 443546 | 1008 |
| 1696 | 1645842 | 1646195 | 443536 | 443183 | 1009 |
| 1697 | 1646550 | 1647749 | 442828 | 441629 | 1010 |
| 1698 | 1651192 | 1652691 | 438186 | 436687 | 1181 |
| 1699 | 1652842 | 1653462 | 436536 | 435916 | 277 |
| 1700 | 1653443 | 1654624 | 435935 | 434754 | 635 |
| 1701 | 1654676 | 1655512 | 434702 | 433866 | 636 |
| 1702 | 1655924 | 1656976 | 433454 | 432402 | 1891 |
| 1703 | 1657257 | 1658210 | 432121 | 431168 | 1547 |
| 1704 | 1658633 | 1658857 | 430745 | 430521 | 1890 |
| 1705 | 1659540 | 1660034 | 429838 | 429344 | 1011 |
| 1706 | 1660137 | 1660616 | 429241 | 428762 | 1012 |
| 1707 | 1660605 | 1661033 | 428773 | 428345 | 1546 |
| 1708 | 1661293 | 1661439 | 428085 | 427939 | 278 |
| 1709 | 1661519 | 1662583 | 427859 | 426795 | 1889 |
| 1710 | 1662585 | 1666019 | 426793 | 423359 | 1545 |
| 1711 | 1666185 | 1666505 | 423193 | 422873 | 1544 |
| 1712 | 1667046 | 1668500 | 422332 | 420878 | 1543 |
| 1713 | 1668573 | 1668914 | 420805 | 420464 | 1013 |
| 1714 | 1668871 | 1669944 | 420507 | 419434 | 279 |
| 1715 | 1669941 | 1671896 | 419437 | 417482 | 1542 |
| 1716 | 1671856 | 1672545 | 417522 | 416833 | 1180 |
| 1717 | 1672642 | 1672686 | 416736 | 416692 | 1179 |
| 1718 | 1672713 | 1673096 | 416665 | 416282 | 1541 |
| 1719 | 1673965 | 1674999 | 415413 | 414379 | 1178 |
| 1720 | 1675448 | 1676545 | 413930 | 412833 | 637 |
| 1721 | 1676630 | 1677790 | 412748 | 411588 | 638 |
| 1722 | 1677812 | 1678636 | 411566 | 410742 | 639 |
| 1723 | 1678705 | 1679553 | 410673 | 409825 | 280 |
| 1724 | 1679540 | 1680370 | 409838 | 409008 | 640 |
| 1725 | 1680367 | 1681128 | 409011 | 408250 | 281 |
| 1726 | 1681383 | 1681730 | 407995 | 407648 | 1014 |
| 1727 | 1681740 | 1682333 | 407638 | 407045 | 1015 |
| 1728 | 1682428 | 1682817 | 406950 | 406561 | 282 |
| 1729 | 1682818 | 1683495 | 406560 | 405883 | 1177 |
| 1730 | 1683568 | 1684578 | 405810 | 404800 | 1176 |
| 1731 | 1684439 | 1684564 | 404939 | 404814 | 641 |
| 1732 | 1685535 | 1686689 | 403843 | 402689 | 1540 |
| 1733 | 1686869 | 1687045 | 402509 | 402333 | 642 |
| 1734 | 1687089 | 1687931 | 402289 | 401447 | 1016 |
| 1735 | 1687932 | 1689299 | 401446 | 400079 | 1539 |
| 1736 | 1689399 | 1690175 | 399979 | 399203 | 1017 |
| 1737 | 1691003 | 1692442 | 398375 | 396936 | 1888 |
| 1738 | 1692515 | 1693180 | 396863 | 396198 | 643 |
| 1739 | 1693184 | 1693489 | 396194 | 395889 | 644 |
| 1740 | 1693499 | 1694056 | 395879 | 395322 | 645 |
| 1741 | 1694157 | 1695629 | 395221 | 393749 | 1018 |
| 1742 | 1695642 | 1696265 | 393736 | 393113 | 1538 |
| 1743 | 1696275 | 1697726 | 393103 | 391652 | 1537 |
| 1744 | 1697807 | 1698145 | 391571 | 391233 | 646 |
| 1745 | 1699092 | 1699178 | 390286 | 390200 | 1019 |
| 1746 | 1699622 | 1700173 | 389756 | 389205 | 1887 |
| 1747 | 1700210 | 1701493 | 389168 | 387885 | 1886 |
| 1748 | 1703531 | 1704163 | 385847 | 385215 | 647 |
| 1749 | 1704224 | 1704970 | 385154 | 384408 | 1885 |
| 1750 | 1704989 | 1705141 | 384389 | 384237 | 1884 |
| 1751 | 1705367 | 1706314 | 384011 | 383064 | 1883 |
| 1752 | 1706139 | 1706984 | 383239 | 382394 | 1020 |
| 1753 | 1706986 | 1707378 | 382392 | 382000 | 283 |
| 1754 | 1707375 | 1708133 | 382003 | 381245 | 1536 |
| 1755 | 1708168 | 1710714 | 381210 | 378664 | 1175 |
| 1756 | 1710855 | 1711487 | 378523 | 377891 | 1535 |
| 1757 | 1712778 | 1714040 | 376600 | 375338 | 1021 |
| 1758 | 1714040 | 1716247 | 375338 | 373131 | 648 |
| 1759 | 1716248 | 1721644 | 373130 | 367734 | 649 |
| 1760 | 1721669 | 1722406 | 367709 | 366972 | 650 |
| 1761 | 1722894 | 1723436 | 366484 | 365942 | 1022 |
| 1762 | 1725222 | 1725860 | 364156 | 363518 | 1023 |
| 1763 | 1725857 | 1726705 | 363521 | 362673 | 1882 |
| 1764 | 1727964 | 1729022 | 361414 | 360356 | 1024 |
| 1765 | 1729029 | 1729787 | 360349 | 359591 | 1025 |
| 1766 | 1729784 | 1730227 | 359594 | 359151 | 651 |
| 1767 | 1730270 | 1731955 | 359108 | 357423 | 652 |
| 1768 | 1731945 | 1732280 | 357433 | 357098 | 1534 |
| 1769 | 1732332 | 1732982 | 357046 | 356396 | 1533 |
| 1770 | 1732998 | 1733120 | 356380 | 356258 | 1532 |
| 1771 | 1733473 | 1734267 | 355905 | 355111 | 284 |
| 1772 | 1734255 | 1735046 | 355123 | 354332 | 1531 |
| 1773 | 1735212 | 1735793 | 354166 | 353585 | 1026 |
| 1774 | 1736419 | 1736520 | 352959 | 352858 | 285 |
| 1775 | 1736456 | 1736896 | 352922 | 352482 | 653 |
| 1776 | 1736893 | 1737423 | 352485 | 351955 | 1174 |
| 1777 | 1737620 | 1738414 | 351758 | 350964 | 1881 |
| 1778 | 1738777 | 1739505 | 350601 | 349873 | 1173 |
| 1779 | 1739502 | 1739852 | 349876 | 349526 | 1530 |
| 1780 | 1739935 | 1740549 | 349443 | 348829 | 1172 |
| 1781 | 1740792 | 1741826 | 348586 | 347552 | 1027 |
| 1782 | 1741926 | 1743704 | 347452 | 345674 | 1028 |
| 1783 | 1743694 | 1743957 | 345684 | 345421 | 1171 |
| 1784 | 1743938 | 1744243 | 345440 | 345135 | 1880 |
| 1785 | 1744245 | 1745591 | 345133 | 343787 | 1529 |
| 1786 | 1745650 | 1746300 | 343728 | 343078 | 286 |
| 1787 | 1746894 | 1747268 | 342484 | 342110 | 1029 |
| 1788 | 1747308 | 1748660 | 342070 | 340718 | 1030 |
| 1789 | 1749755 | 1749931 | 339623 | 339447 | 1879 |
| 1790 | 1749900 | 1749992 | 339478 | 339386 | 1031 |
| 1791 | 1750416 | 1751543 | 338962 | 337835 | 1528 |
| 1792 | 1751717 | 1752793 | 337661 | 336585 | 1878 |
| 1793 | 1752795 | 1753493 | 336583 | 335885 | 1527 |
| 1794 | 1753468 | 1755291 | 335910 | 334087 | 1170 |
| 1795 | 1755444 | 1756100 | 333934 | 333278 | 1526 |
| 1796 | 1756133 | 1756924 | 333245 | 332454 | 1877 |
| 1797 | 1757029 | 1757460 | 332349 | 331918 | 1169 |
| 1798 | 1757494 | 1758735 | 331884 | 330643 | 1168 |
| 1799 | 1758870 | 1758998 | 330508 | 330380 | 1525 |
| 1800 | 1760394 | 1760735 | 328984 | 328643 | 1032 |
| 1801 | 1762166 | 1762558 | 327212 | 326820 | 1876 |
| 1802 | 1762676 | 1762846 | 326702 | 326532 | 654 |
| 1803 | 1762843 | 1763493 | 326535 | 325885 | 1167 |
| 1804 | 1763590 | 1764141 | 325788 | 325237 | 287 |
| 1805 | 1764136 | 1764609 | 325242 | 324769 | 1166 |
| 1806 | 1764704 | 1765804 | 324674 | 323574 | 655 |
| 1807 | 1765840 | 1766682 | 323538 | 322696 | 288 |
| 1808 | 1766679 | 1767068 | 322699 | 322310 | 1033 |
| 1809 | 1767079 | 1767885 | 322299 | 321493 | 1165 |
| 1810 | 1767919 | 1768269 | 321459 | 321109 | 1164 |
| 1811 | 1768271 | 1769350 | 321107 | 320028 | 1875 |
| 1812 | 1769469 | 1770143 | 319909 | 319235 | 1524 |
| 1813 | 1770892 | 1772169 | 318486 | 317209 | 289 |
| 1814 | 1772144 | 1772719 | 317234 | 316659 | 1874 |
| 1815 | 1772653 | 1773303 | 316725 | 316075 | 1163 |
| 1816 | 1773571 | 1774485 | 315807 | 314893 | 1162 |
| 1817 | 1774489 | 1775145 | 314889 | 314233 | 1161 |
| 1818 | 1775139 | 1776068 | 314239 | 313310 | 1523 |
| 1819 | 1776073 | 1776540 | 313305 | 312838 | 1160 |
| 1820 | 1776586 | 1777293 | 312792 | 312085 | 290 |
| 1821 | 1777281 | 1777811 | 312097 | 311567 | 1034 |
| 1822 | 1777799 | 1778830 | 311579 | 310548 | 656 |
| 1823 | 1779069 | 1779554 | 310309 | 309824 | 1035 |
| 1824 | 1779558 | 1779923 | 309820 | 309455 | 1522 |
| 1825 | 1779979 | 1781619 | 309399 | 307759 | 1159 |
| 1826 | 1781597 | 1782928 | 307781 | 306450 | 657 |
| 1827 | 1782866 | 1783828 | 306512 | 305550 | 1873 |
| 1828 | 1784010 | 1784594 | 305368 | 304784 | 1036 |
| 1829 | 1784774 | 1784953 | 304604 | 304425 | 658 |
| 1830 | 1784955 | 1786151 | 304423 | 303227 | 1037 |
| 1831 | 1786148 | 1787092 | 303230 | 302286 | 659 |
| 1832 | 1787147 | 1787473 | 302231 | 301905 | 660 |
| 1833 | 1787485 | 1788669 | 301893 | 300709 | 291 |
| 1834 | 1788671 | 1789675 | 300707 | 299703 | 661 |
| 1835 | 1789714 | 1790697 | 299664 | 298681 | 292 |
| 1836 | 1790705 | 1791568 | 298673 | 297810 | 662 |
| 1837 | 1791624 | 1791959 | 297754 | 297419 | 1038 |
| 1838 | 1791963 | 1792769 | 297415 | 296609 | 1039 |
| 1839 | 1792792 | 1793328 | 296586 | 296050 | 293 |
| 1840 | 1793325 | 1794524 | 296053 | 294854 | 1521 |
| 1841 | 1794521 | 1794823 | 294857 | 294555 | 1872 |
| 1842 | 1794964 | 1796124 | 294414 | 293254 | 294 |
| 1843 | 1796129 | 1797154 | 293249 | 292224 | 1871 |
| 1844 | 1797235 | 1797561 | 292143 | 291817 | 1158 |
| 1845 | 1797561 | 1797665 | 291817 | 291713 | 1520 |
| 1846 | 1797874 | 1798116 | 291504 | 291262 | 1157 |
| 1847 | 1798158 | 1800545 | 291220 | 288833 | 1519 |
| 1848 | 1800686 | 1801306 | 288692 | 288072 | 1870 |
| 1849 | 1801592 | 1802125 | 287786 | 287253 | 663 |
| 1850 | 1802245 | 1803363 | 287133 | 286015 | 1156 |
| 1851 | 1803363 | 1803602 | 286015 | 285776 | 1518 |
| 1852 | 1803666 | 1804280 | 285712 | 285098 | 1040 |
| 1853 | 1804317 | 1804535 | 285061 | 284843 | 1517 |
| 1854 | 1804571 | 1805047 | 284807 | 284331 | 1869 |
| 1855 | 1805521 | 1805853 | 283857 | 283525 | 1155 |
| 1856 | 1805911 | 1806657 | 283467 | 282721 | 1154 |
| 1857 | 1806654 | 1807073 | 282724 | 282305 | 1516 |
| 1858 | 1807161 | 1808084 | 282217 | 281294 | 1041 |
| 1859 | 1808249 | 1808404 | 281129 | 280974 | 664 |
| 1860 | 1808394 | 1808819 | 280984 | 280559 | 1515 |
| 1861 | 1808985 | 1811618 | 280393 | 277760 | 1042 |
| 1862 | 1811744 | 1812487 | 277634 | 276891 | 665 |
| 1863 | 1812518 | 1813510 | 276860 | 275868 | 1868 |
| 1864 | 1813353 | 1813550 | 276025 | 275828 | 1043 |
| 1865 | 1813638 | 1814054 | 275740 | 275324 | 1514 |
| 1866 | 1814141 | 1814644 | 275237 | 274734 | 1867 |
| 1867 | 1814559 | 1814648 | 274819 | 274730 | 1044 |
| 1868 | 1814829 | 1815962 | 274549 | 273416 | 1045 |
| 1869 | 1815959 | 1817002 | 273419 | 272376 | 666 |
| 1870 | 1816999 | 1817745 | 272379 | 271633 | 295 |
| 1871 | 1817756 | 1818715 | 271622 | 270663 | 667 |
| 1872 | 1819570 | 1819776 | 269808 | 269602 | 1153 |
| 1873 | 1820187 | 1820936 | 269191 | 268442 | 1513 |
| 1874 | 1820961 | 1821659 | 268417 | 267719 | 1512 |
| 1875 | 1821659 | 1821841 | 267719 | 267537 | 1866 |
| 1876 | 1822105 | 1823073 | 267273 | 266305 | 296 |
| 1877 | 1823702 | 1823782 | 265676 | 265596 | 1865 |
| 1878 | 1823857 | 1824675 | 265521 | 264703 | 297 |
| 1879 | 1824662 | 1825624 | 264716 | 263754 | 1864 |
| 1880 | 1825648 | 1826151 | 263730 | 263227 | 298 |
| 1881 | 1826226 | 1826504 | 263152 | 262874 | 1511 |
| 1882 | 1826572 | 1826886 | 262806 | 262492 | 299 |
| 1883 | 1826859 | 1827470 | 262519 | 261908 | 1046 |
| 1884 | 1827563 | 1828408 | 261815 | 260970 | 1863 |
| 1885 | 1828493 | 1829698 | 260885 | 259680 | 668 |
| 1886 | 1829731 | 1830558 | 259647 | 258820 | 300 |
| 1887 | 1830621 | 1831115 | 258757 | 258263 | 1510 |
| 1888 | 1831076 | 1831645 | 258302 | 257733 | 1862 |
| 1889 | 1831699 | 1832772 | 257679 | 256606 | 301 |
| 1890 | 1832777 | 1833709 | 256601 | 255669 | 669 |
| 1891 | 1833706 | 1834158 | 255672 | 255220 | 1152 |
| 1892 | 1834155 | 1834856 | 255223 | 254522 | 1509 |
| 1893 | 1834992 | 1835603 | 254386 | 253775 | 1047 |
| 1894 | 1835581 | 1836201 | 253797 | 253177 | 302 |
| 1895 | 1836239 | 1837111 | 253139 | 252267 | 670 |
| 1896 | 1837108 | 1838508 | 252270 | 250870 | 1151 |
| 1897 | 1838515 | 1839846 | 250863 | 249532 | 1150 |
| 1898 | 1839843 | 1842821 | 249535 | 246557 | 1508 |
| 1899 | 1842996 | 1844864 | 246382 | 244514 | 1507 |
| 1900 | 1844947 | 1845273 | 244431 | 244105 | 303 |
| 1901 | 1845241 | 1845942 | 244137 | 243436 | 1149 |
| 1902 | 1845932 | 1846168 | 243446 | 243210 | 671 |
| 1903 | 1846267 | 1847184 | 243111 | 242194 | 1148 |
| 1904 | 1847191 | 1848111 | 242187 | 241267 | 1147 |
| 1905 | 1848117 | 1849664 | 241261 | 239714 | 1506 |
| 1906 | 1853437 | 1853742 | 235941 | 235636 | 1146 |
| 1907 | 1853826 | 1853894 | 235552 | 235484 | 1048 |
| 1908 | 1853933 | 1854607 | 235445 | 234771 | 1861 |
| 1909 | 1854612 | 1855832 | 234766 | 233546 | 1505 |
| 1910 | 1855928 | 1857586 | 233450 | 231792 | 1860 |
| 1911 | 1857656 | 1858012 | 231722 | 231366 | 672 |
| 1912 | 1858017 | 1859300 | 231361 | 230078 | 1504 |
| 1913 | 1859380 | 1859607 | 229998 | 229771 | 1145 |
| 1914 | 1859695 | 1860141 | 229683 | 229237 | 1144 |
| 1915 | 1860556 | 1860741 | 228822 | 228637 | 1143 |
| 1916 | 1860814 | 1862100 | 228564 | 227278 | 1142 |
| 1917 | 1862097 | 1862900 | 227281 | 226478 | 1503 |
| 1918 | 1862902 | 1863786 | 226476 | 225592 | 1141 |
| 1919 | 1863783 | 1864895 | 225595 | 224483 | 1502 |
| 1920 | 1865656 | 1866711 | 223722 | 222667 | 304 |
| 1921 | 1866693 | 1867223 | 222685 | 222155 | 1049 |
| 1922 | 1867473 | 1868666 | 221905 | 220712 | 1050 |
| 1923 | 1868696 | 1869637 | 220682 | 219741 | 673 |
| 1924 | 1869643 | 1870143 | 219735 | 219235 | 305 |
| 1925 | 1870833 | 1871861 | 218545 | 217517 | 1051 |
| 1926 | 1872015 | 1872557 | 217363 | 216821 | 1052 |
| 1927 | 1872533 | 1872811 | 216845 | 216567 | 674 |
| 1928 | 1872808 | 1873179 | 216570 | 216199 | 306 |
| 1929 | 1873176 | 1873442 | 216202 | 215936 | 1053 |
| 1930 | 1873439 | 1873735 | 215939 | 215643 | 675 |
| 1931 | 1873732 | 1874181 | 215646 | 215197 | 307 |
| 1932 | 1874169 | 1874537 | 215209 | 214841 | 1054 |
| 1933 | 1874534 | 1876078 | 214844 | 213300 | 676 |
| 1934 | 1876071 | 1876427 | 213307 | 212951 | 1055 |
| 1935 | 1876465 | 1876995 | 212913 | 212383 | 308 |
| 1936 | 1876992 | 1877561 | 212386 | 211817 | 1056 |
| 1937 | 1877558 | 1878838 | 211820 | 210540 | 677 |
| 1938 | 1878843 | 1879835 | 210535 | 209543 | 1057 |
| 1939 | 1879832 | 1880263 | 209546 | 209115 | 678 |
| 1940 | 1880264 | 1880797 | 209114 | 208581 | 1859 |
| 1941 | 1880784 | 1881278 | 208594 | 208100 | 1501 |
| 1942 | 1881271 | 1881759 | 208107 | 207619 | 1140 |
| 1943 | 1881790 | 1882272 | 207588 | 207106 | 1139 |
| 1944 | 1882334 | 1883542 | 207044 | 205836 | 679 |
| 1945 | 1883543 | 1884076 | 205835 | 205302 | 680 |
| 1946 | 1884157 | 1885149 | 205221 | 204229 | 309 |
| 1947 | 1885281 | 1886627 | 204097 | 202751 | 1058 |
| 1948 | 1886671 | 1887270 | 202707 | 202108 | 310 |
| 1949 | 1887267 | 1887560 | 202111 | 201818 | 1500 |
| 1950 | 1887544 | 1888218 | 201834 | 201160 | 1138 |
| 1951 | 1888724 | 1890025 | 200654 | 199353 | 681 |
| 1952 | 1890006 | 1890557 | 199372 | 198821 | 1499 |
| 1953 | 1890634 | 1894026 | 198744 | 195352 | 311 |
| 1954 | 1894318 | 1894365 | 195060 | 195013 | 312 |
| 1955 | 1894442 | 1895158 | 194936 | 194220 | 682 |
| 1956 | 1895222 | 1895692 | 194156 | 193686 | 1858 |
| 1957 | 1895730 | 1896284 | 193648 | 193094 | 1498 |
| 1958 | 1896330 | 1896818 | 193048 | 192560 | 1497 |
| 1959 | 1896886 | 1897806 | 192492 | 191572 | 313 |
| 1960 | 1897803 | 1898744 | 191575 | 190634 | 1496 |
| 1961 | 1898830 | 1899255 | 190548 | 190123 | 1137 |
| 1962 | 1899309 | 1900178 | 190069 | 189200 | 1059 |
| 1963 | 1900171 | 1900881 | 189207 | 188497 | 1136 |
| 1964 | 1901205 | 1901720 | 188173 | 187658 | 1495 |
| 1965 | 1901783 | 1902706 | 187595 | 186672 | 683 |
| 1966 | 1902746 | 1903273 | 186632 | 186105 | 684 |
| 1967 | 1903277 | 1904434 | 186101 | 184944 | 685 |
| 1968 | 1904431 | 1905462 | 184947 | 183916 | 314 |
| 1969 | 1905501 | 1906337 | 183877 | 183041 | 1060 |
| 1970 | 1906334 | 1907098 | 183044 | 182280 | 1857 |
| 1971 | 1907089 | 1908066 | 182289 | 181312 | 1135 |
| 1972 | 1908127 | 1909461 | 181251 | 179917 | 1134 |
| 1973 | 1909517 | 1910014 | 179861 | 179364 | 686 |
| 1974 | 1910023 | 1910727 | 179355 | 178651 | 315 |
| 1975 | 1912010 | 1912546 | 177368 | 176832 | 687 |
| 1976 | 1912651 | 1912902 | 176727 | 176476 | 316 |
| 1977 | 1912921 | 1913589 | 176457 | 175789 | 1133 |
| 1978 | 1913472 | 1914050 | 175906 | 175328 | 1494 |
| 1979 | 1914387 | 1914812 | 174991 | 174566 | 1493 |
| 1980 | 1914882 | 1916204 | 174496 | 173174 | 1492 |
| 1981 | 1916252 | 1916479 | 173126 | 172899 | 688 |
| 1982 | 1916521 | 1917351 | 172857 | 172027 | 317 |
| 1983 | 1917310 | 1917879 | 172068 | 171499 | 1132 |
| 1984 | 1918215 | 1918709 | 171163 | 170669 | 1061 |
| 1985 | 1918693 | 1920390 | 170685 | 168988 | 1131 |
| 1986 | 1920429 | 1921331 | 168949 | 168047 | 1491 |
| 1987 | 1921407 | 1923065 | 167971 | 166313 | 1490 |
| 1988 | 1923377 | 1923970 | 166001 | 165408 | 1856 |
| 1989 | 1923967 | 1924317 | 165411 | 165061 | 1130 |
| 1990 | 1924478 | 1926250 | 164900 | 163128 | 689 |
| 1991 | 1926252 | 1926566 | 163126 | 162812 | 1062 |
| 1992 | 1926707 | 1929025 | 162671 | 160353 | 690 |
| 1993 | 1929037 | 1930491 | 160341 | 158887 | 1129 |
| 1994 | 1930573 | 1930920 | 158805 | 158458 | 318 |
| 1995 | 1930917 | 1931588 | 158461 | 157790 | 1063 |
| 1996 | 1931535 | 1932002 | 157843 | 157376 | 1489 |
| 1997 | 1932193 | 1932927 | 157185 | 156451 | 319 |
| 1998 | 1932928 | 1933236 | 156450 | 156142 | 1128 |
| 1999 | 1933306 | 1933578 | 156072 | 155800 | 320 |
| 2000 | 1933671 | 1934051 | 155707 | 155327 | 1064 |
| 2001 | 1934029 | 1935735 | 155349 | 153643 | 1127 |
| 2002 | 1935745 | 1936650 | 153633 | 152728 | 1126 |
| 2003 | 1936888 | 1937835 | 152490 | 151543 | 1125 |
| 2004 | 1937965 | 1939305 | 151413 | 150073 | 1124 |
| 2005 | 1941378 | 1941863 | 148000 | 147515 | 1065 |
| 2006 | 1942184 | 1942507 | 147194 | 146871 | 691 |
| 2007 | 1942618 | 1944576 | 146760 | 144802 | 1123 |
| 2008 | 1944729 | 1945865 | 144649 | 143513 | 1488 |
| 2009 | 1945993 | 1946349 | 143385 | 143029 | 1122 |
| 2010 | 1947328 | 1948446 | 142050 | 140932 | 321 |
| 2011 | 1948368 | 1949834 | 141010 | 139544 | 1066 |
| 2012 | 1949788 | 1951875 | 139590 | 137503 | 1121 |
| 2013 | 1951825 | 1953192 | 137553 | 136186 | 322 |
| 2014 | 1953189 | 1954478 | 136189 | 134900 | 1067 |
| 2015 | 1954540 | 1955208 | 134838 | 134170 | 323 |
| 2016 | 1955253 | 1957394 | 134125 | 131984 | 1068 |
| 2017 | 1957397 | 1958206 | 131981 | 131172 | 1855 |
| 2018 | 1958454 | 1958975 | 130924 | 130403 | 1487 |
| 2019 | 1959384 | 1959980 | 129994 | 129398 | 1486 |
| 2020 | 1959997 | 1960209 | 129381 | 129169 | 1120 |
| 2021 | 1961911 | 1965690 | 127467 | 123688 | 1119 |
| 2022 | 1962226 | 1962360 | 127152 | 127018 | 324 |
| 2023 | 1964567 | 1964629 | 124811 | 124749 | 692 |
| 2024 | 1965873 | 1966658 | 123505 | 122720 | 1069 |
| 2025 | 1966899 | 1969403 | 122479 | 119975 | 1070 |
| 2026 | 1969396 | 1970652 | 119982 | 118726 | 325 |
| 2027 | 1970804 | 1971262 | 118574 | 118116 | 693 |
| 2028 | 1971328 | 1971672 | 118050 | 117706 | 326 |
| 2029 | 1971682 | 1972395 | 117696 | 116983 | 327 |
| 2030 | 1972493 | 1973851 | 116885 | 115527 | 694 |
| 2031 | 1974299 | 1975357 | 115079 | 114021 | 1854 |
| 2032 | 1975695 | 1977017 | 113683 | 112361 | 1071 |
| 2033 | 1976971 | 1977399 | 112407 | 111979 | 1118 |
| 2034 | 1977396 | 1977704 | 111982 | 111674 | 1485 |
| 2035 | 1977819 | 1978400 | 111559 | 110978 | 1484 |
| 2036 | 1978397 | 1978993 | 110981 | 110385 | 1853 |
| 2037 | 1978966 | 1979769 | 110412 | 109609 | 1117 |
| 2038 | 1979866 | 1980489 | 109512 | 108889 | 328 |
| 2039 | 1980484 | 1980942 | 108894 | 108436 | 1116 |
| 2040 | 1980946 | 1981878 | 108432 | 107500 | 1115 |
| 2041 | 1981986 | 1982897 | 107392 | 106481 | 1072 |
| 2042 | 1982894 | 1983307 | 106484 | 106071 | 695 |
| 2043 | 1983573 | 1984325 | 105805 | 105053 | 1483 |
| 2044 | 1984369 | 1985724 | 105009 | 103654 | 1114 |
| 2045 | 1985942 | 1987522 | 103436 | 101856 | 696 |
| 2046 | 1987535 | 1988848 | 101843 | 100530 | 1852 |
| 2047 | 1988883 | 1989671 | 100495 | 99707 | 1482 |
| 2048 | 1989712 | 1990701 | 99666 | 98677 | 1113 |
| 2049 | 1991043 | 1992029 | 98335 | 97349 | 1481 |
| 2050 | 1992178 | 1993323 | 97200 | 96055 | 1112 |
| 2051 | 1993320 | 1993928 | 96058 | 95450 | 1480 |
| 2052 | 1993956 | 1994684 | 95422 | 94694 | 1479 |
| 2053 | 1994681 | 1995694 | 94697 | 93684 | 1851 |
| 2054 | 1995731 | 1997062 | 93647 | 92316 | 1850 |
| 2055 | 1997062 | 1999713 | 92316 | 89665 | 1111 |
| 2056 | 1999710 | 2001092 | 89668 | 88286 | 1478 |
| 2057 | 2001233 | 2003020 | 88145 | 86358 | 1849 |
| 2058 | 2003136 | 2003711 | 86242 | 85667 | 1073 |
| 2059 | 2003696 | 2004217 | 85682 | 85161 | 697 |
| 2060 | 2004220 | 2004576 | 85158 | 84802 | 1110 |
| 2061 | 2004890 | 2004943 | 84488 | 84435 | 698 |
| 2062 | 2005188 | 2006615 | 84190 | 82763 | 1477 |
| 2063 | 2006536 | 2009136 | 82842 | 80242 | 329 |
| 2064 | 2009133 | 2010641 | 80245 | 78737 | 1074 |
| 2065 | 2010697 | 2012013 | 78681 | 77365 | 330 |
| 2066 | 2012072 | 2012314 | 77306 | 77064 | 699 |
| 2067 | 2012311 | 2012514 | 77067 | 76864 | 1109 |
| 2068 | 2012712 | 2013572 | 76666 | 75806 | 1476 |
| 2069 | 2013609 | 2014661 | 75769 | 74717 | 1475 |
| 2070 | 2014525 | 2015568 | 74853 | 73810 | 1108 |
| 2071 | 2015632 | 2016564 | 73746 | 72814 | 1107 |
| 2072 | 2016684 | 2017421 | 72694 | 71957 | 1075 |
| 2073 | 2017378 | 2018802 | 72000 | 70576 | 331 |
| 2074 | 2019182 | 2019406 | 70196 | 69972 | 1848 |
| 2075 | 2019763 | 2020425 | 69615 | 68953 | 1106 |
| 2076 | 2020435 | 2021076 | 68943 | 68302 | 1105 |
| 2077 | 2021157 | 2021522 | 68221 | 67856 | 1076 |
| 2078 | 2021495 | 2022214 | 67883 | 67164 | 700 |
| 2079 | 2022269 | 2023111 | 67109 | 66267 | 701 |
| 2080 | 2025340 | 2025417 | 64038 | 63961 | 332 |
| 2081 | 2028631 | 2028912 | 60747 | 60466 | 333 |
| 2082 | 2028914 | 2029489 | 60464 | 59889 | 702 |
| 2083 | 2029483 | 2030094 | 59895 | 59284 | 1104 |
| 2084 | 2030142 | 2031023 | 59236 | 58355 | 1474 |
| 2085 | 2031138 | 2032727 | 58240 | 56651 | 1077 |
| 2086 | 2032734 | 2033420 | 56644 | 55958 | 1473 |
| 2087 | 2033501 | 2034466 | 55877 | 54912 | 703 |
| 2088 | 2034330 | 2035610 | 55048 | 53768 | 1078 |
| 2089 | 2035637 | 2036254 | 53741 | 53124 | 704 |
| 2090 | 2036331 | 2036594 | 53047 | 52784 | 1079 |
| 2091 | 2036609 | 2037244 | 52769 | 52134 | 705 |
| 2092 | 2037290 | 2038219 | 52088 | 51159 | 706 |
| 2093 | 2038219 | 2039394 | 51159 | 49984 | 334 |
| 2094 | 2039429 | 2040040 | 49949 | 49338 | 707 |
| 2095 | 2039994 | 2040326 | 49384 | 49052 | 1080 |
| 2096 | 2040316 | 2040816 | 49062 | 48562 | 1103 |
| 2097 | 2040797 | 2041732 | 48581 | 47646 | 1847 |
| 2098 | 2043010 | 2044203 | 46368 | 45175 | 1102 |
| 2099 | 2044340 | 2045170 | 45038 | 44208 | 708 |
| 2100 | 2045127 | 2046032 | 44251 | 43346 | 1472 |
| 2101 | 2046077 | 2047399 | 43301 | 41979 | 709 |
| 2102 | 2047406 | 2047780 | 41972 | 41598 | 710 |
| 2103 | 2047777 | 2048313 | 41601 | 41065 | 1101 |
| 2104 | 2048320 | 2049099 | 41058 | 40279 | 1100 |
| 2105 | 2049106 | 2049471 | 40272 | 39907 | 1099 |
| 2106 | 2050697 | 2051614 | 38681 | 37764 | 711 |
| 2107 | 2051664 | 2051900 | 37714 | 37478 | 1081 |
| 2108 | 2051888 | 2052298 | 37490 | 37080 | 712 |
| 2109 | 2052295 | 2053014 | 37083 | 36364 | 335 |
| 2110 | 2053125 | 2053190 | 36253 | 36188 | 1082 |
| 2111 | 2055992 | 2057146 | 33386 | 32232 | 1846 |
| 2112 | 2057204 | 2057467 | 32174 | 31911 | 1845 |
| 2113 | 2057477 | 2058655 | 31901 | 30723 | 1844 |
| 2114 | 2058742 | 2059149 | 30636 | 30229 | 1098 |
| 2115 | 2059310 | 2059501 | 30068 | 29877 | 713 |
| 2116 | 2059560 | 2060801 | 29818 | 28577 | 1083 |
| 2117 | 2060819 | 2061598 | 28559 | 27780 | 714 |
| 2118 | 2061501 | 2061911 | 27877 | 27467 | 1084 |
| 2119 | 2061997 | 2062446 | 27381 | 26932 | 1097 |
| 2120 | 2062448 | 2062966 | 26930 | 26412 | 1843 |
| 2121 | 2062966 | 2063607 | 26412 | 25771 | 1096 |
| 2122 | 2063612 | 2064214 | 25766 | 25164 | 1842 |
| 2123 | 2064280 | 2065428 | 25098 | 23950 | 1095 |
| 2124 | 2065471 | 2066778 | 23907 | 22600 | 1094 |
| 2125 | 2066863 | 2067558 | 22515 | 21820 | 336 |
| 2126 | 2067623 | 2068384 | 21755 | 20994 | 715 |
| 2127 | 2068384 | 2069838 | 20994 | 19540 | 337 |
| 2128 | 2069828 | 2070184 | 19550 | 19194 | 1841 |
| 2129 | 2070189 | 2070728 | 19189 | 18650 | 1471 |
| 2130 | 2070778 | 2071599 | 18600 | 17779 | 1093 |
| 2131 | 2071722 | 2072069 | 17656 | 17309 | 1085 |
| 2132 | 2072066 | 2072986 | 17312 | 16392 | 716 |
| 2133 | 2073002 | 2073490 | 16376 | 15888 | 717 |
| 2134 | 2073534 | 2073737 | 15844 | 15641 | 1470 |
| 2135 | 2074012 | 2075424 | 15366 | 13954 | 338 |
| 2136 | 2075557 | 2076162 | 13821 | 13216 | 339 |
| 2137 | 2076199 | 2076411 | 13179 | 12967 | 1092 |
| 2138 | 2076528 | 2076959 | 12850 | 12419 | 1086 |
| 2139 | 2076986 | 2077663 | 12392 | 11715 | 718 |
| 2140 | 2077703 | 2078152 | 11675 | 11226 | 719 |
| 2141 | 2078164 | 2078964 | 11214 | 10414 | 1091 |
| 2142 | 2079001 | 2080026 | 10377 | 9352 | 1090 |
| 2143 | 2080319 | 2082169 | 9059 | 7209 | 720 |
| 2144 | 2082376 | 2082897 | 7002 | 6481 | 340 |
| 2145 | 2082919 | 2083284 | 6459 | 6094 | 1089 |
| 2146 | 2083288 | 2084007 | 6090 | 5371 | 1088 |
| 2147 | 2084057 | 2085316 | 5321 | 4062 | 1840 |
| 2148 | 2085470 | 2087110 | 3908 | 2268 | 721 |
| 2149 | 2087216 | 2088568 | 2162 | 810 | 1839 |
| 2150 | 2088670 | 2088921 | 708 | 457 | 341 |
| 2151 | 2088905 | 2089378 | 473 | 0 | 722 |

In one embodiment, such a region is selected from the group consisting of genes (1) through (2151).

[0273] As used herein, in the above Table, translated amino acid sequences usually start with methionine, and is identified as “amino acid SEQ ID No: Y (SEQ ID NO: 2-341, 343-722, 724-1086, 1088-1468, 1470-1837, and 1839-2157)”, however the other reading frames may also be readily translated using known molecular biological techniques. It is also understood that the polypeptide produced by another open reading frame is also encompassed in the scope of the present invention.

[0274] The accuracy of the sequence disclosed herein is sufficient and suitable for a variety of applications well known in the art and further described hereinbelow. For example, the sequence of the open reading frame region of SEQ ID NO: 1 is useful for designing a nucleic acid hybridization probe for detection of cDNA contained in the nucleic acid sequence in the open reading frame. These probes also hybridize with a nucleic acid molecule in a biological sample, thereby allowing a variety of forensic and diagnostic methods of the present invention. Similarly, the polypeptide identified by SEQ ID NO: Z may be used for, for example, producing an antibody specifically binding to a protein (including a polypeptide and secreted protein) encoded by an open reading frame identified herein.

[0275] Although we have analyzed the sequence of the present invention with special care, DNA sequences produced by sequencing reactions may comprise an error in sequencing. This error may be present as an incorrectly identified nucleotide, or as an insertion or a deletion of a nucleotide, in the DNA sequence produced. Incorrectly inserted or deleted nucleotides cause frame shifts in the deduced amino acid sequence of the reading frame. In such cases, the produced DNA sequences may be identical with more than 99.9 % identity (for example, 1 base insertion or deletion in an open reading frame over 1000 bases), but the deduced amino acid sequence may differ from the actual amino acid sequence.

[0276] Accordingly, in these applications where accuracy is required in nucleotide or amino acid sequence, the present invention also provides the nucleic acid sequence and the amino acid sequence encoded by the genome of Thermococcus kodakaraensis KOD1 of the present invention, which was deposisted in the International Patent Organism Depositary (IPOD). Those skilled in the art may determine a more accurate sequence by sequencing the sequence of the deposited Thermococcus kodakaraensis KOD 1 of the present invention. What is also provided in the present ivention are allelic variants, orthologs, and/or speicies homologs.

[0277] In another aspect, the present invention provides a nucleic acid molecule per se having a sequence set forth in SEQ ID NO: 1 or 1087. The nucleic acid molecule per se is useful in the gene targeting disruption method of the present invention.

[0278] In another aspect, the present invention provides a nucleic acid molecule comprising at least eight contiguous nucleic acid sequence of the sequence set forth in SEQ ID NO: 1 or 1087.

[0279] As used herein, the term “probe” refers to a substance for use in searching, which is a nucleic acid sequence having a variable length. Probes are variable depending on the use thereof. Examples of a nucleic acid molecule as a common probe include one having a nucleic acid sequence of at least about 8 nucleotides in length, preferably at least about 10 nucleotides, preferably at least about 15 nucleotides, preferably at least about 20 nucleotides, preferably at least about 30 nucleotides, preferably at least about 40 nucleotides, preferably at least about 50 nucleotides, preferably at least about 100 nucleotides, or may be at least about 6000 nucleotides. Probes are used for detecting an identical, similar or complementary nucleic acid sequence. Longer probes may be usually available from natural or recombinant sources, are very specific, and hybridize much slower than oligomers. Probes may be single- or double-stranded, and are designed to have specificity in technologies such as PCR, membrane based hybridization or ELIS and the like.

[0280] As used herein, the term “primer” refers to a nucleic acid sequence having variable length, and serves for initiation of elongation of a polynucleotide strand in a synthetic reaction of a nucleic acid such as a PCR. Examples of a nucleic acid molecule as a common primer include one having a nucleic acid sequence having a length of at least about 6 nucleotides, at least about 7 nucleotides, at least about 8 nucleotides, preferably at least about 10 nucleotides, preferably at least about 15 nucleotides, at least about 17 nucleotides, preferably at least about 20 nucleotides, preferably at least about 30 nucleotides, preferably at least about 40 nucleotides, preferably at least about 50 nucleotides, preferably at least about 100 nucleotides, or may be at least about 6000 nucleotides.

[0281] In one aspect, the present invention provides a polypeptide having an amino acid sequence selected from a group consisting of any Gene ID (1) through (2151) as listed in Table 1 (namely, SEQ ID NOs: 2-341, 343-722, 724-1086, 1088-1468, 1470-1837, and 1839-2157). The polypeptide of the present invention is preferably fused to another protein. These fusion proteins may be used for a variety of applications. For example, fusion of His tag, HA tag, Protein A, IgG domain and maltose binding protein to the polypeptide of the present invention facilitates purification (see also EP A 394,827, Traunecker et al., Nature, 331:84-86(1988)).

[0282] In another aspect, the present invention provides a peptide molecule comprising at least one amino acid sequence of an amino acid sequence selected from a group consisting of any Gene ID (1) through (2151) as listed in Table 1 (namely, SEQ ID NOs: 2-341, 343-722, 724-1086, 1088-1468, 1470-1837, and 1839-2157). Such peptide molecules may be used as an epitope. Preferably, such a peptide molecule may comprise at least about a 4 amino acid sequence, at least about a 5 amino acid sequence, at least about a 6 amino acid sequence, at least about a 7 amino acid sequence, at least about a 8 amino acid sequence, at least about a 9 amino acid sequence, at least about a 10 amino acid sequence, at least about a 15 amino acid sequence, at least about a 20 amino acid sequence, at least about a 30 amino acid sequence, at least about a 40 amino acid sequence, at least about a 50 amino acid sequence, or at least about a 100 amino acid sequence. The longer the peptide becomes, the higher the specificity thereof becomes.

[0283] As used herein the term “epitope” refers to a portion of a polypeptide having antigenicity or immunogenicity in an animal, preferably a mammal, and most preferably in a human. In a preferable embodiment, the invention comprises a polypeptide comprising an epitope, and a polynucleotide encoding the polypeptide. As used herein the term “immunogenic epitope” is defined as a portion of a protein inducing antibody reaction in an animal, as determined by any method known in the art such as those for producing an antibody described herein below (see for example, Geysen et al., Proc.Natl.Acad.Sci.USA 81:3998-4002(1983)). As used herein the term “antigenic epitope” refers to a portion of a protein capable of binding to an antibody in an immunologically specific manner, as determined by any method well known in the art, such as an immunoassay as described herein. Immunologically specific binding excludes non-immunological binding, but does not necessarily exclude cross-reaction with different antigens. Antigenic epitopes are not necessarily immunogenic.

[0284] Fragments working as an epitope may be produced in any method conventionally known in the art (for example, see Houghten, Proc. Natl. Acad. Sci. USA 82:5131-5135(1985); see also, U.S. Pat. No. 4,631,211).

[0285] As used herein an antigenic epitope may comprise usually at least three amino acids, preferably at least 4 amino acids, at least 5 amino acids, at least 6 amino acids, at least 7 amino acids, more preferably at least 8 amino acids, at least 9 amino acids, at least 10 amino acids, at least 11 amino acids, at least 12 amino acids, at least 13 amino acids, at least 14 amino acids, at least 154 amino acids, at least 20 amino acids, at least 25 amino acids, at least 30 amino acids, at least 40 amino acids, at least 50 amino acids, and most preferably comprises a sequence of between about 15 amino acids and 30 amino acids. Preferable polypeptides comprising an immunogenic epitope or antigenic epitope are at least 10, 15, 20, 25, 30, 35, 40, 45, 50, 55, 60, 65, 70, 75, 80, 85, 90, 95 or 100 amino acid residues in length. Still, non-exclusively preferable antigenic epitopes comprise antigenic epitopes and a portion thereof as disclosed herein. Antigenic epitopes are useful for raising an antibody capable of specifically binding to an epitope (including monoclonal antibodies). Preferable antigenic epitopes comprise any combination of the antigenic epitopes as disclosed herein and 2, 3, 4, 5 or more these antigenic epitopes. Antigenic epitopes may be used as a target molecule in an immunoassay (see, for example, Wilson et al., Cell 37:767-778(1984); Sutcliffe et al., Science 219: 660-666 (1983)).

[0286] Similarly, with respect to the use of an immunogenic epitope, for example, an antibody may be induced according to a method well known in the art (see, for example, Sutcliffe et al., (ibid.) ; Wilson et al., (ibid.); Chow et al., , Proc. Natl. Acad. Sci. USA 82:910-914; and Bittle et al., J. Gen. Virol. 66: 2347-2354 (1985)). Preferable immunogenic epitopes are those immunogenic epitopes as disclosed herein, and any combination of two, three, four, five or more of these immunogenic epitopes. Polypeptides comprising one or more immunogenic epitopes may be presented for raising antibody response against an animal system (for example, rabbit or mouse) with a carrier protein (for example, albumin), or if the polypeptide is sufficiently long (at least about 25 amino acids), the polypeptide is presented withouth carrier. However, immunogenic epitopes as short as 8-10 amino acids have been shown to be sufficient for raising an antibody capable of binding to (at least) a linear epitope of a modified polypeptide (for example, by Western blotting).

[0287] Epitope-containing polypeptides of the present invention may be used for inducing an antibody according to a well known technology in the art. Such a method includes, but is not limited to in vivo immunization, in vitro immunization, and phage display method. For example, see Sutcliffe et al. ibid; Wilson et al., ibid; and Bittle et al., J. Gen. Virol., 66: 2347-2354 (1985). When using in vivo immunization, an animal may be immunized using a free peptide. However, anti-peptide antibody titer may be boosted by binding a peptide to a macromolecular carrier (for example, keyhole limpet hemocyanin (KLH) or tetanus toxoid). For example, a peptide comprising a cysteine residue, may be bound to a carrier by the use of a linker such as a maleidobenzoyl-N-hydroxysuccineimideester (MBS). On the other hand, another peptide may be bound to a carrier by the use of more general binder such as glutaraldehyde. An animal such as a rabbit, rat, or mouse may be immunized by peritoneal injection and/or intradermic injection of, for example, an emulsion (containing about 100 μg of a peptide or carrier protein and Freund's adjuvant or any other adjuvant known to stimulate an immunoresponse). Some booster injections may be necessary to provide an effective titer of anti-peptide, for example, at about-two week intervals. This titer may be detected by an ELISA assay using a free peptide absorbed onto a solid surface. Titer of such anti-peptide antibodies in the serum derived from an immunized animal may be enhanced by selecting anti-peptide antibodies (for example, by absorption of the peptide on a solid support and elution of the selected antibody according to a well known method in the art).

[0288] As can be understood by those skilled in the art, and as discussed hereinabove, the polypeptide of the present invention comprising an immunogenic or antigenic epitope, may be fused to another polypeptide. For example, the polypeptide of the present invention may be fused to a constant domain or a portion thereof (CH1, CH2, CH3 or any combination or fragment thereof), or albumin (including, but not limited to, for example, recombinant albumin (see, for example, U.S. Pat. No. 5,876,969 (issued Mar. 2, 1999), EP 0 413 622 and U.S. Pat. No. 5,766,883 (issued Jun. 16, 1998), which are herein incorporated as reference in their entireties) to result in a chimeric protein. Such a fusion protein may facilitate purification, and enhance half-life in vivo. This has been demonstrated for the first two domains of a human CD4-polypeptide, and a chimeric protein consisting of a variety of domains from heavy chain or light chain constant regions of an immunoglobulin of a mammal. For example, see EP 394,827; Traunecker et al., Nature, 331: 84-86 (1988). An enhanced delivery of an antigen into the immune system across the epidermal barrier, has been demonstrated for an antigen (for example, insulin) bound to an IgG or a FcRn binding partner such as Fc fragment (see, PCT publications WO 96/22024 and WO 99/04812). IgG fusion proteins having a dimeric structure due to disulfide bonding of the IgG portions have also been demonstrated to be more effective in binding and neutralizing of another molecule, than a monomer polypeptide or a fragment thereof alone. See Fountoulakis et al., J.Biochem., 270: 3958-3964 (1995). A nucleic acid encoding the epitope may be recombined as a gene of interest as an epitope tag (for example, hemagglutinin “HA” or flag tag) to assist detection and purification of the expressed polypeptide. For example, a system described by Janknecht et al., allows simple purification of a non-modified fusion protein expressed in a human cell line (see Janknecht et al., 1991, Proc. Natl. Acad. Sci. USA 88: 8972-897). In this system, a gene of interest may be subcloned into a vaccinia recombinant plasmid to result in fusion of the open reading frame of the gene with an amino terminal tag consisting of six histidine residues upon translation. This tag functions as a substrate binding domain for the fusion protein. An extract from a cell infected with the recombinant vaccinia virus may be loaded onto a Ni2+ nitriloacetate-agarose column and a histidine tagged protein may be selectively eluted using imidazole containing buffer.

[0289] An “isolated” nucleic acid molecule is separated from the other nucleic acid molecules present in the natural source of the subject nucleic acid molecule. Examples of such isolated nucleic acid molecules include, but are not limited to, for example, recombinant DNA molecules contained in a vector, recombinant DNA molecules maintained in a heterologous host cell, nucleic acid molecules partially or substantially purified, and synthetic DNA or RNA molecules. Preferably, “isolated” nucleic acid is free of naturally flanking sequences to the subject nucleic acid in the genomic DNA of the organism from which the subject nucleic acid is derived (i.e., sequences located at 5′ and 3′ termini of the subject nucleic acid). For example, in a variety of embodiments, isolated novel nucleic acids molecules may include nucleotide sequence of less than about 50 kb, 25 kb, 5 kb, 4 kb, 3 kb, 2 kb, 1 kb, 0.5 kb or 0.1 kb. Further, “isolated” nucleic acid molecules, for example, cDNA molecules, may be substantially free of other cellular materials or culture medium when recombinantly produced, or of chemical precursors or other chemical substances when chemically synthesized.

[0290] In one aspect, the present invention provides a nucleic acid molecule comprising a sequence encoding an amino acid sequence having at least one amino acid sequence selected from the group consisting of Gene ID No. 1-2151 of Table 1 (at least one sequence selected from the group consisting of SEQ ID NOs: 2-341, 343-722, 724-1086, 1088-1468, 1470-1837 and 1839-2157); or a sequence having 70 % homology thereto.

[0291] In another aspect, the present invention provides a polpeptide, having at least one amino acid sequence selected from the group consisting of Gene ID No. 1-2151 of Table 1 (comprising at least one amino acid sequence selected from the group consisting of SEQ ID NO: 2-341, 343-722, 724-1086, 1088-1468, 1470-1837 and 1839-2157), or a sequence having at least 70 % homology thereto.

[0292] In another aspect, the present invention provides an epitope or a variant thereof, having at least one amino acid sequence selected from the group consisting of Gene ID No. 1-2151 of Table 1 (at least one amino acid sequence consisting of SEQ ID NO: 2-341, 343-722, 724-1086, 1088-1468, 1470-1837 and 1839-2157), or a sequence having at least 70 % homology thereto, or a portion thereof.

[0293] In another aspect, the present invention provides a method for screening for a thermostable protein. The present method comprises A) providing the entire sequence of the genome of a thermoresistant living organism; B) selecting at least one arbitrary region of the sequence; C) providing a vector comprising a sequence complementary to the selected region and a gene encoding a candidate for the heat resistance protein; D) transforming the living organism with the vector; E) placing the thermoresistant living organism in a condition causing possible homologous recombination; F) selecting the thermoresistant living organism in which homologous recombination has occurred; and G) assaying for identifying the thermoresistant protein. As used herein the entire sequence of the genome may not necessarily be a complete sequence, but preferably is an entire complete sequence. As used herein, as the selected region, two or more regions may be selected. The length of the region may be any length, as long as homologous recombination occurs, and includes, for example, at least about 500 bases, at least about 600 bases, at least about 700 bases, at least about 800 bases, at least about 900 bases, at least about 1000 bases, at least about 2000 bases, and the like. The candidate for the above thermotable proteins may be any protein of the present invention, as long as the expression thereof is expected. Vectors may be any vector, as long as they can express the protein of interest.

[0294] Vectors may preferably comprise gene regulation elements such as a promoter. Transformation may be any condition, as long as it is appropriate therefor.

[0295] Conditions causing homologous recombination may be any condition, as long as homologous recombination occurs under such conditions. Usually, the following condition may be used:
[0296] Tk-pyrF deleted strain No. 25, No. 27 are cultured in 20 ml of ASW-YT liquid medium.
[0297] ↓
[0298] Collect the bacteria from the culture medium (3 ml) per one sample (No. 25, No. 27, five samples for each)
[0299] ↓
[0300] Suspend the cells in 0.8×ASW+80 mM CaCl₂ 200 μl, and let stand on ice for 30 minutes
[0301] ↓
[0302] 3 μg pUC118/DS and 3 μg pUC118/DD are mixed and let stand on ice for 1 hour (two samples for each. Equivalent volume of TE buffer added to the sample was used as a control)
[0303] ↓
[0304] heat shock at 85° C., 45 s
[0305] ↓
[0306] let stand on ice for 10 minutes
[0307] ↓
[0308] Preculture in Ura-ASW-AA liquid medium (proliferation occurs based on the incorporated uracil)
[0309] ↓
[0310] Culture on Ura-ASW-AA liquid medium (enriched for PyrF+ strain)
[0311] Culture on Ura-ASW-AA solid medium

[0312] The present invention is not limited to the above-condition. As used herein the composition of ASW (artificial sea water) is as follows: 1×Artificial sea water (ASW) (/L) : NaCl 20 g; MgCl₂.6H₂O 3 g ; MgSO₄.7H₂O 6 g; (NH₄)₂SO₄ 1 g ; NaHCO₃ 0.2 g; CaCl₂.2H₂O 0.3 g; KCl 0.5 g; NaBr 0.05 g; SrCl₂6.H₂O 0.02 g; and Fe (NH₄) citric acid 0.01 g.

[0313] A method for selecting an organism in which homologous recombination has occurred may be performed by detecting a marker specific for the organism in which homologous recombination has occurred. Accordingly, it is preferable to use a marker which can be expressed in an organism which is expressed upon occurrence of homologous recombination, in the above-mentioned vector.

[0314] Identification of a thermostable protein may be performed by determining that the protein of interest is observed to have an activity under the same condition under which the protein usually attains the activity, but changes only the temperature to about 50° C., preferably to about 60° C., more preferably to about 70° C., still more preferably to about 80° C., most preferably to about 90° C.

[0315] In another aspect, the present invention provides a kit for screening for a thermoresistant protein. The kit comprises A) a thermoresistant living organism; and B) a vector comprising a sequence complementary to the selected region and a gene encoding a candide for the thermoresistant protein.

[0316] In a preferable embodiment, the thermostable organism is a hyperthermophillic archaebacteria, and more preferably, Thermococcus kodakaraensis KOD1.

[0317] In a preferable embodiment, the kit of the present invention further comprises C) an assay system for identifying the thermoresistant protein. The assay system may vary depending on the activity of the thermostable protein of interest.

[0318] (Description of each Gene)

[0319] Hereinafter, each gene comprised in the genomoic sequence of Thermococcus kodakaraensis KOD1 strain as identified in the present invention, is described.

[0320] (Overview of the Genome of Hyperthermophillic Bacteria)

[0321] Chromosomal DNA of hyperthermophillic bacteria is stable. As double stranded DNA is maintained by hydrogen bonds, it is questionable if it will dissociate into single strands under higher temperature circumstances. KOD 1 strain has two types of basic histone-like proteins, which are stabilized by binding to the DNA, which is negatively charged, to form a nucleosome-like complex to be compacted. In the present invention, polyamines may be used to further enhance stabilization by binding to the same. Acetylated polyamine (acetyl polyamine) is weak in binding ability to the nucleosome-like complex, and thus can more firmly bind to polyamine obtained by the action of deacetylated enzyme. Generally, hyperthermophillic bacetria have much more intracellylar K⁺ ion than a normal-temperature bacteria, and this should contribute to the stabilization of double-stranded DNA. Actually, when the melting curve of such DNA is observed, this property thereof is clearly demonstrated.

[0322] (Universality of Thermophillic Property)

[0323] The present inventors have found universal properties in proteins from hyperthermophillic bacteria through studies of glutumate dehydrogenase (GDH) of KOD-1 strain. That is, it has been demonstrated that proteins from ordinary temperature bacteria generally denature due to heat, whereas recombinant proteins from hyperthermophillic bacteria mature once heat is given. GDH synthesized in the high temperature circumstances in the KOD-1 strain has a hexamer structure and high specific activity. On the other hand, when the GDH gene is expressed in E. coli as a host, such GDH has weaker enzymatic activity than a natural form thereof, and is a monomer protein having a different structure. It was demonstrated that when heat treatment at 70° C. for twenty minuties was performed, a recombinant GDH developed similar specific activity and three-dimensional structure of the natural GDH. Once heat treatment is given, the present enzyme behaved similarly to the natural GDH thereof even in the lower temperature range. Such features were acknowledged for not only for GDH, but also all the enzymes anlayzed by the present inventors from hyperthermophillic bacteria. As such, heat is important for maturation of thermostable proteins, and was determined that this is due to irreversible structural change of enzymatic proteins by heat.

[0324] (Discovery of Enzymes having New Structures and Functions)

[0325] Ribulose 1,5-bisphosphate carboxylase (Rubisco) is present in all the plants, algae, and cyanophyte, and plays an important role in fixing carbon dioxide to an organic material. Rubisco is the most abundant enzyme on earth, and is expected to heavily contribute to the solution of global warming or green house effects, and food problems. To date, archeabacteria, which is close to a primordial living organism, is believed not to possess a Rubisco, however, the present inventors have discovered Rubisco having high carbon dioxide fixation ability in the KOD-1 strain. The present enzyme (Tk-Rubisco) has twenty times greater activity than the conventional Rubisco, and the specificity to the carbon dioxide is extremely high. Tk-Rubisco is novel in terms of structure, and possesses the novel structure of a pentagonal decamaer. Presently, the analysis of physiological role of the present invention and introduction into a plant and the like is performed.

[0326] (Analysis of Thermostable Mechanism of Proteins from Hyperthermophillic Bacteria based on Three-Dimensional Structure)

[0327] High thermostablility presented by a protein derived from hyperthermophillic bacteria is not only from the basic field of protein sciences but also from a variety of applied field using the enzymes. The present inventors have clarified a number of three dimensional structures of enzymes derived from the KOD-1 strain, and also clarified a number of thermostable mechanisms. Typical examples thereof include O⁶-methyl guanine-DNA methyl transferase (Tk-MGMT). Comparing the three dimensional structures of Tk-MGMT and the same derived from E. coli (AdaC), it was demonstrated that Tk-MGMT has a number of intrahelical ionic bond stablizing alpha-helices. Further, there were also a number of intrahelical ionic bonds stablizing the global protein structure. It was shown that AdaC derived from E. coli has less such ionic bonds, and thus the hyperthermophillic bacteria derived enzymes attain high thermostability by a number of ionic bonds and ionic bond networks. This is also true of the above-mentioned GDH, and also demonstrated biochemically. That is, when introducing site-directed mutations disrupting ionic bond networks present inside the GDH, thermostability of the variant enzyme is greatly reduced. On the other hand, a variant enzyme with increased ionic bonds enhanced its thermostability.

[0328] (Use of Useful Enzymes)

[0329] Polymerase chain reaction (PCR) method is an essential technology for gene engineering technologies, and the application thereof ranges from medicine, environment fields, to food industries and the like. Presently, improvements presently required for PCR methods, are the shortening of amplification time, prevention of misamplification, and the proliferation of long DNA fragments. In particular, clinical or food tests require rapid and accurate DNA synthesizing DNA polymerases. As a result of our functional analysis of the DNA polymerase (KOD DNA polymerase) from the KOD-1 strain, we found that the present enzyme has improved ability of synthesizing a longer DNA, and the speed of the synthesis of DNA is increased, in comparison of conventional enzymes. In fact, when the DNA polymerase from the KOD-1 strain is used, reaction time for PCR only takes 25 minutes, while the conventional Taq enzyme takes two hours. Further, modified enzyme with 3→5′ exonuclease activity of the KOD DNA polymerase, and the wild type enzyme can be mixed in an appropriate ratio to yield significantly superior reaction efficiency and amplification property. Further, the present inventors further have attained that an antibody to the KOD DNA polymerase is used to suppress mis-amplification which is often seen in the initial period of PCR reactions, and thus could establish an extremely efficient DNA amplification system. The present system is now commercially available from TOYOBO as “KOD-Plus-” in Japan, and available elsewhere thrhough Life Technologies/GIBCO BRL, as “Platinum™ Pfx DNA polymerase” including Europe and America. Recently, the present inventors have further analyzed the KOD DNA polymerase to determine the three dimensional structure thereof. Detailed three dimensional structure could be analyzed with respect to the speed of elongation reaction of the present enzyme, accuracy of the replication capability and the like, in view of what the structure is related to.

[0330] The present inventors have identified and analyzed a number of useful thermophillic enzymer other than DNA polymerases. DNA ligases catalyze reaction of binding termini of two DNA fragments, and thus are essential enzymes for genetic engineering. Most conventional enzymes from bacteria and phages are sensitive to heat and unstable. HOwever, the DNA ligase from KOD-1 strain (Tk-Lig) presented high DNA ligase activity from 30-100° C. Further, substrate specificity in Nick-site of Tk-Lig (base-pairing) was interesting, and it was turned out that it was necessary to form accurate base-pairing against the 3′ terminus, while substrate specificity was loose against the 5′ terminus. No such DNA ligases having such features are reported to date, and these are expected to be applicable for detection of single nucleotide polymorphisms (SNPs). Sugar-related enzymes identified with respect to biochemical properties include alpha-amylase digesting alpha(1-4)bond as appears in starch and the like, or cyclodextrin glucanotransferase synthesizing cyclodextrine which catalyzes circulation, and 4-alpha-glucanotransferase, catalyzing a transferase reaction. Beta-glucosidase, which digests beta(1-4)bonds, appears in cellulose and chitin, and chitinase were also analyzed in detail. Two chitinase activities are present on the same polypeptide chain in chitinase from the KOD-1 strain, and one is responsable for endochitinase activity, while the other is responsable for exochitinase activity. These catalytic domains attain extremely high chitin degrading activity by synergy.

[0331] (Genomic Analysis of Thermococcus Kodakaraensis KOD-1 Strain and Development of Gene Introduction Technology)

[0332] Through the present studies, the present inventors have analyzed substantially all the genes relating to the KOD-1 strain, and revealed detailed biochemical properties of a huge variety of proteins. KOD-1 strain is a simple organism, located in the vicinity of the bottom of the evolutionary tree of organisms, and thus is believed to be a good tool for understanding basic mechanisms of life. Further, the KOD-1 strain produces a number of thermostable enzymes with broad applicability or novel enzymes with novel features as described above. Having such as background, the present inventors have proceeded with the entire genomic analysis of the KOD-1 strain. The genome of the KOD-1 strain consists of 2,076,138 base pairs, and is very short, as we have expected (40% or less of that of E. coli). Further, there were about 1,500 genes. As the KOD-1 strain maintains its life with such low number of genes, it is expected to allow analysis of basic principle of life through the research of the present bacteria.

[0333] The most important object of research in the post-genomic era is to analyze the physiological role of unknown genes. Exhaustive gene expression analysis by DNA chips, and exhaustive protein analysis by proteomics are effective analysis methods for these purposes. The present inventors have proceeded using these methods, and recently, have succeeded in constructing a novel system, which is an important new technology for specifically disrupting any gene of interest on the genome of the KOD-1 strain. This technology is used to disrupt a functionally-known gene to allow analysis and clarififcation of the physiological role thereof.

[0334] Genes comprised in the genome of KOD1 encompass a variety of species as listed in Table 2 below. Description of such genes are described in biochemistry references well known in the art, such as Sambrook, J. et al.Molecular Cloning:A Laboratory Manual,3rd Ed. Cold Spring Harbor Laboratory Press, Cold Spring Harbor, N.Y., USA(2001);Ausubel, F.et al., Short protocols in molecular biology, 4th ed. John Wiley&Sons, NJ, USA(1999);Ausubel, F.,et al., Current Protocols in Molecular Biology, John Wiley&Sons, NJ, USA(1988); Jiro Ota ed., Biochemistry Handbook, Asakura Shoten, (1987); Kazutomo Imabori, Tamio Yamakawa ed., Seikagaku Jiten (Dictionary of BIOCHEMISTRY), Third Edition, Tokyo Kagaku Dojin (1998); Yasudomi NISHIDZUKA ed., Saibokino to Taisha mappu (Cellular Functions and Metabolism map), Tokyo Kagaku Dojin (1997); Lewin Genes VII, Oxford University Press, Oxford, UK (2000) and the like). Further, methods for measuring such function of a protein are described in for example, Sambrook,J.et al.Molecular Cloning:A Laboratory Manual,3rd Ed. Cold Spring Harbor Laboratory Press, Cold Spring Harbor, N.Y., USA(2001);Frank T., et al., Thermophiles(Archaea:A Laboratory Manual 3), Cold Spring Harbor Laboratory Press, Cold Spring Harbor, N.Y., USA(1995); KOSOGAKU HANDOBUKKU (Enzyme handbook) edited by Bunji MARUO, and Nobuo TAMIYA, published by Asakura shoten (1982); Methods in Enzymology series, Academic Press; Kazutomo Imabori, Tamio Yamakawa ed., Seikagaku Jiten (Dictionary of BIOCHEMISTRY), Third Edition, Tokyo Kagaku Dojin (1998); Yasudomi NISHIDZUKA ed., Saibokino to Taisha mappu (Cellular Functions and Metabolism map), Tokyo Kagaku Dojin (1997); Lengeler, J. et al. Biology of the Prokaryotes, Blackwell Science, Oxford, UK(1998); Lewin Genes VII, Oxford University Press, Oxford, UK(2000) and the like.

[0335] As such, the functions of genes comprised in the genome of KOD are revealed by the present invention, which are summarized in the following Table. Table 2 describes genes defined by the region (1) as described in Table 2 (hereinafter, Gene ID No. (1) and the like; the amino acid sequence of the gene is a sequence corresponding to the SEQ ID NO: set forth in SEQ ID NO: as described in the table).

TABLE 2
DECRIPTION OF GENES COMPRISED IN THE GENOME OF Thermococcus kodakaraensis KOD1

| | | | | | | | start | stop | | | | |
|---|---|---|---|---|---|---|---|---|---|---|---|---|
| | | | | | | | nucleic | nucleic | | | | |
| | | | | | | | acid | acid | | | | |
| | | | | | | | number | number | | | | |
| | | | | | | | having | having | | | | |
| | Nucleic | Nucleic | Nucleic | Nucleic | | | high | high | | | | |
| | acid No. | acid No. | acid No. | acid No. | corresponding | | homology | homology | | | | |
| GENE | (sense | (sense | (antisense | (antisense | SEQ | | to | to | amino | | | |
| ID | strand, | strand, | strand, | strand, | ID | reading | known | known | acid | gene | | |
| NO: | start) | stop) | stop) | start) | NO: | frame | genes | genes | length | nomenclature | classification | Description |
| 1 | 1 | 5016 | 2089377 | 2084362 | 2 | f-1 | 1 | 1216 | 702 | PolB | L | DNA polymerase elongation |
| | | | | | | | | | | | | subunit (family B) (homing |
| | | | | | | | | | | | | endonuclease) |
| 2 | 5134 | 5733 | 2084244 | 2083645 | 3 | f-1 | 5134 | 5707 | 165 | — | R | Predicted metal-dependent |
| | | | | | | | | | | | | hydrolase |
| 3 | 6079 | 6543 | 2083299 | 2082835 | 1468 | r-1 | 6424 | 6541 | 33 | CarB | EF | Carbamoylphosphate synthase |
| | | | | | | | | | | | | large subunit (split gene in MJ) |
| | | | | | | | | | | | | COG0458 CarB |
| 4 | 6586 | 7014 | 2082792 | 2082364 | 4 | f-1 | 6586 | 7012 | 262 | — | R | Predicted CoA-binding protein |
| 5 | 7152 | 7391 | 2082226 | 2081987 | 1837 | r-2 | 7170 | 7338 | 30 | — | R | Predicted ATPase or kinase |
| 6 | 7399 | 7614 | 2081979 | 2081764 | 1467 | r-1 | 7399 | 7549 | 29 | RpoZ | K | DNA-directed RNA polymerase |
| | | | | | | | | | | | | subunit K/omega |
| 7 | 7655 | 8755 | 2081723 | 2080623 | 2157 | r-3 | 7658 | 8726 | 470 | — | L | Predicted DNA modification |
| | | | | | | | | | | | | methylase |
| 8 | 8843 | 10093 | 2080535 | 2079285 | 343 | f-2 | 9011 | 9572 | 34 | — | G | Predicted N-acetylglucosaminyl |
| | | | | | | | | | | | | transferase |
| 9 | 10095 | 10379 | 2079283 | 2078999 | 724 | f-3 | 10104 | 10299 | 30 | PutA | C | NAD-dependent aldehyde |
| | | | | | | | | | | | | dehydrogenases |
| 10 | 10376 | 10807 | 2079002 | 2078571 | 344 | f-2 | 10385 | 10787 | 161 | — | S | Uncharacterized ACR |
| 11 | 10808 | 11416 | 2078570 | 2077962 | 2156 | r-3 | 10859 | 11414 | 277 | — | R | GTPases |
| 12 | 11406 | 11726 | 2077972 | 2077652 | 725 | f-3 | 11445 | 11646 | 30 | UgpQ | C | Glycerophosphoryl diester |
| | | | | | | | | | | | | phosphodiesterase |
| 13 | 11723 | 12286 | 2077655 | 2077092 | 345 | f-2 | 11759 | 12275 | 150 | — | R | Predicted hydrolases of HD |
| | | | | | | | | | | | | superfamily |
| 14 | 12338 | 13411 | 2077040 | 2075967 | 346 | f-2 | 12404 | 13391 | 550 | ModA | P | ABC-type molybdate transport |
| | | | | | | | | | | | | system |
| 15 | 13392 | 13841 | 2075986 | 2075537 | 1836 | r-2 | 13425 | 13833 | 146 | — | R | Predicted nucleic acid-binding |
| | | | | | | | | | | | | protein |
| 16 | 13808 | 14056 | 2075570 | 2075322 | 2155 | r-3 | 13841 | 14000 | 57 | AbrB | K | Regulators of |
| | | | | | | | | | | | | stationary/sporulation gene |
| | | | | | | | | | | | | expression |
| 17 | 14153 | 14896 | 2075225 | 2074482 | 347 | f-2 | 14159 | 14885 | 379 | CysU | P | ABC-type sulfate/molybdate |
| | | | | | | | | | | | | transport systems |
| 18 | 15239 | 15964 | 2074139 | 2073414 | 348 | f-2 | 15371 | 15962 | 266 | — | R | Predicted ATPases |
| 19 | 16151 | 16699 | 2073227 | 2072679 | 349 | f-2 | 16505 | 16649 | 29 | — | R | Predicted ATPases of PP-loop |
| | | | | | | | | | | | | superfamily |
| 20 | 16696 | 17697 | 2072682 | 2071681 | 5 | f-1 | 16708 | 17686 | 448 | CysA | P | ABC-type sulfate/molybdate |
| | | | | | | | | | | | | transport systems |
| 21 | 17780 | 18793 | 2071598 | 2070585 | 2154 | r-3 | 17879 | 18437 | 40 | HflC | O | Membrane protease subunits |
| 22 | 18786 | 19280 | 2070592 | 2070098 | 1835 | r-2 | 18792 | 19251 | 29 | NqrA | C | Na+-transporting |
| | | | | | | | | | | | | NADH:ubiquinone |
| | | | | | | | | | | | | oxidoreductase alpha subunit |
| 23 | 19290 | 20183 | 2070088 | 2069195 | 1834 | r-2 | 19293 | 19407 | 32 | — | L | Archaea-specific RecJ-like |
| | | | | | | | | | | | | exonuclease |
| 24 | 20183 | 21187 | 2069195 | 2068191 | 2153 | r-3 | 20645 | 20885 | 40 | Pnp | J | Polyribonucleotide |
| | | | | | | | | | | | | nucleotidyltransferase |
| | | | | | | | | | | | | (polynucleotide phosphorylase) |
| 25 | 21266 | 21919 | 2068112 | 2067459 | 2152 | r-3 | 21269 | 21908 | 223 | Gph | R | Predicted phosphatases |
| 26 | 21913 | 22569 | 2067465 | 2066809 | 1466 | r-1 | 21931 | 22552 | 320 | — | S | Uncharacterized ACR |
| 27 | 22597 | 24195 | 2066781 | 2065183 | 1465 | r-1 | 22921 | 24193 | 691 | SAM1 | H | S-adenosylhomocysteine |
| | | | | | | | | | | | | hydrolase |
| 28 | 23947 | 24834 | 2065431 | 2064544 | 6 | f-1 | 23953 | 24808 | 141 | GloB | R | Zn-dependent hydrolases |
| 29 | 24813 | 25451 | 2064565 | 2063927 | 726 | f-3 | 24879 | 25446 | 218 | — | R | Uncharacterized ACR |
| 30 | 25413 | 25811 | 2063965 | 2063567 | 1833 | r-2 | 25476 | 25770 | 159 | RPR2 | J | RNAse P protein subunit RPR2 |
| 31 | 25813 | 27396 | 2063565 | 2061982 | 1464 | r-1 | 25930 | 27364 | 295 | MCM2 | L | Predicted ATPase involved in |
| | | | | | | | | | | | | replication control |
| 32 | 27565 | 28620 | 2061813 | 2060758 | 7 | f-1 | 27568 | 28012 | 42 | SbcC | L | ATPase involved in DNA repair |
| 33 | 28591 | 29334 | 2060787 | 2060044 | 1463 | r-1 | 28777 | 29116 | 33 | UshA | F | 5′-nucleotidase/2′ |
| 34 | 29782 | 30681 | 2059596 | 2058697 | 8 | f-1 | 29791 | 30655 | 227 | — | S | Uncharacterized proteins of |
| | | | | | | | | | | | | WD40-like repeat family |
| 35 | 31102 | 31266 | 2058276 | 2058112 | 9 | f-1 | 31102 | 31264 | 94 | — | S | Uncharacterized ArCR |
| 36 | 31414 | 32235 | 2057964 | 2057143 | 10 | f-1 | 31414 | 32182 | 270 | SmtA | QR | SAM-dependent |
| | | | | | | | | | | | | methyltransferases COG0500 |
| | | | | | | | | | | | | SmtA |
| 37 | 32367 | 33251 | 2057011 | 2056127 | 727 | f-3 | 32382 | 33087 | 202 | FlaB | N | Archaeal flagellins(flagellin) |
| 38 | 33291 | 35033 | 2056087 | 2054345 | 728 | f-3 | 33309 | 33636 | 125 | FlaB | N | Archaeal flagellins(flagellin) |
| 39 | 35048 | 35824 | 2054330 | 2053554 | 350 | f-2 | 35048 | 35804 | 206 | FlaB | N | Archaeal flagellins(flagellin) |
| 40 | 35882 | 36541 | 2053496 | 2052837 | 351 | f-2 | 35888 | 36533 | 262 | FlaB | N | Archaeal flagellins(flagellin) |
| 41 | 36553 | 37380 | 2052825 | 2051998 | 11 | f-1 | 36553 | 37378 | 290 | FlaB | N | Archaeal flagellins(flagellin) |
| 42 | 37394 | 37870 | 2051984 | 2051508 | 352 | f-2 | 37541 | 37868 | 181 | FlaC | N | Putative archaeal flagellar protein C |
| 43 | 37874 | 39298 | 2051504 | 2050080 | 353 | f-2 | 38870 | 39296 | 258 | FlaD | N | Putative archaeal flagellar protein |
| | | | | | | | | | | | | D/E |
| 44 | 39760 | 40332 | 2049618 | 2049046 | 12 | f-1 | 39862 | 40318 | 194 | FlaG | N | Putative archaeal flagellar protein G |
| 45 | 40360 | 41070 | 2049018 | 2048308 | 13 | f-1 | 40372 | 41068 | 385 | FlaH | N | Predicted ATPases involved in |
| | | | | | | | | | | | | biogenesis of archaeal flagella |
| 46 | 41072 | 42694 | 2048306 | 2046684 | 354 | f-2 | 41072 | 42692 | 905 | VirB11 | N | Predicted ATPases involved in |
| | | | | | | | | | | | | pili and flagella biosynthesis |
| 47 | 42696 | 44444 | 2046682 | 2044934 | 729 | f-3 | 42696 | 44436 | 656 | FlaJ | N | Uncharacterized membrane |
| | | | | | | | | | | | | component of archaeal flagella |
| 48 | 44441 | 46435 | 2044937 | 2042943 | 355 | f-2 | 45869 | 46073 | 36 | — | R | Predicted helicases |
| 49 | 46470 | 46991 | 2042908 | 2042387 | 730 | f-3 | 46497 | 46986 | 294 | Pcm | O | Protein-L-isoaspartate |
| | | | | | | | | | | | | carboxylmethyltransferase |
| 50 | 47171 | 47416 | 2042207 | 2041962 | 356 | f-2 | 47171 | 47321 | 60 | SerB | E | Phosphoserine phosphatase |
| 51 | 47317 | 47799 | 2042061 | 2041579 | 14 | f-1 | 47320 | 47794 | 143 | SerB | E | Phosphoserine phosphatase |
| 52 | 47937 | 49139 | 2041441 | 2040239 | 1832 | r-2 | 47943 | 49128 | 224 | PppA | N | Signal peptidase |
| 53 | 49153 | 49329 | 2040225 | 2040049 | 1462 | r-1 | | | | | | |
| 54 | 49393 | 49731 | 2039985 | 2039647 | 15 | f-1 | 49528 | 49669 | 28 | SPS1 | T | Serine/threonine protein kinases |
| 55 | 49728 | 50297 | 2039650 | 2039081 | 731 | f-3 | 49728 | 50292 | 246 | — | S | Uncharacterized ACR |
| 56 | 50278 | 50559 | 2039100 | 2038819 | 1461 | r-1 | 50290 | 50461 | 29 | — | R | STAS domain protein |
| 57 | 50693 | 51412 | 2038685 | 2037966 | 357 | f-2 | 50705 | 51410 | 276 | — | R | Predicted hydrolases of the HAD |
| | | | | | | | | | | | | superfamily |
| 58 | 51483 | 52061 | 2037895 | 2037317 | 1831 | r-2 | 51492 | 52056 | 219 | PgsA | I | Phosphatidylglycerophosphate |
| | | | | | | | | | | | | synthase |
| 59 | 52063 | 52605 | 2037315 | 2036773 | 1460 | r-1 | 52069 | 52603 | 276 | — | S | Uncharacterized ArCR |
| 60 | 52602 | 53792 | 2036776 | 2035586 | 1830 | r-2 | 53523 | 53715 | 32 | DnaX | L | DNA polymerase III |
| 61 | 54169 | 55020 | 2035209 | 2034358 | 16 | f-1 | 54250 | 55018 | 407 | — | S | Uncharacterized ACR |
| 62 | 55058 | 55606 | 2034320 | 2033772 | 358 | f-2 | 55322 | 55499 | 44 | — | R | Predicted nucleotidyltransferases |
| 63 | 55746 | 56018 | 2033632 | 2033360 | 732 | f-3 | 55749 | 56010 | 43 | — | S | Uncharacterized ACR |
| 64 | 56132 | 56263 | 2033246 | 2033115 | 359 | f-2 | | | | | | |
| 65 | 56244 | 56708 | 2033134 | 2032670 | 733 | f-3 | 56244 | 56661 | 99 | — | R | Predicted nucleic acid-binding |
| | | | | | | | | | | | | protein |
| 66 | 56674 | 57267 | 2032704 | 2032111 | 17 | f-1 | 56710 | 57265 | 320 | NadR | H | Nicotinamide mononucleotide |
| | | | | | | | | | | | | adenylyltransferase |
| 67 | 57264 | 57584 | 2032114 | 2031794 | 1829 | r-2 | 57408 | 57528 | 28 | AlsT | E | Na+/alanine symporter |
| 68 | 57599 | 58276 | 2031779 | 2031102 | 2151 | r-3 | 57722 | 58157 | 36 | — | R | Predicted helicases |
| 69 | 58855 | 59703 | 2030523 | 2029675 | 18 | f-1 | 58867 | 59701 | 481 | — | R | Predicted methyltransferase |
| 70 | 59704 | 59868 | 2029674 | 2029510 | 1459 | r-1 | 59725 | 59851 | 27 | FabG | QR | Dehydrogenases with different |
| | | | | | | | | | | | | specificities (related to |
| | | | | | | | | | | | | short-chain alcohol |
| | | | | | | | | | | | | dehydrogenases) COG1028 FabG |
| 71 | 59898 | 61799 | 2029480 | 2027579 | 1828 | r-2 | 59910 | 61719 | 390 | — | C | Aldehyde:ferredoxin |
| | | | | | | | | | | | | oxidoreductase |
| 72 | 62830 | 63723 | 2026548 | 2025655 | 19 | f-1 | 62941 | 63376 | 40 | XerC | L | Integrase |
| 73 | 64226 | 65992 | 2025152 | 2023386 | 360 | f-2 | 64697 | 64985 | 35 | XynB | G | Beta-xylosidase |
| 74 | 66045 | 67382 | 2023333 | 2021996 | 734 | f-3 | 66330 | 66741 | 34 | FliD | N | Flagellar capping protein |
| 75 | 67399 | 68973 | 2021979 | 2020405 | 20 | f-1 | 68080 | 68833 | 173 | AprE | O | Subtilisin-like serine proteases |
| 76 | 69117 | 69374 | 2020261 | 2020004 | 735 | f-3 | 69240 | 69327 | 32 | — | R | Predicted membrane protein |
| 77 | 69583 | 69795 | 2019795 | 2019583 | 21 | f-1 | | | | | | |
| 78 | 69792 | 70511 | 2019586 | 2018867 | 736 | f-3 | 69903 | 70296 | 36 | FtsW | D | Bacterial cell division membrane |
| | | | | | | | | | | | | protein |
| 79 | 70504 | 71112 | 2018874 | 2018266 | 22 | f-1 | 70885 | 70972 | 32 | — | Q | Phytoene dehydrogenase and |
| | | | | | | | | | | | | related proteins |
| 80 | 71117 | 71245 | 2018261 | 2018133 | 361 | f-2 | 71123 | 71237 | 29 | GcvP | E | Glycine cleavage system protein |
| | | | | | | | | | | | | P (pyridoxal-binding) |
| 81 | 71679 | 72593 | 2017699 | 2016785 | 737 | f-3 | 71922 | 72174 | 38 | IleS | J | Isoleucyl-tRNA synthetase |
| 82 | 72764 | 73339 | 2016614 | 2016039 | 362 | f-2 | 73049 | 73235 | 34 | — | K | Predicted transcriptional regulator |
| 83 | 73336 | 74643 | 2016042 | 2014735 | 23 | f-1 | 74005 | 74110 | 35 | GloB | R | Zn-dependent hydrolases |
| 84 | 74603 | 75760 | 2014775 | 2013618 | 363 | f-2 | | | | | | |
| 85 | 75753 | 76025 | 2013625 | 2013353 | 738 | f-3 | 75786 | 75972 | 28 | FabG | QR | Dehydrogenases with different |
| | | | | | | | | | | | | specificities (related to |
| | | | | | | | | | | | | short-chain alcohol |
| | | | | | | | | | | | | dehydrogenases) COG1028 FabG |
| 86 | 76022 | 77458 | 2013356 | 2011920 | 364 | f-2 | 76211 | 76475 | 34 | — | S | Uncharacterized BCR |
| 87 | 77735 | 79045 | 2011643 | 2010333 | 365 | f-2 | 77804 | 78005 | 34 | UshA | F | 5′-nucleotidase/2′ |
| 88 | 79622 | 79726 | 2009756 | 2009652 | 2150 | r-3 | | | | | | |
| 89 | 79968 | 80129 | 2009410 | 2009249 | 739 | f-3 | 79968 | 80058 | 31 | AbrB | K | Regulators of |
| | | | | | | | | | | | | stationary/sporulation gene |
| | | | | | | | | | | | | expression |
| 90 | 80246 | 80428 | 2009132 | 2008950 | 366 | f-2 | 80318 | 80402 | 29 | CaiC | IQ | Acyl-CoA synthetases |
| | | | | | | | | | | | | (AMP-forming)/AMP-acid |
| | | | | | | | | | | | | ligases II COG0318 CaiC |
| 91 | 80432 | 83176 | 2008946 | 2006202 | 367 | f-2 | 81101 | 83075 | 233 | MCM2 | L | Predicted ATPase involved in |
| | | | | | | | | | | | | replication control |
| 92 | 83431 | 83628 | 2005947 | 2005750 | 24 | f-1 | 83440 | 83602 | 33 | GlpC | C | Fe—S oxidoreductases |
| 93 | 83908 | 84267 | 2005470 | 2005111 | 25 | f-1 | 83947 | 84109 | 28 | — | E | Serine proteases of the peptidase |
| | | | | | | | | | | | | family S9A |
| 94 | 84264 | 84440 | 2005114 | 2004938 | 740 | f-3 | 84303 | 84420 | 26 | DnaJ | O | Molecular chaperones (contain |
| | | | | | | | | | | | | C-terminal Zn finger domain) |
| 95 | 84461 | 85018 | 2004917 | 2004360 | 368 | f-2 | 84530 | 84731 | 29 | | | |
| 96 | 84999 | 85340 | 2004379 | 2004038 | 741 | f-3 | 85002 | 85176 | 28 | — | R | Na+-dependent transporters of the |
| | | | | | | | | | | | | SNF family |
| 97 | 85421 | 85948 | 2003957 | 2003430 | 369 | f-2 | 85448 | 85847 | 100 | XerC | L | Integrase |
| 98 | 86333 | 87139 | 2003045 | 2002239 | 2149 | r-3 | 86345 | 87128 | 428 | DPH5 | J | Diphthamide biosynthesis |
| | | | | | | | | | | | | methyltransferase DPH5 |
| 99 | 87211 | 87663 | 2002167 | 2001715 | 26 | f-1 | 87226 | 87619 | 221 | TroR | K | Mn-dependent transcriptional |
| | | | | | | | | | | | | regulator |
| 100 | 87663 | 88265 | 2001715 | 2001113 | 742 | f-3 | 87912 | 88224 | 39 | NorM | Q | Na+-driven multidrug efflux |
| | | | | | | | | | | | | pump |
| 101 | 88266 | 89279 | 2001112 | 2000099 | 743 | f-3 | 88395 | 88851 | 32 | PolC | L | DNA polymerase III alpha |
| | | | | | | | | | | | | subunit |
| 102 | 89307 | 90059 | 2000071 | 1999319 | 744 | f-3 | 89319 | 90003 | 286 | — | R | Predicted hydrolases of the HAD |
| | | | | | | | | | | | | superfamily |
| 103 | 90079 | 90267 | 1999299 | 1999111 | 27 | f-1 | 90088 | 90265 | 131 | — | J | Predicted Zn-ribbon |
| | | | | | | | | | | | | RNA-binding protein with a |
| | | | | | | | | | | | | function in translation |
| 104 | 90276 | 90560 | 1999102 | 1998818 | 745 | f-3 | 90285 | 90558 | 167 | EFB1 | J | Translation elongation factor |
| | | | | | | | | | | | | EF-1beta |
| 105 | 90583 | 91056 | 1998795 | 1998322 | 1458 | r-1 | 90811 | 90976 | 32 | WecD | KR | Histone acetyltransferase HPA2 |
| | | | | | | | | | | | | and related acetyltransferases |
| | | | | | | | | | | | | COG0454 WecD |
| 106 | 91178 | 91366 | 1998200 | 1998012 | 370 | f-2 | 91268 | 91355 | 28 | AroC | E | Chorismate synthase |
| 107 | 91363 | 92979 | 1998015 | 1996399 | 28 | f-1 | 91363 | 92974 | 892 | PutP | EHR | Na+/proline |
| 108 | 93072 | 94550 | 1996306 | 1994828 | 746 | f-3 | 93072 | 94539 | 17 | HcaD | R | Uncharacterized |
| | | | | | | | | | | | | NAD(FAD)-dependent |
| | | | | | | | | | | | | dehydrogenases |
| 109 | 94552 | 95712 | 1994826 | 1993666 | 29 | f-1 | 94567 | 95710 | 635 | DadA | E | Glycine/D-amino acid oxidases |
| | | | | | | | | | | | | (deaminating) |
| 110 | 96185 | 97636 | 1993193 | 1991742 | 371 | f-2 | 96185 | 97601 | 702 | HcaD | R | Uncharacterized |
| | | | | | | | | | | | | NAD(FAD)-dependent |
| | | | | | | | | | | | | dehydrogenases |
| 111 | 97620 | 98147 | 1991758 | 1991231 | 747 | f-3 | 97629 | 98127 | 287 | HycB | C | Fe—S-cluster-containing |
| | | | | | | | | | | | | hydrogenase components 2 |
| 112 | 98417 | 99583 | 1990961 | 1989795 | 372 | f-2 | 98474 | 99581 | 464 | DadA | E | Glycine/D-amino acid oxidases |
| | | | | | | | | | | | | (deaminating) |
| 113 | 99648 | 100892 | 1989730 | 1988486 | 748 | f-3 | 99654 | 100881 | 398 | | | |
| 114 | 100915 | 101205 | 1988463 | 1988173 | 1457 | r-1 | 100975 | 101098 | 30 | — | S | Uncharacterized ACR |
| 115 | 101224 | 101733 | 1988154 | 1987645 | 1456 | r-1 | 101239 | 101695 | 212 | WecD | KR | Histone acetyltransferase HPA2 |
| | | | | | | | | | | | | and related acetyltransferases |
| | | | | | | | | | | | | COG0454 WecD |
| 116 | 101796 | 102347 | 1987582 | 1987031 | 749 | f-3 | 101805 | 102315 | 206 | — | K | Predicted transcription factor |
| 117 | 102393 | 102563 | 1986985 | 1986815 | 750 | f-3 | | | | | | |
| 118 | 102986 | 103432 | 1986392 | 1985946 | 2148 | r-3 | 103016 | 103364 | 182 | — | S | Uncharacterized ArCR |
| 119 | 103476 | 104318 | 1985902 | 1985060 | 751 | f-3 | 103539 | 104313 | 429 | SppA | NO | Periplasmic serine proteases |
| | | | | | | | | | | | | (ClpP class) COG0616 SppA |
| 120 | 104398 | 106101 | 1984980 | 1983277 | 30 | f-1 | 104398 | 106099 | 723 | — | S | Uncharacterized ACR |
| 121 | 106210 | 106779 | 1983168 | 1982599 | 31 | f-1 | 106210 | 106759 | 316 | SPT15 | K | Transcription initiation factor |
| | | | | | | | | | | | | TFIID (TATA-binding protein) |
| 122 | 106834 | 107454 | 1982544 | 1981924 | 32 | f-1 | 106894 | 107104 | 30 | RAD55 | T | RecA-superfamily ATPases |
| | | | | | | | | | | | | implicated in signal transduction |
| 123 | 107637 | 108455 | 1981741 | 1980923 | 752 | f-3 | 107640 | 108435 | 354 | AcuC | TQ | Deacetylases |
| 124 | 108482 | 109099 | 1980896 | 1980279 | 2147 | r-3 | 108491 | 109097 | 374 | PorG | C | Pyruvate:ferredoxin |
| | | | | | | | | | | | | oxidoreductase and related |
| | | | | | | | | | | | | 2-oxoacid:ferredoxin |
| | | | | | | | | | | | | oxidoreductases |
| | | | | | | | | | | | | (Indole-pyruvate ferredoxin |
| | | | | | | | | | | | | oxidoreductase) |
| 125 | 109092 | 111035 | 1980286 | 1978343 | 1827 | r-2 | 109092 | 110067 | 452 | PorA | C | Pyruvate:ferredoxin |
| | | | | | | | | | | | | oxidoreductase and related |
| | | | | | | | | | | | | 2-oxoacid:ferredoxin |
| | | | | | | | | | | | | oxidoreductases (Indole-pyruvate |
| | | | | | | | | | | | | ferredoxin oxidoreductase) |
| 126 | 111643 | 113019 | 1977735 | 1976359 | 1455 | r-1 | 111652 | 113017 | 732 | — | C | Acyl-CoA synthetase (NDP |
| | | | | | | | | | | | | forming) |
| 127 | 113205 | 114563 | 1976173 | 1974815 | 753 | f-3 | 113205 | 114555 | 724 | — | R | Predicted ATPase of the AAA |
| | | | | | | | | | | | | superfamily |
| 128 | 114668 | 115351 | 1974710 | 1974027 | 373 | f-2 | 114677 | 115346 | 390 | — | R | Predicted Zn-dependent |
| | | | | | | | | | | | | hydrolases of the beta-lactamase |
| | | | | | | | | | | | | fold |
| 129 | 115397 | 116401 | 1973981 | 1972977 | 374 | f-2 | 115490 | 116378 | 284 | LytB | M | Putative cell wall-binding domain |
| 130 | 116482 | 116634 | 1972896 | 1972744 | 1454 | r-1 | 116524 | 116596 | 27 | — | R | Predicted nucleic-acid-binding |
| | | | | | | | | | | | | protein containing a Zn-ribbon |
| 131 | 116676 | 117494 | 1972702 | 1971884 | 1826 | r-2 | 116700 | 117054 | 34 | RecN | L | ATPases involved in DNA repair |
| 132 | 117475 | 118242 | 1971903 | 1971136 | 1453 | r-1 | 117556 | 117835 | 34 | — | S | Predicted membrane protein |
| 133 | 118178 | 118711 | 1971200 | 1970667 | 2146 | r-3 | 118235 | 118379 | 30 | PitA | P | Phosphate/sulphate permeases |
| 134 | 119061 | 119939 | 1970317 | 1969439 | 1825 | r-2 | 119100 | 119931 | 416 | SpeE | E | Spermidine synthase |
| 135 | 119973 | 120485 | 1969405 | 1968893 | 754 | f-3 | 120156 | 120420 | 35 | — | R | Hydrolases of the alpha/beta |
| | | | | | | | | | | | | superfamily |
| 136 | 120479 | 120952 | 1968899 | 1968426 | 2145 | r-3 | 120479 | 120947 | 269 | — | S | Uncharacterized ACR |
| 137 | 121121 | 121192 | 1968257 | 1968186 | 2144 | r-3 | | | | | | |
| 138 | 121404 | 121856 | 1967974 | 1967522 | 755 | f-3 | 121443 | 121854 | 245 | GcvH | E | Glycine cleavage system H |
| | | | | | | | | | | | | protein (lipoate-binding) |
| 139 | 122007 | 122438 | 1967371 | 1966940 | 756 | f-3 | 122007 | 122256 | 90 | PspC | KT | Putative stress-responsive |
| | | | | | | | | | | | | transcriptional regulator |
| | | | | | | | | | | | | COG1983 PspC |
| 140 | 122431 | 122667 | 1966947 | 1966711 | 33 | f-1 | | | | | | |
| 141 | 122668 | 123594 | 1966710 | 1965784 | 34 | f-1 | 122680 | 123508 | 313 | CitG | H | Triphosphoribosyl-dephospho-CoA |
| | | | | | | | | | | | | synthetase |
| 142 | 123578 | 123868 | 1965800 | 1965510 | 2143 | r-3 | 123599 | 123710 | 29 | — | L | Archaea-specific RecJ-like |
| | | | | | | | | | | | | exonuclease |
| 143 | 123932 | 126157 | 1965446 | 1963221 | 2142 | r-3 | 123932 | 126146 | 1300 | — | L | Archaea-specific RecJ-like |
| | | | | | | | | | | | | exonuclease |
| 144 | 126306 | 128561 | 1963072 | 1960817 | 757 | f-3 | 126333 | 128553 | 448 | Tar | N | Methyl-accepting chemotaxis |
| | | | | | | | | | | | | protein |
| 145 | 128631 | 130013 | 1960747 | 1959365 | 1824 | r-2 | 128640 | 130011 | 628 | — | R | Permeases |
| 146 | 130150 | 131154 | 1959228 | 1958224 | 1452 | r-1 | 130150 | 131110 | 392 | MalK | G | ABC-type |
| | | | | | | | | | | | | sugar/spermidine/putrescine/iron/thiamine |
| | | | | | | | | | | | | transport systems |
| 147 | 131148 | 133049 | 1958230 | 1956329 | 1823 | r-2 | 131409 | 133029 | 584 | ThiP | H | ABC-type thiamine transport |
| | | | | | | | | | | | | system |
| 148 | 132745 | 133890 | 1956633 | 1955488 | 35 | f-1 | 132856 | 133831 | 394 | DmpA | EQ | L-aminopeptidase/D-esterase |
| | | | | | | | | | | | | COG3191 DmpA |
| 149 | 133885 | 134547 | 1955493 | 1954831 | 1451 | r-1 | 133900 | 134527 | 182 | CcmA | Q | ABC-type multidrug transport |
| | | | | | | | | | | | | system |
| 150 | 134544 | 134834 | 1954834 | 1954544 | 1822 | r-2 | 134589 | 134763 | 30 | FhaB | M | Putative hemagglutinin/hemolysin |
| 151 | 134978 | 135754 | 1954400 | 1953624 | 2141 | r-3 | 135020 | 135215 | 33 | — | R | Permeases of the major facilitator |
| | | | | | | | | | | | | superfamily |
| 152 | 137477 | 138172 | 1951901 | 1951206 | 2140 | r-3 | 137828 | 138005 | 32 | — | S | Uncharacterized BCR |
| 153 | 138521 | 138676 | 1950857 | 1950702 | 2139 | r-3 | 138590 | 138671 | 28 | Map | J | Methionine aminopeptidase |
| 154 | 139365 | 140972 | 1950013 | 1948406 | 758 | f-3 | 139365 | 140970 | 914 | — | C | Fe—S oxidoreductases family 2 |
| 155 | 141078 | 141311 | 1948300 | 1948067 | 759 | f-3 | 141087 | 141294 | 46 | Lrp | K | Transcriptional regulators |
| 156 | 141335 | 141856 | 1948043 | 1947522 | 375 | f-2 | 141335 | 141797 | 147 | — | K | Predicted transcriptional |
| | | | | | | | | | | | | regulators |
| 157 | 141853 | 142707 | 1947525 | 1946671 | 1450 | r-1 | 141862 | 142702 | 474 | Nfo | L | Endonuclease IV |
| 158 | 142732 | 143793 | 1946646 | 1945585 | 1449 | r-1 | 142903 | 143602 | 40 | SbcC | L | ATPase involved in DNA repair |
| 159 | 143756 | 144931 | 1945622 | 1944447 | 2138 | r-3 | 143765 | 144896 | 451 | — | S | Predicted membrane protein |
| 160 | 144924 | 145235 | 1944454 | 1944143 | 1821 | r-2 | 144936 | 145224 | 134 | — | S | Uncharacterized ACR |
| 161 | 145334 | 145951 | 1944044 | 1943427 | 376 | f-2 | 145334 | 145949 | 383 | — | S | Uncharacterized ACR |
| 162 | 146007 | 146603 | 1943371 | 1942775 | 1820 | r-2 | 146016 | 146553 | 261 | — | S | Uncharacterized ACR |
| 163 | 147207 | 149273 | 1942171 | 1940105 | 1819 | r-2 | 147309 | 149253 | 934 | — | L | Superfamily I DNA and RNA |
| | | | | | | | | | | | | helicases and helicase subunits |
| 164 | 149293 | 149697 | 1940085 | 1939681 | 1448 | r-1 | 149293 | 149695 | 230 | — | R | Predicted nucleic-acid-binding |
| | | | | | | | | | | | | protein containing a Zn-ribbon |
| 165 | 149699 | 150874 | 1939679 | 1938504 | 2137 | r-3 | 149708 | 150872 | 612 | PaaJ | I | Acetyl-CoA acetyltransferases |
| 166 | 150876 | 151928 | 1938502 | 1937450 | 1818 | r-2 | 150876 | 151926 | 582 | PksG | I | 3-hydroxy-3-methylglutaryl CoA |
| | | | | | | | | | | | | synthase |
| 167 | 152076 | 152471 | 1937302 | 1936907 | 760 | f-3 | 152076 | 152433 | 157 | — | S | Uncharacterized ACR |
| 168 | 152417 | 152743 | 1936961 | 1936635 | 377 | f-2 | 152417 | 152738 | 164 | — | S | Uncharacterized ACR |
| 169 | 152801 | 153490 | 1936577 | 1935888 | 2136 | r-3 | 152810 | 153485 | 416 | NOP1 | J | Fibrillarin-like rRNA methylase |
| 170 | 153487 | 154752 | 1935891 | 1934626 | 1447 | r-1 | 153487 | 154609 | 553 | SIK1 | J | Protein implicated in ribosomal |
| | | | | | | | | | | | | biogenesis |
| 171 | 154844 | 155881 | 1934534 | 1933497 | 2135 | r-3 | 154919 | 155879 | 578 | GCD2 | J | Translation initiation factor |
| | | | | | | | | | | | | eIF-2B delta subunit |
| 172 | 156044 | 157309 | 1933334 | 1932069 | 378 | f-2 | 156056 | 157292 | 602 | ARO8 | KE | Transcriptional regulators |
| | | | | | | | | | | | | containing a DNA-binding HTH |
| | | | | | | | | | | | | domain and an aminotransferase |
| | | | | | | | | | | | | domain (MocR family) and their |
| | | | | | | | | | | | | eukaryotic orthologs COG1167 |
| | | | | | | | | | | | | ARO8 |
| 173 | 157368 | 158228 | 1932010 | 1931150 | 761 | f-3 | 157452 | 157953 | 129 | — | R | Predicted glutamine |
| | | | | | | | | | | | | amidotransferases |
| 174 | 158158 | 159018 | 1931220 | 1930360 | 1446 | r-1 | 158179 | 159016 | 422 | SplB | L | DNA repair photolyase |
| 175 | 158982 | 159464 | 1930396 | 1929914 | 762 | f-3 | 159054 | 159462 | 216 | — | S | Uncharacterized ACR |
| 176 | 159517 | 160083 | 1929861 | 1929295 | 1445 | r-1 | 159517 | 160081 | 350 | GuaA | F | GMP synthase - Glutamine |
| | | | | | | | | | | | | amidotransferase domain |
| 177 | 160206 | 160256 | 1929172 | 1929122 | 763 | f-3 | | | | | | |
| 178 | 160526 | 160744 | 1928852 | 1928634 | 2134 | r-3 | 160619 | 160733 | 27 | — | C | Acyl-CoA synthetase (NDP |
| | | | | | | | | | | | | forming) |
| 179 | 160787 | 161719 | 1928591 | 1927659 | 2133 | r-3 | 160799 | 161717 | 567 | GuaA | F | GMP synthase - PP-ATPase |
| | | | | | | | | | | | | domain |
| 180 | 161795 | 163255 | 1927583 | 1926123 | 2132 | r-3 | 162410 | 163253 | 495 | GuaB | F | IMP dehydrogenase/GMP |
| | | | | | | | | | | | | reductase |
| 181 | 163362 | 164405 | 1926016 | 1924973 | 764 | f-3 | 163503 | 163761 | 32 | | | |
| 182 | 164398 | 165393 | 1924980 | 1923985 | 1444 | r-1 | 164398 | 165388 | 544 | — | R | ATP-utilizing enzymes of |
| | | | | | | | | | | | | ATP-grasp superfamily (probably |
| | | | | | | | | | | | | carboligases) |
| 183 | 165390 | 167531 | 1923988 | 1921847 | 1817 | r-2 | 165390 | 167505 | 1051 | PurL | F | Phosphoribosylformylglycinamidine |
| | | | | | | | | | | | | (FGAM) synthase |
| 184 | 168881 | 170377 | 1920497 | 1919001 | 2131 | r-3 | 169019 | 169826 | 162 | PpsA | G | Phosphoenolpyruvate |
| | | | | | | | | | | | | synthase/pyruvate phosphate |
| | | | | | | | | | | | | dikinase |
| 185 | 170457 | 171128 | 1918921 | 1918250 | 1816 | r-2 | 170457 | 171126 | 385 | PurL | F | Phosphoribosylformylglycinamidine |
| | | | | | | | | | | | | (FGAM) synthase |
| 186 | 171130 | 171381 | 1918248 | 1917997 | 1443 | r-1 | 171139 | 171376 | 110 | PurS | F | Phosphoribosylformylglycinamidine |
| | | | | | | | | | | | | (FGAM) synthase |
| 187 | 171383 | 172534 | 1917995 | 1916844 | 2130 | r-3 | 171392 | 172532 | 673 | — | R | ATP-utilizing enzymes of |
| | | | | | | | | | | | | ATP-grasp superfamily (probably |
| | | | | | | | | | | | | carboligases) |
| 188 | 172527 | 173834 | 1916851 | 1915544 | 1815 | r-2 | 172539 | 173829 | 602 | PurD | F | Phosphoribosylamine-glycine |
| | | | | | | | | | | | | ligase |
| 189 | 173896 | 173985 | 1915482 | 1915393 | 1442 | r-1 | | | | | | |
| 190 | 174404 | 174601 | 1914974 | 1914777 | 379 | f-2 | 174434 | 174599 | 29 | PolB | L | DNA polymerase elongation |
| | | | | | | | | | | | | subunit (family B) |
| 191 | 174585 | 175349 | 1914793 | 1914029 | 765 | f-3 | 174597 | 174876 | 34 | RAD55 | T | RecA-superfamily ATPases |
| | | | | | | | | | | | | implicated in signal transduction |
| 192 | 175740 | 177038 | 1913638 | 1912340 | 1814 | r-2 | 175749 | 177036 | 781 | PurT | F | Formate-dependent |
| | | | | | | | | | | | | phosphoribosylglycinamide |
| | | | | | | | | | | | | formyltransferase (GAR |
| | | | | | | | | | | | | transformylase) |
| 193 | 177138 | 178151 | 1912240 | 1911227 | 766 | f-3 | 177147 | 178146 | 545 | PurM | F | Phosphoribosylaminoimidazol |
| | | | | | | | | | | | | (AIR) synthetase |
| 194 | 178184 | 178348 | 1911194 | 1911030 | 380 | f-2 | 178217 | 178331 | 28 | PyrF | F | Orotidine-5′-phosphate |
| | | | | | | | | | | | | decarboxylase |
| 195 | 178320 | 179039 | 1911058 | 1910339 | 1813 | r-2 | 178332 | 179028 | 341 | PurC | F | Phosphoribosylaminoimidazolesuccinocarboxamide |
| | | | | | | | | | | | | (SAICAR) |
| | | | | | | | | | | | | synthase |
| 196 | 179195 | 180553 | 1910183 | 1908825 | 381 | f-2 | 179195 | 180551 | 661 | PurF | F | Glutamine |
| | | | | | | | | | | | | phosphoribosylpyrophosphate |
| | | | | | | | | | | | | amidotransferase |
| 197 | 180543 | 181031 | 1908835 | 1908347 | 1812 | r-2 | 180543 | 181002 | 102 | — | R | Predicted nucleic acid-binding |
| | | | | | | | | | | | | protein |
| 198 | 181028 | 181288 | 1908350 | 1908090 | 2129 | r-3 | 181028 | 181277 | 73 | — | S | Uncharacterized ACR |
| 199 | 181345 | 183324 | 1908033 | 1906054 | 1441 | r-1 | 181345 | 183322 | 984 | BisC | C | Anaerobic dehydrogenases |
| 200 | 183436 | 184935 | 1905942 | 1904443 | 1440 | r-1 | 184129 | 184273 | 33 | MalG | G | Sugar permeases |
| 201 | 185362 | 185955 | 1904016 | 1903423 | 1439 | r-1 | 185365 | 185953 | 330 | PDX2 | H | Predicted glutamine |
| | | | | | | | | | | | | amidotransferase involved in |
| | | | | | | | | | | | | pyridoxine biosynthesis |
| 202 | 185988 | 187004 | 1903390 | 1902374 | 1811 | r-2 | 185997 | 186966 | 536 | SNZ1 | H | Pyridoxine biosynthesis enzyme |
| 203 | 187111 | 187953 | 1902267 | 1901425 | 1438 | r-1 | 187120 | 187939 | 410 | NadC | H | Nicotinate-nucleotide |
| | | | | | | | | | | | | pyrophosphorylase |
| 204 | 188074 | 189315 | 1901304 | 1900063 | 36 | f-1 | 188083 | 189256 | 188 | GCD1 | MJ | Nucleoside-diphosphate-sugar |
| | | | | | | | | | | | | pyrophosphorylases involved in |
| | | | | | | | | | | | | lipopolysaccharide |
| | | | | | | | | | | | | biosynthesis/translation initiation |
| | | | | | | | | | | | | factor eIF2B subunits COG1208 |
| | | | | | | | | | | | | GCD1 |
| 205 | 189865 | 190278 | 1899513 | 1899100 | 37 | f-1 | 189865 | 190276 | 167 | — | S | Uncharacterized ACR |
| 206 | 190253 | 190621 | 1899125 | 1898757 | 382 | f-2 | 190253 | 190583 | 154 | — | R | Predicted nucleotidyltransferases |
| 207 | 190630 | 191799 | 1898748 | 1897579 | 1437 | r-1 | 190630 | 191785 | 715 | | | |
| 208 | 191874 | 192509 | 1897504 | 1896869 | 767 | f-3 | 191889 | 192489 | 256 | SmtA | QR | SAM-dependent |
| | | | | | | | | | | | | methyltransferases COG0500 |
| | | | | | | | | | | | | SmtA |
| 209 | 192535 | 192981 | 1896843 | 1896397 | 38 | f-1 | 192553 | 192763 | 29 | PilO | N | Fimbrial assembly protein |
| 210 | 192971 | 193486 | 1896407 | 1895892 | 383 | f-2 | 193004 | 193349 | 42 | SbcC | L | ATPase involved in DNA repair |
| 211 | 193701 | 194033 | 1895677 | 1895345 | 1810 | r-2 | 193740 | 194025 | 117 | WecD | KR | Histone acetyltransferase HPA2 |
| | | | | | | | | | | | | and related acetyltransferases |
| | | | | | | | | | | | | COG0454 WecD |
| 212 | 194152 | 194358 | 1895226 | 1895020 | 1436 | r-1 | 194242 | 194350 | 28 | RimL | J | Acetyltransferases |
| 213 | 195097 | 195405 | 1894281 | 1893973 | 39 | f-1 | 195097 | 195313 | 46 | CcmA | Q | ABC-type multidrug transport |
| | | | | | | | | | | | | system |
| 214 | 195742 | 195846 | 1893636 | 1893532 | 1435 | r-1 | | | | | | |
| 215 | 195995 | 196111 | 1893383 | 1893267 | 384 | f-2 | | | | | | |
| 216 | 196138 | 196959 | 1893240 | 1892419 | 1434 | r-1 | 196138 | 196951 | 291 | WecD | KR | Histone acetyltransferase HPA2 |
| | | | | | | | | | | | | and related acetyltransferases |
| | | | | | | | | | | | | COG0454 WecD |
| 217 | 197032 | 197625 | 1892346 | 1891753 | 1433 | r-1 | 197044 | 197563 | 125 | RimL | J | Acetyltransferases |
| 218 | 197747 | 198367 | 1891631 | 1891011 | 385 | f-2 | 197837 | 198185 | 65 | SmtA | QR | SAM-dependent |
| | | | | | | | | | | | | methyltransferases COG0500 |
| | | | | | | | | | | | | SmtA |
| 219 | 198495 | 199754 | 1890883 | 1889624 | 1809 | r-2 | 198549 | 198996 | 75 | | | |
| 220 | 199748 | 200686 | 1889630 | 1888692 | 2128 | r-3 | 199901 | 200363 | 33 | RfaG | M | Predicted glycosyltransferases |
| 221 | 200742 | 201098 | 1888636 | 1888280 | 768 | f-3 | 200931 | 201003 | 27 | BtuC | PH | ABC-type |
| | | | | | | | | | | | | cobalamin/Fe3+-siderophores |
| | | | | | | | | | | | | transport systems |
| 222 | 201067 | 201738 | 1888311 | 1887640 | 40 | f-1 | 201067 | 201727 | 360 | — | R | Predicted amidohydrolase |
| 223 | 201692 | 202102 | 1887686 | 1887276 | 386 | f-2 | 201773 | 202100 | 181 | ARC1 | R | EMAP domain |
| 224 | 202103 | 202924 | 1887275 | 1886454 | 387 | f-2 | 202313 | 202922 | 229 | SpeB | E | Arginase/agmatinase/formimionoglutamate |
| | | | | | | | | | | | | hydrolase |
| 225 | 202929 | 203372 | 1886449 | 1886006 | 769 | f-3 | 202944 | 203361 | 187 | CDC14 | T | Predicted protein-tyrosine |
| | | | | | | | | | | | | phosphatase |
| 226 | 203585 | 204475 | 1885793 | 1884903 | 388 | f-2 | 203633 | 204170 | 82 | HisS | J | Histidyl-tRNA synthetase |
| 227 | 204472 | 205083 | 1884906 | 1884295 | 41 | f-1 | 204484 | 205048 | 155 | HisG | E | ATP phosphoribosyltransferase |
| | | | | | | | | | | | | (histidine biosynthesis) |
| 228 | 205070 | 206200 | 1884308 | 1883178 | 389 | f-2 | 205079 | 206111 | 276 | HisD | E | Histidinol dehydrogenase |
| 229 | 206280 | 206813 | 1883098 | 1882565 | 770 | f-3 | 206280 | 206766 | 117 | HisB | E | Imidazoleglycerol-phosphate |
| | | | | | | | | | | | | dehydratase |
| 230 | 206810 | 207397 | 1882568 | 1881981 | 390 | f-2 | 206810 | 207380 | 182 | HisH | E | Glutamine amidotransferase |
| 231 | 207399 | 208100 | 1881979 | 1881278 | 771 | f-3 | 207405 | 208038 | 162 | HisA | E | Phosphoribosylformimino-5-aminoimidazole |
| | | | | | | | | | | | | carboxamide |
| | | | | | | | | | | | | ribonucleotide (ProFAR) |
| | | | | | | | | | | | | isomerase |
| 232 | 208082 | 208840 | 1881296 | 1880538 | 391 | f-2 | 208082 | 208826 | 310 | HisF | E | Imidazoleglycerol-phosphate |
| | | | | | | | | | | | | synthase |
| 233 | 208850 | 209479 | 1880528 | 1879899 | 392 | f-2 | 208898 | 209171 | 119 | HisI | E | Phosphoribosyl-AMP |
| | | | | | | | | | | | | cyclohydrolase |
| 234 | 209476 | 210486 | 1879902 | 1878892 | 42 | f-1 | 209542 | 210427 | 184 | HisC | E | Histidinol-phosphate |
| | | | | | | | | | | | | aminotransferase/Tyrosine |
| | | | | | | | | | | | | aminotransferase |
| 235 | 210470 | 211198 | 1878908 | 1878180 | 393 | f-2 | 210476 | 210995 | 37 | Gph | R | Predicted phosphatases |
| 236 | 211296 | 211982 | 1878082 | 1877396 | 772 | f-3 | 211296 | 211980 | 355 | TrpC | E | Indole-3-glycerol phosphate |
| | | | | | | | | | | | | synthase |
| 237 | 211979 | 212956 | 1877399 | 1876422 | 394 | f-2 | 211985 | 212951 | 415 | TrpD | E | Anthranilate |
| | | | | | | | | | | | | phosphoribosyltransferase |
| 238 | 212938 | 214239 | 1876440 | 1875139 | 43 | f-1 | 212980 | 214228 | 610 | TrpE | EH | Anthranilate/para-aminobenzoate |
| | | | | | | | | | | | | synthases component I COG0147 |
| | | | | | | | | | | | | TrpE |
| 239 | 214236 | 214814 | 1875142 | 1874564 | 773 | f-3 | 214236 | 214806 | 326 | PabA | EH | Anthranilate/para-aminobenzoate |
| | | | | | | | | | | | | synthases component II |
| | | | | | | | | | | | | COG0512 PabA |
| 240 | 214807 | 215433 | 1874571 | 1873945 | 44 | f-1 | 214816 | 215428 | 253 | TrpF | E | Phosphoribosyl anthranilate |
| | | | | | | | | | | | | isomerase |
| 241 | 215426 | 216595 | 1873952 | 1872783 | 395 | f-2 | 215435 | 216587 | 676 | TrpB | E | Tryptophan synthase beta chain |
| 242 | 216588 | 217343 | 1872790 | 1872035 | 774 | f-3 | 216588 | 217323 | 370 | TrpA | E | Tryptophan synthase alpha chain |
| 243 | 217325 | 218095 | 1872053 | 1871283 | 2127 | r-3 | 217328 | 217913 | 85 | TyrA | E | Prephenate dehydrogenase |
| 244 | 218020 | 219114 | 1871358 | 1870264 | 1432 | r-1 | 218029 | 218971 | 191 | AvtA | E | PLP-dependent aminotransferases |
| 245 | 219077 | 219253 | 1870301 | 1870125 | 2126 | r-3 | 219080 | 219221 | 35 | PheA | E | Chorismate mutase |
| 246 | 219407 | 220474 | 1869971 | 1868904 | 2125 | r-3 | 219407 | 220457 | 530 | AroC | E | Chorismate synthase |
| 247 | 220471 | 221718 | 1868907 | 1867660 | 1431 | r-1 | 220513 | 221710 | 470 | AroA | E | 5-enolpyruvylshikimate-3-phosphate |
| | | | | | | | | | | | | synthase |
| 248 | 221676 | 222236 | 1867702 | 1867142 | 1808 | r-2 | 221742 | 222234 | 175 | — | EH | Archaeal shikimate kinase |
| | | | | | | | | | | | | COG1685 - |
| 249 | 222472 | 222852 | 1866906 | 1866526 | 1430 | r-1 | 222472 | 222850 | 161 | AroE | E | Shikimate 5-dehydrogenase |
| 250 | 222879 | 223259 | 1866499 | 1866119 | 1807 | r-2 | 222879 | 223197 | 142 | AroE | E | Shikimate 5-dehydrogenase |
| 251 | 223282 | 223923 | 1866096 | 1865455 | 1429 | r-1 | 223282 | 223894 | 207 | AroD | E | 3-dehydroquinate dehydratase |
| 252 | 223877 | 225022 | 1865501 | 1864356 | 2124 | r-3 | 223985 | 224876 | 350 | AroB | E | 3-dehydroquinate synthetase |
| 253 | 224890 | 225804 | 1864488 | 1863574 | 1428 | r-1 | 224965 | 225682 | 395 | AroA | E | 3-Deoxy-D-arabino-heptulosonate |
| | | | | | | | | | | | | 7-phosphate (DAHP) synthase |
| 254 | 225801 | 226844 | 1863577 | 1862534 | 1806 | r-2 | 225924 | 226824 | 426 | TktA | G | Transketolase |
| 255 | 226718 | 227377 | 1862660 | 1862001 | 2123 | r-3 | 226742 | 227369 | 278 | TktA | G | Transketolase |
| 256 | 227370 | 227741 | 1862008 | 1861637 | 1805 | r-2 | 227463 | 227547 | 30 | AraC | K | AraC-type DNA-binding |
| | | | | | | | | | | | | domain-containing proteins |
| 257 | 227931 | 228242 | 1861447 | 1861136 | 775 | f-3 | 227985 | 228237 | 71 | ProC | E | Pyrroline-5-carboxylate reductase |
| 258 | 228257 | 228718 | 1861121 | 1860660 | 396 | f-2 | 228257 | 228701 | 136 | ProC | E | Pyrroline-5-carboxylate reductase |
| 259 | 228710 | 229147 | 1860668 | 1860231 | 2122 | r-3 | 228710 | 229079 | 201 | ArgE | E | Acetylornithine |
| | | | | | | | | | | | | deacetylase/Succinyl-diaminopimelate |
| | | | | | | | | | | | | desuccinylase and related |
| | | | | | | | | | | | | deacylases |
| 260 | 229347 | 229745 | 1860031 | 1859633 | 1804 | r-2 | 229347 | 229716 | 195 | ArgE | E | Acetylornithine |
| | | | | | | | | | | | | deacetylase/Succinyl-diaminopimelate |
| | | | | | | | | | | | | desuccinylase and related |
| | | | | | | | | | | | | deacylases |
| 261 | 229732 | 230820 | 1859646 | 1858558 | 1427 | r-1 | 229732 | 230809 | 523 | ArgD | E | PLP-dependent aminotransferases |
| 262 | 230826 | 231581 | 1858552 | 1857797 | 1803 | r-2 | 230826 | 231579 | 315 | ArgB | E | Acetylglutamate kinase |
| 263 | 231591 | 232583 | 1857787 | 1856795 | 1802 | r-2 | 231591 | 232578 | 564 | ArgC | E | Acetylglutamate semialdehyde |
| | | | | | | | | | | | | dehydrogenase |
| 264 | 232580 | 233410 | 1856798 | 1855968 | 2121 | r-3 | 232589 | 233405 | 437 | RimK | HJ | Glutathione synthase/Ribosomal |
| | | | | | | | | | | | | protein S6 modification enzyme |
| | | | | | | | | | | | | (glutaminyl transferase) |
| | | | | | | | | | | | | COG0189 RimK |
| 265 | 233428 | 233589 | 1855950 | 1855789 | 1426 | r-1 | 233431 | 233512 | 28 | PqiA | S | Uncharacterized |
| | | | | | | | | | | | | paraquat-inducible protein A |
| 266 | 233684 | 234727 | 1855694 | 1854651 | 2120 | r-3 | 233684 | 234692 | 456 | LeuB | E | Isocitrate/isopropylmalate |
| | | | | | | | | | | | | dehydrogenase |
| 267 | 234715 | 235206 | 1854663 | 1854172 | 1425 | r-1 | 234715 | 235201 | 256 | LeuD | E | 3-isopropylmalate dehydratase |
| | | | | | | | | | | | | small subunit |
| 268 | 235203 | 236345 | 1854175 | 1853033 | 1801 | r-2 | 235203 | 236337 | 595 | LeuC | E | 3-isopropylmalate dehydratase |
| | | | | | | | | | | | | large subunit |
| 269 | 236342 | 237427 | 1853036 | 1851951 | 2119 | r-3 | 236342 | 237425 | 536 | LeuA | E | Isopropylmalate/homocitrate/citramalate |
| | | | | | | | | | | | | synthases |
| 270 | 237653 | 238216 | 1851725 | 1851162 | 2118 | r-3 | 237653 | 238214 | 297 | NfnB | C | Nitroreductase |
| 271 | 238509 | 239528 | 1850869 | 1849850 | 776 | f-3 | 238581 | 239505 | 289 | — | R | Predicted ATPase of the AAA |
| | | | | | | | | | | | | superfamily |
| 272 | 239489 | 239686 | 1849889 | 1849692 | 397 | f-2 | 239495 | 239672 | 76 | — | R | Predicted ATPase of the AAA |
| | | | | | | | | | | | | superfamily |
| 273 | 239677 | 240426 | 1849701 | 1848952 | 1424 | r-1 | 239677 | 240424 | 406 | PhnP | R | Metal-dependent hydrolases of |
| | | | | | | | | | | | | the beta-lactamase superfamily I |
| 274 | 240560 | 243028 | 1848818 | 1846350 | 398 | f-2 | 240662 | 242990 | 424 | PflD | C | Pyruvate-formate lyase |
| 275 | 243977 | 244525 | 1845401 | 1844853 | 399 | f-2 | 244118 | 244322 | 35 | Arp | R | Ankyrin repeat proteins |
| 276 | 244591 | 245055 | 1844787 | 1844323 | 45 | f-1 | 244591 | 245044 | 228 | — | S | Uncharacterized ACR |
| 277 | 245052 | 245747 | 1844326 | 1843631 | 777 | f-3 | 245052 | 245736 | 322 | — | S | Uncharacterized ArCR |
| 278 | 245738 | 246229 | 1843640 | 1843149 | 2117 | r-3 | 245744 | 245888 | 33 | | | |
| 279 | 246239 | 246340 | 1843139 | 1843038 | 2116 | r-3 | 246239 | 246326 | 26 | TehA | P | Tellurite resistance protein and |
| | | | | | | | | | | | | related permeases |
| 280 | 247226 | 248134 | 1842152 | 1841244 | 2115 | r-3 | 247241 | 248132 | 503 | NadA | H | Quinolinate synthase |
| 281 | 248197 | 249606 | 1841181 | 1839772 | 1423 | r-1 | 248275 | 249586 | 598 | NadB | H | Aspartate oxidase |
| 282 | 251161 | 251265 | 1838217 | 1838113 | 46 | f-1 | | | | | | |
| 283 | 251394 | 251477 | 1837984 | 1837901 | 778 | f-3 | | | | | | |
| 284 | 251557 | 251760 | 1837821 | 1837618 | 47 | f-1 | 251602 | 251731 | 32 | GpmA | G | Phosphoglycerate mutase 1 |
| 285 | 254653 | 255162 | 1834725 | 1834216 | 1422 | r-1 | 254653 | 255151 | 248 | KptA | S | Uncharacterized ACR |
| 286 | 255227 | 256987 | 1834151 | 1832391 | 2114 | r-3 | 256304 | 256919 | 57 | ElsH | R | Metal-dependent hydrolase |
| 287 | 257124 | 258452 | 1832254 | 1830926 | 1800 | r-2 | 257133 | 258450 | 728 | HcaD | R | Uncharacterized |
| | | | | | | | | | | | | NAD(FAD)-dependent |
| | | | | | | | | | | | | dehydrogenases |
| 288 | 258556 | 259233 | 1830822 | 1830145 | 1421 | r-1 | 258556 | 259231 | 310 | PyrH | F | Uridylate kinase |
| 289 | 260703 | 261923 | 1828675 | 1827455 | 779 | f-3 | 260703 | 261798 | 430 | SrmB | LKJ | Superfamily II DNA and RNA |
| | | | | | | | | | | | | helicases COG0513 SrmB |
| 290 | 262176 | 262484 | 1827202 | 1826894 | 1799 | r-2 | 262176 | 262482 | 183 | RpsJ | J | Ribosomal protein S10 |
| 291 | 262544 | 263830 | 1826834 | 1825548 | 2113 | r-3 | 262544 | 263828 | 762 | TufB | JE | GTPases - translation elongation |
| | | | | | | | | | | | | factors COG0050 TufB |
| 292 | 264065 | 265165 | 1825313 | 1824213 | 2112 | r-3 | 264065 | 265157 | 634 | FusA | J | Translation elongation and release |
| | | | | | | | | | | | | factors (GTPases) |
| 293 | 264895 | 266262 | 1824483 | 1823116 | 1420 | r-1 | 264895 | 265954 | 642 | FusA | J | Translation elongation and release |
| | | | | | | | | | | | | factors (GTPases) |
| 294 | 266696 | 266977 | 1822682 | 1822401 | 2111 | r-3 | | | | | | |
| 295 | 267002 | 268075 | 1822376 | 1821303 | 2110 | r-3 | 267005 | 267965 | 260 | — | R | HD superfamily |
| | | | | | | | | | | | | phosphohydrolases |
| 296 | 268109 | 269197 | 1821269 | 1820181 | 2109 | r-3 | 268109 | 269156 | 619 | ArgE | E | Acetylornithine |
| | | | | | | | | | | | | deacetylase/Succinyl-diaminopimelate |
| | | | | | | | | | | | | desuccinylase and related |
| | | | | | | | | | | | | deacylases |
| 297 | 269297 | 270064 | 1820081 | 1819314 | 400 | f-2 | 269378 | 270059 | 270 | GloB | R | Zn-dependent hydrolases |
| 298 | 270052 | 270306 | 1819326 | 1819072 | 48 | f-1 | 270061 | 270304 | 147 | — | S | Uncharacterized ArCR |
| 299 | 270301 | 271278 | 1819077 | 1818100 | 1419 | r-1 | 270331 | 270853 | 117 | — | S | Uncharacterized ACR |
| 300 | 271361 | 272119 | 1818017 | 1817259 | 401 | f-2 | 271361 | 272117 | 317 | TatD | L | Mg-dependent DNase |
| 301 | 272121 | 272429 | 1817257 | 1816949 | 780 | f-3 | 272208 | 272421 | 58 | SmtA | QR | SAM-dependent |
| | | | | | | | | | | | | methyltransferases COG0500 |
| | | | | | | | | | | | | SmtA |
| 302 | 272525 | 274057 | 1816853 | 1815321 | 2108 | r-3 | 272534 | 274055 | 679 | FolP | H | Dihydropteroate synthase |
| 303 | 274244 | 274963 | 1815134 | 1814415 | 402 | f-2 | 274244 | 274955 | 417 | — | S | Uncharacterized ACR |
| 304 | 275340 | 275564 | 1814038 | 1813814 | 781 | f-3 | 275463 | 275538 | 27 | — | R | Predicted nucleic acid-binding |
| | | | | | | | | | | | | protein |
| 305 | 276688 | 277758 | 1812690 | 1811620 | 49 | f-1 | 277030 | 277165 | 33 | — | C | Aldehyde:ferredoxin |
| | | | | | | | | | | | | oxidoreductase |
| 306 | 277759 | 278526 | 1811619 | 1810852 | 50 | f-1 | 278314 | 278485 | 28 | ThiP | H | ABC-type thiamine transport |
| | | | | | | | | | | | | system |
| 307 | 278454 | 278981 | 1810924 | 1810397 | 782 | f-3 | 278700 | 278793 | 29 | — | K | RNA-binding proteins (RRM |
| | | | | | | | | | | | | domain) |
| 308 | 278969 | 279736 | 1810409 | 1809642 | 403 | f-2 | 279002 | 279638 | 156 | CcmA | Q | ABC-type multidrug transport |
| | | | | | | | | | | | | system |
| 309 | 279859 | 280521 | 1809519 | 1808857 | 1418 | r-1 | 279883 | 280513 | 255 | HIS2 | ER | Histidinol phosphatase and |
| | | | | | | | | | | | | related hydrolases of the PHP |
| | | | | | | | | | | | | family COG1387 HIS2 |
| 310 | 280629 | 281072 | 1808749 | 1808306 | 783 | f-3 | 280638 | 281070 | 251 | Sbm | I | Methylmalonyl-CoA mutase |
| 311 | 281104 | 282072 | 1808274 | 1807306 | 51 | f-1 | 281113 | 282061 | 494 | ArgK | E | Putative periplasmic protein |
| | | | | | | | | | | | | kinase ArgK and related GTPases |
| | | | | | | | | | | | | of G3E family |
| 312 | 282069 | 282467 | 1807309 | 1806911 | 784 | f-3 | 282069 | 282462 | 233 | GloA | E | Lactoylglutathione lyase and |
| | | | | | | | | | | | | related lyases |
| 313 | 282544 | 283272 | 1806834 | 1806106 | 1417 | r-1 | 282544 | 283186 | 182 | WecD | KR | Histone acetyltransferase HPA2 |
| | | | | | | | | | | | | and related acetyltransferases |
| | | | | | | | | | | | | COG0454 WecD |
| 314 | 283421 | 284416 | 1805957 | 1804962 | 2107 | r-3 | 283421 | 284405 | 414 | DUR1 | E | Allophanate hydrolase subunit 2 |
| 315 | 284413 | 285099 | 1804965 | 1804279 | 1416 | r-1 | 284419 | 285085 | 318 | DUR1 | E | Allophanate hydrolase subunit 1 |
| 316 | 285104 | 285292 | 1804274 | 1804086 | 2106 | r-3 | 285107 | 285257 | 39 | VapC | R | Predicted nucleic acid-binding |
| | | | | | | | | | | | | protein |
| 317 | 285716 | 286492 | 1803662 | 1802886 | 2105 | r-3 | 285725 | 286487 | 455 | — | R | Uncharacterized proteins |
| 318 | 286543 | 287079 | 1802835 | 1802299 | 52 | f-1 | 286570 | 287005 | 214 | — | R | Predicted nucleic acid-binding |
| | | | | | | | | | | | | protein |
| 319 | 287046 | 287645 | 1802332 | 1801733 | 1798 | r-2 | 287112 | 287643 | 244 | — | F | Predicted nucleotide kinase |
| | | | | | | | | | | | | (related to CMP and AMP |
| | | | | | | | | | | | | kinases) |
| 320 | 287758 | 288153 | 1801620 | 1801225 | 1415 | r-1 | 287788 | 287881 | 28 | RpoD | K | DNA-directed RNA polymerase |
| | | | | | | | | | | | | sigma subunits |
| | | | | | | | | | | | | (sigma70/sigma32) |
| 321 | 288150 | 288437 | 1801228 | 1800941 | 1797 | r-2 | 288159 | 288423 | 44 | — | S | Uncharacterized ACR |
| 322 | 288505 | 289047 | 1800873 | 1800331 | 1414 | r-1 | 288724 | 288904 | 42 | — | R | Predicted nucleotidyltransferases |
| 323 | 289173 | 289493 | 1800205 | 1799885 | 1796 | r-2 | | | | | | |
| 324 | 289490 | 289948 | 1799888 | 1799430 | 2104 | r-3 | 289502 | 289874 | 33 | — | R | Predicted nucleic acid-binding |
| | | | | | | | | | | | | protein |
| 325 | 290136 | 291029 | 1799242 | 1798349 | 1795 | r-2 | 290193 | 291024 | 363 | AlkA | L | 3-Methyladenine DNA |
| | | | | | | | | | | | | glycosylase |
| 326 | 290939 | 291157 | 1798439 | 1798221 | 2103 | r-3 | 290975 | 291065 | 30 | GlgB | G | 1 |
| 327 | 291353 | 292696 | 1798025 | 1796682 | 404 | f-2 | 291431 | 292670 | 516 | — | NO | Membrane-bound serine protease |
| | | | | | | | | | | | | (ClpP class) COG1030- |
| 328 | 292703 | 293509 | 1796675 | 1795869 | 405 | f-2 | 292763 | 293507 | 374 | HflC | O | Membrane protease subunits |
| 329 | 293510 | 293593 | 1795868 | 1795785 | 2102 | r-3 | | | | | | |
| 330 | 293627 | 294415 | 1795751 | 1794963 | 406 | f-2 | 293636 | 294413 | 406 | — | D | ATPases involved in chromosome |
| | | | | | | | | | | | | partitioning |
| 331 | 294346 | 294663 | 1795032 | 1794715 | 53 | f-1 | | | | | | |
| 332 | 294750 | 295001 | 1794628 | 1794377 | 785 | f-3 | 294801 | 294969 | 28 | SecA | N | Preprotein translocase subunit |
| | | | | | | | | | | | | SecA (ATPase |
| 333 | 295115 | 296626 | 1794263 | 1792752 | 407 | f-2 | 295115 | 296624 | 782 | DeoA | F | Thymidine phosphorylase |
| 334 | 296627 | 297139 | 1792751 | 1792239 | 2101 | r-3 | 296882 | 297017 | 30 | UvrA | L | Excinuclease ATPase subunit |
| 335 | 297204 | 297731 | 1792174 | 1791647 | 1794 | r-2 | 297270 | 297720 | 278 | MoaC | H | Molybdenum cofactor |
| | | | | | | | | | | | | biosynthesis enzyme |
| 336 | 297773 | 298702 | 1791605 | 1790676 | 408 | f-2 | 297785 | 298694 | 452 | CcmA | Q | ABC-type multidrug transport |
| | | | | | | | | | | | | system |
| 337 | 298699 | 300825 | 1790679 | 1788553 | 54 | f-1 | 298768 | 300298 | 273 | — | S | Predicted membrane protein |
| 338 | 300795 | 301748 | 1788583 | 1787630 | 786 | f-3 | 300822 | 301671 | 226 | NosY | R | ABC-type transport system |
| | | | | | | | | | | | | involved in multi-copper enzyme |
| | | | | | | | | | | | | maturation |
| 339 | 301803 | 303251 | 1787575 | 1786127 | 1793 | r-2 | 302097 | 303249 | 645 | RtcB | S | Uncharacterized ACR |
| 340 | 303305 | 303766 | 1786073 | 1785612 | 2100 | r-3 | 303374 | 303752 | 140 | — | S | Uncharacterized ACR |
| 341 | 303750 | 304688 | 1785628 | 1784690 | 1792 | r-2 | 303750 | 304662 | 427 | Sun | J | tRNA and rRNA |
| | | | | | | | | | | | | cytosine-C5-methylases |
| 342 | 304698 | 305126 | 1784680 | 1784252 | 1791 | r-2 | 304698 | 305124 | 183 | — | S | Uncharacterized ACR |
| 343 | 305339 | 306193 | 1784039 | 1783185 | 409 | f-2 | 305339 | 306185 | 437 | PanB | H | Ketopantoate |
| | | | | | | | | | | | | hydroxymethyltransferase |
| 344 | 306190 | 306858 | 1783188 | 1782520 | 55 | f-1 | 306193 | 306853 | 272 | WcaA | M | Glycosyltransferases involved in |
| | | | | | | | | | | | | cell wall biogenesis |
| 345 | 307473 | 307700 | 1781905 | 1781678 | 787 | f-3 | 307527 | 307656 | 26 | BaeS | T | Sensory transduction histidine |
| | | | | | | | | | | | | kinases |
| 346 | 308311 | 308886 | 1781067 | 1780492 | 1413 | r-1 | 308311 | 308875 | 240 | ThiI | H | Thiamine biosynthesis ATP |
| | | | | | | | | | | | | pyrophosphatase |
| 347 | 308930 | 309406 | 1780448 | 1779972 | 2099 | r-3 | 308930 | 309377 | 139 | — | S | Predicted membrane protein |
| 348 | 309492 | 310637 | 1779886 | 1778741 | 1790 | r-2 | 309498 | 310497 | 350 | ThiI | H | Thiamine biosynthesis ATP |
| | | | | | | | | | | | | pyrophosphatase |
| 349 | 310642 | 311016 | 1778736 | 1778362 | 1412 | r-1 | 310708 | 310894 | 31 | ThiP | H | ABC-type thiamine transport |
| | | | | | | | | | | | | system |
| 350 | 311017 | 311625 | 1778361 | 1777753 | 1411 | r-1 | 311035 | 311569 | 62 | NfnB | C | Nitroreductase |
| 351 | 312108 | 312536 | 1777270 | 1776842 | 1789 | r-2 | 312399 | 312528 | 29 | PhoU | P | Phosphate uptake regulator |
| 352 | 312637 | 312903 | 1776741 | 1776475 | 56 | f-1 | | | | | | |
| 353 | 312953 | 313306 | 1776425 | 1776072 | 410 | f-2 | 313193 | 313301 | 32 | — | R | ATPases of the PilT family |
| 354 | 313344 | 314120 | 1776034 | 1775258 | 788 | f-3 | 313407 | 314118 | 356 | — | Q | Maleate cis-trans isomerase |
| 355 | 314205 | 314447 | 1775173 | 1774931 | 789 | f-3 | 314313 | 314436 | 30 | AraC | K | AraC-type DNA-binding |
| | | | | | | | | | | | | domain-containing proteins |
| 356 | 314429 | 315589 | 1774949 | 1773789 | 411 | f-2 | 314453 | 314765 | 39 | GloB | R | Zn-dependent hydrolases |
| 357 | 315618 | 316058 | 1773760 | 1773320 | 1788 | r-2 | 315762 | 315858 | 32 | KatE | P | Catalase |
| 358 | 316245 | 316973 | 1773133 | 1772405 | 1787 | r-2 | 316245 | 316971 | 423 | Spo0J | K | Predicted transcriptional |
| | | | | | | | | | | | | regulators |
| 359 | 317124 | 318272 | 1772254 | 1771106 | 790 | f-3 | 317136 | 318267 | 480 | — | S | Uncharacterized ACR |
| 360 | 318265 | 319239 | 1771113 | 1770139 | 1410 | r-1 | 318388 | 319225 | 367 | — | S | Uncharacterized ACR |
| 361 | 319807 | 319851 | 1769571 | 1769527 | 1409 | r-1 | | | | | | |
| 362 | 320239 | 320928 | 1769139 | 1768450 | 57 | f-1 | 320308 | 320521 | 38 | XerC | L | Integrase |
| 363 | 321374 | 321511 | 1768004 | 1767867 | 412 | f-2 | | | | | | |
| 364 | 321508 | 321696 | 1767870 | 1767682 | 58 | f-1 | 321517 | 321649 | 28 | — | R | Predicted nucleic acid-binding |
| | | | | | | | | | | | | protein |
| 365 | 322012 | 322365 | 1767366 | 1767013 | 59 | f-1 | 322060 | 322228 | 31 | CysZ | E | Uncharacterized protein involved |
| | | | | | | | | | | | | in cysteine biosynthesis |
| 366 | 322265 | 324256 | 1767113 | 1765122 | 413 | f-2 | 322982 | 323261 | 36 | — | S | Predicted membrane protein |
| 367 | 324261 | 326399 | 1765117 | 1762979 | 791 | f-3 | 324882 | 325074 | 34 | Arp | R | Ankyrin repeat proteins |
| 368 | 326552 | 326935 | 1762826 | 1762443 | 414 | f-2 | 326639 | 326792 | 31 | AmtB | P | Ammonia permeases |
| 369 | 327013 | 327282 | 1762365 | 1762096 | 60 | f-1 | 327049 | 327217 | 28 | ZntA | P | Cation transport ATPases |
| 370 | 327284 | 327514 | 1762094 | 1761864 | 415 | f-2 | 327386 | 327488 | 27 | DraG | O | ADP-ribosylglycohydrolase |
| 371 | 327518 | 328321 | 1761860 | 1761057 | 416 | f-2 | 328157 | 328313 | 30 | BioD | H | Dethiobiotin synthetase |
| 372 | 328333 | 328815 | 1761045 | 1760563 | 61 | f-1 | 328333 | 328492 | 29 | — | S | Uncharacterized BCR |
| 373 | 328812 | 329288 | 1760566 | 1760090 | 792 | f-3 | 329004 | 329118 | 29 | — | N | Predicted secreted acid |
| | | | | | | | | | | | | phosphatase |
| 374 | 329290 | 330090 | 1760088 | 1759288 | 62 | f-1 | 329380 | 329929 | 44 | Smc | D | Chromosome segregation |
| | | | | | | | | | | | | ATPases |
| 375 | 330224 | 331687 | 1759154 | 1757691 | 417 | f-2 | 330827 | 331406 | 42 | RfaG | M | Predicted glycosyltransferases |
| 376 | 331691 | 332452 | 1757687 | 1756926 | 418 | f-2 | 332153 | 332312 | 32 | GlmU | M | N-acetylglucosamine-1-phosphate |
| | | | | | | | | | | | | uridyltransferase (contains |
| | | | | | | | | | | | | nucleotidyltransferase and I-patch |
| | | | | | | | | | | | | acetyltransferase domains) |
| 377 | 332449 | 332736 | 1756929 | 1756642 | 63 | f-1 | | | | | | |
| 378 | 334175 | 334945 | 1755203 | 1754433 | 419 | f-2 | 334223 | 334319 | 31 | CirA | P | Outer membrane receptor proteins |
| 379 | 335068 | 335664 | 1754310 | 1753714 | 64 | f-1 | 335158 | 335434 | 35 | — | R | Uncharacterized CBS |
| | | | | | | | | | | | | domain-containing proteins |
| 380 | 337045 | 337260 | 1752333 | 1752118 | 65 | f-1 | 337087 | 337222 | 28 | — | GC | Glycosyl transferases |
| 381 | 337711 | 338295 | 1751667 | 1751083 | 1408 | r-1 | 338050 | 338284 | 37 | — | L | MutS-like ATPases involved in |
| | | | | | | | | | | | | mismatch repair |
| 382 | 339363 | 339788 | 1750015 | 1749590 | 793 | f-3 | 339441 | 339639 | 34 | — | L | Replication factor A large subunit |
| | | | | | | | | | | | | and related ssDNA-binding |
| | | | | | | | | | | | | proteins |
| 383 | 340641 | 340727 | 1748737 | 1748651 | 794 | f-3 | | | | | | |
| 384 | 341558 | 341995 | 1747820 | 1747383 | 420 | f-2 | 341600 | 341747 | 42 | AbrB | K | Regulators of |
| | | | | | | | | | | | | stationary/sporulation gene |
| | | | | | | | | | | | | expression |
| 385 | 342397 | 343461 | 1746981 | 1745917 | 66 | f-1 | 343126 | 343363 | 36 | MarR | K | Transcriptional regulators |
| 386 | 343454 | 343891 | 1745924 | 1745487 | 421 | f-2 | 343538 | 343760 | 32 | — | S | Uncharacterized BCR |
| 387 | 343888 | 344076 | 1745490 | 1745302 | 67 | f-1 | 343912 | 343987 | 29 | PyrG | F | CTP synthase (UTP-ammonia |
| | | | | | | | | | | | | lyase) |
| 388 | 344090 | 344401 | 1745288 | 1744977 | 422 | f-2 | | | | | | |
| 389 | 345281 | 345472 | 1744097 | 1743906 | 423 | f-2 | 345350 | 345464 | 26 | NlpD | M | Membrane proteins related to |
| | | | | | | | | | | | | metalloendopeptidases |
| 390 | 345566 | 345622 | 1743812 | 1743756 | 2098 | r-3 | | | | | | |
| 391 | 345615 | 345740 | 1743763 | 1743638 | 795 | f-3 | | | | | | |
| 392 | 346174 | 346356 | 1743204 | 1743022 | 68 | f-1 | 346183 | 346297 | 28 | NrfG | R | TPR-repeat-containing proteins |
| 393 | 346528 | 346881 | 1742850 | 1742497 | 69 | f-1 | 346651 | 346837 | 28 | — | L | Replication factor A large subunit |
| | | | | | | | | | | | | and related ssDNA-binding |
| | | | | | | | | | | | | proteins |
| 394 | 346606 | 346668 | 1742772 | 1742710 | 1407 | r-1 | | | | | | |
| 395 | 347138 | 348463 | 1742240 | 1740915 | 424 | f-2 | 347351 | 348461 | 427 | — | S | Uncharacterized ACR |
| 396 | 348567 | 350417 | 1740811 | 1738961 | 1786 | r-2 | 348567 | 350403 | 1032 | — | E | Serine proteases of the peptidase |
| | | | | | | | | | | | | family S9A |
| 397 | 350537 | 351598 | 1738841 | 1737780 | 425 | f-2 | 350537 | 350981 | 162 | RibD | H | Pyrimidine deaminase |
| 398 | 351592 | 352155 | 1737786 | 1737223 | 70 | f-1 | 351601 | 352150 | 191 | RibC | H | Riboflavin synthase alpha chain |
| 399 | 352419 | 352985 | 1736959 | 1736393 | 796 | f-3 | 352461 | 352647 | 30 | — | R | Predicted membrane-associated |
| 400 | 353923 | 354102 | 1735455 | 1735276 | 71 | f-1 | 354010 | 354097 | 25 | LytR | K | Transcriptional regulator |
| 401 | 354174 | 355334 | 1735204 | 1734044 | 797 | f-3 | 354723 | 355320 | 243 | RibA | H | GTP cyclohydrolase II |
| 402 | 355393 | 355872 | 1733985 | 1733506 | 72 | f-1 | 355414 | 355849 | 170 | RibH | H | Riboflavin synthase beta-chain |
| 403 | 355856 | 356452 | 1733522 | 1732926 | 2097 | r-3 | 355862 | 356387 | 125 | — | S | Uncharacterized ArCR |
| 404 | 356449 | 357381 | 1732929 | 1731997 | 1406 | r-1 | 356455 | 357211 | 170 | — | R | ATP-utilizing enzymes of |
| | | | | | | | | | | | | ATP-grasp superfamily (probably |
| | | | | | | | | | | | | carboligases) |
| 405 | 357378 | 358037 | 1732000 | 1731341 | 1785 | r-2 | 357378 | 357969 | 140 | PurC | F | Phosphoribosylaminoimidazolesuccinocarboxamide |
| | | | | | | | | | | | | (SAICAR) |
| | | | | | | | | | | | | synthase |
| 406 | 358034 | 359329 | 1731344 | 1730049 | 2096 | r-3 | 358043 | 359312 | 651 | ThiC | H | Thiamine biosynthesis protein |
| | | | | | | | | | | | | ThiC |
| 407 | 359407 | 360171 | 1729971 | 1729207 | 73 | f-1 | 359416 | 360163 | 386 | — | R | Flavoproteins |
| 408 | 360168 | 361466 | 1729210 | 1727912 | 798 | f-3 | 360171 | 360888 | 200 | ThiD | H | Hydroxymethylpyrimidine/phosphomethylpyrimidine |
| | | | | | | | | | | | | kinase |
| 409 | 361497 | 363407 | 1727881 | 1725971 | 799 | f-3 | 361506 | 363378 | 1016 | — | R | Uncharacterized ABC-type |
| | | | | | | | | | | | | transporter |
| 410 | 366699 | 367151 | 1722679 | 1722227 | 1784 | r-2 | 366879 | 367050 | 33 | — | R | Predicted metal-dependent |
| | | | | | | | | | | | | membrane protease |
| 411 | 367290 | 368240 | 1722088 | 1721138 | 1783 | r-2 | 367932 | 368190 | 35 | HypF | O | Hydrogenase maturation factor |
| 412 | 368237 | 369289 | 1721141 | 1720089 | 2095 | r-3 | 368243 | 368948 | 301 | SlpA | O | FKBP-type peptidyl-prolyl |
| | | | | | | | | | | | | cis-trans isomerases 2 |
| 413 | 370634 | 371449 | 1718744 | 1717929 | 426 | f-2 | 371216 | 371363 | 30 | CaiA | I | Acyl-CoA dehydrogenases |
| 414 | 371481 | 372920 | 1717897 | 1716458 | 800 | f-3 | 371490 | 372918 | 859 | CysS | J | Cysteinyl-tRNA synthetase |
| 415 | 374488 | 374550 | 1714890 | 1714828 | 74 | f-1 | | | | | | |
| 416 | 374583 | 374840 | 1714795 | 1714538 | 801 | f-3 | 374583 | 374832 | 129 | — | S | Uncharacterized ACR |
| 417 | 374833 | 375534 | 1714545 | 1713844 | 1405 | r-1 | 375247 | 375427 | 32 | — | L | Predicted transposase |
| 418 | 375535 | 376308 | 1713843 | 1713070 | 1404 | r-1 | 375535 | 376294 | 105 | — | S | Uncharacterized ACR |
| 419 | 376000 | 376092 | 1713378 | 1713286 | 75 | f-1 | | | | | | |
| 420 | 376298 | 376771 | 1713080 | 1712607 | 2094 | r-3 | 376298 | 376769 | 238 | — | K | Predicted transcriptional regulator |
| 421 | 379177 | 380310 | 1710201 | 1709068 | 1403 | r-1 | 379756 | 379984 | 38 | Tar | N | Methyl-accepting chemotaxis |
| | | | | | | | | | | | | protein |
| 422 | 380366 | 381109 | 1709012 | 1708269 | 2093 | r-3 | 380558 | 381047 | 32 | SPS1 | T | Serine/threonine protein kinases |
| 423 | 381111 | 382313 | 1708267 | 1707065 | 1782 | r-2 | 381642 | 382305 | 360 | — | S | Uncharacterized ACR |
| 424 | 382310 | 382675 | 1707068 | 1706703 | 2092 | r-3 | 382454 | 382604 | 29 | HisS | J | Histidyl-tRNA synthetase |
| 425 | 382850 | 383839 | 1706528 | 1705539 | 2091 | r-3 | 382859 | 383837 | 516 | — | S | Uncharacterized ACR |
| 426 | 384244 | 384471 | 1705134 | 1704907 | 1402 | r-1 | 384244 | 384304 | 42 | AbrB | K | Regulators of |
| | | | | | | | | | | | | stationary/sporulation gene |
| | | | | | | | | | | | | expression |
| 427 | 384528 | 385040 | 1704850 | 1704338 | 1781 | r-2 | 384534 | 385035 | 239 | — | L | RecB family exonuclease |
| 428 | 385030 | 386139 | 1704348 | 1703239 | 1401 | r-1 | 385138 | 385843 | 40 | — | R | Predicted ATPase of the AAA |
| | | | | | | | | | | | | superfamily |
| 429 | 389056 | 390132 | 1700322 | 1699246 | 1400 | r-1 | 389056 | 390127 | 503 | — | S | Uncharacterized ACR |
| 430 | 390129 | 391328 | 1699249 | 1698050 | 1780 | r-2 | 390450 | 390630 | 32 | — | S | Uncharacterized proteins of |
| | | | | | | | | | | | | WD40-like repeat family |
| 431 | 391570 | 392187 | 1697808 | 1697191 | 1399 | r-1 | 391570 | 392140 | 247 | — | S | Uncharacterized ACR |
| 432 | 392614 | 393321 | 1696764 | 1696057 | 1398 | r-1 | 392674 | 393319 | 399 | — | C | Acyl-CoA synthetase (NDP |
| | | | | | | | | | | | | forming) |
| 433 | 393449 | 394750 | 1695929 | 1694628 | 427 | f-2 | 394415 | 394688 | 30 | WcaG | MG | Nucleoside-diphosphate-sugar |
| | | | | | | | | | | | | epimerases COG0451 WcaG |
| 434 | 394894 | 398109 | 1694484 | 1691269 | 76 | f-1 | 396901 | 397378 | 42 | Tar | N | Methyl-accepting chemotaxis |
| | | | | | | | | | | | | protein |
| 435 | 398178 | 398471 | 1691200 | 1690907 | 1779 | r-2 | 398202 | 398352 | 27 | Sms | O | Predicted ATP-dependent serine |
| | | | | | | | | | | | | protease |
| 436 | 398502 | 399011 | 1690876 | 1690367 | 802 | f-3 | 398772 | 398904 | 30 | EmrK | Q | Multidrug resistance efflux pump |
| 437 | 399050 | 404185 | 1690328 | 1685193 | 428 | f-2 | 399050 | 401933 | 1348 | — | L | Reverse gyrase |
| 438 | 404484 | 405290 | 1684894 | 1684088 | 803 | f-3 | 404487 | 405282 | 409 | — | K | Predicted transcriptional |
| | | | | | | | | | | | | regulators |
| 439 | 405419 | 405631 | 1683959 | 1683747 | 2090 | r-3 | 405422 | 405554 | 38 | — | K | Predicted transcriptional regulator |
| 440 | 405628 | 405963 | 1683750 | 1683415 | 1397 | r-1 | 405640 | 405955 | 155 | — | R | Uncharacterized Zn-finger |
| | | | | | | | | | | | | containing protein |
| 441 | 405960 | 406709 | 1683418 | 1682669 | 1778 | r-2 | 405975 | 406707 | 256 | SpeB | E | Arginase/agmatinase/formimionoglutamate |
| | | | | | | | | | | | | hydrolase |
| 442 | 406835 | 408055 | 1682543 | 1681323 | 429 | f-2 | 406835 | 407465 | 358 | SgbH | G | 3-hexulose-6-phosphate synthase |
| | | | | | | | | | | | | and related proteins |
| 443 | 408052 | 408807 | 1681326 | 1680571 | 77 | f-1 | 408082 | 408796 | 262 | FtsZ | D | Cell division GTPase |
| 444 | 408809 | 409462 | 1680569 | 1679916 | 430 | f-2 | 408818 | 409448 | 248 | — | R | Predicted hydrolases of the HAD |
| | | | | | | | | | | | | superfamily |
| 445 | 409459 | 409647 | 1679919 | 1679731 | 78 | f-1 | 409495 | 409645 | 30 | WcaG | MG | Nucleoside-diphosphate-sugar |
| | | | | | | | | | | | | epimerases COG0451 WcaG |
| 446 | 409647 | 410459 | 1679731 | 1678919 | 804 | f-3 | 409902 | 410307 | 33 | — | Q | Polyketide synthase modules and |
| | | | | | | | | | | | | related proteins |
| 447 | 410460 | 411080 | 1678918 | 1678298 | 805 | f-3 | 410499 | 411027 | 205 | — | R | Predicted HD superfamily |
| | | | | | | | | | | | | hydrolase |
| 448 | 411176 | 411688 | 1678202 | 1677690 | 431 | f-2 | 411176 | 411686 | 227 | NusA | K | Transcription terminator |
| 449 | 411878 | 413293 | 1677500 | 1676085 | 432 | f-2 | 412490 | 413045 | 36 | — | K | Predicted transcriptional |
| | | | | | | | | | | | | regulators |
| 450 | 413415 | 413915 | 1675963 | 1675463 | 806 | f-3 | 413523 | 413754 | 39 | GyrA | L | DNA gyrase (topoisomerase II) A |
| | | | | | | | | | | | | subunit |
| 451 | 413926 | 414252 | 1675452 | 1675126 | 79 | f-1 | 413938 | 414175 | 30 | SurA | O | Parvulin-like peptidyl-prolyl |
| | | | | | | | | | | | | isomerase |
| 452 | 414877 | 415209 | 1674501 | 1674169 | 80 | f-1 | 414877 | 415123 | 31 | ArgS | J | Arginyl-tRNA synthetase |
| 453 | 417109 | 417270 | 1672269 | 1672108 | 81 | f-1 | 417115 | 417259 | 27 | PutA | B | Proline dehydrogenase |
| 454 | 417291 | 417929 | 1672087 | 1671449 | 807 | f-3 | 417330 | 417462 | 30 | MetC | E | Cystathionine |
| | | | | | | | | | | | | beta-lyases/cystathionine |
| | | | | | | | | | | | | gamma-synthases |
| 455 | 418636 | 419175 | 1670742 | 1670203 | 82 | f-1 | 418663 | 419017 | 33 | — | S | Uncharacterized proteins of |
| | | | | | | | | | | | | WD40-like repeat family |
| 456 | 419247 | 420563 | 1670131 | 1668815 | 808 | f-3 | 419247 | 420561 | 771 | AsnS | J | Aspartyl/asparaginyl-tRNA |
| | | | | | | | | | | | | synthetases (Aspartyl-tRNA |
| | | | | | | | | | | | | synthetase) |
| 457 | 420627 | 422132 | 1668751 | 1667246 | 809 | f-3 | 421635 | 421917 | 33 | — | R | Uncharacterized membrane |
| | | | | | | | | | | | | protein |
| 458 | 422333 | 422719 | 1667045 | 1666659 | 433 | f-2 | | | | | | |
| 459 | 422876 | 424030 | 1666502 | 1665348 | 2089 | r-3 | 422876 | 424019 | 541 | AbgB | R | Metal-dependent |
| | | | | | | | | | | | | amidase/aminoacylase/carboxypeptidase |
| 460 | 426547 | 426711 | 1662831 | 1662667 | 83 | f-1 | | | | | | |
| 461 | 426747 | 427742 | 1662631 | 1661636 | 810 | f-3 | 426750 | 427734 | 452 | — | R | Predicted methyltransferase |
| 462 | 427799 | 429064 | 1661579 | 1660314 | 434 | f-2 | 427820 | 429011 | 224 | — | R | Uncharacterized ATPases of the |
| | | | | | | | | | | | | AAA superfamily |
| 463 | 429065 | 430390 | 1660313 | 1658988 | 2088 | r-3 | 429065 | 430388 | 624 | TldD | R | Predicted Zn-dependent proteases |
| | | | | | | | | | | | | and their inactivated homologs |
| 464 | 430394 | 430633 | 1658984 | 1658745 | 2087 | r-3 | 430490 | 430592 | 30 | SpoU | J | rRNA methylases |
| 465 | 430618 | 430785 | 1658760 | 1658593 | 1396 | r-1 | 430654 | 430720 | 25 | PncA | Q | Amidases related to |
| | | | | | | | | | | | | nicotinamidase |
| 466 | 430883 | 432259 | 1658495 | 1657119 | 2086 | r-3 | 430883 | 432257 | 780 | TldD | R | Predicted Zn-dependent proteases |
| | | | | | | | | | | | | and their inactivated homologs |
| 467 | 432397 | 432738 | 1656981 | 1656640 | 84 | f-1 | 432397 | 432733 | 176 | — | S | Uncharacterized ACR |
| 468 | 432751 | 433449 | 1656627 | 1655929 | 85 | f-1 | 432760 | 433429 | 319 | RacX | M | Aspartate racemase |
| 469 | 433446 | 434621 | 1655932 | 1654757 | 1777 | r-2 | 433650 | 434616 | 391 | CorA | P | Mg2+ and Co2+ transporters |
| 470 | 434530 | 435735 | 1654848 | 1653643 | 86 | f-1 | 434542 | 435733 | 681 | — | R | Predicted GTPase |
| 471 | 435779 | 436300 | 1653599 | 1653078 | 2085 | r-3 | 435779 | 436295 | 208 | CyaB | F | Adenylate cyclase |
| 472 | 436300 | 436812 | 1653078 | 1652566 | 1395 | r-1 | 436339 | 436810 | 201 | Lrp | K | Transcriptional regulators |
| 473 | 437409 | 438209 | 1651969 | 1651169 | 811 | f-3 | 437415 | 438207 | 286 | — | S | Uncharacterized ACR |
| 474 | 438222 | 439658 | 1651156 | 1649720 | 1776 | r-2 | 438222 | 439650 | 588 | PykF | G | Pyruvate kinase |
| 475 | 439696 | 440403 | 1649682 | 1648975 | 1394 | r-1 | 439696 | 440368 | 147 | — | R | Predicted Zn-dependent proteases |
| 476 | 440578 | 441444 | 1648800 | 1647934 | 87 | f-1 | 440578 | 441442 | 390 | — | S | Uncharacterized ArCR |
| 477 | 441511 | 441882 | 1647867 | 1647496 | 88 | f-1 | 441511 | 441880 | 136 | CrcB | D | Integral membrane protein |
| | | | | | | | | | | | | possibly involved in chromosome |
| | | | | | | | | | | | | condensation |
| 478 | 441887 | 442267 | 1647491 | 1647111 | 435 | f-2 | 441887 | 442262 | 231 | — | S | Uncharacterized ACR |
| 479 | 442358 | 442873 | 1647020 | 1646505 | 436 | f-2 | 442448 | 442634 | 29 | — | G | 2-Phosphoglycerate kinase |
| 480 | 442922 | 444142 | 1646456 | 1645236 | 437 | f-2 | 442931 | 444140 | 630 | Dfp | H | Phosphopantothenoylcysteine |
| | | | | | | | | | | | | synthetase/decarboxylase |
| 481 | 444220 | 444681 | 1645158 | 1644697 | 89 | f-1 | 444295 | 444607 | 39 | ZntA | P | Cation transport ATPases |
| 482 | 444972 | 445310 | 1644406 | 1644068 | 812 | f-3 | 444972 | 445278 | 69 | — | S | Uncharacterized ACR |
| 483 | 446197 | 448899 | 1643181 | 1640479 | 1393 | r-1 | 446209 | 448864 | 962 | — | R | Distinct helicase family with a |
| | | | | | | | | | | | | unique C-terminal domain |
| | | | | | | | | | | | | including a metal-binding |
| | | | | | | | | | | | | cysteine cluster |
| 484 | 448945 | 450294 | 1640433 | 1639084 | 1392 | r-1 | 449620 | 450244 | 148 | — | R | Predicted hydrolase of the |
| | | | | | | | | | | | | alpha/beta superfamily |
| 485 | 450481 | 450996 | 1638897 | 1638382 | 90 | f-1 | 450481 | 450994 | 274 | — | C | Rubrerythrin |
| 486 | 451077 | 451238 | 1638301 | 1638140 | 813 | f-3 | 451077 | 451236 | 111 | — | C | Rubredoxin |
| 487 | 451250 | 451597 | 1638128 | 1637781 | 438 | f-2 | 451250 | 451595 | 224 | — | C | Desulfoferrodoxin |
| 488 | 452770 | 453123 | 1636608 | 1636255 | 91 | f-1 | 452818 | 452929 | 33 | Mrp | D | ATPases involved in chromosome |
| | | | | | | | | | | | | partitioning |
| 489 | 453183 | 454601 | 1636195 | 1634777 | 814 | f-3 | 453318 | 454590 | 772 | GlyA | E | Glycine |
| | | | | | | | | | | | | hydroxymethyltransferase |
| 490 | 454835 | 455341 | 1634543 | 1634037 | 439 | f-2 | 454952 | 455234 | 33 | — | R | Large extracellular alpha-helical |
| | | | | | | | | | | | | protein |
| 491 | 455338 | 455502 | 1634040 | 1633876 | 92 | f-1 | 455362 | 455437 | 25 | — | G | Cellobiose phosphorylase |
| 492 | 456330 | 456662 | 1633048 | 1632716 | 815 | f-3 | 456330 | 456660 | 174 | RPB9 | K | DNA-directed RNA polymerase |
| | | | | | | | | | | | | subunit M/Transcription |
| | | | | | | | | | | | | elongation factor TFIIS |
| 493 | 456623 | 456835 | 1632755 | 1632543 | 440 | f-2 | 456659 | 456734 | 28 | WecD | KR | Histone acetyltransferase HPA2 |
| | | | | | | | | | | | | and related acetyltransferases |
| | | | | | | | | | | | | COG0454 WecD |
| 494 | 456838 | 457587 | 1632540 | 1631791 | 93 | f-1 | 456838 | 457585 | 358 | DnaN | L | DNA polymerase III beta subunit |
| | | | | | | | | | | | | (Proliferating cell nuclear |
| | | | | | | | | | | | | antigen = PCNA) |
| 495 | 457618 | 458184 | 1631760 | 1631194 | 94 | f-1 | 457618 | 458128 | 140 | — | S | Uncharacterized ArCR |
| 496 | 458476 | 459126 | 1630902 | 1630252 | 95 | f-1 | 458476 | 459124 | 417 | AhpC | O | Peroxiredoxin |
| 497 | 459138 | 459680 | 1630240 | 1629698 | 1775 | r-2 | 459147 | 459678 | 164 | RimL | J | Acetyltransferases |
| 498 | 459718 | 460674 | 1629660 | 1628704 | 96 | f-1 | 459718 | 460603 | 345 | — | K | Predicted transcriptional |
| | | | | | | | | | | | | regulators |
| 499 | 460667 | 461935 | 1628711 | 1627443 | 2084 | r-3 | 460670 | 461927 | 532 | — | R | HD superfamily |
| | | | | | | | | | | | | phosphohydrolases |
| 500 | 462618 | 463808 | 1626760 | 1625570 | 1774 | r-2 | 462624 | 463764 | 576 | MoeA | H | Molybdopterin biosynthesis |
| | | | | | | | | | | | | enzyme |
| 501 | 464266 | 464421 | 1625112 | 1624957 | 1391 | r-1 | 464320 | 464380 | 26 | RplW | J | Ribosomal protein L23 |
| 502 | 464460 | 464972 | 1624918 | 1624406 | 1773 | r-2 | 464460 | 464970 | 218 | MoaB | H | Molybdopterin biosynthesis |
| | | | | | | | | | | | | enzymes |
| 503 | 465336 | 466562 | 1624042 | 1622816 | 816 | f-3 | 465360 | 466560 | 653 | — | S | Uncharacterized ACR |
| 504 | 466632 | 466847 | 1622746 | 1622531 | 1772 | r-2 | | | | | | |
| 505 | 466975 | 467631 | 1622403 | 1621747 | 97 | f-1 | 466975 | 467581 | 273 | — | R | Predicted phosphoesterases |
| 506 | 467628 | 468806 | 1621750 | 1620572 | 1771 | r-2 | 467637 | 468804 | 686 | AvtA | E | PLP-dependent aminotransferases |
| 507 | 471018 | 472637 | 1618360 | 1616741 | 1770 | r-2 | 471027 | 472629 | 799 | — | O | Predicted carbamoyl transferase |
| 508 | 472691 | 474145 | 1616687 | 1615233 | 2083 | r-3 | 472706 | 474143 | 726 | ProS | J | Prolyl-tRNA synthetase |
| 509 | 474239 | 475240 | 1615139 | 1614138 | 441 | f-2 | 474239 | 475193 | 469 | LdhA | CHR | Lactate dehydrogenase and |
| | | | | | | | | | | | | related dehydrogenases COG1052 |
| | | | | | | | | | | | | LdhA |
| 510 | 475250 | 475708 | 1614128 | 1613670 | 442 | f-2 | 475403 | 475541 | 45 | FrvX | G | Cellulase M and related proteins |
| 511 | 475702 | 477042 | 1613676 | 1612336 | 98 | f-1 | 475768 | 477031 | 662 | — | R | Predicted DNA-binding protein |
| | | | | | | | | | | | | containing a Zn-ribbon domain |
| 512 | 477049 | 477657 | 1612329 | 1611721 | 99 | f-1 | 477061 | 477640 | 249 | — | S | Uncharacterized ACR |
| 513 | 477738 | 478031 | 1611640 | 1611347 | 817 | f-3 | | | | | | |
| 514 | 477971 | 479050 | 1611407 | 1610328 | 2082 | r-3 | 477980 | 479039 | 533 | GCN3 | J | Translation initiation factor |
| | | | | | | | | | | | | eIF-2B alpha subunit |
| 515 | 478881 | 479639 | 1610497 | 1609739 | 818 | f-3 | 479103 | 479622 | 191 | — | R | Predicted ATPases or kinases |
| 516 | 479629 | 480162 | 1609749 | 1609216 | 1390 | r-1 | 479635 | 480148 | 228 | — | R | CBS domains |
| 517 | 480198 | 480755 | 1609180 | 1608623 | 1769 | r-2 | 480219 | 480501 | 52 | ArsR | K | Predicted transcriptional |
| | | | | | | | | | | | | regulators |
| 518 | 480843 | 481127 | 1608535 | 1608251 | 1768 | r-2 | 480852 | 481119 | 129 | Ssh10b | K | Archaeal DNA-binding protein |
| 519 | 481315 | 482679 | 1608063 | 1606699 | 100 | f-1 | 481315 | 482656 | 775 | PurB | F | Adenylosuccinate lyase |
| 520 | 484981 | 485445 | 1604397 | 1603933 | 101 | f-1 | 485002 | 485437 | 219 | — | H | 6-pyruvoyl-tetrahydropterin |
| | | | | | | | | | | | | synthase |
| 521 | 485442 | 486008 | 1603936 | 1603370 | 1767 | r-2 | 485529 | 485790 | 31 | TrpD | E | Anthranilate |
| | | | | | | | | | | | | phosphoribosyltransferase |
| 522 | 486065 | 486484 | 1603313 | 1602894 | 443 | f-2 | 486080 | 486473 | 167 | — | R | Predicted DNA-binding proteins |
| | | | | | | | | | | | | with PD1-like DNA-binding |
| | | | | | | | | | | | | motif |
| 523 | 486481 | 488979 | 1602897 | 1600399 | 1389 | r-1 | 486481 | 488977 | 1328 | — | R | Specific archaeal helicases |
| 524 | 489517 | 490644 | 1599861 | 1598734 | 1388 | r-1 | 489604 | 490642 | 651 | TyrS | J | Tyrosyl-tRNA synthetase |
| 525 | 490744 | 491844 | 1598634 | 1597534 | 102 | f-1 | 491755 | 491842 | 38 | OppA | EP | ABC-type |
| | | | | | | | | | | | | dipeptide/oligopeptide/nickel |
| | | | | | | | | | | | | transport systems |
| 526 | 491922 | 493376 | 1597456 | 1596002 | 819 | f-3 | 492033 | 493350 | 412 | TbpA | H | ABC-type iron/thiamine transport |
| | | | | | | | | | | | | systems |
| 527 | 493561 | 495408 | 1595817 | 1593970 | 103 | f-1 | 493843 | 495388 | 396 | ThiP | H | ABC-type thiamine transport |
| | | | | | | | | | | | | system |
| 528 | 495410 | 496480 | 1593968 | 1592898 | 444 | f-2 | 495419 | 496436 | 314 | MalK | G | ABC-type |
| | | | | | | | | | | | | sugar/spermidine/putrescine/iron/thiamine |
| | | | | | | | | | | | | transport systems |
| 529 | 497090 | 499186 | 1592288 | 1590192 | 445 | f-2 | 497276 | 498920 | 114 | Icc | R | Predicted phosphohydrolases |
| 530 | 499596 | 499949 | 1589782 | 1589429 | 1766 | r-2 | 499647 | 499797 | 30 | MipB | G | Transaldolase |
| 531 | 500938 | 501252 | 1588440 | 1588126 | 1387 | r-1 | 500971 | 501085 | 29 | SpoU | J | rRNA methylases |
| 532 | 501249 | 501479 | 1588129 | 1587899 | 1765 | r-2 | 501312 | 501420 | 28 | AceE | C | Pyruvate dehydrogenase |
| 533 | 501658 | 502464 | 1587720 | 1586914 | 1386 | r-1 | 501703 | 502453 | 241 | DnaN | L | DNA polymerase III beta subunit |
| | | | | | | | | | | | | (Proliferating cell nuclear |
| | | | | | | | | | | | | antigen = PCNA) |
| 534 | 502547 | 502792 | 1586831 | 1586586 | 2081 | r-3 | 502661 | 502784 | 30 | XylB | G | Sugar (pentulose and hexulose) |
| | | | | | | | | | | | | kinases |
| 535 | 502785 | 502967 | 1586593 | 1586411 | 1764 | r-2 | 502821 | 502959 | 32 | RpoC | K | DNA-directed RNA polymerase |
| | | | | | | | | | | | | beta' subunit/160 kD subunit |
| | | | | | | | | | | | | (split gene in archaea and Syn) |
| 536 | 503187 | 503354 | 1586191 | 1586024 | 820 | f-3 | 503241 | 503325 | 26 | AcrA | Q | Membrane-fusion protein |
| 537 | 504971 | 505099 | 1584407 | 1584279 | 446 | f-2 | 504971 | 505094 | 26 | MarR | K | Transcriptional regulators |
| 538 | 506242 | 506664 | 1583136 | 1582714 | 1385 | r-1 | 506404 | 506635 | 35 | DeoA | F | Thymidine phosphorylase |
| 539 | 507506 | 507592 | 1581872 | 1581786 | 447 | f-2 | | | | | | |
| 540 | 508803 | 509420 | 1580575 | 1579958 | 1763 | r-2 | 509091 | 509313 | 33 | — | L | Inteins |
| 541 | 510163 | 510879 | 1579215 | 1578499 | 1384 | r-1 | 510235 | 510490 | 34 | — | S | Uncharacterized ACR |
| 542 | 511923 | 512477 | 1577455 | 1576901 | 1762 | r-2 | 512034 | 512298 | 34 | MtlA | C | Phosphotransferase system |
| 543 | 513104 | 513481 | 1576274 | 1575897 | 448 | f-2 | 513269 | 513386 | 30 | ClpA | O | ATPases with chaperone activity |
| 544 | 513710 | 514261 | 1575668 | 1575117 | 2080 | r-3 | 513953 | 514163 | 30 | Hit | FGR | Diadenosine tetraphosphate |
| | | | | | | | | | | | | (Ap4A) hydrolase and other HIT |
| | | | | | | | | | | | | family hydrolases COG0537 Hit |
| 545 | 514843 | 515223 | 1574535 | 1574155 | 1383 | r-1 | 514873 | 515029 | 29 | — | R | Uncharacterized proteins of the |
| | | | | | | | | | | | | AP superfamily |
| 546 | 515543 | 515791 | 1573835 | 1573587 | 2079 | r-3 | 515636 | 515699 | 28 | RplC | J | Ribosomal protein L3 |
| 547 | 517003 | 517803 | 1572375 | 1571575 | 1382 | r-1 | 517276 | 517618 | 44 | Smc | D | Chromosome segregation |
| | | | | | | | | | | | | ATPases |
| 548 | 517805 | 518281 | 1571573 | 1571097 | 2078 | r-3 | 517997 | 518111 | 29 | — | N | Predicted secreted acid |
| | | | | | | | | | | | | phosphatase |
| 549 | 518278 | 518760 | 1571100 | 1570618 | 1381 | r-1 | 518296 | 518515 | 28 | — | R | Predicted hydrolase of alkaline |
| | | | | | | | | | | | | phosphatase superfamily |
| 550 | 518772 | 519575 | 1570606 | 1569803 | 1761 | r-2 | | | | | | |
| 551 | 519579 | 519809 | 1569799 | 1569569 | 1760 | r-2 | 519735 | 519798 | 26 | Rbn | J | tRNA-processing ribonuclease |
| | | | | | | | | | | | | BN |
| 552 | 520158 | 520541 | 1569220 | 1568837 | 1759 | r-2 | 520245 | 520398 | 31 | AmtB | P | Ammonia permeases |
| 553 | 520694 | 522628 | 1568684 | 1566750 | 2077 | r-3 | 521111 | 521303 | 34 | Arp | R | Ankyrin repeat proteins |
| 554 | 522837 | 524828 | 1566541 | 1564550 | 1758 | r-2 | 523617 | 523854 | 35 | — | S | Predicted membrane protein |
| 555 | 524728 | 525042 | 1564650 | 1564336 | 1380 | r-1 | 524737 | 524905 | 31 | CysZ | E | Uncharacterized protein involved |
| | | | | | | | | | | | | in cysteine biosynthesis |
| 556 | 525397 | 525585 | 1563981 | 1563793 | 1379 | r-1 | 525406 | 525538 | 28 | — | R | Predicted nucleic acid-binding |
| | | | | | | | | | | | | protein |
| 557 | 525884 | 526483 | 1563494 | 1562895 | 2076 | r-3 | 526004 | 526199 | 29 | — | K | Predicted RNA-binding protein |
| | | | | | | | | | | | | homologous to eukaryotic snRNP |
| 558 | 527199 | 527468 | 1562179 | 1561910 | 821 | f-3 | 527208 | 527451 | 153 | RPL43A | J | Ribosomal protein L37AE/L43A |
| 559 | 527689 | 528324 | 1561689 | 1561054 | 104 | f-1 | 527698 | 528319 | 339 | IMP4 | J | Protein containing the IMP4 |
| | | | | | | | | | | | | domain present in small nuclear |
| | | | | | | | | | | | | ribonucleoproteins; implicated in |
| | | | | | | | | | | | | RNA processing |
| 560 | 528364 | 528969 | 1561014 | 1560409 | 105 | f-1 | 528364 | 528967 | 266 | MnhE | P | Multisubunit Na+/H+ antiporter |
| 561 | 528984 | 529217 | 1560394 | 1560161 | 822 | f-3 | 528993 | 529212 | 84 | MnhF | P | Multisubunit Na+/H+ antiporter |
| 562 | 529214 | 529528 | 1560164 | 1559850 | 449 | f-2 | 529280 | 529526 | 97 | MnhG | P | Multisubunit Na+/H+ antiporter |
| 563 | 529509 | 529739 | 1559869 | 1559639 | 823 | f-3 | 529509 | 529737 | 61 | MnhB | P | Multisubunit Na+/H+ antiporter |
| 564 | 529736 | 529981 | 1559642 | 1559397 | 450 | f-2 | 529817 | 529979 | 59 | MnhB | P | Multisubunit Na+/H+ antiporter |
| 565 | 529978 | 530385 | 1559400 | 1558993 | 106 | f-1 | 529978 | 530383 | 122 | MnhB | P | Multisubunit Na+/H+ antiporter |
| 566 | 530659 | 532146 | 1558719 | 1557232 | 107 | f-1 | 530749 | 531982 | 315 | HyfB | CP | Formate hydrogenlyase subunit |
| | | | | | | | | | | | | 3/Multisubunit Na+/H+ antiporter |
| 567 | 532123 | 532530 | 1557255 | 1556848 | 1378 | r-1 | 532123 | 532525 | 172 | IlvH | E | Acetolactate synthase |
| 568 | 532615 | 533754 | 1556763 | 1555624 | 108 | f-1 | 532684 | 533521 | 77 | KefB | P | Kef-type K+ transport systems |
| 569 | 533789 | 534916 | 1555589 | 1554462 | 451 | f-2 | 534575 | 534905 | 33 | Smc | D | Chromosome segregation |
| | | | | | | | | | | | | ATPases |
| 570 | 534917 | 535363 | 1554461 | 1554015 | 2075 | r-3 | 534926 | 535361 | 249 | CheW | N | Chemotaxis signal transduction |
| | | | | | | | | | | | | protein |
| 571 | 535366 | 536694 | 1554012 | 1552684 | 1377 | r-1 | 535876 | 536542 | 231 | Tar | N | Methyl-accepting chemotaxis |
| | | | | | | | | | | | | protein |
| 572 | 536818 | 536871 | 1552560 | 1552507 | 1376 | r-1 | | | | | | |
| 573 | 536998 | 537846 | 1552380 | 1551532 | 109 | f-1 | 537025 | 537838 | 375 | CheR | NT | Methylase of chemotaxis |
| | | | | | | | | | | | | methyl-accepting proteins |
| | | | | | | | | | | | | COG1352 CheR |
| 574 | 537847 | 538209 | 1551531 | 1551169 | 110 | f-1 | 537847 | 538207 | 224 | CheY | T | CheY-like receiver domains |
| 575 | 538230 | 539297 | 1551148 | 1550081 | 824 | f-3 | 538230 | 539286 | 509 | CheB | NT | Chemotaxis response regulator |
| | | | | | | | | | | | | CheB |
| 576 | 539304 | 540950 | 1550074 | 1548428 | 825 | f-3 | 539304 | 540906 | 521 | CheA | N | Chemotaxis protein histidine |
| | | | | | | | | | | | | kinase and related kinases |
| 577 | 540986 | 541681 | 1548392 | 1547697 | 452 | f-2 | 540986 | 541628 | 349 | CheA | N | Chemotaxis protein histidine |
| | | | | | | | | | | | | kinase and related kinases |
| 578 | 541671 | 542294 | 1547707 | 1547084 | 826 | f-3 | 541680 | 542289 | 293 | CheC | NT | Chemotaxis protein CheC |
| 579 | 542291 | 542914 | 1547087 | 1546464 | 453 | f-2 | 542291 | 542903 | 303 | CheC | NT | Chemotaxis protein CheC |
| 580 | 542904 | 545159 | 1546474 | 1544219 | 827 | f-3 | 542916 | 545154 | 640 | Tar | N | Methyl-accepting chemotaxis |
| | | | | | | | | | | | | protein |
| 581 | 545191 | 545688 | 1544187 | 1543690 | 111 | f-1 | 545206 | 545686 | 259 | CheD | NT | Chemotaxis protein; stimulates |
| | | | | | | | | | | | | methylation of MCP proteins |
| | | | | | | | | | | | | COG1871 CheD |
| 582 | 545706 | 546455 | 1543672 | 1542923 | 828 | f-3 | 545892 | 546411 | 40 | — | S | Uncharacterized archaeal |
| | | | | | | | | | | | | coiled-coil domain |
| 583 | 546468 | 547502 | 1542910 | 1541876 | 829 | f-3 | 546477 | 547491 | 366 | — | S | Uncharacterized ACR |
| 584 | 547499 | 547759 | 1541879 | 1541619 | 454 | f-2 | 547538 | 547757 | 92 | — | S | Uncharacterized ArCR |
| 585 | 547830 | 548183 | 1541548 | 1541195 | 830 | f-3 | 547830 | 548181 | 136 | GimC | O | Prefoldin |
| 586 | 548218 | 548553 | 1541160 | 1540825 | 112 | f-1 | 548227 | 548386 | 32 | Tas | C | Predicted oxidoreductases (related |
| | | | | | | | | | | | | to aryl-alcohol dehydrogenases) |
| 587 | 548531 | 549514 | 1540847 | 1539864 | 455 | f-2 | 548531 | 549509 | 423 | — | R | Exopolyphosphatase-related |
| | | | | | | | | | | | | proteins |
| 588 | 549515 | 549850 | 1539863 | 1539528 | 456 | f-2 | 549557 | 549824 | 30 | Cls | I | Phosphatidylserine/phosphatidylglycerophosphate/ |
| | | | | | | | | | | | | cardioli pin |
| | | | | | | | | | | | | synthases and related enzymes |
| 589 | 550080 | 551150 | 1539298 | 1538228 | 831 | f-3 | 550164 | 550494 | 32 | TatA | N | Sec-independent protein secretion |
| | | | | | | | | | | | | pathway components |
| 590 | 551249 | 552460 | 1538129 | 1536918 | 457 | f-2 | 551270 | 552290 | 74 | NrfG | R | TPR-repeat-containing proteins |
| 591 | 552309 | 553043 | 1537069 | 1536335 | 832 | f-3 | 552318 | 553041 | 399 | — | R | Uncharacterized ArCR (contains |
| | | | | | | | | | | | | C-terminal EMAP domain) |
| 592 | 553133 | 553699 | 1536245 | 1535679 | 458 | f-2 | 553214 | 553697 | 265 | — | S | Uncharacterized ACR |
| 593 | 553745 | 554734 | 1535633 | 1534644 | 2074 | r-3 | 553745 | 554720 | 466 | MviM | R | Predicted dehydrogenases and |
| | | | | | | | | | | | | related proteins |
| 594 | 554855 | 555676 | 1534523 | 1533702 | 459 | f-2 | 554867 | 555674 | 401 | — | P | Predicted divalent heavy-metal |
| | | | | | | | | | | | | cations transporter |
| 595 | 555783 | 556910 | 1533595 | 1532468 | 1757 | r-2 | 555882 | 556908 | 419 | FtsY | N | Signal recognition particle |
| | | | | | | | | | | | | GTPase |
| 596 | 556879 | 558105 | 1532499 | 1531273 | 1375 | r-1 | 556879 | 558076 | 334 | — | L | Predicted transposases |
| 597 | 558125 | 558196 | 1531253 | 1531182 | 2073 | r-3 | | | | | | |
| 598 | 558864 | 559322 | 1530514 | 1530056 | 1756 | r-2 | 558897 | 559002 | 31 | — | L | Superfamily I DNA and RNA |
| | | | | | | | | | | | | helicases and helicase subunits |
| 599 | 559506 | 560798 | 1529872 | 1528580 | 833 | f-3 | 560307 | 560760 | 144 | Med | N | Surface lipoprotein |
| 600 | 560838 | 562364 | 1528540 | 1527014 | 834 | f-3 | 560865 | 562350 | 525 | MglA | G | ABC-type sugar (aldose) |
| | | | | | | | | | | | | transport system |
| 601 | 562361 | 563395 | 1527017 | 1525983 | 460 | f-2 | 562454 | 563390 | 164 | — | R | Uncharacterized ABC-type |
| | | | | | | | | | | | | transport system |
| 602 | 563371 | 564303 | 1526007 | 1525075 | 113 | f-1 | 563407 | 564241 | 201 | — | R | Uncharacterized ABC-type |
| | | | | | | | | | | | | transport system |
| 603 | 564310 | 565311 | 1525068 | 1524067 | 1374 | r-1 | 564310 | 565306 | 276 | ZnuA | P | ABC-type Mn/Zn transport |
| | | | | | | | | | | | | system |
| 604 | 565409 | 567541 | 1523969 | 1521837 | 461 | f-2 | 566648 | 567164 | 34 | AceE | C | Pyruvate dehydrogenase |
| 605 | 567556 | 567786 | 1521822 | 1521592 | 1373 | r-1 | 567565 | 567664 | 28 | — | S | Uncharacterized stress-induced |
| | | | | | | | | | | | | protein |
| 606 | 567865 | 568512 | 1521513 | 1520866 | 1372 | r-1 | 567865 | 568507 | 355 | — | R | Predicted |
| | | | | | | | | | | | | phosphoribosyltransferases |
| 607 | 568711 | 570129 | 1520667 | 1519249 | 114 | f-1 | 568747 | 570121 | 813 | — | C | Acyl-CoA synthetase(NDP |
| | | | | | | | | | | | | forming) |
| 608 | 570172 | 570729 | 1519206 | 1518649 | 1371 | r-1 | 570364 | 570493 | 30 | ChaC | P | Uncharacterized protein involved |
| | | | | | | | | | | | | in cation transport |
| 609 | 570898 | 570957 | 1518480 | 1518421 | 115 | f-1 | | | | | | |
| 610 | 571031 | 571738 | 1518347 | 1517640 | 462 | f-2 | 571031 | 571736 | 351 | ApaH | T | Diadenosine tetraphosphatase and |
| | | | | | | | | | | | | related serine/threonine protein |
| | | | | | | | | | | | | phosphatases |
| 611 | 571735 | 572070 | 1517643 | 1517308 | 1370 | r-1 | 571735 | 571981 | 42 | — | S | Uncharacterized ACR |
| 612 | 572149 | 574656 | 1517229 | 1514722 | 1369 | r-1 | 572149 | 574636 | 1272 | SpoVK | O | ATPases of the AAA+ class(cell |
| | | | | | | | | | | | | division control protein A) |
| 613 | 574653 | 575411 | 1514725 | 1513967 | 1755 | r-2 | 574734 | 575103 | 32 | — | S | Uncharacterized ACR |
| 614 | 575490 | 576503 | 1513888 | 1512875 | 1754 | r-2 | 575502 | 576498 | 595 | DYS1 | J | Deoxyhypusine synthase |
| 615 | 576540 | 577586 | 1512838 | 1511792 | 1753 | r-2 | 576540 | 577428 | 182 | GltD | ER | NADPH-dependent glutamate |
| | | | | | | | | | | | | synthase beta chain and related |
| | | | | | | | | | | | | oxidoreductases COG0493 GltD |
| 616 | 577750 | 578565 | 1511628 | 1510813 | 116 | f-1 | 577786 | 578563 | 355 | FabG | QR | Dehydrogenases with different |
| | | | | | | | | | | | | specificities (related to |
| | | | | | | | | | | | | short-chain alcohol |
| | | | | | | | | | | | | dehydrogenases) COG1028 FabG |
| 617 | 578612 | 579025 | 1510766 | 1510353 | 463 | f-2 | 578621 | 578960 | 151 | — | R | Predicted nucleotidyltransferases |
| 618 | 579392 | 579454 | 1509986 | 1509924 | 464 | f-2 | | | | | | |
| 619 | 580461 | 580553 | 1508917 | 1508825 | 1752 | r-2 | | | | | | |
| 620 | 581070 | 581168 | 1508308 | 1508210 | 1751 | r-2 | | | | | | |
| 621 | 582573 | 583445 | 1506805 | 1505933 | 1750 | r-2 | 582573 | 583443 | 326 | HtpX | O | Zn-dependent protease with |
| | | | | | | | | | | | | chaperone function |
| 622 | 583582 | 585228 | 1505796 | 1504150 | 1368 | r-1 | 583582 | 585172 | 854 | GroL | O | Chaperonin GroEL (HSP60 |
| | | | | | | | | | | | | family) (Chaperonin A) |
| 623 | 585396 | 586382 | 1503982 | 1502996 | 835 | f-3 | 585717 | 586377 | 332 | — | T | Mn2+-dependent serine/threonine |
| | | | | | | | | | | | | protein kinase |
| 624 | 587383 | 587667 | 1501995 | 1501711 | 1367 | r-1 | 587404 | 587620 | 29 | TyrB | B | Aspartate/aromatic |
| | | | | | | | | | | | | aminotransferase |
| 625 | 588220 | 589968 | 1501158 | 1499410 | 1366 | r-1 | 588244 | 589963 | 615 | — | L | MutS-like ATPases involved in |
| | | | | | | | | | | | | mismatch repair |
| 626 | 590029 | 591039 | 1499349 | 1498339 | 1365 | r-1 | 590041 | 591037 | 552 | LdhA | CHR | Lactate dehydrogenase and |
| | | | | | | | | | | | | related dehydrogenases COG1052 |
| | | | | | | | | | | | | LdhA |
| 627 | 591078 | 592301 | 1498300 | 1497077 | 1749 | r-2 | 591276 | 592218 | 147 | SdaC | E | Amino acid permeases |
| 628 | 592190 | 593191 | 1497188 | 1496187 | 465 | f-2 | 592418 | 593168 | 346 | SIR2 | H | NAD-dependent protein |
| | | | | | | | | | | | | deacetylases |
| 629 | 593214 | 593957 | 1496164 | 1495421 | 836 | f-3 | 593229 | 593949 | 332 | — | R | Predicted hydrolases of the HAD |
| | | | | | | | | | | | | superfamily |
| 630 | 593914 | 594495 | 1495464 | 1494883 | 117 | f-1 | 593923 | 594493 | 259 | — | S | Uncharacterized ACR |
| 631 | 594739 | 594795 | 1494639 | 1494583 | 1364 | r-1 | | | | | | |
| 632 | 595329 | 595610 | 1494049 | 1493768 | 837 | f-3 | 595338 | 595602 | 124 | — | S | Uncharacterized membrane |
| | | | | | | | | | | | | protein |
| 633 | 595427 | 597550 | 1493951 | 1491828 | 466 | f-2 | 595616 | 597509 | 1017 | BisC | C | Anaerobic dehydrogenases |
| 634 | 597520 | 597798 | 1491858 | 1491580 | 1363 | r-1 | 597547 | 597730 | 30 | PlsX | I | Fatty acid/phospholipid |
| | | | | | | | | | | | | biosynthesis enzyme |
| 635 | 598695 | 599399 | 1490683 | 1489979 | 1748 | r-2 | 598704 | 599283 | 38 | NatB | C | ABC-type Na+ efflux pump |
| 636 | 599396 | 600097 | 1489982 | 1489281 | 2072 | r-3 | 599432 | 599996 | 42 | — | R | ABC-type multidrug transport |
| | | | | | | | | | | | | system |
| 637 | 600094 | 600945 | 1489284 | 1488433 | 1362 | r-1 | 600139 | 600934 | 281 | CcmA | Q | ABC-type multidrug transport |
| | | | | | | | | | | | | system |
| 638 | 600958 | 600999 | 1488420 | 1488379 | 1361 | r-1 | | | | | | |
| 639 | 601388 | 601828 | 1487990 | 1487550 | 467 | f-2 | 601388 | 601826 | 188 | — | R | Predicted nucleic acid-binding |
| | | | | | | | | | | | | protein |
| 640 | 601912 | 602571 | 1487466 | 1486807 | 1360 | r-1 | 602386 | 602563 | 65 | — | R | Predicted DNA binding domain |
| 641 | 602643 | 603974 | 1486735 | 1485404 | 1747 | r-2 | 602643 | 603972 | 762 | TldD | R | Predicted Zn-dependent proteases |
| | | | | | | | | | | | | and their inactivated homologs |
| 642 | 603976 | 605406 | 1485402 | 1483972 | 1359 | r-1 | 603985 | 605404 | 756 | TldD | R | Predicted Zn-dependent proteases |
| | | | | | | | | | | | | and their inactivated homologs |
| 643 | 605506 | 605823 | 1483872 | 1483555 | 118 | f-1 | 605530 | 605815 | 174 | MazG | R | Predicted pyrophosphatase |
| 644 | 605856 | 606749 | 1483522 | 1482629 | 1746 | r-2 | 605859 | 606744 | 522 | — | C | MinD superfamily P-loop ATPase |
| | | | | | | | | | | | | containing an inserted ferredoxin |
| | | | | | | | | | | | | domain |
| 645 | 606746 | 607678 | 1482632 | 1481700 | 2071 | r-3 | 606806 | 607664 | 427 | — | C | MinD superfamily P-loop ATPase |
| | | | | | | | | | | | | containing an inserted ferredoxin |
| | | | | | | | | | | | | domain |
| 646 | 607678 | 608625 | 1481700 | 1480753 | 1358 | r-1 | 607678 | 608620 | 476 | — | C | Fe—S oxidoreductases |
| 647 | 608720 | 609349 | 1480658 | 1480029 | 468 | f-2 | 608720 | 609347 | 295 | SmtA | QR | SAM-dependent |
| | | | | | | | | | | | | methyltransferases COG0500 |
| | | | | | | | | | | | | SmtA |
| 648 | 609665 | 611200 | 1479713 | 1478178 | 469 | f-2 | 609749 | 611192 | 473 | PutA | C | NAD-dependent aldehyde |
| | | | | | | | | | | | | dehydrogenases |
| 649 | 611281 | 612924 | 1478097 | 1476454 | 119 | f-1 | 612169 | 612835 | 124 | FecB | P | ABC-type Fe3+-siderophores |
| | | | | | | | | | | | | transport systems |
| 650 | 612921 | 613868 | 1476457 | 1475510 | 838 | f-3 | 612963 | 613839 | 185 | BtuC | PH | ABC-type |
| | | | | | | | | | | | | cobalamin/Fe3+-siderophores |
| | | | | | | | | | | | | transport systems |
| 651 | 613855 | 614616 | 1475523 | 1474762 | 120 | f-1 | 613858 | 614590 | 160 | FepC | PH | ABC-type |
| | | | | | | | | | | | | cobalamin/Fe3+-siderophores |
| | | | | | | | | | | | | transport systems |
| 652 | 614613 | 615374 | 1474765 | 1474004 | 839 | f-3 | 614850 | 614994 | 32 | — | R | Putative homoserine kinase type |
| | | | | | | | | | | | | II (protein kinase fold) |
| 653 | 615379 | 616116 | 1473999 | 1473262 | 121 | f-1 | 615379 | 616108 | 323 | — | S | Uncharacterized ACR |
| 654 | 616117 | 616626 | 1473261 | 1472752 | 1357 | r-1 | 616150 | 616618 | 275 | — | S | Uncharacterized ACR |
| 655 | 616713 | 617375 | 1472665 | 1472003 | 840 | f-3 | 616716 | 617373 | 325 | — | R | Metal-dependent hydrolases of |
| | | | | | | | | | | | | the beta-lactamase superfamily II |
| 656 | 617430 | 618005 | 1471948 | 1471373 | 1745 | r-2 | | | | | | |
| 657 | 617873 | 619891 | 1471505 | 1469487 | 2070 | r-3 | 617873 | 619829 | 739 | FeoB | P | Ferrous ion uptake system protein |
| | | | | | | | | | | | | FeoB (predicted GTPase) |
| 658 | 619888 | 620115 | 1469490 | 1469263 | 1356 | r-1 | 619888 | 620104 | 55 | FeoA | P | Protein |
| 659 | 620116 | 620346 | 1469262 | 1469032 | 1355 | r-1 | 620197 | 620341 | 55 | FeoA | P | Protein |
| 660 | 620526 | 621581 | 1468852 | 1467797 | 841 | f-3 | 620853 | 621561 | 229 | ModA | P | ABC-type molybdate transport |
| | | | | | | | | | | | | system |
| 661 | 621554 | 622366 | 1467824 | 1467012 | 470 | f-2 | 621668 | 622349 | 238 | CysU | P | ABC-type sulfate/molybdate |
| | | | | | | | | | | | | transport systems |
| 662 | 622338 | 623402 | 1467040 | 1465976 | 842 | f-3 | 622377 | 623397 | 335 | CysA | P | ABC-type sulfate/molybdate |
| | | | | | | | | | | | | transport systems |
| 663 | 623814 | 624353 | 1465564 | 1465025 | 1744 | r-2 | 624078 | 624273 | 32 | ARA1 | R | Aldo/keto reductases |
| 664 | 624301 | 624510 | 1465077 | 1464868 | 1354 | r-1 | 624301 | 624502 | 70 | STE14 | O | Putative |
| | | | | | | | | | | | | protein-S-isoprenylcysteine |
| | | | | | | | | | | | | methyltransferase |
| 665 | 624735 | 625205 | 1464643 | 1464173 | 1743 | r-2 | 625065 | 625146 | 28 | GspD | N | General secretory pathway |
| | | | | | | | | | | | | protein D |
| 666 | 625223 | 625891 | 1464155 | 1463487 | 471 | f-2 | 625268 | 625595 | 146 | — | S | Uncharacterized ACR |
| 667 | 625916 | 626170 | 1463462 | 1463208 | 472 | f-2 | | | | | | |
| 668 | 626202 | 626936 | 1463176 | 1462442 | 1742 | r-2 | 626232 | 626790 | 55 | — | R | ABC-type multidrug transport |
| | | | | | | | | | | | | system |
| 669 | 626909 | 627853 | 1462469 | 1461525 | 2069 | r-3 | 626918 | 627773 | 206 | CcmA | Q | ABC-type multidrug transport |
| | | | | | | | | | | | | system |
| 670 | 627832 | 628989 | 1461546 | 1460389 | 1353 | r-1 | 627964 | 628603 | 44 | — | S | Uncharacterized proteins of |
| | | | | | | | | | | | | WD40-like repeat family |
| 671 | 629061 | 629687 | 1460317 | 1459691 | 1741 | r-2 | 629088 | 629673 | 198 | SmtA | QR | SAM-dependent |
| | | | | | | | | | | | | methyltransferases COG0500 |
| | | | | | | | | | | | | SmtA |
| 672 | 629684 | 631024 | 1459694 | 1458354 | 2068 | r-3 | 629684 | 631022 | 771 | — | R | Predicted membrane components |
| | | | | | | | | | | | | of an uncharacterized |
| | | | | | | | | | | | | iron-regulated ABC-type |
| | | | | | | | | | | | | transporter SufB |
| 673 | 631021 | 631839 | 1458357 | 1457539 | 1352 | r-1 | 631099 | 631822 | 386 | — | R | Iron-regulated ABC transporter |
| | | | | | | | | | | | | ATPase subunit SufC |
| 674 | 631871 | 632350 | 1457507 | 1457028 | 473 | f-2 | 631886 | 632231 | 196 | — | S | Uncharacterized ACR |
| 675 | 632430 | 632630 | 1456948 | 1456748 | 843 | f-3 | 632430 | 632625 | 46 | — | S | Uncharacterized ArCR |
| 676 | 632617 | 633099 | 1456761 | 1456279 | 122 | f-1 | 632617 | 633070 | 203 | — | R | Predicted nucleic acid-binding |
| | | | | | | | | | | | | protein |
| 677 | 633112 | 633933 | 1456266 | 1455445 | 123 | f-1 | 633121 | 633931 | 381 | — | R | Metal-dependent hydrolases of |
| | | | | | | | | | | | | the beta-lactamase superfamily II |
| 678 | 633964 | 634764 | 1455414 | 1454614 | 124 | f-1 | 633973 | 634762 | 469 | FabG | QR | Dehydrogenases with different |
| | | | | | | | | | | | | specificities (related to |
| | | | | | | | | | | | | short-chain alcohol |
| | | | | | | | | | | | | dehydrogenases) COG1028 FabG |
| 679 | 634815 | 635330 | 1454563 | 1454048 | 1740 | r-2 | 634893 | 635016 | 30 | DnaX | L | DNA polymerase III |
| 680 | 635934 | 636071 | 1453444 | 1453307 | 1739 | r-2 | 635982 | 636060 | 27 | — | C | Uncharacterized Fe—S protein |
| 681 | 637143 | 637451 | 1452235 | 1451927 | 844 | f-3 | 637329 | 637425 | 29 | ArtI | E | ABC-type amino acid transport |
| | | | | | | | | | | | | system |
| 682 | 637487 | 638062 | 1451891 | 1451316 | 474 | f-2 | 637520 | 638036 | 145 | — | S | Predicted membrane protein |
| 683 | 638134 | 639000 | 1451244 | 1450378 | 1351 | r-1 | 638206 | 638998 | 409 | — | S | Predicted membrane proteins |
| 684 | 639553 | 639651 | 1449825 | 1449727 | 125 | f-1 | | | | | | |
| 685 | 639626 | 640396 | 1449752 | 1448982 | 2067 | r-3 | 639641 | 640298 | 219 | CbiQ | P | ABC-type cobalt transport system |
| 686 | 640393 | 641181 | 1448985 | 1448197 | 1350 | r-1 | 640393 | 641167 | 299 | CbiO | P | ABC-type cobalt transport system |
| 687 | 641204 | 641923 | 1448174 | 1447455 | 2066 | r-3 | 641438 | 641909 | 84 | BirA | H | Biotin-(acetyl-CoA carboxylase) |
| | | | | | | | | | | | | ligase |
| 688 | 641972 | 642490 | 1447406 | 1446888 | 475 | f-2 | 641981 | 642464 | 146 | BioY | R | Uncharacterized ACR |
| 689 | 642511 | 643098 | 1446867 | 1446280 | 1349 | r-1 | 642511 | 643081 | 162 | MobA | H | Molybdopterin-guanine |
| | | | | | | | | | | | | dinucleotide biosynthesis protein A |
| 690 | 643209 | 643670 | 1446169 | 1445708 | 845 | f-3 | 643221 | 643398 | 31 | HHT1 | L | Histones H3 and H4 |
| 691 | 644598 | 646496 | 1444780 | 1442882 | 1738 | r-2 | 644598 | 646488 | 1164 | DAP2 | E | Dipeptidyl |
| | | | | | | | | | | | | aminopeptidases/acylaminoacyl-peptidases |
| 692 | 647573 | 650017 | 1441805 | 1439361 | 476 | f-2 | 647582 | 650006 | 1260 | — | R | Predicted P-loop ATPase fused to |
| | | | | | | | | | | | | an acetyltransferase |
| 693 | 650078 | 650584 | 1439300 | 1438794 | 477 | f-2 | 650099 | 650570 | 241 | — | S | Uncharacterized ACR |
| 694 | 650587 | 651087 | 1438791 | 1438291 | 126 | f-1 | 650656 | 651073 | 236 | — | S | Uncharacterized ACR |
| 695 | 651198 | 652340 | 1438180 | 1437038 | 846 | f-3 | 651285 | 652236 | 390 | TbpA | H | ABC-type iron/thiamine transport |
| | | | | | | | | | | | | systems |
| 696 | 652343 | 653548 | 1437035 | 1435830 | 2065 | r-3 | 652400 | 653513 | 272 | SsnA | FR | Cytosine deaminase and related |
| | | | | | | | | | | | | metal-dependent hydrolases |
| | | | | | | | | | | | | COG0402 SsnA |
| 697 | 653784 | 655079 | 1435594 | 1434299 | 847 | f-3 | 653784 | 655065 | 724 | AsnS | J | Aspartyl/asparaginyl-tRNA |
| | | | | | | | | | | | | synthetases |
| 698 | 655937 | 657688 | 1433441 | 1431690 | 2064 | r-3 | 655958 | 657119 | 612 | Tgt | J | Queuine/archaeosine |
| | | | | | | | | | | | | tRNA-ribosyltransferase |
| 699 | 657722 | 658642 | 1431656 | 1430736 | 2063 | r-3 | 657722 | 658622 | 210 | PitA | P | Phosphate/sulphate permeases |
| 700 | 658773 | 659825 | 1430605 | 1429553 | 1737 | r-2 | 658797 | 659823 | 362 | — | M | Glycosyltransferases |
| 701 | 659850 | 660155 | 1429528 | 1429223 | 1736 | r-2 | 659850 | 660120 | 59 | — | R | Predicted acetyltransferase |
| 702 | 660246 | 664418 | 1429132 | 1424960 | 848 | f-3 | 662859 | 664401 | 827 | Lhr | R | Lhr-like helicases |
| 703 | 664498 | 665586 | 1424880 | 1423792 | 127 | f-1 | 664582 | 665584 | 608 | GapA | G | Glyceraldehyde-3-phosphate |
| | | | | | | | | | | | | dehydrogenase/erythrose-4-phosphate |
| | | | | | | | | | | | | dehydrogenase |
| 704 | 665627 | 665995 | 1423751 | 1423383 | 478 | f-2 | 665753 | 665900 | 28 | ThrA | E | Homoserine dehydrogenase |
| 705 | 666332 | 666616 | 1423046 | 1422762 | 2062 | r-3 | 666341 | 666608 | 120 | — | S | Uncharacterized ACR |
| 706 | 666618 | 667169 | 1422760 | 1422209 | 1735 | r-2 | 666663 | 667155 | 258 | — | S | Uncharacterized ACR |
| 707 | 667123 | 667176 | 1422255 | 1422202 | 128 | f-1 | | | | | | |
| 708 | 667218 | 667724 | 1422160 | 1421654 | 1734 | r-2 | 667332 | 667629 | 53 | — | K | Predicted transcriptional |
| | | | | | | | | | | | | regulators |
| 709 | 667824 | 669488 | 1421554 | 1419890 | 849 | f-3 | 667914 | 668805 | 36 | — | R | Predicted drug exporters of the |
| | | | | | | | | | | | | RND superfamily |
| 710 | 669735 | 671918 | 1419643 | 1417460 | 850 | f-3 | 670269 | 671868 | 169 | — | R | Predicted drug exporters of the |
| | | | | | | | | | | | | RND superfamily |
| 711 | 673707 | 673985 | 1415671 | 1415393 | 851 | f-3 | 673707 | 673926 | 32 | — | S | Uncharacterized BCR |
| 712 | 674033 | 674911 | 1415345 | 1414467 | 479 | f-2 | 674039 | 674858 | 79 | — | R | Predicted permeases |
| 713 | 674957 | 675970 | 1414421 | 1413408 | 480 | f-2 | 674957 | 675962 | 570 | FrvX | G | Cellulase M and related proteins |
| 714 | 676425 | 677294 | 1412953 | 1412084 | 852 | f-3 | 676440 | 677232 | 177 | — | R | Predicted ATPase of the AAA |
| | | | | | | | | | | | | superfamily |
| 715 | 677302 | 678150 | 1412076 | 1411228 | 1348 | r-1 | 677314 | 678145 | 374 | XerC | L | Integrase |
| 716 | 678143 | 679063 | 1411235 | 1410315 | 2061 | r-3 | 678329 | 678989 | 45 | — | K | Predicted transcriptional |
| | | | | | | | | | | | | regulators |
| 717 | 679100 | 679813 | 1410278 | 1409565 | 2060 | r-3 | 679127 | 679811 | 161 | SfsA | G | Sugar fermentation stimulation |
| | | | | | | | | | | | | protein (uncharacterized) |
| 718 | 679850 | 679924 | 1409528 | 1409454 | 481 | f-2 | | | | | | |
| 719 | 680156 | 680470 | 1409222 | 1408908 | 482 | f-2 | 680231 | 680285 | 28 | — | R | Predicted DNA-binding proteins |
| | | | | | | | | | | | | with PD1-like DNA-binding |
| | | | | | | | | | | | | motif |
| 720 | 680606 | 681754 | 1408772 | 1407624 | 483 | f-2 | 680708 | 681752 | 617 | FrvX | G | Cellulase M and related proteins |
| 721 | 682401 | 682496 | 1406977 | 1406882 | 853 | f-3 | | | | | | |
| 722 | 682446 | 682799 | 1406932 | 1406579 | 1733 | r-2 | 682512 | 682641 | 28 | — | S | Uncharacterized ACR |
| 723 | 682717 | 684711 | 1406661 | 1404667 | 129 | f-1 | 682804 | 684694 | 883 | DinG | L | Rad3-related DNA helicases |
| 724 | 684698 | 685174 | 1404680 | 1404204 | 2059 | r-3 | 684719 | 684902 | 33 | — | L | Adenine-specific DNA methylase |
| 725 | 686253 | 686873 | 1403125 | 1402505 | 1732 | r-2 | 686274 | 686841 | 135 | GlpG | R | Uncharacterized membrane |
| | | | | | | | | | | | | protein (homolog of Drosophila |
| | | | | | | | | | | | | rhomboid) |
| 726 | 686863 | 687633 | 1402515 | 1401745 | 1347 | r-1 | 686875 | 687622 | 273 | SuhB | G | Archaeal fructose-1 |
| 727 | 687638 | 688447 | 1401740 | 1400931 | 2058 | r-3 | 687644 | 688424 | 265 | — | S | Predicted membrane proteins |
| 728 | 688516 | 689571 | 1400862 | 1399807 | 130 | f-1 | 688525 | 689569 | 528 | GldA | C | Glycerol dehydrogenase and |
| | | | | | | | | | | | | related enzymes |
| 729 | 689568 | 690029 | 1399810 | 1399349 | 854 | f-3 | 689601 | 690024 | 210 | — | S | Uncharacterized ArCR |
| 730 | 690316 | 690513 | 1399062 | 1398865 | 1346 | r-1 | 690334 | 690502 | 27 | AceF | C | Dihydrolipoamide |
| | | | | | | | | | | | | acyltransferases |
| 731 | 690550 | 691353 | 1398828 | 1398025 | 1345 | r-1 | 690550 | 691351 | 381 | — | S | Uncharacterized ACR |
| 732 | 691387 | 692820 | 1397991 | 1396558 | 1344 | r-1 | 691462 | 691798 | 34 | SppA | NO | Periplasmic serine proteases |
| | | | | | | | | | | | | (ClpP class) COG0616 SppA |
| 733 | 692817 | 694928 | 1396561 | 1394450 | 1731 | r-2 | 694260 | 694908 | 170 | McrB | L | GTPase subunit of restriction |
| | | | | | | | | | | | | endonuclease |
| 734 | 694986 | 695405 | 1394392 | 1393973 | 1730 | r-2 | 694986 | 695361 | 160 | — | S | Uncharacterized ArCR |
| 735 | 695410 | 696654 | 1393968 | 1392724 | 1343 | r-1 | 695410 | 696643 | 487 | — | S | Uncharacterized ArCR |
| 736 | 696651 | 697808 | 1392727 | 1391570 | 1729 | r-2 | 696663 | 697806 | 699 | — | L | DNA topoisomerase VI |
| 737 | 697801 | 699510 | 1391577 | 1389868 | 1342 | r-1 | 697807 | 699451 | 866 | — | L | DNA topoisomerase VI |
| 738 | 699507 | 700274 | 1389871 | 1389104 | 1728 | r-2 | 699561 | 700224 | 275 | — | R | Predicted RNA-binding protein |
| | | | | | | | | | | | | (contains KH domains) |
| 739 | 700228 | 701004 | 1389150 | 1388374 | 1341 | r-1 | 700237 | 700993 | 413 | RIO1 | T | Predicted serine/threonine protein |
| | | | | | | | | | | | | kinases |
| 740 | 701037 | 701399 | 1388341 | 1387979 | 1727 | r-2 | 701061 | 701394 | 198 | InfA | J | Translation initiation factor IF-1 |
| 741 | 701550 | 702359 | 1387828 | 1387019 | 855 | f-3 | 701577 | 702336 | 277 | ZnuC | P | ABC-type Mn/Zn transport |
| | | | | | | | | | | | | systems |
| 742 | 702356 | 703177 | 1387022 | 1386201 | 484 | f-2 | 702356 | 703175 | 241 | ZnuB | P | ABC-type Mn2+/Zn2+ transport |
| | | | | | | | | | | | | systems |
| 743 | 703152 | 703868 | 1386226 | 1385510 | 856 | f-3 | 703182 | 703782 | 262 | RnhB | L | Ribonuclease HII |
| 744 | 703837 | 705249 | 1385541 | 1384129 | 1340 | r-1 | 704299 | 704578 | 51 | PMT1 | O | Dolichyl-phosphate-mannose--protein |
| | | | | | | | | | | | | O-mannosyl transferase |
| | | | | | | | | | | | | PMT1 |
| 745 | 705309 | 706460 | 1384069 | 1382918 | 857 | f-3 | 705321 | 706449 | 537 | SmtA | QR | SAM-dependent |
| | | | | | | | | | | | | methyltransferases COG0500 |
| | | | | | | | | | | | | SmtA |
| 746 | 706455 | 706655 | 1382923 | 1382723 | 1726 | r-2 | 706455 | 706650 | 29 | AroB | E | 3-dehydroquinate synthetase |
| 747 | 706739 | 708556 | 1382639 | 1380822 | 485 | f-2 | 706748 | 708554 | 805 | GlmS | M | Glucosamine 6-phosphate |
| | | | | | | | | | | | | synthetase |
| 748 | 708558 | 711569 | 1380820 | 1377809 | 858 | f-3 | 708582 | 711462 | 590 | — | R | Uncharacterized membrane |
| | | | | | | | | | | | | protein |
| 749 | 711859 | 712440 | 1377519 | 1376938 | 131 | f-1 | 711985 | 712315 | 30 | RpoE | K | DNA-directed RNA polymerase |
| | | | | | | | | | | | | specialized sigma subunits |
| 750 | 712445 | 713191 | 1376933 | 1376187 | 2057 | r-3 | 712517 | 713177 | 349 | Adk | F | Adenylate kinase and related |
| | | | | | | | | | | | | kinases |
| 751 | 713142 | 713633 | 1376236 | 1375745 | 859 | f-3 | 713280 | 713592 | 43 | Smc | D | Chromosome segregation |
| | | | | | | | | | | | | ATPases |
| 752 | 713693 | 714955 | 1375685 | 1374423 | 2056 | r-3 | 713726 | 714947 | 684 | — | C | Uncharacterized flavoproteins |
| 753 | 715024 | 715470 | 1374354 | 1373908 | 1339 | r-1 | 715024 | 715438 | 110 | AhpC | O | Peroxiredoxin |
| 754 | 715543 | 716427 | 1373835 | 1372951 | 1338 | r-1 | 715597 | 716419 | 370 | PorB | C | Pyruvate:ferredoxin |
| | | | | | | | | | | | | oxidoreductase and related |
| | | | | | | | | | | | | 2-oxoacid:ferredoxin |
| | | | | | | | | | | | | oxidoreductases |
| 755 | 716424 | 718136 | 1372954 | 1371242 | 1725 | r-2 | 717030 | 718128 | 453 | PorA | C | Pyruvate:ferredoxin |
| | | | | | | | | | | | | oxidoreductase and related |
| | | | | | | | | | | | | 2-oxoacid:ferredoxin |
| | | | | | | | | | | | | oxidoreductases |
| 756 | 718317 | 719339 | 1371061 | 1370039 | 860 | f-3 | 718353 | 718866 | 213 | MsrA | O | Peptide methionine sulfoxide |
| | | | | | | | | | | | | reductase |
| 757 | 719507 | 719788 | 1369871 | 1369590 | 486 | f-2 | 719567 | 719732 | 33 | AvtA | E | PLP-dependent aminotransferases |
| 758 | 719790 | 720593 | 1369588 | 1368785 | 1724 | r-2 | 719973 | 720528 | 32 | XynB | G | Beta-xylosidase |
| 759 | 720689 | 721426 | 1368689 | 1367952 | 2055 | r-3 | 720704 | 720962 | 35 | | | |
| 760 | 721789 | 722304 | 1367589 | 1367074 | 132 | f-1 | 721870 | 722299 | 70 | — | S | Uncharacterized ACR |
| 761 | 722344 | 722481 | 1367034 | 1366897 | 1337 | r-1 | 722359 | 722470 | 32 | VacB | K | Exoribonucleases |
| 762 | 722592 | 723116 | 1366786 | 1366262 | 861 | f-3 | 722595 | 723087 | 77 | — | S | Uncharacterized ACR |
| 763 | 723142 | 724314 | 1366236 | 1365064 | 1336 | r-1 | 723160 | 724303 | 528 | | | |
| 764 | 724419 | 725573 | 1364959 | 1363805 | 1723 | r-2 | 724488 | 725553 | 393 | HcaD | R | Uncharacterized |
| | | | | | | | | | | | | NAD(FAD)-dependent |
| | | | | | | | | | | | | dehydrogenases |
| 765 | 725704 | 726249 | 1363674 | 1363129 | 133 | f-1 | 725713 | 726238 | 271 | — | S | Predicted membrane protein |
| 766 | 726458 | 726643 | 1362920 | 1362735 | 487 | f-2 | 726467 | 726614 | 69 | RAD55 | T | RecA-superfamily ATPases |
| | | | | | | | | | | | | implicated in signal transduction |
| 767 | 728745 | 728798 | 1360633 | 1360580 | 862 | f-3 | | | | | | |
| 768 | 729082 | 729786 | 1360296 | 1359592 | 1335 | r-1 | 729259 | 729748 | 167 | Lrp | K | Transcriptional regulators |
| 769 | 729844 | 730989 | 1359534 | 1358389 | 134 | f-1 | 729859 | 730951 | 395 | PurK | F | Phosphoribosylaminoimidazole |
| | | | | | | | | | | | | carboxylase (NCAIR synthetase) |
| 770 | 730961 | 731485 | 1358417 | 1357893 | 488 | f-2 | 730961 | 731462 | 193 | PurE | F | Phosphoribosylcarboxyaminoimidazole |
| | | | | | | | | | | | | (NCAIR) mutase |
| 771 | 731586 | 733985 | 1357792 | 1355393 | 863 | f-3 | 731799 | 733923 | 812 | ZntA | P | Cation transport ATPases |
| 772 | 734016 | 734336 | 1355362 | 1355042 | 864 | f-3 | 734046 | 734259 | 50 | TrxA | OC | Thiol-disulfide isomerase and |
| | | | | | | | | | | | | thioredoxins COG0526 TrxA |
| 773 | 734349 | 734939 | 1355029 | 1354439 | 1722 | r-2 | 734349 | 734931 | 238 | NfnB | C | Nitroreductase |
| 774 | 735215 | 735760 | 1354163 | 1353618 | 489 | f-2 | 735215 | 735749 | 288 | NfnB | C | Nitroreductase |
| 775 | 735762 | 735941 | 1353616 | 1353437 | 865 | f-3 | 735798 | 735924 | 29 | KefB | P | Kef-type K+ transport systems |
| 776 | 735965 | 737146 | 1353413 | 1352232 | 2054 | r-3 | 736043 | 737078 | 368 | ACR3 | P | Arsenite efflux pump ACR3 and |
| | | | | | | | | | | | | related permeases |
| 777 | 737210 | 737683 | 1352168 | 1351695 | 490 | f-2 | 737234 | 737618 | 110 | Wzb | T | Protein-tyrosine-phosphatase |
| 778 | 737822 | 739696 | 1351556 | 1349682 | 2053 | r-3 | 737828 | 739679 | 1055 | — | C | Aldehyde:ferredoxin |
| | | | | | | | | | | | | oxidoreductase |
| 779 | 739687 | 740523 | 1349691 | 1348855 | 1334 | r-1 | 739711 | 740518 | 459 | ARA1 | R | Aldo/keto reductases |
| 780 | 740584 | 741294 | 1348794 | 1348084 | 135 | f-1 | 740716 | 741283 | 283 | — | S | Uncharacterized ACR |
| 781 | 741329 | 741541 | 1348049 | 1347837 | 491 | f-2 | 741419 | 741518 | 27 | — | C | Uncharacterized conserved |
| | | | | | | | | | | | | protein containing a |
| | | | | | | | | | | | | ferredoxin-like domain |
| 782 | 741920 | 742084 | 1347458 | 1347294 | 492 | f-2 | 741944 | 742076 | 28 | SdrC | T | Predicted secreted protein |
| | | | | | | | | | | | | containing a PDZ domain |
| 783 | 742684 | 743376 | 1346694 | 1346002 | 136 | f-1 | 742684 | 743185 | 259 | — | L | Predicted transposases |
| 784 | 743424 | 743609 | 1345954 | 1345769 | 866 | f-3 | 743481 | 743586 | 28 | VapC | R | Predicted nucleic acid-binding |
| | | | | | | | | | | | | protein |
| 785 | 743587 | 744603 | 1345791 | 1344775 | 1333 | r-1 | 743596 | 744598 | 558 | CobT | H | NaMN:DMB |
| | | | | | | | | | | | | phosphoribosyltransferase |
| 786 | 744560 | 745372 | 1344818 | 1344006 | 493 | f-2 | 744698 | 745208 | 70 | PflA | O | Pyruvate-formate lyase-activating |
| | | | | | | | | | | | | enzyme |
| 787 | 745369 | 746826 | 1344009 | 1342552 | 137 | f-1 | 745381 | 746665 | 377 | CobQ | H | Cobyric acid synthase |
| 788 | 746823 | 747761 | 1342555 | 1341617 | 1721 | r-2 | 746862 | 747171 | 37 | SurA | O | Parvulin-like peptidyl-prolyl |
| | | | | | | | | | | | | isomerase |
| 789 | 747766 | 748353 | 1341612 | 1341025 | 1332 | r-1 | 747778 | 748315 | 251 | — | H | GTP:adenosylcobinamide-phosphate |
| | | | | | | | | | | | | guanylyltransferase |
| 790 | 748338 | 749033 | 1341040 | 1340345 | 1720 | r-2 | 748338 | 749013 | 272 | CobS | H | Cobalamin-5-phosphate synthase |
| | | | | | | | | | | | | (Cobalamin synthase) |
| 791 | 749030 | 749443 | 1340348 | 1339935 | 2052 | r-3 | 749042 | 749438 | 201 | PgpA | I | Phosphatidylglycerophosphatase A |
| 792 | 749440 | 749877 | 1339938 | 1339501 | 1331 | r-1 | 749548 | 749629 | 28 | — | S | Uncharacterized ACR |
| 793 | 750208 | 750714 | 1339170 | 1338664 | 1330 | r-1 | 750211 | 750661 | 238 | — | R | Predicted ATPases of PP-loop |
| | | | | | | | | | | | | superfamily |
| 794 | 751954 | 752967 | 1337424 | 1336411 | 138 | f-1 | 751999 | 752965 | 486 | HisC | E | Histidinol-phosphate |
| | | | | | | | | | | | | aminotransferase/Tyrosine |
| | | | | | | | | | | | | aminotransferase |
| 795 | 753046 | 754110 | 1336332 | 1335268 | 139 | f-1 | 753067 | 754081 | 386 | FecB | P | ABC-type Fe3+-siderophores |
| | | | | | | | | | | | | transport systems |
| 796 | 754166 | 755410 | 1335212 | 1333968 | 2051 | r-3 | 754226 | 755408 | 708 | — | G | Predicted phosphoglycerate |
| | | | | | | | | | | | | mutase |
| 797 | 755496 | 756431 | 1333882 | 1332947 | 867 | f-3 | 755586 | 756408 | 195 | ECM27 | P | Ca2+/Na+ antiporter |
| 798 | 756477 | 756968 | 1332901 | 1332410 | 868 | f-3 | 756477 | 756957 | 304 | Hit | FGR | Diadenosine tetraphosphate |
| | | | | | | | | | | | | (Ap4A) hydrolase and other HIT |
| | | | | | | | | | | | | family hydrolases COG0537 Hit |
| 799 | 756958 | 757629 | 1332420 | 1331749 | 1329 | r-1 | 756994 | 757156 | 32 | — | R | Predicted amidohydrolase |
| 800 | 757712 | 758458 | 1331666 | 1330920 | 2050 | r-3 | 757733 | 758453 | 417 | THY1 | F | Predicted alternative thymidylate |
| | | | | | | | | | | | | synthase |
| 801 | 758689 | 759645 | 1330689 | 1329733 | 140 | f-1 | 758698 | 759640 | 549 | ArgF | E | Ornithine carbamoyltransferase |
| 802 | 759762 | 760691 | 1329616 | 1328687 | 869 | f-3 | 759762 | 760689 | 549 | Sun | J | tRNA and rRNA |
| | | | | | | | | | | | | cytosine-C5-methylases |
| 803 | 760688 | 761674 | 1328690 | 1327704 | 2049 | r-3 | 760724 | 761135 | 33 | HslU | O | ATP-dependent protease |
| 804 | 762327 | 763418 | 1327051 | 1325960 | 870 | f-3 | 762327 | 763383 | 518 | LYS9 | E | Saccharopine dehydrogenase and |
| | | | | | | | | | | | | related proteins |
| 805 | 763396 | 764058 | 1325982 | 1325320 | 141 | f-1 | 763399 | 764041 | 323 | Mra1 | S | Uncharacterized ACR |
| 806 | 765200 | 765316 | 1324178 | 1324062 | 2048 | r-3 | | | | | | |
| 807 | 765637 | 766047 | 1323741 | 1323331 | 142 | f-1 | 765637 | 766045 | 238 | Efp | J | Translation elongation factor |
| | | | | | | | | | | | | P/translation initiation factor |
| | | | | | | | | | | | | eIF-5A |
| 808 | 766138 | 766683 | 1323240 | 1322695 | 143 | f-1 | 766195 | 766504 | 34 | — | S | Uncharacterized ACR |
| 809 | 766685 | 767974 | 1322693 | 1321404 | 494 | f-2 | 766703 | 767969 | 542 | ArsB | P | Na+/H+ antiporter NhaD and |
| | | | | | | | | | | | | related arsenite permeases |
| 810 | 767976 | 768434 | 1321402 | 1320944 | 871 | f-3 | 767985 | 768432 | 223 | UspA | T | Universal stress protein UspA and |
| | | | | | | | | | | | | related nucleotide-binding |
| | | | | | | | | | | | | proteins |
| 811 | 768477 | 769343 | 1320901 | 1320035 | 872 | f-3 | 768486 | 769323 | 387 | SpeB | E | Arginase/agmatinase/formimionoglutamate |
| | | | | | | | | | | | | hydrolase |
| 812 | 769459 | 769962 | 1319919 | 1319416 | 144 | f-1 | 769459 | 769954 | 190 | — | R | CBS domains |
| 813 | 769950 | 771269 | 1319428 | 1318109 | 873 | f-3 | 770010 | 771258 | 553 | KefB | P | Kef-type K+ transport systems |
| 814 | 771283 | 771807 | 1318095 | 1317571 | 1328 | r-1 | 771334 | 771469 | 31 | ZntA | P | Cation transport ATPases |
| 815 | 771820 | 773541 | 1317558 | 1315837 | 145 | f-1 | 772069 | 773122 | 177 | EriC | P | Chloride channel protein EriC |
| 816 | 773543 | 774817 | 1315835 | 1314561 | 495 | f-2 | 773552 | 774800 | 647 | — | S | Uncharacterized ACR |
| 817 | 774838 | 775089 | 1314540 | 1314289 | 146 | f-1 | 774847 | 775066 | 52 | AbrB | K | Regulators of |
| | | | | | | | | | | | | stationary/sporulation gene |
| | | | | | | | | | | | | expression |
| 818 | 775493 | 776422 | 1313885 | 1312956 | 496 | f-2 | 775493 | 776399 | 327 | ThiL | H | Thiamine monophosphate kinase |
| 819 | 776480 | 777643 | 1312898 | 1311735 | 497 | f-2 | 776480 | 777614 | 382 | RfaG | M | Predicted glycosyltransferases |
| 820 | 778176 | 778346 | 1311202 | 1311032 | 874 | f-3 | 778176 | 778329 | 62 | CDA1 | G | Predicted xylanase/chitin |
| | | | | | | | | | | | | deacetylase |
| 821 | 778362 | 779411 | 1311016 | 1309967 | 875 | f-3 | 778362 | 779409 | 622 | PflA | O | Pyruvate-formate lyase-activating |
| | | | | | | | | | | | | enzyme |
| 822 | 779336 | 780247 | 1310042 | 1309131 | 498 | f-2 | 779384 | 779564 | 32 | — | R | Uncharacterized protein |
| 823 | 780438 | 782276 | 1308940 | 1307102 | 876 | f-3 | 782085 | 782205 | 34 | — | L | Archaea-specific RecJ-like |
| | | | | | | | | | | | | exonuclease |
| 824 | 782329 | 783108 | 1307049 | 1306270 | 147 | f-1 | 782773 | 782986 | 29 | Ggt | E | Gamma-glutamyltranspeptidase |
| 825 | 783098 | 784927 | 1306280 | 1304451 | 2047 | r-3 | 783182 | 784919 | 922 | — | C | Uncharactenzed Fe—S |
| | | | | | | | | | | | | oxidoreductases |
| 826 | 785382 | 786104 | 1303996 | 1303274 | 1719 | r-2 | 785382 | 786081 | 310 | KsgA | J | Dimethyladenosine transferase |
| | | | | | | | | | | | | (rRNA methylation) |
| 827 | 786218 | 786838 | 1303160 | 1302540 | 2046 | r-3 | 786218 | 786833 | 337 | — | J | Predicted RNA-binding protein |
| 828 | 786930 | 787286 | 1302448 | 1302092 | 1718 | r-2 | 786936 | 787230 | 135 | — | S | Uncharacterized ArCR |
| 829 | 787283 | 787609 | 1302095 | 1301769 | 2045 | r-3 | 787313 | 787604 | 189 | RPL21A | J | Ribosomal protein L21E |
| 830 | 787749 | 788930 | 1301629 | 1300448 | 1717 | r-2 | 787749 | 788916 | 492 | — | J | Predicted pseudouridylate |
| | | | | | | | | | | | | synthase |
| 831 | 788975 | 789268 | 1300403 | 1300110 | 499 | f-2 | 788975 | 789266 | 138 | — | S | Uncharacterized ArCR |
| 832 | 789317 | 789460 | 1300061 | 1299918 | 2044 | r-3 | 789350 | 789440 | 27 | Rfe | M | UDP-N-acetylmuramyl |
| | | | | | | | | | | | | pentapeptide |
| | | | | | | | | | | | | phosphotransferase/UDP-N- |
| | | | | | | | | | | | | acetylglucosamine-1-phosphate |
| | | | | | | | | | | | | transferase |
| 833 | 789852 | 790022 | 1299526 | 1299356 | 1716 | r-2 | 789855 | 789993 | 56 | Nfi | L | Deoxyinosine 3′endonuclease |
| | | | | | | | | | | | | (endonuclease V) |
| 834 | 790438 | 791058 | 1298940 | 1298320 | 1327 | r-1 | 790438 | 791038 | 264 | — | L | Translin (RNA-binding protein |
| 835 | 790672 | 790737 | 1298706 | 1298641 | 148 | f-1 | | | | | | |
| 836 | 791117 | 792469 | 1298261 | 1296909 | 500 | f-2 | 791156 | 792467 | 683 | AnsB | EJ | L-asparaginase/archaeal |
| | | | | | | | | | | | | Glu-tRNAGln amidotransferase |
| | | | | | | | | | | | | subunit D COG0252 AnsB |
| 837 | 792505 | 792675 | 1296873 | 1296703 | 149 | f-1 | 792505 | 792610 | 34 | — | S | Uncharacterized ArCR |
| 838 | 792665 | 793114 | 1296713 | 1296264 | 501 | f-2 | 792665 | 793079 | 77 | — | R | Predicted nucleic acid-binding |
| | | | | | | | | | | | | protein |
| 839 | 793111 | 795000 | 1296267 | 1294378 | 150 | f-1 | 793111 | 794998 | 997 | GatE | J | Archaeal Glu-tRNAGln |
| | | | | | | | | | | | | amidotransferase subunit E |
| | | | | | | | | | | | | (contains GAD domain) |
| 840 | 795038 | 795544 | 1294340 | 1293834 | 502 | f-2 | 795356 | 795491 | 34 | FtsW | D | Bacterial cell division membrane |
| | | | | | | | | | | | | protein |
| 841 | 796310 | 797536 | 1293068 | 1291842 | 2043 | r-3 | 796310 | 797534 | 710 | HMG1 | I | Hydroxymethylglutaryl-CoA |
| | | | | | | | | | | | | reductase |
| 842 | 797552 | 798316 | 1291826 | 1291062 | 2042 | r-3 | 797570 | 798311 | 335 | — | D | ATPases involved in chromosome |
| | | | | | | | | | | | | partitioning |
| 843 | 798473 | 799534 | 1290905 | 1289844 | 503 | f-2 | 798482 | 799517 | 596 | Tdh | ER | Threonine dehydrogenase and |
| | | | | | | | | | | | | related Zn-dependent |
| | | | | | | | | | | | | dehydrogenases COG1063 Tdh |
| 844 | 799610 | 799858 | 1289768 | 1289520 | 504 | f-2 | 799625 | 799838 | 55 | — | S | Uncharacterized ACR |
| 845 | 799848 | 800327 | 1289530 | 1289051 | 877 | f-3 | 799848 | 800325 | 91 | — | R | Predicted nucleic acid-binding |
| | | | | | | | | | | | | protein |
| 846 | 800324 | 800425 | 1289054 | 1288953 | 2041 | r-3 | 800324 | 800402 | 26 | Uup | R | ATPase components of ABC |
| | | | | | | | | | | | | transporters with duplicated |
| | | | | | | | | | | | | ATPase domains |
| 847 | 800450 | 800518 | 1288928 | 1288860 | 2040 | r-3 | | | | | | |
| 848 | 800919 | 802424 | 1288459 | 1286954 | 878 | f-3 | 800919 | 802422 | 753 | PheS | J | Phenylalanyl-tRNA synthetase |
| | | | | | | | | | | | | alpha subunit |
| 849 | 802436 | 802672 | 1286942 | 1286706 | 505 | f-2 | 802478 | 802649 | 32 | — | R | Predicted ATPase of the AAA |
| | | | | | | | | | | | | superfamily |
| 850 | 802669 | 802890 | 1286709 | 1286488 | 151 | f-1 | 802816 | 802876 | 26 | — | R | Predicted RNA-binding protein |
| | | | | | | | | | | | | (contains KH domains) |
| 851 | 802887 | 803297 | 1286491 | 1286081 | 879 | f-3 | 802887 | 803277 | 45 | — | R | Predicted nucleic acid-binding |
| | | | | | | | | | | | | protein |
| 852 | 803294 | 805027 | 1286084 | 1284351 | 506 | f-2 | 803303 | 805010 | 933 | PheT | J | Phenylalanyl-tRNA synthetase |
| | | | | | | | | | | | | beta subunit |
| 853 | 805220 | 806068 | 1284158 | 1283310 | 507 | f-2 | 805265 | 806051 | 266 | TruA | J | Pseudouridylate synthase (tRNA |
| | | | | | | | | | | | | psi55) |
| 854 | 806024 | 807415 | 1283354 | 1281963 | 2039 | r-3 | 806030 | 807359 | 722 | SSL2 | L | DNA or RNA helicases of |
| | | | | | | | | | | | | superfamily II |
| 855 | 807366 | 808745 | 1282012 | 1280633 | 880 | f-3 | 807480 | 808743 | 673 | UbiD | H | 3-polyprenyl-4-hydroxybenzoate |
| | | | | | | | | | | | | decarboxylase and related |
| | | | | | | | | | | | | decarboxylases |
| 856 | 808746 | 809576 | 1280632 | 1279802 | 1715 | r-2 | 808875 | 809043 | 30 | RimI | R | Acetyltransferases |
| 857 | 810847 | 811266 | 1278531 | 1278112 | 1326 | r-1 | 810856 | 811252 | 127 | — | L | Predicted transposase |
| 858 | 811367 | 811606 | 1278011 | 1277772 | 508 | f-2 | 811391 | 811532 | 30 | Hfq | R | Uncharacterized ACR |
| 859 | 811608 | 812351 | 1277770 | 1277027 | 881 | f-3 | 811620 | 812340 | 392 | MobB | H | Molybdopterin-guanine |
| | | | | | | | | | | | | dinucleotide biosynthesis protein |
| 860 | 812635 | 813648 | 1276743 | 1275730 | 152 | f-1 | 812755 | 813613 | 280 | — | R | Predicted periplasmic binding |
| | | | | | | | | | | | | protein |
| 861 | 813652 | 814113 | 1275726 | 1275265 | 153 | f-1 | 813730 | 813889 | 32 | UvrB | L | Helicase subunit of the DNA |
| | | | | | | | | | | | | excision repair complex |
| 862 | 814077 | 816419 | 1275301 | 1272959 | 882 | f-3 | 814140 | 816300 | 432 | — | S | Integral membrane protein |
| 863 | 816501 | 816650 | 1272877 | 1272728 | 883 | f-3 | | | | | | |
| 864 | 816754 | 817728 | 1272624 | 1271650 | 154 | f-1 | 816754 | 817711 | 403 | — | R | Predicted archaeal sugar kinases |
| 865 | 817725 | 818519 | 1271653 | 1270859 | 884 | f-3 | 817746 | 817962 | 33 | FabG | QR | Dehydrogenases with different |
| | | | | | | | | | | | | specificities (related to |
| | | | | | | | | | | | | short-chain alcohol |
| | | | | | | | | | | | | dehydrogenases) COG1028 FabG |
| 866 | 818623 | 819468 | 1270755 | 1269910 | 155 | f-1 | 818650 | 819301 | 49 | NosY | R | ABC-type transport system |
| | | | | | | | | | | | | involved in multi-copper enzyme |
| | | | | | | | | | | | | maturation |
| 867 | 819475 | 820395 | 1269903 | 1268983 | 156 | f-1 | 819475 | 820381 | 317 | CcmA | Q | ABC-type multidrug transport |
| | | | | | | | | | | | | system |
| 868 | 820410 | 821180 | 1268968 | 1268198 | 1714 | r-2 | 820458 | 821160 | 412 | — | C | Acyl-CoA synthetase (NDP |
| | | | | | | | | | | | | forming) |
| 869 | 821146 | 822570 | 1268232 | 1266808 | 1325 | r-1 | 821146 | 822553 | 724 | — | C | Acyl-CoA synthetase (NDP |
| | | | | | | | | | | | | forming) |
| 870 | 822810 | 823514 | 1266568 | 1265864 | 1713 | r-2 | 822810 | 823500 | 395 | — | R | Predicted nucleotidyltransferase |
| 871 | 823599 | 824021 | 1265779 | 1265357 | 885 | f-3 | 823815 | 823947 | 29 | ARA1 | R | Aldo/keto reductases |
| 872 | 824015 | 825196 | 1265363 | 1264182 | 2038 | r-3 | 824069 | 825182 | 278 | NrfG | R | TPR-repeat-containing proteins |
| 873 | 825266 | 826294 | 1264112 | 1263084 | 2037 | r-3 | 825275 | 826289 | 485 | SUA5 | J | Putative translation factor (SUA5) |
| 874 | 826379 | 827413 | 1262999 | 1261965 | 2036 | r-3 | 826379 | 827411 | 358 | RfaG | M | Predicted glycosyltransferases |
| 875 | 827435 | 828904 | 1261943 | 1260474 | 2035 | r-3 | 827453 | 828887 | 543 | AsnB | E | Asparagine synthase |
| | | | | | | | | | | | | (glutamine-hydrolyzing) |
| 876 | 828985 | 829728 | 1260393 | 1259650 | 1324 | r-1 | 828985 | 829720 | 355 | — | R | GTPases |
| 877 | 829725 | 830471 | 1259653 | 1258907 | 1712 | r-2 | 829734 | 830466 | 361 | — | D | ATPases involved in chromosome |
| | | | | | | | | | | | | partitioning |
| 878 | 830551 | 832368 | 1258827 | 1257010 | 157 | f-1 | 830560 | 832363 | 924 | — | R | ATPases of the PilT family |
| 879 | 832337 | 833035 | 1257041 | 1256343 | 509 | f-2 | 832469 | 833018 | 196 | Maf | D | Nucleotide-binding protein |
| | | | | | | | | | | | | implicated in inhibition of septum |
| | | | | | | | | | | | | formation |
| 880 | 836010 | 837260 | 1253368 | 1252118 | 1711 | r-2 | 836019 | 837258 | 744 | GCD1 | MJ | Nucleoside-diphosphate-sugar |
| | | | | | | | | | | | | pyrophosphorylases involved in |
| | | | | | | | | | | | | lipopolysaccharide |
| | | | | | | | | | | | | biosynthesis/translation initiation |
| | | | | | | | | | | | | factor eIF2B subunits COG1208 |
| | | | | | | | | | | | | GCD1 |
| 881 | 837335 | 837601 | 1252043 | 1251777 | 2034 | r-3 | 837341 | 837458 | 35 | MCM2 | L | Predicted ATPase involved in |
| | | | | | | | | | | | | replication control |
| 882 | 837647 | 839638 | 1251731 | 1249740 | 2033 | r-3 | 837677 | 839612 | 820 | FeoB | P | Ferrous ion uptake system protein |
| | | | | | | | | | | | | FeoB (predicted GTPase) |
| 883 | 839649 | 839885 | 1249729 | 1249493 | 1710 | r-2 | 839664 | 839883 | 83 | FeoA | P | Protein |
| 884 | 840097 | 840471 | 1249281 | 1248907 | 158 | f-1 | 840103 | 840271 | 29 | Rfe | M | UDP-N-acetylmuramyl |
| | | | | | | | | | | | | pentapeptide |
| | | | | | | | | | | | | phosphotransferase/UDP-N- |
| | | | | | | | | | | | | acetylglucosamine-1-phosphate |
| | | | | | | | | | | | | transferase |
| 885 | 840503 | 841321 | 1248875 | 1248057 | 510 | f-2 | 840503 | 841277 | 389 | MesJ | D | Predicted ATPase of the PP-loop |
| | | | | | | | | | | | | superfamily implicated in cell |
| | | | | | | | | | | | | cycle control |
| 886 | 841293 | 842288 | 1248085 | 1247090 | 886 | f-3 | 841305 | 842244 | 209 | HypE | O | Hydrogenase maturation factor |
| 887 | 842275 | 842628 | 1247103 | 1246750 | 159 | f-1 | 842377 | 842617 | 50 | — | R | Predicted nucleotidyltransferases |
| 888 | 842986 | 844059 | 1246392 | 1245319 | 1323 | r-1 | 843040 | 843955 | 457 | — | R | Predicted RNA-binding proteins |
| 889 | 844320 | 844517 | 1245058 | 1244861 | 1709 | r-2 | | | | | | |
| 890 | 844597 | 845652 | 1244781 | 1243726 | 1322 | r-1 | 844597 | 845650 | 473 | PepP | E | Xaa-Pro aminopeptidase |
| 891 | 845725 | 846387 | 1243653 | 1242991 | 160 | f-1 | 845728 | 846277 | 96 | — | R | Predicted hydrolases of the HAD |
| | | | | | | | | | | | | superfamily |
| 892 | 846422 | 846727 | 1242956 | 1242651 | 511 | f-2 | 846500 | 846725 | 100 | — | J | Ribosomal protein L35AE/L33A |
| 893 | 846773 | 847903 | 1242605 | 1241475 | 512 | f-2 | 846773 | 847895 | 484 | TRM1 | J | N2 |
| 894 | 847896 | 848990 | 1241482 | 1240388 | 887 | f-3 | 847896 | 848988 | 450 | — | S | Uncharacterized membrane |
| | | | | | | | | | | | | proteins |
| 895 | 848774 | 848884 | 1240604 | 1240494 | 2032 | r-3 | 848777 | 848870 | 26 | — | R | Predicted alternative tryptophan |
| | | | | | | | | | | | | synthase beta-subunit (paralog of |
| | | | | | | | | | | | | TrpB) |
| 896 | 848987 | 849100 | 1240391 | 1240278 | 2031 | r-3 | | | | | | |
| 897 | 849375 | 849638 | 1240003 | 1239740 | 1708 | r-2 | 849387 | 849540 | 43 | UvrC | L | Nuclease subunit of the |
| | | | | | | | | | | | | excinuclease complex |
| 898 | 849669 | 851036 | 1239709 | 1238342 | 1707 | r-2 | 849678 | 851004 | 614 | NorM | Q | Na+-driven multidrug efflux |
| | | | | | | | | | | | | pump |
| 899 | 851134 | 851325 | 1238244 | 1238053 | 1321 | r-1 | 851134 | 851317 | 115 | RPL37A | J | Ribosomal protein L37E |
| 900 | 851346 | 851582 | 1238032 | 1237796 | 1706 | r-2 | 851352 | 851574 | 114 | LSM1 | K | Small nuclear ribonucleoprotein |
| | | | | | | | | | | | | (snRNP) homolog |
| 901 | 851738 | 854035 | 1237640 | 1235343 | 513 | f-2 | 852581 | 854012 | 262 | AmyA | G | Glycosidases |
| 902 | 851818 | 851883 | 1237560 | 1237495 | 1320 | r-1 | | | | | | |
| 903 | 854126 | 855841 | 1235252 | 1233537 | 514 | f-2 | 854129 | 855836 | 978 | GRS1 | J | Glycyl-tRNA synthetase |
| 904 | 855888 | 856652 | 1233490 | 1232726 | 888 | f-3 | 855975 | 856650 | 291 | — | R | Predicted permeases |
| 905 | 856637 | 856798 | 1232741 | 1232580 | 2030 | r-3 | 856637 | 856763 | 27 | PotB | E | ABC-type spermidine/putrescine |
| | | | | | | | | | | | | transport system |
| 906 | 857151 | 858227 | 1232227 | 1231151 | 889 | f-3 | 857238 | 858216 | 375 | — | L | Predicted DNA modification |
| | | | | | | | | | | | | methylase |
| 907 | 858728 | 858934 | 1230650 | 1230444 | 515 | f-2 | | | | | | |
| 908 | 860080 | 860340 | 1229298 | 1229038 | 161 | f-1 | 860128 | 860266 | 29 | MrcA | M | Membrane carboxypeptidase |
| | | | | | | | | | | | | (penicillin-binding protein) |
| 909 | 860404 | 861084 | 1228974 | 1228294 | 1319 | r-1 | 860443 | 861079 | 402 | — | R | Predicted metal-dependent |
| | | | | | | | | | | | | hydrolases related to alanyl-tRNA |
| | | | | | | | | | | | | synthetase HxxxH domain |
| 910 | 861133 | 862545 | 1228245 | 1226833 | 1318 | r-1 | 862474 | 862543 | 40 | OppA | EP | ABC-type |
| | | | | | | | | | | | | dipeptide/oligopeptide/nickel |
| | | | | | | | | | | | | transport systems |
| 911 | 862729 | 864021 | 1226649 | 1225357 | 1317 | r-1 | 862744 | 864004 | 586 | GltP | C | Na+/H+-dicarboxylate symporters |
| 912 | 864121 | 864819 | 1225257 | 1224559 | 1316 | r-1 | 864133 | 864793 | 199 | BirA | H | Biotin-(acetyl-CoA carboxylase) |
| | | | | | | | | | | | | ligase |
| 913 | 865002 | 865454 | 1224376 | 1223924 | 890 | f-3 | 865107 | 865314 | 30 | — | R | Uncharacterized FAD-dependent |
| | | | | | | | | | | | | dehydrogenases |
| 914 | 865387 | 866304 | 1223991 | 1223074 | 162 | f-1 | 865489 | 866302 | 457 | FbaB | G | DhnA-type fructose-1 |
| 915 | 866496 | 868313 | 1222882 | 1221065 | 891 | f-3 | 866535 | 868305 | 800 | PycA | C | Pyruvate carboxylase |
| 916 | 868296 | 868430 | 1221082 | 1220948 | 1705 | r-2 | 868338 | 868413 | 26 | — | S | Uncharacterized ACR |
| 917 | 868444 | 870222 | 1220934 | 1219156 | 163 | f-1 | 868483 | 870106 | 640 | CstA | T | Carbon starvation protein |
| 918 | 870263 | 870547 | 1219115 | 1218831 | 516 | f-2 | 870374 | 870533 | 30 | OmpR | TK | Response regulators consisting of |
| | | | | | | | | | | | | a CheY-like receiver domain and |
| | | | | | | | | | | | | a HTH DNA-binding domain |
| | | | | | | | | | | | | COG0745 OmpR |
| 919 | 870532 | 870840 | 1218846 | 1218538 | 164 | f-1 | 870586 | 870769 | 29 | OppF | EP | ABC-type |
| | | | | | | | | | | | | dipeptide/oligopeptide/nickel |
| | | | | | | | | | | | | transport system |
| 920 | 870842 | 871846 | 1218536 | 1217532 | 517 | f-2 | 870851 | 871838 | 451 | ArsA | P | Arsenite transporting ATPase |
| 921 | 871836 | 872120 | 1217542 | 1217258 | 892 | f-3 | 871845 | 872079 | 38 | PaaD | R | Putative aromatic ring |
| | | | | | | | | | | | | hydroxylating enzyme |
| 922 | 871942 | 872775 | 1217436 | 1216603 | 165 | f-1 | 872578 | 872758 | 33 | Smc | D | Chromosome segregation |
| | | | | | | | | | | | | ATPases |
| 923 | 872833 | 873117 | 1216545 | 1216261 | 166 | f-1 | 872863 | 873061 | 50 | AbrB | K | Regulators of |
| | | | | | | | | | | | | stationary/sporulation gene |
| | | | | | | | | | | | | expression |
| 924 | 873524 | 874306 | 1215854 | 1215072 | 518 | f-2 | 873530 | 874292 | 400 | PldB | I | Lysophospholipase |
| 925 | 874707 | 874940 | 1214671 | 1214438 | 893 | f-3 | 874749 | 874902 | 26 | — | D | Intracellular septation protein A |
| 926 | 875022 | 875840 | 1214356 | 1213538 | 894 | f-3 | 875025 | 875277 | 33 | ValS | J | Valyl-tRNA synthetase |
| 927 | 875837 | 876856 | 1213541 | 1212522 | 2029 | r-3 | 875837 | 876854 | 603 | PurA | F | Adenylosuccinate synthase |
| 928 | 877020 | 877235 | 1212358 | 1212143 | 895 | f-3 | 877107 | 877197 | 31 | Hmp | C | Flavodoxin reductases |
| | | | | | | | | | | | | (ferredoxin-NADPH reductases) |
| | | | | | | | | | | | | family 1 |
| 929 | 877271 | 878197 | 1212107 | 1211181 | 519 | f-2 | 877274 | 878180 | 435 | WcaG | MG | Nucleoside-diphosphate-sugar |
| | | | | | | | | | | | | epimerases COG0451 WcaG |
| 930 | 878209 | 878658 | 1211169 | 1210720 | 1315 | r-1 | 878317 | 878650 | 145 | GIM5 | O | Predicted prefoldin |
| 931 | 878718 | 878765 | 1210660 | 1210613 | 896 | f-3 | | | | | | |
| 932 | 878886 | 879182 | 1210492 | 1210196 | 897 | f-3 | | | | | | |
| 933 | 879211 | 880500 | 1210167 | 1208878 | 167 | f-1 | 879229 | 880453 | 249 | | | |
| 934 | 880506 | 881387 | 1208872 | 1207991 | 898 | f-3 | 880518 | 881385 | 365 | EutG | C | Alcohol dehydrogenase IV |
| 935 | 881550 | 881654 | 1207828 | 1207724 | 899 | f-3 | 881550 | 881646 | 43 | EutG | C | Alcohol dehydrogenase IV |
| 936 | 882812 | 882925 | 1206566 | 1206453 | 2028 | r-3 | | | | | | |
| 937 | 885694 | 886539 | 1203684 | 1202839 | 1314 | r-1 | 885694 | 886495 | 110 | | | |
| 938 | 886567 | 887178 | 1202811 | 1202200 | 1313 | r-1 | 886657 | 887176 | 174 | | | |
| 939 | 887275 | 887487 | 1202103 | 1201891 | 168 | f-1 | 887284 | 887434 | 40 | — | S | Uncharacterized ArCR |
| 940 | 887717 | 887920 | 1201661 | 1201458 | 520 | f-2 | 887720 | 887915 | 54 | — | R | Predicted nucleic acid-binding |
| | | | | | | | | | | | | protein |
| 941 | 887924 | 890701 | 1201454 | 1198677 | 521 | f-2 | 887924 | 890642 | 1093 | Lhr | R | Lhr-like helicases |
| 942 | 891114 | 891398 | 1198264 | 1197980 | 900 | f-3 | 891159 | 891396 | 31 | Nfo | L | Endonuclease IV |
| 943 | 891434 | 895009 | 1197944 | 1194369 | 522 | f-2 | 891443 | 894968 | 1392 | Smc | D | Chromosome segregation |
| | | | | | | | | | | | | ATPases |
| 944 | 895013 | 895678 | 1194365 | 1193700 | 523 | f-2 | 895022 | 895667 | 248 | — | S | Uncharacterized ACR |
| 945 | 895675 | 896097 | 1193703 | 1193281 | 1312 | r-1 | 895888 | 896050 | 30 | AcyP | C | Acylphosphatases |
| 946 | 896626 | 899040 | 1192752 | 1190338 | 169 | f-1 | 896632 | 898126 | 684 | MPH1 | L | ERCC4-like helicases |
| 947 | 899156 | 900004 | 1190222 | 1189374 | 2027 | r-3 | 899165 | 899987 | 342 | DppA | E | Uncharacterized protein |
| | | | | | | | | | | | | associated with dipeptide |
| | | | | | | | | | | | | transport |
| 948 | 900134 | 900385 | 1189244 | 1188993 | 524 | f-2 | 900230 | 900314 | 30 | MglA | G | ABC-type sugar (aldose) |
| | | | | | | | | | | | | transport system |
| 949 | 901696 | 902574 | 1187682 | 1186804 | 1311 | r-1 | 901891 | 901987 | 30 | TenA | K | Putative transcription activator |
| 950 | 902700 | 903458 | 1186678 | 1185920 | 1704 | r-2 | 902703 | 903450 | 387 | — | R | Predicted phosphate-binding |
| | | | | | | | | | | | | enzymes |
| 951 | 903912 | 904115 | 1185466 | 1185263 | 1703 | r-2 | 903912 | 904077 | 45 | — | S | Uncharacterized ArCR |
| 952 | 904127 | 904555 | 1185251 | 1184823 | 2026 | r-3 | 904127 | 904520 | 173 | — | S | Uncharacterized ACR |
| 953 | 904610 | 905026 | 1184768 | 1184352 | 525 | f-2 | 904871 | 904967 | 28 | TFA1 | K | Transcription initiation factor IIE |
| 954 | 905105 | 906898 | 1184273 | 1182480 | 526 | f-2 | 905105 | 906887 | 998 | — | R | RNase L inhibitor homolog |
| 955 | 906982 | 907974 | 1182396 | 1181404 | 170 | f-1 | 906994 | 907963 | 387 | HypE | O | Hydrogenase maturation factor |
| 956 | 907975 | 908217 | 1181403 | 1181161 | 1310 | r-1 | 907975 | 908215 | 98 | — | S | Uncharacterized ACR |
| 957 | 908370 | 909260 | 1181008 | 1180118 | 1702 | r-2 | 908463 | 909246 | 221 | — | L | Predicted type IV restriction |
| | | | | | | | | | | | | endonuclease |
| 958 | 909301 | 910116 | 1180077 | 1179262 | 171 | f-1 | 909313 | 910093 | 189 | — | R | Predicted glutamine |
| | | | | | | | | | | | | amidotransferase |
| 959 | 910097 | 910516 | 1179281 | 1178862 | 527 | f-2 | 910106 | 910514 | 190 | — | R | CBS domains |
| 960 | 910513 | 912024 | 1178865 | 1177354 | 172 | f-1 | 910531 | 912016 | 744 | Icc | R | Predicted phosphohydrolases |
| 961 | 912021 | 912893 | 1177357 | 1176485 | 1701 | r-2 | 912021 | 912879 | 311 | — | G | 2-Phosphoglycerate kinase |
| 962 | 912890 | 914188 | 1176488 | 1175190 | 2025 | r-3 | 913589 | 913814 | 45 | — | S | Uncharacterized ACR |
| 963 | 914305 | 914493 | 1175073 | 1174885 | 173 | f-1 | 914389 | 914491 | 27 | HHT1 | L | Histones H3 and H4 |
| 964 | 914711 | 915121 | 1174667 | 1174257 | 528 | f-2 | 914711 | 915119 | 153 | ArsR | K | Predicted transcriptional |
| | | | | | | | | | | | | regulators |
| 965 | 915118 | 916428 | 1174260 | 1172950 | 174 | f-1 | 915148 | 915403 | 37 | — | S | Uncharacterized ArCR |
| 966 | 916589 | 917257 | 1172789 | 1172121 | 529 | f-2 | 916604 | 917246 | 142 | — | S | Uncharacterized BCR |
| 967 | 917348 | 918352 | 1172030 | 1171026 | 530 | f-2 | 917357 | 918311 | 400 | | | |
| 968 | 918655 | 918705 | 1170723 | 1170673 | 1309 | r-1 | | | | | | |
| 969 | 918719 | 919171 | 1170659 | 1170207 | 2024 | r-3 | 918779 | 919163 | 149 | — | S | Uncharacterized ACR |
| 970 | 919305 | 923264 | 1170073 | 1166114 | 901 | f-3 | 920052 | 920499 | 60 | — | L | Micrococcal nuclease |
| | | | | | | | | | | | | (thermonuclease) homologs |
| 971 | 924116 | 924814 | 1165262 | 1164564 | 2023 | r-3 | 924128 | 924773 | 140 | RAD55 | T | RecA-superfamily ATPases |
| | | | | | | | | | | | | implicated in signal transduction |
| 972 | 925010 | 927244 | 1164368 | 1162134 | 531 | f-2 | 925019 | 926708 | 1043 | MetG | J | Methionyl-tRNA synthetase |
| 973 | 927249 | 927578 | 1162129 | 1161800 | 1700 | r-2 | 927339 | 927576 | 92 | — | S | Uncharacterized |
| | | | | | | | | | | | | membrane-associated |
| | | | | | | | | | | | | protein/domain |
| 974 | 928257 | 929309 | 1161121 | 1160069 | 1699 | r-2 | 928353 | 929178 | 45 | SbcC | L | ATPase involved in DNA repair |
| 975 | 929424 | 929705 | 1159954 | 1159673 | 1698 | r-2 | 929538 | 929697 | 33 | Dcp | E | Zn-dependent oligopeptidases |
| 976 | 930480 | 931013 | 1158898 | 1158365 | 1697 | r-2 | 930486 | 930996 | 219 | WecD | KR | Histone acetyltransferase HPA2 |
| | | | | | | | | | | | | and related acetyltransferases |
| | | | | | | | | | | | | COG0454 WecD |
| 977 | 931103 | 931576 | 1158275 | 1157802 | 532 | f-2 | 931145 | 931556 | 147 | Bcp | O | Peroxiredoxin |
| 978 | 931594 | 932070 | 1157784 | 1157308 | 175 | f-1 | 931651 | 932068 | 190 | — | S | Uncharacterized ACR |
| 979 | 932526 | 933086 | 1156852 | 1156292 | 902 | f-3 | 932535 | 933084 | 180 | — | S | Uncharacterized ACR |
| 980 | 933128 | 933430 | 1156250 | 1155948 | 533 | f-2 | 933128 | 933428 | 153 | — | S | Uncharacterized ACR |
| 981 | 933728 | 933904 | 1155650 | 1155474 | 534 | f-2 | 933779 | 933902 | 32 | — | S | Uncharacterized ACR |
| 982 | 933919 | 934392 | 1155459 | 1154986 | 1308 | r-1 | 933925 | 934387 | 75 | — | S | Uncharacterized ACR |
| 983 | 934564 | 935379 | 1154814 | 1153999 | 176 | f-1 | 934612 | 935371 | 180 | MscS | M | Small-conductance |
| | | | | | | | | | | | | mechanosensitive channel |
| 984 | 935513 | 936664 | 1153865 | 1152714 | 2022 | r-3 | 935549 | 936659 | 541 | — | R | Predicted Fe—S oxidoreductases |
| 985 | 936666 | 936944 | 1152712 | 1152434 | 1696 | r-2 | 936696 | 936942 | 94 | MoaD | H | Molybdopterin converting factor |
| 986 | 936987 | 938822 | 1152391 | 1150556 | 1695 | r-2 | 937005 | 938814 | 977 | — | C | Aldehyde:ferredoxin |
| | | | | | | | | | | | | oxidoreductase |
| 987 | 938954 | 940192 | 1150424 | 1149186 | 535 | f-2 | 938969 | 940178 | 572 | — | S | Uncharacterized ACR |
| 988 | 940239 | 940469 | 1149139 | 1148909 | 903 | f-3 | | | | | | |
| 989 | 940803 | 940937 | 1148575 | 1148441 | 904 | f-3 | | | | | | |
| 990 | 940934 | 942055 | 1148444 | 1147323 | 536 | f-2 | 940943 | 942050 | 604 | — | R | Uncharacterized proteins of the |
| | | | | | | | | | | | | AP superfamily |
| 991 | 942591 | 942917 | 1146787 | 1146461 | 905 | f-3 | 942627 | 942897 | 93 | — | R | Predicted nucleotidyltransferases |
| 992 | 942914 | 943306 | 1146464 | 1146072 | 2021 | r-3 | 943067 | 943286 | 28 | TrmA | J | SAM-dependent |
| | | | | | | | | | | | | methyltransferases related to |
| | | | | | | | | | | | | tRNA |
| | | | | | | | | | | | | (uracil-5-)-methyltransferase |
| 993 | 943357 | 943545 | 1146021 | 1145833 | 1307 | r-1 | 943357 | 943528 | 32 | PyrE | F | Orotate phosphoribosyltransferase |
| 994 | 943533 | 943778 | 1145845 | 1145600 | 1694 | r-2 | 943542 | 943677 | 46 | AbrB | K | Regulators of |
| | | | | | | | | | | | | stationary/sporulation gene |
| | | | | | | | | | | | | expression |
| 995 | 943889 | 944536 | 1145489 | 1144842 | 2020 | r-3 | 943889 | 944534 | 335 | RpsG | J | Ribosomal protein S7 |
| 996 | 944542 | 944994 | 1144836 | 1144384 | 1306 | r-1 | 944542 | 944992 | 263 | RpsL | J | Ribosomal protein S12 |
| 997 | 944996 | 945436 | 1144382 | 1143942 | 2019 | r-3 | 944999 | 945434 | 255 | NusA | K | Transcription terminator |
| 998 | 945433 | 945741 | 1143945 | 1143637 | 1305 | r-1 | 945436 | 945727 | 145 | RPL30 | J | Ribosomal protein L30E |
| 999 | 945755 | 946939 | 1143623 | 1142439 | 2018 | r-3 | 945764 | 946931 | 652 | RpoC | K | DNA-directed RNA polymerase |
| | | | | | | | | | | | | beta′ subunit/160 kD subunit |
| | | | | | | | | | | | | (split gene in archaea and Syn) |
| 1000 | 946932 | 948164 | 1142446 | 1141214 | 1693 | r-2 | 947001 | 948162 | 674 | RpoC | K | DNA-directed RNA polymerase |
| | | | | | | | | | | | | beta′ subunit/160 kD subunit |
| | | | | | | | | | | | | (split gene in archaea and Syn) |
| 1001 | 948079 | 949662 | 1141299 | 1139716 | 1304 | r-1 | 948088 | 949645 | 961 | RpoC | K | DNA-directed RNA polymerase |
| | | | | | | | | | | | | beta′ subunit/160 kD subunit |
| | | | | | | | | | | | | (split gene in archaea and Syn) |
| 1002 | 949659 | 953030 | 1139719 | 1136348 | 1692 | r-2 | 949665 | 953028 | 1967 | RpoB | K | DNA-directed RNA polymerase |
| | | | | | | | | | | | | beta subunit/140 kD subunit (split |
| | | | | | | | | | | | | gene in Mjan |
| 1003 | 953048 | 953296 | 1136330 | 1136082 | 2017 | r-3 | 953048 | 953294 | 118 | RPB5 | K | DNA-directed RNA polymerase |
| 1004 | 953495 | 954190 | 1135883 | 1135188 | 2016 | r-3 | 953510 | 954185 | 408 | TrxA | OC | Thiol-disulfide isomerase and |
| | | | | | | | | | | | | thioredoxins COG0526 TrxA |
| 1005 | 954301 | 955020 | 1135077 | 1134358 | 177 | f-1 | 954316 | 955009 | 290 | — | K | Predicted transcriptional |
| | | | | | | | | | | | | regulators |
| 1006 | 955204 | 956391 | 1134174 | 1132987 | 178 | f-1 | 955213 | 956347 | 629 | FixC | C | Dehydrogenases (flavoproteins) |
| 1007 | 956375 | 956533 | 1133003 | 1132845 | 2015 | r-3 | 956402 | 956498 | 26 | — | S | Uncharacterized BCR |
| 1008 | 957270 | 957638 | 1132108 | 1131740 | 906 | f-3 | 957477 | 957579 | 28 | — | R | Predicted integral membrane |
| | | | | | | | | | | | | protein |
| 1009 | 957640 | 961329 | 1131738 | 1128049 | 1303 | r-1 | 957649 | 958597 | 493 | TopA | L | Topoisomerase IA |
| 1010 | 961407 | 962324 | 1127971 | 1127054 | 907 | f-3 | 961689 | 961947 | 35 | FepC | PH | ABC-type |
| | | | | | | | | | | | | cobalamin/Fe3+-siderophores |
| | | | | | | | | | | | | transport systems |
| 1011 | 962372 | 962575 | 1127006 | 1126803 | 537 | f-2 | 962372 | 962573 | 108 | ThiS | H | Sulfur transfer protein involved in |
| | | | | | | | | | | | | thiamine biosynthesis |
| 1012 | 962593 | 963804 | 1126785 | 1125574 | 1302 | r-1 | 962605 | 963799 | 691 | AvtA | E | PLP-dependent aminotransferases |
| 1013 | 964168 | 964827 | 1125210 | 1124551 | 179 | f-1 | 964495 | 964822 | 139 | — | S | Uncharacterized membrane |
| | | | | | | | | | | | | protein |
| 1014 | 964831 | 965430 | 1124547 | 1123948 | 1301 | r-1 | 965176 | 965329 | 36 | SbcC | L | ATPase involved in DNA repair |
| 1015 | 965603 | 965896 | 1123775 | 1123482 | 538 | f-2 | 965612 | 965894 | 188 | RPL42A | J | Ribosomal protein L44E |
| 1016 | 965901 | 966098 | 1123477 | 1123280 | 908 | f-3 | 965901 | 966096 | 128 | RPS27A | J | Ribosomal protein S27E |
| 1017 | 966166 | 967002 | 1123212 | 1122376 | 180 | f-1 | 966175 | 966955 | 461 | SUI2 | J | Translation initiation factor |
| | | | | | | | | | | | | eIF2alpha |
| 1018 | 967002 | 967181 | 1122376 | 1122197 | 909 | f-3 | 967002 | 967176 | 120 | — | J | Predicted Zn-ribbon |
| | | | | | | | | | | | | RNA-binding protein |
| 1019 | 967184 | 967987 | 1122194 | 1121391 | 539 | f-2 | 967184 | 967985 | 394 | — | R | Uncharacterized proteins of the |
| | | | | | | | | | | | | ATP-grasp superfamily |
| 1020 | 968134 | 968757 | 1121244 | 1120621 | 181 | f-1 | 968143 | 968734 | 142 | CbiM | H | Cobalamin biosynthesis protein |
| | | | | | | | | | | | | CbiM |
| 1021 | 968754 | 969002 | 1120624 | 1120376 | 910 | f-3 | 968760 | 968970 | 33 | CbiM | H | Cobalamin biosynthesis protein |
| | | | | | | | | | | | | CbiM |
| 1022 | 968995 | 969663 | 1120383 | 1119715 | 182 | f-1 | 969193 | 969643 | 72 | CbiQ | P | ABC-type cobalt transport system |
| 1023 | 969660 | 970463 | 1119718 | 1118915 | 911 | f-3 | 969660 | 970404 | 233 | CbiO | P | ABC-type cobalt transport system |
| 1024 | 970555 | 971892 | 1118823 | 1117486 | 183 | f-1 | 971431 | 971527 | 33 | AprE | O | Subtilisin-like serine proteases |
| 1025 | 971952 | 973340 | 1117426 | 1116038 | 1691 | r-2 | 971970 | 973332 | 786 | CpsG | G | Phosphomannomutase |
| 1026 | 973366 | 974772 | 1116012 | 1114606 | 1300 | r-1 | 973375 | 974356 | 455 | CpsB | M | Mannose-1-phosphate |
| | | | | | | | | | | | | guanylyltransferase |
| 1027 | 974823 | 976277 | 1114555 | 1113101 | 1690 | r-2 | 975489 | 975720 | 32 | — | K | RNA-binding proteins (RRM |
| | | | | | | | | | | | | domain) |
| 1028 | 976234 | 976803 | 1113144 | 1112575 | 1299 | r-1 | 976240 | 976795 | 340 | — | GR | Thermophilic |
| | | | | | | | | | | | | glucose-6-phosphate isomerase |
| | | | | | | | | | | | | and related metalloenzymes |
| | | | | | | | | | | | | COG2140- |
| 1029 | 976871 | 977053 | 1112507 | 1112325 | 2014 | r-3 | 976880 | 977042 | 59 | NusA | K | Transcription terminator |
| 1030 | 977082 | 977765 | 1112296 | 1111613 | 1689 | r-2 | 977082 | 977730 | 174 | — | S | Uncharacterized ACR |
| 1031 | 977762 | 978706 | 1111616 | 1110672 | 2013 | r-3 | 977762 | 978671 | 401 | ElaC | R | Metal-dependent hydrolases of |
| | | | | | | | | | | | | the beta-lactamase superfamily III |
| 1032 | 978776 | 979747 | 1110602 | 1109631 | 540 | f-2 | 978791 | 979706 | 234 | NrfG | R | TPR-repeat-containing proteins |
| 1033 | 979826 | 981100 | 1109552 | 1108278 | 541 | f-2 | 979841 | 981095 | 488 | TrmA | J | SAM-dependent |
| | | | | | | | | | | | | methyltransferases related to |
| | | | | | | | | | | | | tRNA |
| | | | | | | | | | | | | (uracil-5-)-methyltransferase |
| 1034 | 981159 | 981425 | 1108219 | 1107953 | 1688 | r-2 | 981168 | 981357 | 28 | DapD | E | Tetrahydrodipicolinate |
| | | | | | | | | | | | | N-succinyltransferase |
| 1035 | 981762 | 981815 | 1107616 | 1107563 | 1687 | r-2 | | | | | | |
| 1036 | 982136 | 982483 | 1107242 | 1106895 | 542 | f-2 | 982136 | 982481 | 168 | — | H | 6-pyruvoyl-tetrahydropterin |
| | | | | | | | | | | | | synthase |
| 1037 | 982480 | 982953 | 1106898 | 1106425 | 1298 | r-1 | 982480 | 982822 | 142 | — | S | Uncharacterized ACR |
| 1038 | 983025 | 983486 | 1106353 | 1105892 | 912 | f-3 | 983058 | 983460 | 115 | GIM5 | O | Predicted prefoldin |
| 1039 | 983483 | 983821 | 1105895 | 1105557 | 543 | f-2 | 983516 | 983723 | 35 | GimC | O | Prefoldin |
| 1040 | 983802 | 984371 | 1105576 | 1105007 | 1686 | r-2 | 983802 | 984354 | 278 | PorG | C | Pyruvate:ferredoxin |
| | | | | | | | | | | | | oxidoreductase and related |
| | | | | | | | | | | | | 2-oxoacid:ferredoxin |
| | | | | | | | | | | | | oxidoreductases |
| 1041 | 984359 | 985399 | 1105019 | 1103979 | 2012 | r-3 | 984554 | 985397 | 537 | PorB | C | Pyruvate:ferredoxin |
| | | | | | | | | | | | | oxidoreductase and related |
| | | | | | | | | | | | | 2-oxoacid:ferredoxin |
| | | | | | | | | | | | | oxidoreductases |
| 1042 | 985204 | 986352 | 1104174 | 1103026 | 1297 | r-1 | 985204 | 986338 | 639 | PorA | C | Pyruvate:ferredoxin |
| | | | | | | | | | | | | oxidoreductase and related |
| | | | | | | | | | | | | 2-oxoacid:ferredoxin |
| | | | | | | | | | | | | oxidoreductases |
| 1043 | 986349 | 986912 | 1103029 | 1102466 | 1685 | r-2 | 986400 | 986904 | 284 | PorG | C | Pyruvate:ferredoxin |
| | | | | | | | | | | | | oxidoreductase and related |
| | | | | | | | | | | | | 2-oxoacid:ferredoxin |
| | | | | | | | | | | | | oxidoreductases |
| 1044 | 986851 | 987246 | 1102527 | 1102132 | 1296 | r-1 | 986935 | 987235 | 96 | — | S | Uncharacterized ACR |
| 1045 | 987243 | 987566 | 1102135 | 1101812 | 1684 | r-2 | 987297 | 987375 | 32 | — | R | Predicted nucleotidyltransferases |
| 1046 | 987517 | 988383 | 1101861 | 1100995 | 1295 | r-1 | 987517 | 988369 | 501 | PorB | C | Pyruvate:ferredoxin |
| | | | | | | | | | | | | oxidoreductase and related |
| | | | | | | | | | | | | 2-oxoacid:ferredoxin |
| | | | | | | | | | | | | oxidoreductases |
| 1047 | 988383 | 989573 | 1100995 | 1099805 | 1683 | r-2 | 988383 | 989571 | 743 | PorA | C | Pyruvate:ferredoxin |
| | | | | | | | | | | | | oxidoreductase and related |
| | | | | | | | | | | | | 2-oxoacid:ferredoxin |
| | | | | | | | | | | | | oxidoreductases |
| 1048 | 989577 | 989894 | 1099801 | 1099484 | 1682 | r-2 | 989577 | 989877 | 125 | — | C | Ferredoxin 3 |
| 1049 | 990762 | 991511 | 1098616 | 1097867 | 913 | f-3 | 991125 | 991500 | 33 | CcmA | Q | ABC-type multidrug transport |
| | | | | | | | | | | | | system |
| 1050 | 991803 | 991991 | 1097575 | 1097387 | 914 | f-3 | | | | | | |
| 1051 | 992036 | 993010 | 1097342 | 1096368 | 2011 | r-3 | 992042 | 993002 | 446 | — | R | Predicted Fe—S oxidoreductases |
| 1052 | 994241 | 995020 | 1095137 | 1094358 | 544 | f-2 | 994241 | 994985 | 244 | SurE | R | Survival protein |
| 1053 | 995047 | 995112 | 1094331 | 1094266 | 184 | f-1 | | | | | | |
| 1054 | 995380 | 995844 | 1093998 | 1093534 | 185 | f-1 | 995419 | 995779 | 78 | — | S | Predicted membrane protein |
| 1055 | 995878 | 996558 | 1093500 | 1092820 | 1294 | r-1 | 995881 | 996550 | 278 | SpoVK | O | ATPases of the AAA+ class |
| 1056 | 997037 | 998464 | 1092341 | 1090914 | 545 | f-2 | 997097 | 998456 | 785 | SerS | J | Seryl-tRNA synthetase |
| 1057 | 998525 | 999265 | 1090853 | 1090113 | 2010 | r-3 | 998588 | 999200 | 298 | Nth | L | Predicted EndoIII-related |
| | | | | | | | | | | | | endonuclease |
| 1058 | 999750 | 1000229 | 1089628 | 1089149 | 915 | f-3 | 999843 | 1000212 | 168 | — | K | Predicted transcriptional |
| | | | | | | | | | | | | regulators |
| 1059 | 1000226 | 1001212 | 1089152 | 1088166 | 546 | f-2 | 1000235 | 1001201 | 503 | CcmA | Q | ABC-type multidrug transport |
| | | | | | | | | | | | | system |
| 1060 | 1001217 | 1001987 | 1088161 | 1087391 | 916 | f-3 | 1001217 | 1001982 | 355 | — | R | ABC-type multidrug transport |
| | | | | | | | | | | | | system |
| 1061 | 1002002 | 1003240 | 1087376 | 1086138 | 2009 | r-3 | 1002005 | 1003226 | 590 | Pgk | G | 3-phosphoglycerate kinase |
| 1062 | 1003253 | 1005466 | 1086125 | 1083912 | 547 | f-2 | 1003355 | 1003715 | 40 | Mrr | L | Restriction endonuclease |
| 1063 | 1005467 | 1006087 | 1083911 | 1083291 | 2008 | r-3 | 1005581 | 1005884 | 38 | LeuA | E | Isopropylmalate/homocitrate/citramalate |
| | | | | | | | | | | | | synthases |
| 1064 | 1006202 | 1007890 | 1083176 | 1081488 | 2007 | r-3 | 1006202 | 1007888 | 1040 | Sbm | I | Methylmalonyl-CoA mutase |
| 1065 | 1007979 | 1010192 | 1081399 | 1079186 | 1681 | r-2 | 1008876 | 1009398 | 41 | AlsD | H | Glutamate-1-semialdehyde |
| | | | | | | | | | | | | aminotransferase |
| 1066 | 1010189 | 1010956 | 1079189 | 1078422 | 2006 | r-3 | 1010246 | 1010591 | 94 | NosY | R | ABC-type transport system |
| | | | | | | | | | | | | involved in multi-copper enzyme |
| | | | | | | | | | | | | maturation |
| 1067 | 1011011 | 1011949 | 1078367 | 1077429 | 2005 | r-3 | 1011011 | 1011938 | 464 | CcmA | Q | ABC-type multidrug transport |
| | | | | | | | | | | | | system |
| 1068 | 1012013 | 1012879 | 1077365 | 1076499 | 548 | f-2 | 1012013 | 1012862 | 332 | YSH1 | J | Predicted exonuclease of the |
| | | | | | | | | | | | | beta-lactamase fold involved in |
| | | | | | | | | | | | | RNA processing |
| 1069 | 1012961 | 1013278 | 1076417 | 1076100 | 549 | f-2 | 1013114 | 1013255 | 29 | MdlB | Q | ABC-type multidrug/protein/lipid |
| | | | | | | | | | | | | transport system |
| 1070 | 1013371 | 1013883 | 1076007 | 1075495 | 186 | f-1 | 1013407 | 1013806 | 214 | IbpA | O | Molecular chaperone (small heat |
| | | | | | | | | | | | | shock protein) |
| 1071 | 1013995 | 1014411 | 1075383 | 1074967 | 1293 | r-1 | 1014265 | 1014361 | 30 | FlgD | N | Flagellar hook capping protein |
| 1072 | 1014829 | 1017228 | 1074549 | 1072150 | 187 | f-1 | 1014829 | 1017226 | 1310 | SpoVK | O | ATPases of the AAA+ class |
| 1073 | 1017331 | 1020711 | 1072047 | 1068667 | 188 | f-1 | 1018411 | 1018645 | 56 | — | L | Type II restriction enzyme |
| 1074 | 1020821 | 1020970 | 1068557 | 1068408 | 2004 | r-3 | 1020854 | 1020962 | 26 | — | R | Predicted hydrolase of alkaline |
| | | | | | | | | | | | | phosphatase superfamily |
| 1075 | 1021424 | 1022338 | 1067954 | 1067040 | 550 | f-2 | 1021535 | 1022261 | 177 | FolP | H | Dihydropteroate synthase |
| 1076 | 1022319 | 1023311 | 1067059 | 1066067 | 1680 | r-2 | 1022328 | 1023294 | 249 | PerM | R | Predicted permease |
| 1077 | 1023301 | 1023780 | 1066077 | 1065598 | 1292 | r-1 | 1023463 | 1023637 | 32 | TldD | R | Predicted Zn-dependent proteases |
| | | | | | | | | | | | | and their inactivated homologs |
| 1078 | 1023781 | 1024785 | 1065597 | 1064593 | 1291 | r-1 | 1023781 | 1024759 | 278 | SppA | NO | Periplasmic serine proteases |
| | | | | | | | | | | | | (ClpP class) COG0616 SppA |
| 1079 | 1024877 | 1025692 | 1064501 | 1063686 | 551 | f-2 | 1024886 | 1025681 | 417 | IolE | G | Sugar phosphate |
| | | | | | | | | | | | | isomerases/epimerases |
| 1080 | 1025682 | 1026086 | 1063696 | 1063292 | 1679 | r-2 | 1025892 | 1026018 | 29 | LeuB | E | Isocitrate/isopropylmalate |
| | | | | | | | | | | | | dehydrogenase |
| 1081 | 1026083 | 1026376 | 1063295 | 1063002 | 2003 | r-3 | 1026122 | 1026374 | 146 | RPB11 | K | DNA-directed RNA polymerase |
| 1082 | 1026357 | 1026986 | 1063021 | 1062392 | 1678 | r-2 | 1026357 | 1026984 | 248 | — | S | Uncharacterized ArCR |
| 1083 | 1026983 | 1027579 | 1062395 | 1061799 | 2002 | r-3 | 1026986 | 1027571 | 280 | — | J | Predicted RNA-binding protein |
| | | | | | | | | | | | | (consists of S1 domain and a |
| | | | | | | | | | | | | Zn-ribbon domain) |
| 1084 | 1027657 | 1029558 | 1061721 | 1059820 | 189 | f-1 | 1027678 | 1029556 | 1040 | ThrS | J | Threonyl-tRNA synthetase |
| 1085 | 1029517 | 1030068 | 1059861 | 1059310 | 1290 | r-1 | 1029589 | 1029943 | 34 | HsdM | L | Type I restriction-modification |
| | | | | | | | | | | | | system methyltransferase subunit |
| 1086 | 1030276 | 1030950 | 1059102 | 1058428 | 1289 | r-1 | 1030711 | 1030900 | 32 | UvrC | L | Nuclease subunit of the |
| | | | | | | | | | | | | excinuclease complex |
| | | | | | | | | | | | | (TBP-interacting protein) |
| 1087 | 1031013 | 1031807 | 1058365 | 1057571 | 1677 | r-2 | 1031013 | 1031805 | 431 | UppS | I | Undecaprenyl pyrophosphate |
| | | | | | | | | | | | | synthase |
| 1088 | 1031814 | 1032344 | 1057564 | 1057034 | 1676 | r-2 | 1031823 | 1032336 | 291 | PaaY | R | Carbonic |
| | | | | | | | | | | | | anhydrases/acetyltransferases |
| 1089 | 1032406 | 1032792 | 1056972 | 1056586 | 190 | f-1 | 1032412 | 1032781 | 137 | — | L | Holliday junction resolvase - |
| | | | | | | | | | | | | archaeal type |
| 1090 | 1032841 | 1034373 | 1056537 | 1055005 | 191 | f-1 | 1032913 | 1033582 | 45 | — | S | Predicted membrane protein |
| 1091 | 1034458 | 1035498 | 1054920 | 1053880 | 192 | f-1 | 1034458 | 1035493 | 551 | FrvX | G | Cellulase M and related proteins |
| 1092 | 1035541 | 1036101 | 1053837 | 1053277 | 193 | f-1 | 1035547 | 1036087 | 185 | — | R | Predicted Zn-dependent proteases |
| 1093 | 1036098 | 1036649 | 1053280 | 1052729 | 917 | f-3 | 1036104 | 1036623 | 254 | CyaB | F | Adenylate cyclase |
| 1094 | 1036636 | 1037469 | 1052742 | 1051909 | 194 | f-1 | 1037026 | 1037341 | 48 | NrfG | R | TPR-repeat-containing proteins |
| 1095 | 1037390 | 1038229 | 1051988 | 1051149 | 2001 | r-3 | 1037390 | 1038167 | 275 | CbiO | P | ABC-type cobalt transport system |
| 1096 | 1038226 | 1039704 | 1051152 | 1049674 | 1288 | r-1 | 1038226 | 1039687 | 621 | TrkG | P | Trk-type K+ transport systems |
| 1097 | 1039796 | 1040683 | 1049582 | 1048695 | 552 | f-2 | 1039808 | 1040681 | 417 | Map | J | Methionine aminopeptidase |
| 1098 | 1041012 | 1041071 | 1048366 | 1048307 | 918 | f-3 | | | | | | |
| 1099 | 1041624 | 1041935 | 1047754 | 1047443 | 919 | f-3 | 1041705 | 1041822 | 31 | SurA | O | Parvulin-like peptidyl-prolyl |
| | | | | | | | | | | | | isomerase |
| 1100 | 1042133 | 1042384 | 1047245 | 1046994 | 553 | f-2 | 1042145 | 1042382 | 141 | — | R | Predicted nucleic acid-binding |
| | | | | | | | | | | | | protein |
| 1101 | 1042526 | 1043701 | 1046852 | 1045677 | 554 | f-2 | 1042526 | 1043696 | 659 | — | R | CBS domains |
| 1102 | 1043676 | 1044812 | 1045702 | 1044566 | 1675 | r-2 | 1043805 | 1044027 | 34 | NuoL | CP | NADH:ubiquinone |
| | | | | | | | | | | | | oxidoreductase subunit 5 (chain |
| | | | | | | | | | | | | L)/Multisubunit Na+/H+ |
| | | | | | | | | | | | | antiporter |
| 1103 | 1044809 | 1046068 | 1044569 | 1043310 | 2000 | r-3 | 1044809 | 1046030 | 664 | GCD1 | MJ | Nucleoside-diphosphate-sugar |
| | | | | | | | | | | | | pyrophosphorylases involved in |
| | | | | | | | | | | | | lipopolysaccharide |
| | | | | | | | | | | | | biosynthesis/translation initiation |
| | | | | | | | | | | | | factor eIF2B subunits COG1208 |
| | | | | | | | | | | | | GCD1 |
| 1104 | 1047016 | 1048092 | 1042362 | 1041286 | 195 | f-1 | 1047016 | 1048078 | 543 | — | R | Predicted GTPase |
| 1105 | 1048209 | 1048610 | 1041169 | 1040768 | 1674 | r-2 | 1048218 | 1048596 | 207 | RPS8A | J | Ribosomal protein S8E |
| 1106 | 1048684 | 1048761 | 1040694 | 1040617 | 1287 | r-1 | | | | | | |
| 1107 | 1048718 | 1049599 | 1040660 | 1039779 | 555 | f-2 | 1049000 | 1049093 | 30 | HypF | O | Hydrogenase maturation factor |
| 1108 | 1049596 | 1051275 | 1039782 | 1038103 | 1286 | r-1 | 1049674 | 1051264 | 897 | PyrG | F | CTP synthase (UTP-ammonialyase) |
| 1109 | 1051307 | 1051711 | 1038071 | 1037667 | 1999 | r-3 | 1051316 | 1051682 | 168 | — | S | Uncharacterized ArCR |
| 1110 | 1051708 | 1051995 | 1037670 | 1037383 | 1285 | r-1 | 1051720 | 1051993 | 150 | — | S | Uncharacterized ArCR |
| 1111 | 1052192 | 1052701 | 1037186 | 1036677 | 556 | f-2 | 1052495 | 1052684 | 32 | PtsA | G | Phosphoenolpyruvate-protein |
| | | | | | | | | | | | | kinase (PTS system EI component |
| | | | | | | | | | | | | in bacteria) |
| 1112 | 1052753 | 1053022 | 1036625 | 1036356 | 557 | f-2 | 1052792 | 1053005 | 29 | Tar | N | Methyl-accepting chemotaxis |
| | | | | | | | | | | | | protein |
| 1113 | 1053032 | 1053793 | 1036346 | 1035585 | 558 | f-2 | 1053032 | 1053791 | 411 | NrdG | O | Organic radical activating |
| | | | | | | | | | | | | enzymes |
| 1114 | 1053859 | 1055274 | 1035519 | 1034104 | 196 | f-1 | 1053952 | 1055269 | 727 | TIP49 | L | DNA helicase TIP49 |
| 1115 | 1055358 | 1055663 | 1034020 | 1033715 | 920 | f-3 | 1055370 | 1055445 | 28 | AlsT | E | Na+/alanine symporter |
| 1116 | 1056285 | 1056395 | 1033093 | 1032983 | 921 | f-3 | | | | | | |
| 1117 | 1056392 | 1057381 | 1032986 | 1031997 | 1998 | r-3 | 1056605 | 1056746 | 33 | Rpe | G | Pentose-5-phosphate-3-epimerase |
| 1118 | 1057362 | 1057835 | 1032016 | 1031543 | 1673 | r-2 | 1057494 | 1057680 | 31 | Ffh | N | Signal recognition particle |
| | | | | | | | | | | | | GTPase |
| 1119 | 1057832 | 1058302 | 1031546 | 1031076 | 1997 | r-3 | 1058003 | 1058102 | 28 | — | S | Uncharacterized ACR |
| 1120 | 1058495 | 1059043 | 1030883 | 1030335 | 559 | f-2 | 1058543 | 1059041 | 260 | — | R | Phospholipid-binding protein |
| 1121 | 1059047 | 1059307 | 1030331 | 1030071 | 1996 | r-3 | 1059104 | 1059284 | 30 | RfaG | M | Predicted glycosyltransferases |
| 1122 | 1059399 | 1059863 | 1029979 | 1029515 | 1672 | r-2 | 1059465 | 1059795 | 40 | NrfG | R | TPR-repeat-containing proteins |
| 1123 | 1059921 | 1060517 | 1029457 | 1028861 | 922 | f-3 | 1059933 | 1060434 | 108 | GrxC | O | Glutaredoxin and related proteins |
| 1124 | 1060582 | 1061310 | 1028796 | 1028068 | 197 | f-1 | 1060582 | 1061296 | 247 | CcdA | O | Cytochrome c biogenesis protein |
| 1125 | 1061307 | 1061768 | 1028071 | 1027610 | 1671 | r-2 | 1061322 | 1061766 | 237 | Lrp | K | Transcriptional regulators |
| 1126 | 1061878 | 1063221 | 1027500 | 1026157 | 198 | f-1 | 1061878 | 1063186 | 614 | ArgD | E | PLP-dependent aminotransferases |
| 1127 | 1063298 | 1064599 | 1026080 | 1024779 | 560 | f-2 | 1063325 | 1064597 | 535 | UraA | F | Xanthine/uracil permeases |
| 1128 | 1064656 | 1065000 | 1024722 | 1024378 | 1284 | r-1 | | | | | | |
| 1129 | 1065370 | 1066023 | 1024008 | 1023355 | 1283 | r-1 | 1065370 | 1065943 | 316 | NuoI | C | Formate hydrogenlyase subunit |
| | | | | | | | | | | | | 6/NADH:ubiquinone |
| | | | | | | | | | | | | oxidoreductase 23 kD subunit |
| | | | | | | | | | | | | (chain I) |
| 1130 | 1066020 | 1067213 | 1023358 | 1022165 | 1670 | r-2 | 1066053 | 1067211 | 652 | NuoD | C | NADH:ubiquinone |
| | | | | | | | | | | | | oxidoreductase 49 kD subunit 7 |
| 1131 | 1067215 | 1067811 | 1022163 | 1021567 | 1282 | r-1 | 1067317 | 1067797 | 180 | NuoC | C | NADH:ubiquinone |
| | | | | | | | | | | | | oxidoreductase 27 kD subunit |
| 1132 | 1067793 | 1068392 | 1021585 | 1020986 | 1669 | r-2 | 1067838 | 1068390 | 335 | NuoB | C | NADH:ubiquinone |
| | | | | | | | | | | | | oxidoreductase 20 kD subunit and |
| | | | | | | | | | | | | related Fe—S oxidoreductases |
| 1133 | 1068394 | 1069287 | 1020984 | 1020091 | 1281 | r-1 | 1068406 | 1069240 | 367 | HyfC | C | Formate hydrogenlyase subunit 4 |
| 1134 | 1069288 | 1071138 | 1020090 | 1018240 | 1280 | r-1 | 1069288 | 1071115 | 678 | HyfB | CP | Formate hydrogenlyase subunit |
| | | | | | | | | | | | | 3/Multisubunit Na+/H+ antiporter |
| 1135 | 1070858 | 1070965 | 1018520 | 1018413 | 561 | f-2 | | | | | | |
| 1136 | 1071135 | 1072622 | 1018243 | 1016756 | 1668 | r-2 | 1071186 | 1072614 | 713 | HyfB | CP | Formate hydrogenlyase subunit |
| | | | | | | | | | | | | 3/Multisubunit Na+/H+ antiporter |
| 1137 | 1072619 | 1072963 | 1016759 | 1016415 | 1995 | r-3 | 1072619 | 1072961 | 194 | MnhC | P | Multisubunit Na+/H+ antiporter |
| 1138 | 1072960 | 1073688 | 1016418 | 1015690 | 1279 | r-1 | 1072963 | 1073686 | 333 | MnhB | P | Multisubunit Na+/H+ antiporter |
| 1139 | 1073670 | 1073954 | 1015708 | 1015424 | 1667 | r-2 | 1073745 | 1073919 | 68 | — | P | Predicted subunit of the |
| | | | | | | | | | | | | Multisubunit Na+/H+ antiporter |
| 1140 | 1073951 | 1074343 | 1015427 | 1015035 | 1994 | r-3 | 1073951 | 1074290 | 168 | MnhG | P | Multisubunit Na+/H+ antiporter |
| 1141 | 1074340 | 1074594 | 1015038 | 1014784 | 1278 | r-1 | 1074340 | 1074592 | 133 | MnhF | P | Multisubunit Na+/H+ antiporter |
| 1142 | 1074591 | 1075124 | 1014787 | 1014254 | 1666 | r-2 | 1074591 | 1075119 | 258 | MnhE | P | Multisubunit Na+/H+ antiporter |
| 1143 | 1075360 | 1075860 | 1014018 | 1013518 | 1277 | r-1 | 1075360 | 1075858 | 305 | — | E | Predicted regulator of amino acid |
| | | | | | | | | | | | | metabolism (contains the ACT |
| | | | | | | | | | | | | domain) |
| 1144 | 1076013 | 1077278 | 1013365 | 1012100 | 923 | f-3 | 1076019 | 1077276 | 687 | — | R | Predicted Fe—S oxidoreductase |
| 1145 | 1077432 | 1077986 | 1011946 | 1011392 | 924 | f-3 | 1077708 | 1077936 | 32 | RibF | H | FAD synthase |
| 1146 | 1078071 | 1079189 | 1011307 | 1010189 | 1665 | r-2 | 1078071 | 1079187 | 569 | WecB | M | UDP-N-acetylglucosamine |
| | | | | | | | | | | | | 2-epimerase |
| 1147 | 1079201 | 1080472 | 1010177 | 1008906 | 1993 | r-3 | 1079219 | 1080467 | 577 | WecC | M | UDP-N-acetyl-D-mannosaminuronate |
| | | | | | | | | | | | | dehydrogenase |
| 1148 | 1080723 | 1081862 | 1008655 | 1007516 | 925 | f-3 | 1080759 | 1081797 | 524 | — | S | Uncharacterized ArCR |
| 1149 | 1082285 | 1084639 | 1007093 | 1004739 | 562 | f-2 | 1082735 | 1084637 | 891 | ArgS | J | Arginyl-tRNA synthetase |
| 1150 | 1082363 | 1082779 | 1007015 | 1006599 | 1992 | r-3 | 1082441 | 1082765 | 123 | LplA | H | Lipoate-protein ligase A |
| 1151 | 1084640 | 1085716 | 1004738 | 1003662 | 1991 | r-3 | 1084640 | 1085696 | 377 | — | R | Predicted ATPase of the AAA |
| | | | | | | | | | | | | superfamily |
| 1152 | 1085820 | 1086698 | 1003558 | 1002680 | 926 | f-3 | 1085820 | 1086684 | 375 | DapA | EM | Dihydrodipicolinate |
| | | | | | | | | | | | | synthase/N-acetylneuraminate |
| | | | | | | | | | | | | lyase COG0329 DapA |
| 1153 | 1086762 | 1086986 | 1002616 | 1002392 | 927 | f-3 | 1086765 | 1086870 | 25 | PhrB | L | Deoxyribodipyrimidine |
| | | | | | | | | | | | | photolyase |
| 1154 | 1087256 | 1088512 | 1002122 | 1000866 | 1990 | r-3 | 1087265 | 1088507 | 746 | eRF1 | J | Peptide chain release factor eRF1 |
| 1155 | 1088568 | 1088813 | 1000810 | 1000565 | 1664 | r-2 | | | | | | |
| 1156 | 1088815 | 1089384 | 1000563 | 999994 | 1276 | r-1 | 1089229 | 1089355 | 32 | — | S | Uncharacterized ArCR |
| 1157 | 1089160 | 1089210 | 1000218 | 1000168 | 199 | f-1 | | | | | | |
| 1158 | 1089484 | 1089639 | 999894 | 999739 | 1275 | r-1 | 1089532 | 1089634 | 26 | Fba | G | Fructose/tagatose bisphosphate |
| | | | | | | | | | | | | aldolase (fructose 1,6-bisphophate |
| | | | | | | | | | | | | aldolase) |
| 1159 | 1089909 | 1090604 | 999469 | 998774 | 1663 | r-2 | 1090068 | 1090266 | 37 | BaeS | T | Sensory transduction histidine |
| | | | | | | | | | | | | kinases |
| 1160 | 1091118 | 1091525 | 998260 | 997853 | 1662 | r-2 | 1091292 | 1091415 | 33 | GloB | R | Zn-dependent hydrolases |
| 1161 | 1091646 | 1092197 | 997732 | 997181 | 928 | f-3 | 1091877 | 1092138 | 37 | — | S | Uncharacterized ACR |
| 1162 | 1092206 | 1093522 | 997172 | 995856 | 1989 | r-3 | 1092212 | 1093496 | 443 | — | M | Predicted membrane-associated |
| | | | | | | | | | | | | Zn-dependent proteases 1 |
| 1163 | 1093556 | 1093957 | 995822 | 995421 | 1988 | r-3 | 1093556 | 1093952 | 189 | — | S | Uncharacterized ACR |
| 1164 | 1093967 | 1095127 | 995411 | 994251 | 1987 | r-3 | 1093967 | 1095125 | 593 | — | S | Uncharacterized ACR |
| 1165 | 1096375 | 1096839 | 993003 | 992539 | 200 | f-1 | 1096384 | 1096816 | 242 | RpsO | J | Ribosomal protein S15P/S13E |
| 1166 | 1096870 | 1098303 | 992508 | 991075 | 201 | f-1 | 1096870 | 1098295 | 681 | RecJ | L | Single-stranded DNA-specific |
| | | | | | | | | | | | | exonuclease |
| 1167 | 1098281 | 1098538 | 991097 | 990840 | 563 | f-2 | 1098317 | 1098458 | 29 | — | C | Phycocyanin alpha-subunit |
| | | | | | | | | | | | | phycocyanobilin lyase and related |
| | | | | | | | | | | | | proteins |
| 1168 | 1098554 | 1099156 | 990824 | 990222 | 564 | f-2 | 1098614 | 1099148 | 310 | RPS1A | J | Ribosomal protein S3AE |
| 1169 | 1099220 | 1099486 | 990158 | 989892 | 565 | f-2 | 1099274 | 1099469 | 32 | HtpG | O | Molecular chaperone |
| 1170 | 1099468 | 1099908 | 989910 | 989470 | 202 | f-1 | 1099483 | 1099906 | 165 | — | R | Predicted nucleic acid-binding |
| | | | | | | | | | | | | protein |
| 1171 | 1099954 | 1100991 | 989424 | 988387 | 203 | f-1 | 1099954 | 1100962 | 527 | — | S | Uncharacterized protein sharing a |
| | | | | | | | | | | | | conserved domain with thiamine |
| | | | | | | | | | | | | biosynthesis protein ThiI |
| 1172 | 1101073 | 1101510 | 988305 | 987868 | 1274 | r-1 | 1101076 | 1101448 | 136 | — | S | Predicted membrane protein |
| 1173 | 1101868 | 1102326 | 987510 | 987052 | 1273 | r-1 | 1101886 | 1102324 | 133 | Lrp | K | Transcriptional regulators |
| 1174 | 1102786 | 1103181 | 986592 | 986197 | 1272 | r-1 | 1102795 | 1103179 | 136 | ArsR | K | Predicted transcriptional |
| | | | | | | | | | | | | regulators |
| 1175 | 1103673 | 1104461 | 985705 | 984917 | 1661 | r-2 | 1104120 | 1104330 | 31 | — | P | Putative silver efflux pump |
| 1176 | 1104585 | 1106492 | 984793 | 982886 | 929 | f-3 | 1104651 | 1106463 | 742 | LonB | O | Predicted ATP-dependent |
| | | | | | | | | | | | | protease (Lon protease) |
| 1177 | 1106686 | 1107264 | 982692 | 982114 | 1271 | r-1 | 1106686 | 1107262 | 272 | — | K | Predicted transcriptional regulator |
| | | | | | | | | | | | | with C-terminal CBS domains |
| 1178 | 1107524 | 1108015 | 981854 | 981363 | 1986 | r-3 | 1107524 | 1108007 | 160 | RhaT | GER | Permeases of the drug/metabolite |
| | | | | | | | | | | | | transporter (DMT) superfamily |
| | | | | | | | | | | | | COG0697 RhaT |
| 1179 | 1108559 | 1110253 | 980819 | 979125 | 1985 | r-3 | 1108979 | 1109507 | 38 | — | S | Uncharacterized archaeal |
| | | | | | | | | | | | | coiled-coil domain |
| 1180 | 1110347 | 1111819 | 979031 | 977559 | 566 | f-2 | 1110839 | 1111814 | 442 | — | R | Exopolyphosphatase-related |
| | | | | | | | | | | | | proteins |
| 1181 | 1111862 | 1112080 | 977516 | 977298 | 1984 | r-3 | 1111871 | 1112075 | 97 | — | S | Uncharacterized ACR |
| 1182 | 1112624 | 1113001 | 976754 | 976377 | 1983 | r-3 | 1112627 | 1112996 | 204 | — | K | Transcriptional regulator of a |
| | | | | | | | | | | | | riboflavin/FAD biosynthetic |
| | | | | | | | | | | | | operon |
| 1183 | 1113459 | 1114217 | 975919 | 975161 | 930 | f-3 | 1113468 | 1114212 | 405 | SmtA | QR | SAM-dependent |
| | | | | | | | | | | | | methyltransferases COG0500 |
| | | | | | | | | | | | | SmtA |
| 1184 | 1114407 | 1117082 | 974971 | 972296 | 931 | f-3 | 1114416 | 1117071 | 1584 | ValS | J | Valyl-tRNA synthetase |
| 1185 | 1117577 | 1118029 | 971801 | 971349 | 567 | f-2 | 1117577 | 1118027 | 289 | RPS19A | J | Ribosomal protein S19E (S16A) |
| 1186 | 1118086 | 1119738 | 971292 | 969640 | 1270 | r-1 | 1119022 | 1119301 | 33 | — | R | Predicted metal-dependent RNase |
| 1187 | 1119840 | 1120178 | 969538 | 969200 | 932 | f-3 | 1119840 | 1120176 | 182 | — | R | DNA-binding protein |
| 1188 | 1120172 | 1120504 | 969206 | 968874 | 568 | f-2 | 1120172 | 1120442 | 30 | Lig | L | NAD-dependent DNA ligase |
| | | | | | | | | | | | | (contains BRCT domain type II) |
| 1189 | 1120505 | 1121407 | 968873 | 967971 | 569 | f-2 | 1120514 | 1121402 | 506 | SUA7 | K | Transcription initiation factor IIB |
| 1190 | 1121408 | 1122520 | 967970 | 966858 | 1982 | r-3 | 1121498 | 1122512 | 451 | Exo | L | 5′-3′ exonuclease (including |
| | | | | | | | | | | | | N-terminal domain of PolI) |
| 1191 | 1122517 | 1123746 | 966861 | 965632 | 1269 | r-1 | 1122544 | 1123741 | 591 | MoeA | H | Molybdopterin biosynthesis |
| | | | | | | | | | | | | enzyme |
| 1192 | 1123810 | 1124472 | 965568 | 964906 | 204 | f-1 | 1123828 | 1124440 | 299 | — | J | Predicted subunit of |
| | | | | | | | | | | | | tRNA(5-methylaminomethyl-2-thiouridylate) |
| | | | | | | | | | | | | methyltransferase |
| 1193 | 1124569 | 1125114 | 964809 | 964264 | 1268 | r-1 | 1124614 | 1125112 | 284 | ThiJ | R | Putative intracellular |
| | | | | | | | | | | | | protease/amidase |
| 1194 | 1125170 | 1125637 | 964208 | 963741 | 1981 | r-3 | 1125197 | 1125635 | 194 | Lrp | K | Transcriptional regulators |
| 1195 | 1125727 | 1126902 | 963651 | 962476 | 205 | f-1 | 1125736 | 1126900 | 666 | — | R | Predicted GTPase |
| 1196 | 1128262 | 1128495 | 961116 | 960883 | 1267 | r-1 | 1128271 | 1128466 | 102 | Upp | F | Uracil phosphoribosyltransferase |
| 1197 | 1128535 | 1128972 | 960843 | 960406 | 1266 | r-1 | 1128544 | 1128967 | 233 | Upp | F | Uracil phosphoribosyltransferase |
| 1198 | 1129034 | 1130476 | 960344 | 958902 | 1980 | r-3 | 1129043 | 1130459 | 688 | NorM | Q | Na+-driven multidrug efflux |
| | | | | | | | | | | | | pump |
| 1199 | 1130532 | 1131944 | 958846 | 957434 | 1660 | r-2 | 1130547 | 1131936 | 587 | NorM | Q | Na+-driven multidrug efflux |
| | | | | | | | | | | | | pump |
| 1200 | 1132006 | 1132422 | 957372 | 956956 | 1265 | r-1 | 1132006 | 1132420 | 200 | — | R | Predicted nucleic acid-binding |
| | | | | | | | | | | | | protein |
| 1201 | 1132432 | 1132659 | 956946 | 956719 | 1264 | r-1 | 1132438 | 1132630 | 69 | AbrB | K | Regulators of |
| | | | | | | | | | | | | stationary/sporulation gene |
| | | | | | | | | | | | | expression |
| 1202 | 1132744 | 1135125 | 956634 | 954253 | 1263 | r-1 | 1132753 | 1135042 | 1319 | PpsA | G | Phosphoenolpyruvate |
| | | | | | | | | | | | | synthase/pyruvate phosphate |
| | | | | | | | | | | | | dikinase |
| 1203 | 1135154 | 1135213 | 954224 | 954165 | 570 | f-2 | | | | | | |
| 1204 | 1135255 | 1137741 | 954123 | 951637 | 1262 | r-1 | 1136407 | 1136665 | 50 | — | R | Uncharacterized membrane |
| | | | | | | | | | | | | protein |
| 1205 | 1138634 | 1138867 | 950744 | 950511 | 571 | f-2 | | | | | | |
| 1206 | 1139159 | 1142494 | 950219 | 946884 | 572 | f-2 | 1141529 | 1141982 | 35 | SrmB | LKJ | Superfamily II DNA and RNA |
| | | | | | | | | | | | | helicases COG0513 SrmB |
| 1207 | 1142537 | 1142836 | 946841 | 946542 | 573 | f-2 | 1142540 | 1142834 | 165 | — | S | Uncharacterized ACR |
| 1208 | 1142873 | 1144054 | 946505 | 945324 | 574 | f-2 | 1142891 | 1144034 | 531 | NMD3 | J | NMD protein affecting ribosome |
| | | | | | | | | | | | | stability and mRNA decay |
| 1209 | 1144054 | 1145121 | 945324 | 944257 | 206 | f-1 | 1144054 | 1145044 | 228 | — | C | Predicted butyrate kinase |
| 1210 | 1145177 | 1146514 | 944201 | 942864 | 575 | f-2 | 1145180 | 1146512 | 743 | HcaD | R | Uncharacterized |
| | | | | | | | | | | | | NAD(FAD)-dependent |
| | | | | | | | | | | | | dehydrogenases |
| 1211 | 1146553 | 1148040 | 942825 | 941338 | 207 | f-1 | 1146592 | 1148029 | 539 | Kch | P | Kef-type K+ transport systems |
| 1212 | 1148086 | 1149231 | 941292 | 940147 | 208 | f-1 | 1148095 | 1149226 | 549 | — | S | Uncharacterized ACR |
| 1213 | 1150093 | 1151094 | 939285 | 938284 | 209 | f-1 | 1150891 | 1151044 | 33 | AsnB | E | Asparagine synthase |
| | | | | | | | | | | | | (glutamine-hydrolyzing) |
| 1214 | 1151091 | 1154534 | 938287 | 934844 | 1659 | r-2 | 1152798 | 1154532 | 958 | InfB | J | Translation initiation factor 2 |
| | | | | | | | | | | | | (GTPase) |
| 1215 | 1155108 | 1155464 | 934270 | 933914 | 933 | f-3 | 1155324 | 1155450 | 29 | NhaB | P | Na+/H+ antiporter |
| 1216 | 1155466 | 1155999 | 933912 | 933379 | 1261 | r-1 | 1155487 | 1155940 | 256 | Ndk | F | Nucleoside diphosphate kinase |
| 1217 | 1157418 | 1157627 | 931960 | 931751 | 1658 | r-2 | 1157424 | 1157625 | 136 | RPL24A | J | Ribosomal protein L24E |
| 1218 | 1157624 | 1157836 | 931754 | 931542 | 1979 | r-3 | 1157630 | 1157792 | 77 | RPS28A | J | Ribosomal protein S28E/S33 |
| 1219 | 1157916 | 1158293 | 931462 | 931085 | 1657 | r-2 | 1157922 | 1158291 | 226 | RPL8A | J | Ribosomal protein HS6-type |
| | | | | | | | | | | | | (S12/L30/L7a) |
| 1220 | 1158361 | 1159554 | 931017 | 929824 | 1260 | r-1 | 1158373 | 1159537 | 321 | RAD55 | T | RecA-superfamily ATPases |
| | | | | | | | | | | | | implicated in signal transduction |
| 1221 | 1159686 | 1160306 | 929692 | 929072 | 1656 | r-2 | 1159695 | 1160295 | 277 | — | S | Uncharacterized archaeal |
| | | | | | | | | | | | | Zn-finger family |
| 1222 | 1161299 | 1161634 | 928079 | 927744 | 1978 | r-3 | 1161314 | 1161596 | 128 | — | R | Uncharacterized ATPases of the |
| | | | | | | | | | | | | AAA superfamily |
| 1223 | 1161690 | 1163606 | 927688 | 925772 | 1655 | r-2 | 1162347 | 1163139 | 448 | CysH | EH | 3′-phosphoadenosine |
| | | | | | | | | | | | | 5′-phosphosulfate sulfotransferase |
| | | | | | | | | | | | | (PAPS reductase)/FAD synthetase |
| | | | | | | | | | | | | and related enzymes COG0175 |
| | | | | | | | | | | | | CysH |
| 1224 | 1163703 | 1164656 | 925675 | 924722 | 934 | f-3 | 1163775 | 1164561 | 466 | HflC | O | Membrane protease subunits |
| 1225 | 1164663 | 1165082 | 924715 | 924296 | 935 | f-3 | 1164663 | 1165077 | 148 | — | NO | Membrane protein implicated in |
| | | | | | | | | | | | | regulation of membrane protease |
| | | | | | | | | | | | | activity COG1585 - |
| 1226 | 1165121 | 1165714 | 924257 | 923664 | 576 | f-2 | 1165130 | 1165706 | 202 | Tdk | F | Thymidine kinase |
| 1227 | 1165724 | 1165948 | 923654 | 923430 | 577 | f-2 | 1165793 | 1165946 | 81 | RPL39 | J | Ribosomal protein L39E |
| 1228 | 1165959 | 1166231 | 923419 | 923147 | 936 | f-3 | 1165959 | 1166217 | 136 | RPL31A | J | Ribosomal protein L31E |
| 1229 | 1166259 | 1166948 | 923119 | 922430 | 937 | f-3 | 1166259 | 1166943 | 329 | TIF6 | J | Eukaryotic translation initiation |
| | | | | | | | | | | | | factor 6 (EIF6) |
| 1230 | 1167001 | 1167234 | 922377 | 922144 | 210 | f-1 | 1167001 | 1167232 | 91 | RPL20A | J | Ribosomal protein L20A (L18A) |
| 1231 | 1167503 | 1168657 | 921875 | 920721 | 1977 | r-3 | 1167503 | 1168655 | 468 | RfaG | M | Predicted glycosyltransferases |
| 1232 | 1168678 | 1169472 | 920700 | 919906 | 1259 | r-1 | 1168747 | 1169299 | 87 | UbiA | H | 4-hydroxybenzoate |
| | | | | | | | | | | | | polyprenyltransferase |
| 1233 | 1169576 | 1171024 | 919802 | 918354 | 1976 | r-3 | 1169591 | 1170995 | 718 | GltD | ER | NADPH-dependent glutamate |
| | | | | | | | | | | | | synthase beta chain and related |
| | | | | | | | | | | | | oxidoreductases COG0493 GltD |
| 1234 | 1171021 | 1171905 | 918357 | 917473 | 1258 | r-1 | 1171021 | 1171894 | 441 | UbiB | HC | 2-polyprenylphenol hydroxylase |
| | | | | | | | | | | | | and related flavodoxin |
| | | | | | | | | | | | | oxidoreductases˜ COG0543 UbiB |
| 1235 | 1172047 | 1172277 | 917331 | 917101 | 211 | f-1 | 1172059 | 1172224 | 35 | PotE | E | Amino acid transporters |
| 1236 | 1172264 | 1173025 | 917114 | 916353 | 1975 | r-3 | 1172264 | 1173023 | 330 | GCD14 | J | Predicted SAM-dependent |
| | | | | | | | | | | | | methyltransferase involved in |
| | | | | | | | | | | | | tRNA-Met maturation |
| 1237 | 1173022 | 1173636 | 916356 | 915742 | 1257 | r-1 | 1173112 | 1173265 | 32 | NemA | C | NADH:flavin oxidoreductases |
| 1238 | 1173687 | 1174022 | 915691 | 915356 | 938 | f-3 | 1173699 | 1173975 | 120 | SEC65 | N | Signal recognition particle 19 kDa |
| | | | | | | | | | | | | protein |
| 1239 | 1174023 | 1174274 | 915355 | 915104 | 1654 | r-2 | 1174041 | 1174227 | 47 | Lrp | K | Transcriptional regulators |
| 1240 | 1174284 | 1174388 | 915094 | 914990 | 1653 | r-2 | | | | | | |
| 1241 | 1174493 | 1177870 | 914885 | 911508 | 578 | f-2 | 1174493 | 1175486 | 467 | — | R | Predicted helicases |
| 1242 | 1178296 | 1178862 | 911082 | 910516 | 212 | f-1 | 1178305 | 1178854 | 198 | CoaE | H | Dephospho-CoA kinase |
| 1243 | 1178840 | 1179322 | 910538 | 910056 | 579 | f-2 | 1178906 | 1179320 | 232 | — | S | Uncharacterized ArCR |
| 1244 | 1179335 | 1180606 | 910043 | 908772 | 1974 | r-3 | 1179335 | 1180583 | 409 | NatB | C | ABC-type Na+ efflux pump |
| 1245 | 1180603 | 1181361 | 908775 | 908017 | 1256 | r-1 | 1180609 | 1181317 | 376 | CcmA | Q | ABC-type multidrug transport |
| | | | | | | | | | | | | system |
| 1246 | 1181719 | 1181916 | 907659 | 907462 | 1255 | r-1 | 1181776 | 1181914 | 82 | — | K | Predicted transcriptional |
| | | | | | | | | | | | | regulators |
| 1247 | 1182281 | 1182673 | 907097 | 906705 | 1973 | r-3 | 1182308 | 1182527 | 32 | CbiM | H | Cobalamin biosynthesis protein |
| | | | | | | | | | | | | CbiM |
| 1248 | 1182899 | 1183855 | 906479 | 905523 | 580 | f-2 | 1183346 | 1183523 | 33 | — | S | Uncharacterized BCR |
| 1249 | 1184435 | 1184731 | 904943 | 904647 | 1972 | r-3 | 1184531 | 1184717 | 29 | InfB | J | Translation initiation factor 2 |
| | | | | | | | | | | | | (GTPase) |
| 1250 | 1184832 | 1185752 | 904546 | 903626 | 1652 | r-2 | 1185366 | 1185510 | 32 | MurG | M | UDP-N-acetylglucosamine:LPS |
| | | | | | | | | | | | | N-acetylglucosamine transferase |
| 1251 | 1186264 | 1186524 | 903114 | 902854 | 1254 | r-1 | | | | | | |
| 1252 | 1187372 | 1187653 | 902006 | 901725 | 1971 | r-3 | | | | | | |
| 1253 | 1188250 | 1188906 | 901128 | 900472 | 1253 | r-1 | 1188304 | 1188649 | 36 | GyrA | L | DNA gyrase (topoisomerase II) A |
| | | | | | | | | | | | | subunit |
| 1254 | 1188962 | 1189906 | 900416 | 899472 | 1970 | r-3 | 1188983 | 1189385 | 35 | GcvP | E | Glycine cleavage system protein |
| | | | | | | | | | | | | P (pyridoxal-binding) |
| 1255 | 1189940 | 1190062 | 899438 | 899316 | 1969 | r-3 | 1190009 | 1190057 | 26 | MalF | G | ABC-type sugar transport systems |
| 1256 | 1191309 | 1191941 | 898069 | 897437 | 1651 | r-2 | 1191474 | 1191585 | 29 | MalK | G | ABC-type |
| | | | | | | | | | | | | suger/spermidine/putrescine/iron/thiamine |
| | | | | | | | | | | | | transport systems |
| 1257 | 1195773 | 1195841 | 893605 | 893537 | 939 | f-3 | | | | | | |
| 1258 | 1196421 | 1196939 | 892957 | 892439 | 1650 | r-2 | 1196724 | 1196871 | 33 | Gmk | F | Guanylate kinase |
| 1259 | 1197121 | 1197330 | 892257 | 892048 | 1252 | r-1 | 1197211 | 1197322 | 30 | FecB | P | ABC-type Fe3+-siderophores |
| | | | | | | | | | | | | transport systems |
| 1260 | 1197327 | 1197827 | 892051 | 891551 | 1649 | r-2 | 1197588 | 1197801 | 31 | UvrA | L | Excinuclease ATPase subunit |
| 1261 | 1197859 | 1198116 | 891519 | 891262 | 1251 | r-1 | 1197958 | 1198078 | 26 | — | T | SH3 domain protein |
| 1262 | 1198129 | 1198395 | 891249 | 890983 | 1250 | r-1 | 1198141 | 1198300 | 30 | AlkA | L | 3-Methyladenine DNA |
| | | | | | | | | | | | | glycosylase |
| 1263 | 1198775 | 1198969 | 890603 | 890409 | 581 | f-2 | 1198808 | 1198907 | 33 | AbrB | K | Regulators of |
| | | | | | | | | | | | | stationary/sporulation gene |
| | | | | | | | | | | | | expression |
| 1264 | 1199210 | 1199536 | 890168 | 889842 | 1968 | r-3 | 1199303 | 1199522 | 31 | Smc | D | Chromosome segregation |
| | | | | | | | | | | | | ATPases |
| 1265 | 1200465 | 1200542 | 888913 | 888836 | 940 | f-3 | | | | | | |
| 1266 | 1202741 | 1204258 | 886637 | 885120 | 1967 | r-3 | 1202750 | 1204256 | 910 | GcvP | E | Glycine cleavage system protein |
| | | | | | | | | | | | | P (pyridoxal-binding) |
| 1267 | 1204260 | 1205624 | 885118 | 883754 | 1648 | r-2 | 1204269 | 1205598 | 727 | GcvP | E | Glycine cleavage system protein |
| | | | | | | | | | | | | P (pyridoxal-binding) |
| 1268 | 1205780 | 1207075 | 883598 | 882303 | 1966 | r-3 | 1206086 | 1206206 | 32 | FliI | N | Flagellar biosynthesis/type III |
| | | | | | | | | | | | | secretory pathway ATPase |
| 1269 | 1207362 | 1207793 | 882016 | 881585 | 941 | f-3 | 1207452 | 1207662 | 32 | PorG | C | Pyruvate:ferredoxin |
| | | | | | | | | | | | | oxidoreductase and related |
| | | | | | | | | | | | | 2-oxoacid:ferredoxin |
| | | | | | | | | | | | | oxidoreductases |
| 1270 | 1207790 | 1208482 | 881588 | 880896 | 582 | f-2 | 1207790 | 1208444 | 312 | — | R | Predicted hydrolases of the HAD |
| | | | | | | | | | | | | superfamily |
| 1271 | 1209464 | 1210141 | 879914 | 879237 | 583 | f-2 | 1209512 | 1210130 | 239 | — | R | Predicted ICC-like |
| | | | | | | | | | | | | phosphoesterases |
| 1272 | 1210174 | 1210893 | 879204 | 878485 | 213 | f-1 | 1210189 | 1210885 | 275 | — | S | Uncharacterized membrane |
| | | | | | | | | | | | | protein |
| 1273 | 1210890 | 1211111 | 878488 | 878267 | 942 | f-3 | 1210890 | 1211058 | 33 | Smc | D | Chromosome segregation |
| | | | | | | | | | | | | ATPases |
| 1274 | 1211128 | 1211787 | 878250 | 877591 | 214 | f-1 | 1211251 | 1211392 | 33 | XerC | L | Integrase |
| 1275 | 1211850 | 1212755 | 877528 | 876623 | 943 | f-3 | 1211949 | 1212030 | 33 | FecB | P | ABC-type Fe3+-siderophores |
| | | | | | | | | | | | | transport systems |
| 1276 | 1212760 | 1213104 | 876618 | 876274 | 1249 | r-1 | 1212775 | 1212850 | 36 | NuoG | C | NADH |
| | | | | | | | | | | | | dehydrogenase/NADH:ubiquinone |
| | | | | | | | | | | | | oxidoreductase 75 kD subunit |
| | | | | | | | | | | | | (chain G) |
| 1277 | 1213101 | 1214369 | 876277 | 875009 | 1647 | r-2 | 1213137 | 1214364 | 572 | HcaD | R | Uncharacterized |
| | | | | | | | | | | | | NAD(FAD)-dependent |
| | | | | | | | | | | | | dehydrogenases |
| 1278 | 1214366 | 1215214 | 875012 | 874164 | 1965 | r-3 | 1214366 | 1215206 | 475 | — | R | Predicted dehydrogenase |
| 1279 | 1215250 | 1215861 | 874128 | 873517 | 1248 | r-1 | 1215259 | 1215793 | 272 | — | R | Predicted dehydrogenase |
| 1280 | 1217374 | 1217490 | 872004 | 871888 | 215 | f-1 | 1217374 | 1217461 | 26 | — | R | CBS domains |
| 1281 | 1219074 | 1219190 | 870304 | 870188 | 944 | f-3 | | | | | | |
| 1282 | 1219197 | 1220690 | 870181 | 868688 | 1646 | r-2 | 1219197 | 1220676 | 790 | GlpK | C | Glycerol kinase |
| 1283 | 1220740 | 1221513 | 868638 | 867865 | 1247 | r-1 | 1220767 | 1221511 | 387 | UgpQ | C | Glycerophosphoryl diester |
| | | | | | | | | | | | | phosphodiesterase |
| 1284 | 1221503 | 1222201 | 867875 | 867177 | 1964 | r-3 | 1221509 | 1222124 | 92 | UgpQ | C | Glycerophosphoryl diester |
| | | | | | | | | | | | | phosphodiesterase |
| 1285 | 1222282 | 1223655 | 867096 | 865723 | 216 | f-1 | 1222297 | 1223653 | 582 | | | |
| 1286 | 1223758 | 1225113 | 865620 | 864265 | 217 | f-1 | 1223821 | 1225096 | 605 | | | |
| 1287 | 1225113 | 1225991 | 864265 | 863387 | 945 | f-3 | 1225179 | 1225965 | 379 | — | R | Hydrolases of the alpha/beta |
| | | | | | | | | | | | | superfamily |
| 1288 | 1226169 | 1226861 | 863209 | 862517 | 946 | f-3 | 1226217 | 1226835 | 187 | — | R | Predicted deacetylase |
| 1289 | 1227076 | 1227702 | 862302 | 861676 | 1246 | r-1 | 1227088 | 1227691 | 290 | Tmk | F | Thymidylate kinase |
| 1290 | 1227756 | 1228466 | 861622 | 860912 | 1645 | r-2 | 1227756 | 1228449 | 365 | CpsG | G | Phosphomannomutase |
| 1291 | 1228622 | 1230493 | 860756 | 858885 | 584 | f-2 | 1228631 | 1230482 | 1088 | PckA | C | Phosphoenolpyruvate |
| | | | | | | | | | | | | carboxykinase (GTP) |
| 1292 | 1230580 | 1233081 | 858798 | 856297 | 218 | f-1 | 1230592 | 1233058 | 1177 | GlgP | G | Glucan phosphorylase |
| 1293 | 1233236 | 1234546 | 856142 | 854832 | 585 | f-2 | 1233818 | 1234340 | 44 | — | R | Na+-dependent transporters of the |
| | | | | | | | | | | | | SNF family |
| 1294 | 1234563 | 1236284 | 854815 | 853094 | 1644 | r-2 | 1234569 | 1236282 | 931 | GlnS | J | Glutamyl- and glutaminyl-tRNA |
| | | | | | | | | | | | | synthetases |
| 1295 | 1236584 | 1237978 | 852794 | 851400 | 1963 | r-3 | 1236584 | 1237964 | 630 | DnaG | L | DNA primase (bacterial type) |
| 1296 | 1237975 | 1238376 | 851403 | 851002 | 1245 | r-1 | 1237975 | 1238371 | 177 | — | L | Small primase-like proteins |
| | | | | | | | | | | | | (Toprim domain) |
| 1297 | 1238433 | 1239707 | 850945 | 849671 | 1643 | r-2 | 1238439 | 1239702 | 677 | — | C | Fe—S oxidoreductases family 2 |
| 1298 | 1239791 | 1239994 | 849587 | 849384 | 1962 | r-3 | 1239791 | 1239992 | 92 | HHT1 | L | Histones H3 and H4 (Histon |
| | | | | | | | | | | | | A&B) |
| 1299 | 1240125 | 1240214 | 849253 | 849164 | 947 | f-3 | | | | | | |
| 1300 | 1240801 | 1240896 | 848577 | 848482 | 1244 | r-1 | | | | | | |
| 1301 | 1241592 | 1241921 | 847786 | 847457 | 1642 | r-2 | 1241601 | 1241769 | 98 | RPP1A | J | Ribosomal protein |
| | | | | | | | | | | | | L12E/L44/L45/RPP1/RPP2 |
| 1302 | 1241983 | 1243014 | 847395 | 846364 | 1243 | r-1 | 1241992 | 1243009 | 402 | RplJ | J | Ribosomal protein L10 |
| 1303 | 1243011 | 1243661 | 846367 | 845717 | 1641 | r-2 | 1243011 | 1243656 | 327 | RplA | J | Ribosomal protein L1 |
| 1304 | 1243692 | 1243778 | 845686 | 845600 | 1640 | r-2 | | | | | | |
| 1305 | 1243775 | 1244272 | 845603 | 845106 | 1961 | r-3 | 1243781 | 1244264 | 223 | RplK | J | Ribosomal protein L11 |
| 1306 | 1244307 | 1244765 | 845071 | 844613 | 1639 | r-2 | 1244316 | 1244763 | 257 | NusG | K | Transcription antiterminator |
| 1307 | 1244788 | 1244973 | 844590 | 844405 | 1242 | r-1 | 1244788 | 1244893 | 49 | Sss1 | N | Protein translocase subunit Sss1 |
| 1308 | 1245004 | 1246125 | 844374 | 843253 | 1241 | r-1 | 1245004 | 1246123 | 536 | FtsZ | D | Cell division GTPase |
| 1309 | 1246241 | 1247059 | 843137 | 842319 | 1960 | r-3 | 1246241 | 1247057 | 446 | — | S | Uncharacterized ArCR |
| 1310 | 1247369 | 1248709 | 842009 | 840669 | 1959 | r-3 | 1247567 | 1248584 | 105 | FucI | G | L-fucose isomerase and related |
| | | | | | | | | | | | | proteins |
| 1311 | 1248621 | 1249226 | 840757 | 840152 | 948 | f-3 | 1248630 | 1249179 | 314 | — | S | Uncharacterized ACR |
| 1312 | 1250499 | 1251188 | 838879 | 838190 | 1638 | r-2 | 1250499 | 1251186 | 333 | RpiA | G | Ribose 5-phosphate isomerase |
| 1313 | 1251193 | 1251561 | 838185 | 837817 | 1240 | r-1 | 1251223 | 1251379 | 29 | SUL1 | P | Sulfate permease and related |
| | | | | | | | | | | | | transporters (MFS superfamily) |
| 1314 | 1251632 | 1253578 | 837746 | 835800 | 1958 | r-3 | 1251632 | 1253576 | 1146 | — | R | Predicted metal-dependent RNase |
| 1315 | 1253588 | 1253788 | 835790 | 835590 | 1957 | r-3 | 1253588 | 1253750 | 74 | HslV | O | Proteasome protease subunit |
| 1316 | 1254304 | 1255470 | 835074 | 833908 | 219 | f-1 | 1254304 | 1254742 | 37 | AdkA | F | Archaeal adenylate kinase |
| 1317 | 1255582 | 1256436 | 833796 | 832942 | 1239 | r-1 | 1255594 | 1256431 | 481 | GdhA | E | Glutamate dehydrogenase/leucine |
| | | | | | | | | | | | | dehydrogenase |
| 1318 | 1256379 | 1256846 | 832999 | 832532 | 1637 | r-2 | 1256379 | 1256808 | 256 | GdhA | E | Glutamate dehydrogenase/leucine |
| | | | | | | | | | | | | dehydrogenase |
| 1319 | 1257402 | 1258961 | 831976 | 830417 | 949 | f-3 | 1257411 | 1258956 | 828 | — | R | Na+-dependent transporters of the |
| | | | | | | | | | | | | SNF family |
| 1320 | 1258972 | 1259079 | 830406 | 830299 | 220 | f-1 | 1258972 | 1259038 | 26 | SurA | O | Parvulin-like peptidyl-prolyl |
| | | | | | | | | | | | | isomerase |
| 1321 | 1259124 | 1259858 | 830254 | 829520 | 950 | f-3 | 1259490 | 1259712 | 33 | SgaT | S | Uncharacterized BCR |
| 1322 | 1259855 | 1260172 | 829523 | 829206 | 1956 | r-3 | 1259855 | 1260143 | 100 | GlnK | E | Nitrogen regulatory protein PII |
| 1323 | 1260229 | 1262256 | 829149 | 827122 | 1238 | r-1 | 1260229 | 1261816 | 720 | — | S | Uncharacterized ACR |
| 1324 | 1262388 | 1262651 | 826990 | 826727 | 951 | f-3 | | | | | | |
| 1325 | 1262709 | 1264661 | 826669 | 824717 | 952 | f-3 | 1262709 | 1264623 | 880 | — | K | Predicted RNA-binding protein |
| | | | | | | | | | | | | homologous to eukaryotic snRNP |
| 1326 | 1264658 | 1265074 | 824720 | 824304 | 1955 | r-3 | 1264658 | 1265072 | 231 | NikR | K | Predicted transcriptional |
| | | | | | | | | | | | | regulators containing the |
| | | | | | | | | | | | | CopG/Arc/MetJ DNA-binding |
| | | | | | | | | | | | | domain and a metal-binding |
| | | | | | | | | | | | | domain |
| 1327 | 1265145 | 1265591 | 824233 | 823787 | 953 | f-3 | 1265307 | 1265409 | 29 | HsdR | L | Restriction enzymes type I |
| | | | | | | | | | | | | helicase subunits and related |
| | | | | | | | | | | | | helicases |
| 1328 | 1265593 | 1266390 | 823785 | 822988 | 221 | f-1 | 1266082 | 1266259 | 31 | UgpB | G | Sugar-binding periplasmic |
| | | | | | | | | | | | | proteins/domains |
| 1329 | 1266750 | 1267955 | 822628 | 821423 | 954 | f-3 | 1266750 | 1267941 | 638 | — | R | Predicted alternative tryptophan |
| | | | | | | | | | | | | synthase beta-subunit (paralog of |
| | | | | | | | | | | | | TrpB) |
| 1330 | 1268130 | 1269137 | 821248 | 820241 | 1636 | r-2 | 1268130 | 1269132 | 523 | Asd | E | Aspartate-semialdehyde |
| | | | | | | | | | | | | dehydrogenase |
| 1331 | 1269155 | 1270042 | 820223 | 819336 | 1954 | r-3 | 1269167 | 1270037 | 312 | ThrB | E | Homoserine kinase |
| 1332 | 1270062 | 1271162 | 819316 | 818216 | 1635 | r-2 | 1270083 | 1271085 | 242 | LysC | E | Aspartokinases |
| 1333 | 1271162 | 1272181 | 818216 | 817197 | 1953 | r-3 | 1271171 | 1272170 | 567 | MetE | E | Methionine synthase II |
| | | | | | | | | | | | | (cobalamin-independent) |
| 1334 | 1272174 | 1273103 | 817204 | 816275 | 1634 | r-2 | 1272174 | 1273068 | 462 | MetE | E | Methionine synthase II |
| | | | | | | | | | | | | (cobalamin-independent) |
| 1335 | 1273100 | 1274158 | 816278 | 815220 | 1952 | r-3 | 1273109 | 1274144 | 296 | MetF | E | 5 |
| 1336 | 1274151 | 1275281 | 815227 | 814097 | 1633 | r-2 | 1274154 | 1275270 | 484 | MetC | E | Cystathionine |
| | | | | | | | | | | | | beta-lyases/cystathionine |
| | | | | | | | | | | | | gamma-synthases |
| 1337 | 1275461 | 1276135 | 813917 | 813243 | 1951 | r-3 | 1275509 | 1276133 | 239 | — | J | Ribonuclease P subunit Rpp30 |
| 1338 | 1276120 | 1276689 | 813258 | 812689 | 1237 | r-1 | 1276240 | 1276684 | 210 | — | S | Uncharacterized ArCR |
| 1339 | 1276727 | 1278301 | 812651 | 811077 | 1950 | r-3 | 1276892 | 1278245 | 140 | MdlB | Q | ABC-type multidrug/protein/lipid |
| | | | | | | | | | | | | transport system |
| 1340 | 1278636 | 1279535 | 810742 | 809843 | 1632 | r-2 | 1279008 | 1279143 | 32 | LivG | E | ABC-type branched-chain amino |
| | | | | | | | | | | | | acid transport systems |
| 1341 | 1279958 | 1280587 | 809420 | 808791 | 1949 | r-3 | 1279958 | 1280585 | 320 | RPL15A | J | Ribosomal protein L15E |
| 1342 | 1280661 | 1281740 | 808717 | 807638 | 955 | f-3 | 1280670 | 1281729 | 544 | PepP | E | Xaa-Pro aminopeptidase |
| 1343 | 1281804 | 1282397 | 807574 | 806981 | 1631 | r-2 | 1281804 | 1282356 | 295 | — | S | Uncharacterized ACR |
| 1344 | 1282384 | 1283034 | 806994 | 806344 | 1236 | r-1 | 1282417 | 1283032 | 320 | — | S | Uncharacterized ACR |
| 1345 | 1283055 | 1284251 | 806323 | 805127 | 1630 | r-2 | 1283205 | 1284249 | 291 | — | P | Permease |
| 1346 | 1284667 | 1285869 | 804711 | 803509 | 222 | f-1 | 1285024 | 1285702 | 45 | — | S | Uncharacterized archaeal |
| | | | | | | | | | | | | coiled-coil domain |
| 1347 | 1285975 | 1289823 | 803403 | 799555 | 223 | f-1 | 1288144 | 1289155 | 166 | — | L | Type II restriction enzyme |
| 1348 | 1290019 | 1292922 | 799359 | 796456 | 224 | f-1 | 1290019 | 1292920 | 1723 | LeuS | J | Leucyl-tRNA synthetase |
| 1349 | 1293396 | 1293860 | 795982 | 795518 | 1629 | r-2 | 1293606 | 1293774 | 30 | ErfK | S | Uncharacterized BCR |
| 1350 | 1294892 | 1295722 | 794486 | 793656 | 586 | f-2 | 1295033 | 1295336 | 44 | SmtA | QR | SAM-dependent |
| | | | | | | | | | | | | methyltransferases COG0500 |
| | | | | | | | | | | | | SmtA |
| 1351 | 1295748 | 1297115 | 793630 | 792263 | 956 | f-3 | 1295760 | 1297065 | 379 | — | R | Predicted ATPase of the AAA |
| | | | | | | | | | | | | superfamily |
| 1352 | 1297116 | 1298444 | 792262 | 790934 | 1628 | r-2 | 1297161 | 1298433 | 640 | ArgE | E | Acetylornithine |
| | | | | | | | | | | | | deacetylase/Succinyl-diaminopimelate |
| | | | | | | | | | | | | desuccinylase and related |
| | | | | | | | | | | | | deacylases |
| 1353 | 1298625 | 1298846 | 790753 | 790532 | 957 | f-3 | 1298646 | 1298805 | 27 | PanC | H | Panthothenate synthetase |
| 1354 | 1299189 | 1300220 | 790189 | 789158 | 1627 | r-2 | 1299189 | 1300218 | 487 | IspA | H | Geranylgeranyl pyrophosphate |
| | | | | | | | | | | | | synthase |
| 1355 | 1300290 | 1301624 | 789088 | 787754 | 1626 | r-2 | 1300290 | 1301619 | 738 | — | R | Predicted hydrolase of the |
| | | | | | | | | | | | | metallo-beta-lactamase |
| | | | | | | | | | | | | superfamily |
| 1356 | 1301759 | 1302934 | 787619 | 786444 | 1948 | r-3 | 1301825 | 1302926 | 586 | LldD | C | L-lactate dehydrogenase |
| | | | | | | | | | | | | (FMN-dependent) and related |
| | | | | | | | | | | | | alpha-hydroxy acid |
| | | | | | | | | | | | | dehydrogenases |
| 1357 | 1302931 | 1303617 | 786447 | 785761 | 1235 | r-1 | 1302940 | 1303612 | 268 | RacX | M | Aspartate racemase |
| 1358 | 1303690 | 1304454 | 785688 | 784924 | 1234 | r-1 | 1303699 | 1304449 | 388 | CinA | R | Predicted nucleotide-utilizing |
| | | | | | | | | | | | | enzyme related to |
| | | | | | | | | | | | | molybdopterin-biosynthesis |
| | | | | | | | | | | | | enzyme MoeA |
| 1359 | 1304451 | 1305239 | 784927 | 784139 | 1625 | r-2 | 1304451 | 1305222 | 243 | — | R | Predicted archaeal kinases |
| 1360 | 1305236 | 1306249 | 784142 | 783129 | 1947 | r-3 | 1305251 | 1306247 | 484 | ERG12 | I | Mevalonate kinase |
| 1361 | 1306246 | 1306722 | 783132 | 782656 | 1233 | r-1 | 1306312 | 1306711 | 150 | — | S | Uncharacterized ACR |
| 1362 | 1306665 | 1307039 | 782713 | 782339 | 1624 | r-2 | 1306704 | 1307028 | 107 | — | R | Predicted nucleotidyltransferases |
| 1363 | 1307076 | 1307963 | 782302 | 781415 | 1623 | r-2 | 1307088 | 1307961 | 485 | — | R | Predicted dioxygenase |
| 1364 | 1307989 | 1309053 | 781389 | 780325 | 1232 | r-1 | 1307989 | 1309027 | 408 | ThrC | E | Threonine synthase |
| 1365 | 1309106 | 1309948 | 780272 | 779430 | 587 | f-2 | 1309133 | 1309940 | 284 | Udp | F | Uridine phosphorylase |
| 1366 | 1309950 | 1311020 | 779428 | 778358 | 958 | f-3 | 1310643 | 1311006 | 36 | — | S | Uncharacterized archaeal |
| | | | | | | | | | | | | coiled-coil domain |
| 1367 | 1311965 | 1313317 | 777413 | 776061 | 1946 | r-3 | 1311974 | 1313285 | 489 | HcaD | R | Uncharacterized |
| | | | | | | | | | | | | NAD(FAD)-dependent |
| | | | | | | | | | | | | dehydrogenases |
| 1368 | 1313412 | 1314224 | 775966 | 775154 | 1622 | r-2 | 1313421 | 1314216 | 415 | Pnp | F | Purine nucleoside phosphorylase |
| 1369 | 1315661 | 1315879 | 773717 | 773499 | 1945 | r-3 | 1315679 | 1315763 | 29 | PrmA | J | Ribosomal protein L11 methylase |
| 1370 | 1316041 | 1316151 | 773337 | 773227 | 1231 | r-1 | | | | | | |
| 1371 | 1316410 | 1317765 | 772968 | 771613 | 225 | f-1 | 1316419 | 1317742 | 693 | Ffh | N | Signal recognition particle |
| | | | | | | | | | | | | GTPase |
| 1372 | 1317762 | 1318001 | 771616 | 771377 | 959 | f-3 | 1317765 | 1317993 | 95 | Lrp | K | Transcriptional regulators |
| 1373 | 1317998 | 1318528 | 771380 | 770850 | 588 | f-2 | 1318004 | 1318424 | 189 | — | R | Predicted Fe—S-cluster |
| | | | | | | | | | | | | oxidoreductase |
| 1374 | 1318585 | 1319298 | 770793 | 770080 | 226 | f-1 | 1318585 | 1319296 | 316 | Apt | F | Adenine/guanine |
| | | | | | | | | | | | | phosphoribosyltransferases and |
| | | | | | | | | | | | | related PRPP-binding proteins |
| 1375 | 1319308 | 1319637 | 770070 | 769741 | 227 | f-1 | 1319491 | 1319608 | 29 | SrmB | LKJ | Superfamily II DNA and RNA |
| | | | | | | | | | | | | helicases COG0513 SrmB |
| 1376 | 1319620 | 1320078 | 769758 | 769300 | 1230 | r-1 | 1319629 | 1320064 | 179 | Lrp | K | Transcriptional regulators |
| 1377 | 1321326 | 1322096 | 768052 | 767282 | 960 | f-3 | 1321335 | 1322010 | 346 | ApaH | T | Diadenosine tetraphosphatase and |
| | | | | | | | | | | | | related serine/threonine protein |
| | | | | | | | | | | | | phosphatases |
| 1378 | 1322102 | 1322401 | 767276 | 766977 | 1944 | r-3 | 1322102 | 1322399 | 150 | — | S | Uncharacterized ACR |
| 1379 | 1322840 | 1323004 | 766538 | 766374 | 1943 | r-3 | 1322849 | 1323002 | 105 | RPL40A | J | Ribosomal protein L40E |
| 1380 | 1323183 | 1323788 | 766195 | 765590 | 1621 | r-2 | 1323186 | 1323783 | 368 | RpsB | J | Ribosomal protein S2 |
| 1381 | 1323802 | 1324827 | 765576 | 764551 | 1229 | r-1 | 1323802 | 1324822 | 474 | Eno | G | Enolase |
| 1382 | 1325139 | 1325336 | 764239 | 764042 | 1620 | r-2 | 1325139 | 1325334 | 122 | RPB10 | K | DNA-directed RNA polymerase |
| 1383 | 1325369 | 1325800 | 764009 | 763578 | 1942 | r-3 | 1325393 | 1325798 | 217 | RpsI | J | Ribosomal protein S9 |
| 1384 | 1325787 | 1326215 | 763591 | 763163 | 1619 | r-2 | 1325787 | 1326213 | 254 | RplM | J | Ribosomal protein L13 |
| 1385 | 1326222 | 1326593 | 763156 | 762785 | 1618 | r-2 | 1326231 | 1326591 | 187 | RPL18A | J | Ribosomal protein L18E |
| 1386 | 1326738 | 1327526 | 762640 | 761852 | 1617 | r-2 | 1326747 | 1327521 | 411 | RpoA | K | DNA-directed RNA polymerase |
| | | | | | | | | | | | | alpha subunit/40 kD subunit |
| 1387 | 1327548 | 1327970 | 761830 | 761408 | 1616 | r-2 | 1327548 | 1327944 | 188 | RpsK | J | Ribosomal protein S11 |
| 1388 | 1327967 | 1328509 | 761411 | 760869 | 1941 | r-3 | 1327967 | 1328507 | 239 | RpsD | J | Ribosomal protein S4 and related |
| | | | | | | | | | | | | proteins |
| 1389 | 1328520 | 1329077 | 760858 | 760301 | 1615 | r-2 | 1328637 | 1329075 | 235 | RpsM | J | Ribosomal protein S13 |
| 1390 | 1329084 | 1329671 | 760294 | 759707 | 1614 | r-2 | 1329084 | 1329669 | 327 | RsmC | J | 16S RNA G1207 methylase |
| | | | | | | | | | | | | RsmC |
| 1391 | 1330058 | 1330213 | 759320 | 759165 | 589 | f-2 | | | | | | |
| 1392 | 1330540 | 1331565 | 758838 | 757813 | 1228 | r-1 | 1330549 | 1331551 | 632 | TruB | J | Pseudouridine synthase |
| 1393 | 1331777 | 1332007 | 757601 | 757371 | 1940 | r-3 | 1331810 | 1331987 | 40 | — | S | Uncharacterized ACR |
| 1394 | 1332043 | 1332753 | 757335 | 756625 | 1227 | r-1 | 1332094 | 1332751 | 201 | FabG | QR | Dehydrogenases with different |
| | | | | | | | | | | | | specificities (related to |
| | | | | | | | | | | | | short-chain alcohol |
| | | | | | | | | | | | | dehydrogenases) COG1028 FabG |
| 1395 | 1332861 | 1333112 | 756517 | 756266 | 1613 | r-2 | 1332861 | 1333107 | 142 | RPL14A | J | Ribosomal protein L14E |
| 1396 | 1333113 | 1333694 | 756265 | 755684 | 1612 | r-2 | 1333113 | 1333644 | 327 | Cmk | F | Cytidylate kinase 2 |
| 1397 | 1333706 | 1333999 | 755672 | 755379 | 1939 | r-3 | 1333727 | 1333991 | 175 | RPL34A | J | Ribosomal protein L34E |
| 1398 | 1334020 | 1334550 | 755358 | 754828 | 1226 | r-1 | 1334026 | 1334542 | 194 | — | S | Uncharacterized membrane |
| | | | | | | | | | | | | protein |
| 1399 | 1334537 | 1335136 | 754841 | 754242 | 1938 | r-3 | 1334546 | 1335134 | 290 | AdkA | F | Archaeal adenylate kinase |
| 1400 | 1335210 | 1336667 | 754168 | 752711 | 1611 | r-2 | 1335219 | 1336659 | 665 | SecY | N | Preprotein translocase subunit |
| | | | | | | | | | | | | SecY |
| 1401 | 1336699 | 1337145 | 752679 | 752233 | 1225 | r-1 | 1336699 | 1337143 | 155 | RplO | J | Ribosomal protein L15 |
| 1402 | 1337157 | 1337624 | 752221 | 751754 | 1610 | r-2 | 1337157 | 1337622 | 269 | RpmD | J | Ribosomal protein L30/L7E |
| 1403 | 1337636 | 1338343 | 751742 | 751035 | 1937 | r-3 | 1337648 | 1338341 | 426 | RpsE | J | Ribosomal protein S5 |
| 1404 | 1338340 | 1338954 | 751038 | 750424 | 1224 | r-1 | 1338340 | 1338946 | 302 | RplR | J | Ribosomal protein L18 |
| 1405 | 1338956 | 1339411 | 750422 | 749967 | 1936 | r-3 | 1338959 | 1339409 | 213 | RPL19A | J | Ribosomal protein L19E |
| 1406 | 1339413 | 1339793 | 749965 | 749585 | 1609 | r-2 | 1339473 | 1339791 | 194 | RPL32 | J | Ribosomal protein L32E |
| 1407 | 1339810 | 1340373 | 749568 | 749005 | 1223 | r-1 | 1339810 | 1340371 | 302 | RplF | J | Ribosomal protein L6 |
| 1408 | 1340375 | 1340767 | 749003 | 748611 | 1935 | r-3 | 1340375 | 1340765 | 243 | RpsH | J | Ribosomal protein S8 |
| 1409 | 1340779 | 1340949 | 748599 | 748429 | 1222 | r-1 | 1340779 | 1340947 | 122 | RpsN | J | Ribosomal protein S14 |
| 1410 | 1340951 | 1341502 | 748427 | 747876 | 1934 | r-3 | 1340960 | 1341491 | 307 | RplE | J | Ribosomal protein L5 |
| 1411 | 1341516 | 1342247 | 747862 | 747131 | 1608 | r-2 | 1341516 | 1342245 | 444 | RPS4A | J | Ribosomal protein S4E |
| 1412 | 1342247 | 1342612 | 747131 | 746766 | 1933 | r-3 | 1342247 | 1342574 | 189 | RplX | J | Ribosomal protein L24 |
| 1413 | 1342624 | 1343049 | 746754 | 746329 | 1221 | r-1 | 1342624 | 1343047 | 203 | RplN | J | Ribosomal protein L14 |
| 1414 | 1343053 | 1343406 | 746325 | 745972 | 1220 | r-1 | 1343062 | 1343389 | 195 | RpsQ | J | Ribosomal protein S17 |
| 1415 | 1343394 | 1343660 | 745984 | 745718 | 1607 | r-2 | 1343394 | 1343655 | 127 | POP4 | J | RNAse P protein subunit |
| | | | | | | | | | | | | P29/POP4 |
| 1416 | 1343657 | 1343953 | 745721 | 745425 | 1932 | r-3 | 1343657 | 1343951 | 170 | SUI1 | J | Translation initiation factor |
| | | | | | | | | | | | | (SUI1) |
| 1417 | 1343960 | 1344160 | 745418 | 745218 | 1931 | r-3 | 1343984 | 1344158 | 101 | RpmC | J | Ribosomal protein L29 |
| 1418 | 1344147 | 1344785 | 745231 | 744593 | 1606 | r-2 | 1344156 | 1344729 | 316 | RpsC | J | Ribosomal protein S3 |
| 1419 | 1344782 | 1345252 | 744596 | 744126 | 1930 | r-3 | 1344794 | 1345250 | 241 | RplV | J | Ribosomal protein L22 |
| 1420 | 1345263 | 1345673 | 744115 | 743705 | 1605 | r-2 | 1345281 | 1345671 | 203 | RpsS | J | Ribosomal protein S19 |
| 1421 | 1345670 | 1346398 | 743708 | 742980 | 1929 | r-3 | 1345679 | 1346396 | 438 | RplB | J | Ribosomal protein L2 |
| 1422 | 1346403 | 1346663 | 742975 | 742715 | 1604 | r-2 | 1346403 | 1346661 | 153 | RplW | J | Ribosomal protein L23 |
| 1423 | 1346670 | 1347437 | 742708 | 741941 | 1603 | r-2 | 1346670 | 1347435 | 415 | RplD | J | Ribosomal protein L4 |
| 1424 | 1347448 | 1348488 | 741930 | 740890 | 1219 | r-1 | 1347448 | 1348435 | 509 | RplC | J | Ribosomal protein L3 |
| 1425 | 1348490 | 1349344 | 740888 | 740034 | 1928 | r-3 | 1348574 | 1349333 | 394 | — | S | Uncharacterized ACR |
| 1426 | 1349882 | 1351258 | 739496 | 738120 | 1927 | r-3 | 1349882 | 1351238 | 706 | — | R | Predicted ATPase of the AAA |
| | | | | | | | | | | | | superfamily |
| 1427 | 1351322 | 1352506 | 738056 | 736872 | 1926 | r-3 | 1351358 | 1352504 | 501 | — | L | ATP-dependent DNA ligase |
| 1428 | 1352613 | 1353269 | 736765 | 736109 | 1602 | r-2 | 1352721 | 1353255 | 301 | RplP | J | Ribosomal protein L16/L10E |
| 1429 | 1354574 | 1355740 | 734804 | 733638 | 590 | f-2 | 1354601 | 1355738 | 619 | — | E | Serine-pyruvate |
| | | | | | | | | | | | | aminotransferase/archaeal |
| | | | | | | | | | | | | aspartate aminotransferase |
| 1430 | 1355821 | 1356402 | 733557 | 732976 | 1218 | r-1 | 1355821 | 1356397 | 256 | VirB11 | N | Predicted ATPases involved in |
| | | | | | | | | | | | | pili and flagella biosynthesis |
| 1431 | 1356606 | 1357514 | 732772 | 731864 | 961 | f-3 | 1356615 | 1357512 | 426 | AsnS | J | Aspartyl/asparaginyl-tRNA |
| | | | | | | | | | | | | synthetases |
| 1432 | 1357517 | 1358350 | 731861 | 731028 | 1925 | r-3 | 1357520 | 1358333 | 394 | MesJ | D | Predicted ATPase of the PP-loop |
| | | | | | | | | | | | | superfamily implicated in cell |
| | | | | | | | | | | | | cycle control |
| 1433 | 1358441 | 1359433 | 730937 | 729945 | 1924 | r-3 | 1358945 | 1359113 | 36 | LacA | G | Beta-galactosidase |
| 1434 | 1361181 | 1362461 | 728197 | 726917 | 962 | f-3 | 1361181 | 1362417 | 612 | — | M | Glycosyltransferases |
| 1435 | 1362449 | 1362523 | 726929 | 726855 | 591 | f-2 | 1362449 | 1362521 | 43 | — | M | Glycosyltransferases |
| 1436 | 1363010 | 1363930 | 726368 | 725448 | 1923 | r-3 | 1363016 | 1363925 | 512 | MesJ | D | Predicted ATPase of the PP-loop |
| | | | | | | | | | | | | superfamily implicated in cell |
| | | | | | | | | | | | | cycle control |
| 1437 | 1363972 | 1365465 | 725406 | 723913 | 1217 | r-1 | 1364029 | 1365457 | 858 | — | R | Uncharacterized FAD-dependent |
| | | | | | | | | | | | | dehydrogenases |
| 1438 | 1365589 | 1366155 | 723789 | 723223 | 228 | f-1 | 1365643 | 1366150 | 228 | — | R | CBS domains |
| 1439 | 1366195 | 1367346 | 723183 | 722032 | 229 | f-1 | 1366204 | 1367341 | 495 | KefB | P | Kef-type K+ transport systems |
| 1440 | 1367357 | 1368481 | 722021 | 720897 | 592 | f-2 | 1367357 | 1368416 | 353 | KefB | P | Kef-type K+ transport systems |
| 1441 | 1368582 | 1369193 | 720796 | 720185 | 963 | f-3 | 1368636 | 1369188 | 221 | MarC | S | Integral membrane proteins of the |
| | | | | | | | | | | | | MarC family |
| 1442 | 1369248 | 1370567 | 720130 | 718811 | 964 | f-3 | 1369266 | 1370559 | 647 | HisS | J | Histidyl-tRNA synthetase |
| 1443 | 1370627 | 1370989 | 718751 | 718389 | 1922 | r-3 | 1370681 | 1370972 | 51 | Cls | I | Phosphatidylserine/phosphatidylglycerophosphate/ |
| | | | | | | | | | | | | cardioli pin |
| | | | | | | | | | | | | synthases and related enzymes |
| 1444 | 1371847 | 1372125 | 717531 | 717253 | 230 | f-1 | 1371853 | 1372030 | 34 | — | S | Uncharacterized archaeal |
| | | | | | | | | | | | | coiled-coil domain |
| 1445 | 1372322 | 1373752 | 717056 | 715626 | 593 | f-2 | 1372358 | 1372637 | 32 | PheS | J | Phenylalanyl-tRNA synthetase |
| | | | | | | | | | | | | alpha subunit |
| 1446 | 1373902 | 1376664 | 715476 | 712714 | 231 | f-1 | 1373911 | 1376659 | 1504 | AlaS | J | Alanyl-tRNA synthetase |
| 1447 | 1376921 | 1378402 | 712457 | 710976 | 594 | f-2 | 1376936 | 1378388 | 653 | PutP | EHR | Na+/proline |
| 1448 | 1378470 | 1379534 | 710908 | 709844 | 1601 | r-2 | 1378470 | 1379532 | 568 | EutG | C | Alcohol dehydrogenase IV |
| 1449 | 1379649 | 1380014 | 709729 | 709364 | 965 | f-3 | 1379802 | 1379913 | 28 | HemB | H | Delta-aminolevulinic acid |
| | | | | | | | | | | | | dehydratase |
| 1450 | 1379981 | 1380445 | 709397 | 708933 | 1921 | r-3 | 1380098 | 1380248 | 33 | FlgH | N | Flagellar basal body L-ring |
| | | | | | | | | | | | | protein |
| 1451 | 1380532 | 1381284 | 708846 | 708094 | 1216 | r-1 | 1380532 | 1381279 | 332 | — | S | Uncharacterized ACR |
| 1452 | 1381281 | 1382687 | 708097 | 706691 | 1600 | r-2 | 1381296 | 1382565 | 209 | — | R | Predicted ATPase of the AAA |
| | | | | | | | | | | | | superfamily |
| 1453 | 1382767 | 1384572 | 706611 | 704806 | 232 | f-1 | 1382809 | 1384570 | 1039 | ELP3 | K | ELP3 component of the RNA |
| | | | | | | | | | | | | polymerase II complex |
| 1454 | 1384569 | 1385354 | 704809 | 704024 | 1599 | r-2 | 1385043 | 1385295 | 44 | — | S | Uncharacterized ACR |
| 1455 | 1385351 | 1385914 | 704027 | 703464 | 1920 | r-3 | 1385360 | 1385834 | 101 | HdeD | S | Uncharacterized BCR |
| 1456 | 1386061 | 1387578 | 703317 | 701800 | 1215 | r-1 | 1386079 | 1387129 | 150 | — | S | Predicted membrane protein |
| 1457 | 1387922 | 1388011 | 701456 | 701367 | 595 | f-2 | | | | | | |
| 1458 | 1388004 | 1389050 | 701374 | 700328 | 1598 | r-2 | 1388016 | 1388826 | 96 | NosY | R | ABC-type transport system |
| | | | | | | | | | | | | involved in multi-copper enzyme |
| | | | | | | | | | | | | maturation |
| 1459 | 1388485 | 1388589 | 700893 | 700789 | 233 | f-1 | 1388485 | 1388584 | 26 | — | S | Uncharacterized ArCR |
| 1460 | 1389047 | 1389982 | 700331 | 699396 | 1919 | r-3 | 1389059 | 1389962 | 268 | CcmA | Q | ABC-type multidrug transport |
| | | | | | | | | | | | | system |
| 1461 | 1390108 | 1390617 | 699270 | 698761 | 234 | f-1 | 1390108 | 1390498 | 229 | — | R | Predicted Fe-S-cluster |
| | | | | | | | | | | | | oxidoreductase |
| 1462 | 1390656 | 1391165 | 698722 | 698213 | 966 | f-3 | 1390668 | 1391157 | 246 | NIP7 | J | Protein involved in ribosomal |
| | | | | | | | | | | | | biogenesis |
| 1463 | 1391397 | 1391669 | 697981 | 697709 | 967 | f-3 | 1391445 | 1391511 | 28 | GloB | R | Zn-dependent hydrolases |
| 1464 | 1393980 | 1394540 | 695398 | 694838 | 968 | f-3 | 1393980 | 1394523 | 160 | CcmA | Q | ABC-type multidrug transport |
| | | | | | | | | | | | | system |
| 1465 | 1396169 | 1396951 | 693209 | 692427 | 596 | f-2 | 1396205 | 1396946 | 461 | RAD55 | T | RecA-superfamily ATPases |
| | | | | | | | | | | | | implicated in signal transduction |
| 1466 | 1396965 | 1397522 | 692413 | 691856 | 969 | f-3 | 1396977 | 1397328 | 206 | — | K | Predicted transcriptional |
| | | | | | | | | | | | | regulators |
| 1467 | 1397528 | 1397968 | 691850 | 691410 | 1918 | r-3 | 1397546 | 1397951 | 245 | SpeD | E | S-adenosylmethionine |
| | | | | | | | | | | | | decarboxylase |
| 1468 | 1398271 | 1399176 | 691107 | 690202 | 235 | f-1 | 1398328 | 1399144 | 272 | SecF | N | Preprotein translocase subunit |
| | | | | | | | | | | | | SecF |
| 1469 | 1399173 | 1400693 | 690205 | 688685 | 970 | f-3 | 1399188 | 1400673 | 452 | SecD | N | Preprotein translocase subunit |
| | | | | | | | | | | | | SecD |
| 1470 | 1400690 | 1401382 | 688688 | 687996 | 597 | f-2 | 1400693 | 1401374 | 330 | TrkA | P | K+ transport systems |
| 1471 | 1401502 | 1401813 | 687876 | 687565 | 236 | f-1 | 1401502 | 1401802 | 62 | NtpF | C | Archaeal/vacuolar-type |
| | | | | | | | | | | | | H+-ATPase subunit H |
| 1472 | 1401815 | 1403806 | 687563 | 685572 | 598 | f-2 | 1401815 | 1403789 | 681 | NtpI | C | Archaeal/vacuolar-type |
| | | | | | | | | | | | | H+-ATPase subunit I |
| 1473 | 1403824 | 1404309 | 685554 | 685069 | 237 | f-1 | 1403824 | 1404286 | 171 | AtpE | C | F0F1-type ATP synthase c |
| | | | | | | | | | | | | subunit/Archaeal/vacuolar-type |
| | | | | | | | | | | | | H+-ATPase subunit K |
| 1474 | 1404349 | 1404960 | 685029 | 684418 | 238 | f-1 | 1404349 | 1404958 | 186 | NtpE | C | Archaeal/vacuolar-type |
| | | | | | | | | | | | | H+-ATPase subunit E |
| 1475 | 1404957 | 1406060 | 684421 | 683318 | 971 | f-3 | 1404984 | 1406046 | 407 | NtpC | C | Archaeal/vacuolar-type |
| | | | | | | | | | | | | H+-ATPase subunit C |
| 1476 | 1406057 | 1406365 | 683321 | 683013 | 599 | f-2 | 1406057 | 1406360 | 146 | NtpG | C | Archaeal/vacuolar-type |
| | | | | | | | | | | | | H+-ATPase subunit F |
| 1477 | 1406372 | 1407382 | 683006 | 681996 | 600 | f-2 | 1406372 | 1407344 | 399 | NtpA | C | Archaeal/vacuolar-type |
| | | | | | | | | | | | | H+-ATPase subunit A |
| 1478 | 1407475 | 1408257 | 681903 | 681121 | 239 | f-1 | 1407475 | 1408255 | 481 | NtpA | C | Archaeal/vacuolar-type |
| | | | | | | | | | | | | H+-ATPase subunit A |
| 1479 | 1408254 | 1409654 | 681124 | 679724 | 972 | f-3 | 1408257 | 1409646 | 864 | NtpB | C | Archaeal/vacuolar-type |
| | | | | | | | | | | | | H+-ATPase subunit B |
| 1480 | 1409674 | 1410327 | 679704 | 679051 | 240 | f-1 | 1409683 | 1410316 | 318 | NtpD | C | Archaeal/vacuolar-type |
| | | | | | | | | | | | | H+-ATPase subunit D |
| 1481 | 1410413 | 1411189 | 678965 | 678189 | 601 | f-2 | 1410422 | 1411187 | 442 | — | C | Uncharacterized flavoproteins |
| 1482 | 1411199 | 1411954 | 678179 | 677424 | 602 | f-2 | 1411199 | 1411943 | 322 | Tar | N | Methyl-accepting chemotaxis |
| | | | | | | | | | | | | protein |
| 1483 | 1411938 | 1413167 | 677440 | 676211 | 973 | f-3 | 1411947 | 1413159 | 442 | — | R | Predicted metal-dependent |
| | | | | | | | | | | | | hydrolases related to alanyl-tRNA |
| | | | | | | | | | | | | synthetase HxxxH domain |
| 1484 | 1413235 | 1413960 | 676143 | 675418 | 241 | f-1 | 1413274 | 1413763 | 34 | MetC | E | Cystathionine |
| | | | | | | | | | | | | beta-lyases/cystathionine |
| | | | | | | | | | | | | gamma-synthases |
| 1485 | 1413935 | 1414642 | 675443 | 674736 | 603 | f-2 | 1414058 | 1414295 | 30 | AsnB | E | Asparagine synthase |
| | | | | | | | | | | | | (glutamine-hydrolyzing) |
| 1486 | 1414943 | 1415797 | 674435 | 673581 | 604 | f-2 | 1414952 | 1415792 | 507 | — | R | Predicted metal-dependent |
| | | | | | | | | | | | | hydrolases of the urease |
| | | | | | | | | | | | | superfamily |
| 1487 | 1415800 | 1418658 | 673578 | 670720 | 1214 | r-1 | 1416094 | 1417195 | 315 | GltD | ER | NADPH-dependent glutamate |
| | | | | | | | | | | | | synthase beta chain and related |
| | | | | | | | | | | | | oxidoreductases COG0493 GltD |
| 1488 | 1418655 | 1420457 | 670723 | 668921 | 1597 | r-2 | 1418700 | 1420224 | 632 | NuoF | C | NADH:ubiquinone |
| | | | | | | | | | | | | oxidoreductase |
| 1489 | 1420450 | 1420923 | 668928 | 668455 | 1213 | r-1 | 1420489 | 1420888 | 150 | NuoE | C | NADH:ubiquinone |
| | | | | | | | | | | | | oxidoreductase 24 kD subunit |
| 1490 | 1421049 | 1422080 | 668329 | 667298 | 1596 | r-2 | 1421058 | 1422069 | 493 | RCL1 | K | RNA phosphate cyclase |
| 1491 | 1422217 | 1422759 | 667161 | 666619 | 242 | f-1 | 1422355 | 1422448 | 30 | SbcC | L | ATPase involved in DNA repair |
| 1492 | 1422740 | 1423594 | 666638 | 665784 | 1917 | r-3 | 1423205 | 1423340 | 35 | LysC | E | Aspartokinases |
| 1493 | 1423617 | 1424129 | 665761 | 665249 | 1595 | r-2 | 1423617 | 1424127 | 253 | — | R | Predicted phosphoesterase |
| 1494 | 1424266 | 1424787 | 665112 | 664591 | 243 | f-1 | 1424407 | 1424518 | 30 | — | R | Uncharacterized CBS |
| | | | | | | | | | | | | domain-containing proteins |
| 1495 | 1424787 | 1428260 | 664591 | 661118 | 974 | f-3 | 1424787 | 1425792 | 442 | MCM2 | L | Predicted ATPase involved in |
| | | | | | | | | | | | | replication control |
| 1496 | 1428306 | 1428734 | 661072 | 660644 | 975 | f-3 | 1428315 | 1428732 | 250 | GCD7 | J | Translation initiation factor eIF-2 |
| 1497 | 1428842 | 1430410 | 660536 | 658968 | 605 | f-2 | 1429613 | 1430408 | 486 | AccA | I | Acetyl-CoA carboxylase alpha |
| | | | | | | | | | | | | subunit |
| 1498 | 1430421 | 1430807 | 658957 | 658571 | 976 | f-3 | 1430433 | 1430790 | 52 | OadG | C | Na+-transporting |
| | | | | | | | | | | | | methylmalonyl-CoA/oxaloacetate |
| | | | | | | | | | | | | decarboxylase |
| 1499 | 1430801 | 1431283 | 658577 | 658095 | 606 | f-2 | 1430876 | 1431281 | 129 | AccB | I | Biotin carboxyl carrier protein |
| 1500 | 1431290 | 1432483 | 658088 | 656895 | 607 | f-2 | 1431302 | 1432481 | 628 | OadB | C | Na+-transporting |
| | | | | | | | | | | | | methylmalonyl-CoA/oxaloacetate |
| | | | | | | | | | | | | decarboxylase |
| 1501 | 1432547 | 1433398 | 656831 | 655980 | 608 | f-2 | 1432556 | 1433390 | 422 | — | R | CBS domains |
| 1502 | 1433432 | 1434445 | 655946 | 654933 | 609 | f-2 | 1433447 | 1434437 | 291 | ThrA | E | Homoserine dehydrogenase |
| 1503 | 1434874 | 1435398 | 654504 | 653980 | 244 | f-1 | 1434985 | 1435246 | 33 | — | T | Periplasmic ligand-binding sensor |
| | | | | | | | | | | | | domain |
| 1504 | 1435395 | 1436108 | 653983 | 653270 | 1594 | r-2 | 1435434 | 1436022 | 315 | — | R | C4-type Zn finger |
| 1505 | 1436180 | 1436593 | 653198 | 652785 | 1916 | r-3 | 1436180 | 1436591 | 124 | — | S | Uncharacterized ACR |
| 1506 | 1436645 | 1436935 | 652733 | 652443 | 1915 | r-3 | 1436774 | 1436900 | 31 | — | S | Predicted membrane protein |
| 1507 | 1436958 | 1437776 | 652420 | 651602 | 1593 | r-2 | 1436958 | 1437774 | 418 | — | J | RNase PH-related |
| | | | | | | | | | | | | exoribonuclease |
| 1508 | 1437769 | 1438527 | 651609 | 650851 | 1212 | r-1 | 1437778 | 1438525 | 467 | Rph | J | RNase PH |
| 1509 | 1438502 | 1439275 | 650876 | 650103 | 1914 | r-3 | 1438502 | 1439237 | 411 | RRP4 | J | RNA-binding protein Rrp4 and |
| | | | | | | | | | | | | related proteins (contain S1 |
| | | | | | | | | | | | | domain and KH domain) |
| 1510 | 1439272 | 1439982 | 650106 | 649396 | 1211 | r-1 | 1439272 | 1439980 | 424 | — | S | Uncharacterized ACR |
| 1511 | 1439994 | 1440776 | 649384 | 648602 | 1592 | r-2 | 1439994 | 1440774 | 389 | HslV | O | Proteasome protease subunit |
| 1512 | 1441115 | 1441582 | 648263 | 647796 | 610 | f-2 | 1441115 | 1441553 | 219 | Hit | FGR | Diadenosine tetraphosphate |
| | | | | | | | | | | | | (Ap4A) hydrolase and other HIT |
| | | | | | | | | | | | | family hydrolases COG0537 Hit |
| 1513 | 1441557 | 1441976 | 647821 | 647402 | 1591 | r-2 | 1441659 | 1441965 | 99 | MazG | R | Predicted pyrophosphatase |
| 1514 | 1441888 | 1442184 | 647490 | 647194 | 1210 | r-1 | 1441981 | 1442116 | 30 | SerC | HE | Phosphoserine aminotransferase |
| | | | | | | | | | | | | COG1932 SerC |
| 1515 | 1442268 | 1442525 | 647110 | 646853 | 977 | f-3 | | | | | | |
| 1516 | 1442602 | 1444524 | 646776 | 644854 | 245 | f-1 | 1442671 | 1443574 | 550 | PorA | C | Pyruvate:ferredoxin |
| | | | | | | | | | | | | oxidoreductase and related |
| | | | | | | | | | | | | 2-oxoacid:ferredoxin |
| | | | | | | | | | | | | oxidoreductases |
| 1517 | 1444521 | 1444967 | 644857 | 644411 | 1590 | r-2 | 1444521 | 1444953 | 102 | — | R | Predicted nucleic acid-binding |
| | | | | | | | | | | | | protein |
| 1518 | 1445288 | 1446001 | 644090 | 643377 | 1913 | r-3 | 1445507 | 1445840 | 31 | CcmA | Q | ABC-type multidrug transport |
| | | | | | | | | | | | | system |
| 1519 | 1446421 | 1446744 | 642957 | 642634 | 1209 | r-1 | 1446487 | 1446610 | 28 | — | S | Uncharacterized ACR |
| 1520 | 1447018 | 1447827 | 642360 | 641551 | 246 | f-1 | 1447057 | 1447756 | 221 | PerM | R | Predicted permease |
| 1521 | 1447763 | 1448299 | 641615 | 641079 | 1912 | r-3 | 1447763 | 1448297 | 325 | PncA | Q | Amidases related to |
| | | | | | | | | | | | | nicotinamidase |
| 1522 | 1448354 | 1448527 | 641024 | 640851 | 1911 | r-3 | 1448354 | 1448522 | 79 | — | S | Uncharacterized ACR |
| 1523 | 1448733 | 1449227 | 640645 | 640151 | 978 | f-3 | 1448805 | 1449219 | 164 | PaaI | Q | Uncharacterized protein |
| 1524 | 1449764 | 1450072 | 639614 | 639306 | 611 | f-2 | 1449773 | 1450067 | 143 | — | K | Predicted transcriptional |
| | | | | | | | | | | | | regulators |
| 1525 | 1450076 | 1451272 | 639302 | 638106 | 612 | f-2 | 1450103 | 1451219 | 516 | | | |
| 1526 | 1451362 | 1452348 | 638016 | 637030 | 247 | f-1 | 1451362 | 1452337 | 398 | AnsB | EJ | L-asparaginase/archaeal |
| | | | | | | | | | | | | Glu-tRNAGln amidotransferase |
| | | | | | | | | | | | | subunit D COG0252 AnsB |
| 1527 | 1452345 | 1452566 | 637033 | 636812 | 1589 | r-2 | | | | | | |
| 1528 | 1452921 | 1453571 | 636457 | 635807 | 1588 | r-2 | 1452930 | 1453569 | 229 | MarC | S | Integral membrane proteins of the |
| | | | | | | | | | | | | MarC family |
| 1529 | 1453739 | 1453954 | 635639 | 635424 | 613 | f-2 | 1453805 | 1453904 | 28 | CheA | N | Chemotaxis protein histidine |
| | | | | | | | | | | | | kinase and related kinases |
| 1530 | 1454658 | 1454753 | 634720 | 634625 | 1587 | r-2 | | | | | | |
| 1531 | 1455780 | 1457495 | 633598 | 631883 | 1586 | r-2 | 1456269 | 1456545 | 33 | LAP4 | E | Aspartyl aminopeptidase |
| 1532 | 1458373 | 1458516 | 631005 | 630862 | 1208 | r-1 | | | | | | |
| 1533 | 1460859 | 1461371 | 628519 | 628007 | 1585 | r-2 | 1461048 | 1461270 | 30 | GlnQ | E | ABC-type polar amino acid |
| | | | | | | | | | | | | transport system |
| 1534 | 1461343 | 1461726 | 628035 | 627652 | 1207 | r-1 | 1461454 | 1461613 | 30 | UvrA | L | Excinuclease ATPase subunit |
| 1535 | 1462494 | 1463108 | 626884 | 626270 | 1584 | r-2 | 1462509 | 1462680 | 28 | VacB | K | Exoribonucleases |
| 1536 | 1463105 | 1464283 | 626273 | 625095 | 1910 | r-3 | 1463141 | 1464236 | 580 | FtsZ | D | Cell division GTPase |
| 1537 | 1464255 | 1466492 | 625123 | 622886 | 1583 | r-2 | 1464516 | 1464702 | 35 | RnhA | L | Ribonuclease HI |
| 1538 | 1466599 | 1467609 | 622779 | 621769 | 1206 | r-1 | 1466614 | 1467604 | 607 | — | C | Fe—S oxidoreductases |
| 1539 | 1467655 | 1467744 | 621723 | 621634 | 248 | f-1 | | | | | | |
| 1540 | 1467769 | 1467906 | 621609 | 621472 | 249 | f-1 | | | | | | |
| 1541 | 1467891 | 1468676 | 621487 | 620702 | 1582 | r-2 | 1468092 | 1468650 | 200 | HemK | J | Predicted rRNA or tRNA |
| | | | | | | | | | | | | methylase |
| 1542 | 1468498 | 1469019 | 620880 | 620359 | 1205 | r-1 | 1468501 | 1469002 | 255 | — | R | Conserved protein/domain |
| | | | | | | | | | | | | typically associated with |
| | | | | | | | | | | | | flavoprotein oxygenases |
| 1543 | 1469265 | 1470533 | 620113 | 618845 | 979 | f-3 | 1469331 | 1470465 | 343 | AprE | O | Subtilisin-like serine proteases |
| 1544 | 1470609 | 1471790 | 618769 | 617588 | 1581 | r-2 | 1470618 | 1471788 | 664 | PncB | H | Nicotinic acid |
| | | | | | | | | | | | | phosphoribosyltransferase |
| 1545 | 1471812 | 1471937 | 617566 | 617441 | 1580 | r-2 | | | | | | |
| 1546 | 1471870 | 1472673 | 617508 | 616705 | 250 | f-1 | 1471912 | 1472653 | 149 | FabG | QR | Dehydrogenases with different |
| | | | | | | | | | | | | specificities (related to |
| | | | | | | | | | | | | short-chain alcohol |
| | | | | | | | | | | | | dehydrogenases) COG1028 FabG |
| 1547 | 1474731 | 1474928 | 614647 | 614450 | 1579 | r-2 | 1474809 | 1474893 | 27 | Pcm | O | Protein-L-isoaspartate |
| | | | | | | | | | | | | carboxylmethyltransferase |
| 1548 | 1475072 | 1475983 | 614306 | 613395 | 1909 | r-3 | 1475084 | 1475972 | 427 | — | R | Predicted hydrolase of the |
| | | | | | | | | | | | | metallo-beta-lactamase |
| | | | | | | | | | | | | superfamily |
| 1549 | 1477107 | 1477574 | 612271 | 611804 | 980 | f-3 | 1477110 | 1477398 | 30 | DeoR | K | Transcriptional regulator |
| 1550 | 1477584 | 1479029 | 611794 | 610349 | 1578 | r-2 | 1477599 | 1479027 | 735 | GltD | ER | NADPH-dependent glutamate |
| | | | | | | | | | | | | synthase beta chain and related |
| | | | | | | | | | | | | oxidoreductases COG0493 GltD |
| 1551 | 1479030 | 1479884 | 610348 | 609494 | 1577 | r-2 | 1479030 | 1479882 | 446 | UbiB | HC | 2-polyprenylphenol hydroxylase |
| | | | | | | | | | | | | and related flavodoxin |
| | | | | | | | | | | | | oxidoreductases˜ COG0543 UbiB |
| 1552 | 1480088 | 1480873 | 609290 | 608505 | 614 | f-2 | 1480088 | 1480871 | 429 | — | S | Uncharacterized ArCR |
| 1553 | 1480960 | 1481781 | 608418 | 607597 | 1204 | r-1 | 1480960 | 1481779 | 378 | CysK | E | Cysteine synthase |
| 1554 | 1481753 | 1481869 | 607625 | 607509 | 1908 | r-3 | 1481759 | 1481840 | 31 | CysK | E | Cysteine synthase |
| 1555 | 1482049 | 1482780 | 607329 | 606598 | 1203 | r-1 | 1482049 | 1482757 | 382 | — | K | Predicted transcriptional |
| | | | | | | | | | | | | regulators |
| 1556 | 1484422 | 1486413 | 604956 | 602965 | 251 | f-1 | 1484950 | 1485667 | 224 | AprE | O | Subtilisin-like serine proteases |
| 1557 | 1486448 | 1488211 | 602930 | 601167 | 615 | f-2 | 1487183 | 1487729 | 33 | SqhC | I | Squalene cyclase |
| 1558 | 1488253 | 1489308 | 601125 | 600070 | 1202 | r-1 | 1488253 | 1489306 | 553 | — | R | Predicted methyltransferases |
| 1559 | 1489417 | 1490157 | 599961 | 599221 | 252 | f-1 | 1489417 | 1490146 | 257 | — | R | Uncharacterized ATPases of the |
| | | | | | | | | | | | | PP-loop superfamily |
| 1560 | 1490211 | 1490753 | 599167 | 598625 | 981 | f-3 | 1490298 | 1490748 | 206 | PaaD | R | Putative aromatic ring |
| | | | | | | | | | | | | hydroxylating enzyme |
| 1561 | 1490896 | 1491087 | 598482 | 598291 | 253 | f-1 | 1490896 | 1491073 | 99 | Fer | C | Ferredoxin 1 |
| 1562 | 1491222 | 1491395 | 598156 | 597983 | 1576 | r-2 | 1491249 | 1491393 | 103 | RPS31 | J | Ribosomal protein S27AE |
| 1563 | 1491406 | 1491738 | 597972 | 597640 | 1201 | r-1 | 1491442 | 1491733 | 159 | RPS24A | J | Ribosomal protein S24E |
| 1564 | 1491692 | 1492225 | 597686 | 597153 | 1907 | r-3 | 1491692 | 1492217 | 199 | — | S | Uncharacterized ArCR |
| 1565 | 1492222 | 1492431 | 597156 | 596947 | 1200 | r-1 | 1492237 | 1492426 | 99 | — | K | DNA-directed RNA polymerase |
| | | | | | | | | | | | | subunit E″ |
| 1566 | 1492428 | 1493000 | 596950 | 596378 | 1575 | r-2 | 1492428 | 1492941 | 261 | RPB7 | K | DNA-directed RNA polymerase |
| | | | | | | | | | | | | subunit E′ |
| 1567 | 1493037 | 1493573 | 596341 | 595805 | 1574 | r-2 | 1493037 | 1493571 | 312 | Ppa | C | Inorganic pyrophosphatase |
| 1568 | 1493631 | 1494593 | 595747 | 594785 | 1573 | r-2 | 1494243 | 1494420 | 33 | AcnA | C | Aconitase A |
| 1569 | 1494613 | 1495560 | 594765 | 593818 | 1199 | r-1 | 1494913 | 1495111 | 33 | — | T | GAF domain-containing proteins |
| 1570 | 1495557 | 1496564 | 593821 | 592814 | 1572 | r-2 | 1495563 | 1496529 | 235 | LepB | N | Signal peptidase I |
| 1571 | 1496677 | 1497216 | 592701 | 592162 | 1198 | r-1 | 1496755 | 1496977 | 32 | LeuA | E | Isopropylmalate/homocitrate/citramalate |
| | | | | | | | | | | | | synthases |
| 1572 | 1497231 | 1497902 | 592147 | 591476 | 1571 | r-2 | 1497582 | 1497816 | 33 | — | H | 6-pyruvoyl-tetrahydropterin |
| | | | | | | | | | | | | synthase |
| 1573 | 1498015 | 1498506 | 591363 | 590872 | 1197 | r-1 | 1498126 | 1498402 | 31 | DcuC | C | C4-dicarboxylate transporter |
| 1574 | 1499893 | 1500954 | 589485 | 588424 | 1196 | r-1 | 1500004 | 1500946 | 498 | WcaG | MG | Nucleoside-diphosphate-sugar |
| | | | | | | | | | | | | epimerases COG0451 WcaG |
| 1575 | 1500975 | 1501334 | 588403 | 588044 | 982 | f-3 | 1500978 | 1501332 | 167 | — | R | Predicted nucleotidyltransferases |
| 1576 | 1501234 | 1501755 | 588144 | 587623 | 254 | f-1 | 1501312 | 1501732 | 222 | — | S | Uncharacterized ACR |
| 1577 | 1501752 | 1502747 | 587626 | 586631 | 983 | f-3 | 1501752 | 1502745 | 510 | GCD1 | MJ | Nucleoside-diphosphate-sugar |
| | | | | | | | | | | | | pyrophosphorylases involved in |
| | | | | | | | | | | | | lipopolysaccharide |
| | | | | | | | | | | | | biosynthesis/translation initiation |
| | | | | | | | | | | | | factor eIF2B subunits COG1208 |
| | | | | | | | | | | | | GCD1 |
| 1578 | 1502782 | 1504029 | 586596 | 585349 | 255 | f-1 | 1502782 | 1503988 | 650 | RfbX | R | Membrane protein involved in the |
| | | | | | | | | | | | | export of O-antigen and teichoic |
| | | | | | | | | | | | | acid |
| 1579 | 1503705 | 1503881 | 585673 | 585497 | 1570 | r-2 | 1503741 | 1503867 | 27 | CysN | P | GTPases - Sulfate adenylate |
| | | | | | | | | | | | | transferase subunit 1 |
| 1580 | 1506454 | 1507683 | 582924 | 581695 | 256 | f-1 | 1506496 | 1507669 | 617 | TagB | M | Putative |
| | | | | | | | | | | | | glycosyl/glycerophosphate |
| | | | | | | | | | | | | transferases involved in teichoic |
| | | | | | | | | | | | | acid biosynthesis |
| | | | | | | | | | | | | TagF/TagB/EpsJ/RodC |
| 1581 | 1507680 | 1508369 | 581698 | 581009 | 984 | f-3 | 1507680 | 1508364 | 371 | IspD | I | 4-diphosphocytidyl-2-methyl-D-erithritol |
| | | | | | | | | | | | | synthase |
| 1582 | 1508513 | 1509250 | 580865 | 580128 | 616 | f-2 | 1508513 | 1509248 | 404 | WcaA | M | Glycosyltransferases involved in |
| | | | | | | | | | | | | cell wall biogenesis |
| 1583 | 1509284 | 1511584 | 580094 | 577794 | 1906 | r-3 | 1509311 | 1511570 | 800 | — | R | Uncharacterized membrane |
| | | | | | | | | | | | | protein |
| 1584 | 1512986 | 1513759 | 576392 | 575619 | 617 | f-2 | 1513040 | 1513637 | 119 | WcaA | M | Glycosyltransferases involved in |
| | | | | | | | | | | | | cell wall biogenesis |
| 1585 | 1513756 | 1514835 | 575622 | 574543 | 257 | f-1 | 1513756 | 1514773 | 191 | RfaG | M | Predicted glycosyltransferases |
| 1586 | 1515877 | 1516842 | 573501 | 572536 | 258 | f-1 | 1516165 | 1516792 | 93 | RfaG | M | Predicted glycosyltransferases |
| 1587 | 1518510 | 1518569 | 570868 | 570809 | 1569 | r-2 | | | | | | |
| 1588 | 1519816 | 1521600 | 569562 | 567778 | 259 | f-1 | 1520431 | 1520620 | 32 | LolA | M | Outer membrane |
| | | | | | | | | | | | | lipoprotein-sorting protein |
| 1589 | 1519824 | 1519925 | 569554 | 569453 | 1568 | r-2 | | | | | | |
| 1590 | 1521735 | 1522592 | 567643 | 566786 | 985 | f-3 | 1521990 | 1522401 | 37 | HsdR | L | Restriction enzymes type I |
| | | | | | | | | | | | | helicase subunits and related |
| | | | | | | | | | | | | helicases |
| 1591 | 1523210 | 1524667 | 566168 | 564711 | 618 | f-2 | 1523219 | 1523624 | 31 | — | S | Uncharacterized |
| | | | | | | | | | | | | membrane-associated |
| | | | | | | | | | | | | protein/domain |
| 1592 | 1525075 | 1526076 | 564303 | 563302 | 260 | f-1 | 1525372 | 1525714 | 35 | — | S | Predicted archaeal membrane |
| | | | | | | | | | | | | protein |
| 1593 | 1526066 | 1526449 | 563312 | 562929 | 1905 | r-3 | 1526066 | 1526432 | 84 | RfaG | M | Predicted glycosyltransferases |
| 1594 | 1529489 | 1530295 | 559889 | 559083 | 619 | f-2 | 1529501 | 1530284 | 389 | NagD | G | Predicted sugar phosphatases of |
| | | | | | | | | | | | | the HAD superfamily |
| 1595 | 1530296 | 1530733 | 559082 | 558645 | 620 | f-2 | 1530557 | 1530722 | 33 | — | S | Uncharacterized ACR |
| 1596 | 1530894 | 1536164 | 558484 | 553214 | 986 | f-3 | 1534812 | 1536162 | 744 | NrdA | F | Ribonucleotide reductase alpha |
| | | | | | | | | | | | | subunit |
| 1597 | 1536298 | 1536771 | 553080 | 552607 | 261 | f-1 | 1536307 | 1536769 | 230 | — | R | Predicted |
| | | | | | | | | | | | | phosphoribosyltransferases |
| 1598 | 1536811 | 1537365 | 552567 | 552013 | 262 | f-1 | 1536811 | 1537363 | 268 | LigT | J | 2′-5′ RNA ligase |
| 1599 | 1540326 | 1541702 | 549052 | 547676 | 987 | f-3 | 1540326 | 1541697 | 582 | CCA1 | J | tRNA nucleotidyltransferase |
| | | | | | | | | | | | | (CCA-adding enzyme) |
| 1600 | 1541901 | 1543691 | 547477 | 545687 | 1567 | r-2 | 1542636 | 1542834 | 33 | Gmd | M | GDP-D-mannose dehydratase |
| 1601 | 1543754 | 1544062 | 545624 | 545316 | 621 | f-2 | 1543862 | 1544054 | 28 | DPH2 | J | Diphthamide synthase subunit |
| | | | | | | | | | | | | DPH2 |
| 1602 | 1544093 | 1544920 | 545285 | 544458 | 622 | f-2 | 1544096 | 1544915 | 261 | RhaT | GER | Permeases of the drug/metabolite |
| | | | | | | | | | | | | transporter (DMT) superfamily |
| | | | | | | | | | | | | COG0697 RhaT |
| 1603 | 1544970 | 1545347 | 544408 | 544031 | 988 | f-3 | 1545231 | 1545324 | 32 | — | S | Uncharacterized BCR |
| 1604 | 1545432 | 1545968 | 543946 | 543410 | 1566 | r-2 | 1545432 | 1545966 | 183 | — | S | Uncharacterized ACR |
| 1605 | 1546165 | 1549362 | 543213 | 540016 | 263 | f-1 | 1546165 | 1549360 | 1910 | IleS | J | Isoleucyl-tRNA synthetase |
| 1606 | 1549370 | 1549522 | 540008 | 539856 | 1904 | r-3 | 1549385 | 1549490 | 27 | CobQ | H | Cobyric acid synthase |
| 1607 | 1550195 | 1551454 | 539183 | 537924 | 1903 | r-3 | 1550882 | 1551290 | 32 | BaeS | T | Sensory transduction histidine |
| | | | | | | | | | | | | kinases |
| 1608 | 1551384 | 1551506 | 537994 | 537872 | 989 | f-3 | | | | | | |
| 1609 | 1551637 | 1552008 | 537741 | 537370 | 1195 | r-1 | 1551637 | 1552006 | 162 | VapC | R | Predicted nucleic acid-binding |
| | | | | | | | | | | | | protein |
| 1610 | 1551975 | 1552217 | 537403 | 537161 | 1565 | r-2 | 1551975 | 1552212 | 105 | — | S | Uncharacterized ACR |
| 1611 | 1552330 | 1553088 | 537048 | 536290 | 264 | f-1 | 1552351 | 1552525 | 33 | QcrB | C | Cytochrome b subunit of the bc |
| | | | | | | | | | | | | complex |
| 1612 | 1553108 | 1555480 | 536270 | 533898 | 1902 | r-3 | 1553126 | 1555466 | 1072 | LacA | G | Beta-galactosidase |
| | | | | | | | | | | | | (exo-beta-D-glucosaminidase) |
| 1613 | 1555474 | 1556295 | 533904 | 533083 | 1194 | r-1 | 1555474 | 1556287 | 359 | AgaS | M | Predicted phosphosugar |
| | | | | | | | | | | | | isomerases |
| 1614 | 1556455 | 1557438 | 532923 | 531940 | 1193 | r-1 | 1556482 | 1557424 | 491 | OppF | EP | ABC-type |
| | | | | | | | | | | | | dipeptide/oligopeptide/nickel |
| | | | | | | | | | | | | transport system |
| 1615 | 1557416 | 1558507 | 531962 | 530871 | 1901 | r-3 | 1557539 | 1558493 | 497 | DppD | EP | ABC-type |
| | | | | | | | | | | | | dipeptide/oligopeptide/nickel |
| | | | | | | | | | | | | transport system |
| 1616 | 1558390 | 1559334 | 530988 | 530044 | 1192 | r-1 | 1558408 | 1559320 | 357 | DppC | EP | ABC-type |
| | | | | | | | | | | | | dipeptide/oligopeptide/nickel |
| | | | | | | | | | | | | transport systems |
| 1617 | 1559337 | 1560350 | 530041 | 529028 | 1564 | r-2 | 1559364 | 1560345 | 529 | DppB | EP | ABC-type |
| | | | | | | | | | | | | dipeptide/oligopeptide/nickel |
| | | | | | | | | | | | | transport systems |
| 1618 | 1560382 | 1561011 | 528996 | 528367 | 1191 | r-1 | 1560382 | 1560955 | 219 | OppA | EP | ABC-type |
| | | | | | | | | | | | | dipeptide/oligopeptide/nickel |
| | | | | | | | | | | | | transport systems |
| 1619 | 1561392 | 1562597 | 527986 | 526781 | 1563 | r-2 | 1561392 | 1562439 | 468 | OppA | EP | ABC-type |
| | | | | | | | | | | | | dipeptide/oligopeptide/nickel |
| | | | | | | | | | | | | transport systems |
| 1620 | 1562832 | 1564286 | 526546 | 525092 | 990 | f-3 | 1562838 | 1564281 | 790 | BglB | G | Beta-glucosidase/6-phospho-beta- |
| | | | | | | | | | | | | glucosidase/beta-galactosidase |
| 1621 | 1564489 | 1564938 | 524889 | 524440 | 265 | f-1 | 1564489 | 1564933 | 158 | VapC | R | Predicted nucleic acid-binding |
| | | | | | | | | | | | | protein |
| 1622 | 1564960 | 1565772 | 524418 | 523606 | 1190 | r-1 | 1564972 | 1565767 | 355 | — | S | deacetylase |
| 1623 | 1565943 | 1569653 | 523435 | 519725 | 991 | f-3 | 1566258 | 1567437 | 330 | ChiA | G | Chitinase |
| 1624 | 1569699 | 1571144 | 519679 | 518234 | 1562 | r-2 | 1570038 | 1571139 | 557 | — | R | Uncharacterized ACR related to |
| | | | | | | | | | | | | pyruvate formate-lyase activating |
| | | | | | | | | | | | | enzyme |
| 1625 | 1570858 | 1571220 | 518520 | 518158 | 266 | f-1 | 1570867 | 1571218 | 169 | POP5 | L | RNase P subunit P14 and its |
| | | | | | | | | | | | | archaeal orthologs |
| 1626 | 1571217 | 1572563 | 518161 | 516815 | 1561 | r-2 | 1571217 | 1572540 | 557 | GlgA | G | Glycogen synthase |
| 1627 | 1572612 | 1573637 | 516766 | 515741 | 1560 | r-2 | 1572624 | 1573587 | 119 | — | K | Predicted transcriptional |
| | | | | | | | | | | | | regulators |
| 1628 | 1573641 | 1573748 | 515737 | 515630 | 1559 | r-2 | | | | | | |
| 1629 | 1573710 | 1575680 | 515668 | 513698 | 992 | f-3 | 1574037 | 1575441 | 267 | AmyA | G | Glycosidases |
| 1630 | 1575753 | 1577099 | 513625 | 512279 | 993 | f-3 | 1575753 | 1577070 | 692 | MalE | G | Maltose-binding periplasmic |
| | | | | | | | | | | | | proteins/domains |
| 1631 | 1577138 | 1578040 | 512240 | 511338 | 623 | f-2 | 1577138 | 1578032 | 480 | MalF | G | ABC-type sugar transport systems |
| 1632 | 1578037 | 1579284 | 511341 | 510094 | 267 | f-1 | 1578049 | 1579279 | 466 | MalG | G | Sugar permeases |
| 1633 | 1579294 | 1582596 | 510084 | 506782 | 268 | f-1 | 1579300 | 1582387 | 1626 | — | G | Alpha-amylase/alpha-mannosidase |
| 1634 | 1582707 | 1583825 | 506671 | 505553 | 994 | f-3 | 1582707 | 1583823 | 623 | MalK | G | ABC-type |
| | | | | | | | | | | | | sugar/spermidine/putrescine/iron/thiamine |
| | | | | | | | | | | | | transport systems |
| 1635 | 1583858 | 1584259 | 505520 | 505119 | 624 | f-2 | 1583870 | 1584245 | 146 | — | S | Uncharacterized ArCR |
| 1636 | 1584289 | 1585641 | 505089 | 503737 | 269 | f-1 | 1584292 | 1585606 | 321 | CpsG | G | Phosphomannomutase |
| 1637 | 1585646 | 1586575 | 503732 | 502803 | 1900 | r-3 | 1585760 | 1586573 | 431 | PhnP | R | Metal-dependent hydrolases of |
| | | | | | | | | | | | | the beta-lactamase superfamily I |
| 1638 | 1586361 | 1588547 | 503017 | 500831 | 995 | f-3 | 1586673 | 1588470 | 865 | — | S | Uncharacterized membrane |
| | | | | | | | | | | | | protein |
| 1639 | 1588597 | 1588962 | 500781 | 500416 | 270 | f-1 | 1588741 | 1588915 | 31 | LysR | K | Transcriptional regulator |
| 1640 | 1588919 | 1590214 | 500459 | 499164 | 625 | f-2 | 1588952 | 1590212 | 639 | ArgE | E | Acetylornithine |
| | | | | | | | | | | | | deacetylase/Succinyl-diaminopimelate |
| | | | | | | | | | | | | desuccinylase and related |
| | | | | | | | | | | | | deacylases |
| 1641 | 1590298 | 1591578 | 499080 | 497800 | 271 | f-1 | 1590586 | 1590886 | 31 | ThrS | J | Threonyl-tRNA synthetase |
| 1642 | 1591902 | 1592372 | 497476 | 497006 | 1558 | r-2 | 1592157 | 1592334 | 29 | BglC | G | Endoglucanase |
| 1643 | 1592769 | 1593515 | 496609 | 495863 | 996 | f-3 | 1592769 | 1593501 | 411 | SmtA | QR | SAM-dependent |
| | | | | | | | | | | | | methyltransferases COG0500 |
| | | | | | | | | | | | | SmtA |
| 1644 | 1593682 | 1594884 | 495696 | 494494 | 1189 | r-1 | 1593694 | 1594882 | 644 | — | R | Predicted SAM-dependent |
| | | | | | | | | | | | | methyltransferases |
| 1645 | 1595017 | 1595325 | 494361 | 494053 | 272 | f-1 | 1595017 | 1595104 | 30 | — | R | Predicted phosphate-binding |
| | | | | | | | | | | | | enzymes |
| 1646 | 1596465 | 1597058 | 492913 | 492320 | 1557 | r-2 | 1596477 | 1596711 | 30 | DltE | R | Short-chain dehydrogenases of |
| | | | | | | | | | | | | various substrate specificities |
| 1647 | 1597751 | 1598509 | 491627 | 490869 | 1899 | r-3 | 1597778 | 1598507 | 387 | RAD55 | T | RecA-superfamily ATPases |
| | | | | | | | | | | | | implicated in signal transduction |
| 1648 | 1598676 | 1599902 | 490702 | 489476 | 997 | f-3 | 1598700 | 1599873 | 396 | PRI2 | L | Eukaryotic-type DNA primase |
| 1649 | 1599886 | 1600935 | 489492 | 488443 | 273 | f-1 | 1599904 | 1600903 | 474 | PRI1 | L | Eukaryotic-type DNA primase |
| 1650 | 1601220 | 1601777 | 488158 | 487601 | 998 | f-3 | 1601223 | 1601760 | 67 | RhaT | GER | Permeases of the drug/metabolite |
| | | | | | | | | | | | | transporter (DMT) superfamily |
| | | | | | | | | | | | | COG0697 RhaT |
| 1651 | 1603727 | 1603786 | 485651 | 485592 | 626 | f-2 | | | | | | |
| 1652 | 1604088 | 1604264 | 485290 | 485114 | 1556 | r-2 | 1604088 | 1604154 | 26 | — | S | Uncharacterized ArCR |
| 1653 | 1604708 | 1606048 | 484670 | 483330 | 627 | f-2 | 1604768 | 1606046 | 714 | GlnA | E | Glutamine synthase |
| 1654 | 1606039 | 1606902 | 483339 | 482476 | 1188 | r-1 | 1606045 | 1606855 | 363 | RhaT | GE | Permeases of the drug/metabolite |
| | | | | | | | | | | | R | transporter (DMT) superfamily |
| | | | | | | | | | | | | COG0697 RhaT |
| 1655 | 1606912 | 1607685 | 482466 | 481693 | 1187 | r-1 | 1606921 | 1607683 | 375 | NadE | H | NAD synthase |
| 1656 | 1607663 | 1607971 | 481715 | 481407 | 1898 | r-3 | 1607762 | 1607855 | 30 | FUI1 | FH | Cytosine/uracil/thiamine/allantoin |
| | | | | | | | | | | | | permeases COG1953 FUI1 |
| 1657 | 1608213 | 1609220 | 481165 | 480158 | 1555 | r-2 | 1608213 | 1609215 | 592 | OppF | EP | ABC-type |
| | | | | | | | | | | | | dipeptide/oligopeptide/nickel |
| | | | | | | | | | | | | transport system |
| 1658 | 1609231 | 1610190 | 480147 | 479188 | 1186 | r-1 | 1609231 | 1610188 | 581 | DppD | EP | ABC-type |
| | | | | | | | | | | | | dipeptide/oligopeptide/nickel |
| | | | | | | | | | | | | transport system |
| 1659 | 1610202 | 1611623 | 479176 | 477755 | 1554 | r-2 | 1610202 | 1611618 | 657 | DppC | EP | ABC-type |
| | | | | | | | | | | | | dipeptide/oligopeptide/nickel |
| | | | | | | | | | | | | transport systems |
| 1660 | 1611635 | 1612684 | 477743 | 476694 | 1897 | r-3 | 1611635 | 1612673 | 540 | DppB | EP | ABC-type |
| | | | | | | | | | | | | dipeptide/oligopeptide/nickel |
| | | | | | | | | | | | | transport systems |
| 1661 | 1612865 | 1615312 | 476513 | 474066 | 1896 | r-3 | 1613654 | 1614983 | 57 | OppA | EP | ABC-type |
| | | | | | | | | | | | | dipeptide/oligopeptide/nickel |
| | | | | | | | | | | | | transport systems |
| 1662 | 1615653 | 1616882 | 473725 | 472496 | 999 | f-3 | 1615659 | 1616868 | 523 | PyrC | F | Dihydroorotase |
| 1663 | 1616860 | 1617561 | 472518 | 471817 | 274 | f-1 | 1616860 | 1617553 | 338 | UbiB | HC | 2-polyprenylphenol hydroxylase |
| | | | | | | | | | | | | and related flavodoxin |
| | | | | | | | | | | | | oxidoreductases˜ COG0543 UbiB |
| 1664 | 1617558 | 1618517 | 471820 | 470861 | 1000 | f-3 | 1617615 | 1618512 | 516 | — | R | Predicted Fe—S oxidoreductases |
| 1665 | 1617756 | 1617815 | 471622 | 471563 | 1553 | r-2 | | | | | | |
| 1666 | 1618578 | 1619276 | 470800 | 470102 | 1001 | f-3 | 1618647 | 1619130 | 33 | DppC | EP | ABC-type |
| | | | | | | | | | | | | dipeptide/oligopeptide/nickel |
| | | | | | | | | | | | | transport systems |
| 1667 | 1619263 | 1621227 | 470115 | 468151 | 1185 | r-1 | 1619266 | 1621183 | 975 | — | G | Alpha-amylase/alpha-mannosidase |
| | | | | | | | | | | | | (4-alpha-glucanotransferase) |
| 1668 | 1621305 | 1621934 | 468073 | 467444 | 1552 | r-2 | 1621305 | 1621890 | 216 | SEC59 | I | Dolichol kinase |
| 1669 | 1622735 | 1622920 | 466643 | 466458 | 628 | f-2 | 1622735 | 1622909 | 33 | — | S | Uncharacterized archaeal |
| | | | | | | | | | | | | membrane protein |
| 1670 | 1622922 | 1624112 | 466456 | 465266 | 1002 | f-3 | 1622940 | 1624086 | 499 | KefB | P | Kef-type K+ transport systems |
| 1671 | 1624133 | 1625287 | 465245 | 464091 | 629 | f-2 | 1624136 | 1625279 | 536 | GadB | E | Glutamate decarboxylase and |
| | | | | | | | | | | | | related PLP-dependent proteins |
| 1672 | 1625321 | 1625563 | 464057 | 463815 | 630 | f-2 | 1625339 | 1625441 | 39 | — | K | Predicted transcriptional |
| | | | | | | | | | | | | regulators containing the |
| | | | | | | | | | | | | CopG/Arc/MetJ DNA-binding |
| | | | | | | | | | | | | domain |
| 1673 | 1625628 | 1625717 | 463750 | 463661 | 1003 | f-3 | 1625631 | 1625709 | 30 | MazF | T | Growth inhibitor |
| 1674 | 1625816 | 1625929 | 463562 | 463449 | 631 | f-2 | | | | | | |
| 1675 | 1625919 | 1626824 | 463459 | 462554 | 1551 | r-2 | 1625964 | 1626810 | 346 | MMT1 | P | Predicted Co/Zn/Cd cation |
| | | | | | | | | | | | | transporters |
| 1676 | 1627009 | 1627614 | 462369 | 461764 | 1184 | r-1 | 1627279 | 1627477 | 32 | RpoB | K | DNA-directed RNA polymerase |
| | | | | | | | | | | | | beta subunit/140 kD subunit (split |
| | | | | | | | | | | | | gene in Mjan |
| 1677 | 1627793 | 1629337 | 461585 | 460041 | 632 | f-2 | 1627817 | 1629101 | 316 | RfbX | R | Membrane protein involved in the |
| | | | | | | | | | | | | export of O-antigen and teichoic |
| | | | | | | | | | | | | acid |
| 1678 | 1629435 | 1630595 | 459943 | 458783 | 1004 | f-3 | 1629435 | 1630491 | 336 | — | M | Predicted membrane-associated |
| | | | | | | | | | | | | Zn-dependent proteases 1 |
| 1679 | 1630596 | 1631720 | 458782 | 457658 | 1005 | f-3 | 1630749 | 1631694 | 526 | MesJ | D | Predicted ATPase of the PP-loop |
| | | | | | | | | | | | | superfamily implicated in cell |
| | | | | | | | | | | | | cycle control |
| 1680 | 1630637 | 1630705 | 458741 | 458673 | 1895 | r-3 | | | | | | |
| 1681 | 1631799 | 1633073 | 457579 | 456305 | 1006 | f-3 | 1631853 | 1633008 | 232 | — | R | Uncharacterized ATPases of the |
| | | | | | | | | | | | | AAA superfamily |
| 1682 | 1633129 | 1633257 | 456249 | 456121 | 275 | f-1 | 1633156 | 1633240 | 30 | IleS | J | Isoleucyl-tRNA synthetase |
| 1683 | 1634125 | 1634739 | 455253 | 454639 | 276 | f-1 | 1634227 | 1634494 | 33 | AraJ | G | Arabinose efflux permease |
| 1684 | 1634253 | 1634369 | 455125 | 455009 | 1550 | r-2 | 1634256 | 1634337 | 27 | SUL1 | P | Sulfate permease and related |
| | | | | | | | | | | | | transporters (MFS superfamily) |
| 1685 | 1634744 | 1635046 | 454634 | 454332 | 633 | f-2 | 1634744 | 1635005 | 108 | MarR | K | Transcriptional regulators |
| 1686 | 1635049 | 1636365 | 454329 | 453013 | 1183 | r-1 | 1635139 | 1636348 | 703 | BglB | G | Beta-glucosidase/6-phospho-beta- |
| | | | | | | | | | | | | glucosidase/beta-galactosidase |
| 1687 | 1636376 | 1637356 | 453002 | 452022 | 634 | f-2 | 1636376 | 1637351 | 544 | GalT | C | Galactose-1-phosphate |
| | | | | | | | | | | | | uridylyltransferase |
| 1688 | 1637336 | 1638673 | 452042 | 450705 | 1894 | r-3 | 1637342 | 1638653 | 675 | | | |
| 1689 | 1638670 | 1639755 | 450708 | 449623 | 1182 | r-1 | 1638670 | 1639744 | 536 | — | S | Uncharacterized ACR |
| 1690 | 1639752 | 1640816 | 449626 | 448562 | 1549 | r-2 | 1639764 | 1640805 | 404 | GalK | G | Galactokinase |
| 1691 | 1640937 | 1641557 | 448441 | 447821 | 1548 | r-2 | 1641177 | 1641468 | 34 | — | S | Predicted membrane protein |
| 1692 | 1641581 | 1643545 | 447797 | 445833 | 1893 | r-3 | 1641581 | 1643381 | 744 | — | S | Uncharacterized ACR |
| 1693 | 1643712 | 1644038 | 445666 | 445340 | 1007 | f-3 | 1643826 | 1644036 | 33 | ArgS | J | Arginyl-tRNA synthetase |
| 1694 | 1644035 | 1644664 | 445343 | 444714 | 1892 | r-3 | 1644044 | 1644641 | 198 | Pcp | O | Pyrrolidone-carboxylate peptidase |
| | | | | | | | | | | | | (N-terminal pyroglutamyl |
| | | | | | | | | | | | | peptidase) |
| 1695 | 1644711 | 1645832 | 444667 | 443546 | 1008 | f-3 | 1644717 | 1645830 | 464 | FixC | C | Dehydrogenases (flavoproteins) |
| 1696 | 1645842 | 1646195 | 443536 | 443183 | 1009 | f-3 | 1645923 | 1646169 | 33 | BisC | C | Anaerobic dehydrogenases |
| 1697 | 1646550 | 1647749 | 442828 | 441629 | 1010 | f-3 | 1647372 | 1647549 | 32 | UgpB | G | Sugar-binding periplasmic |
| | | | | | | | | | | | | proteins/domains |
| 1698 | 1651192 | 1652691 | 438186 | 436687 | 1181 | r-1 | 1651192 | 1652689 | 865 | — | E | Zn-dependent carboxypeptidases |
| 1699 | 1652842 | 1653462 | 436536 | 435916 | 277 | f-1 | 1652848 | 1653448 | 222 | — | L | Predicted site-specific |
| | | | | | | | | | | | | integrase-resolvase |
| 1700 | 1653443 | 1654624 | 435935 | 434754 | 635 | f-2 | 1653509 | 1654499 | 137 | — | L | Predicted transposases |
| 1701 | 1654676 | 1655512 | 434702 | 433866 | 636 | f-2 | 1654808 | 1655423 | 74 | RbsK | G | Sugar kinases |
| 1702 | 1655924 | 1656976 | 433454 | 432402 | 1891 | r-3 | 1655990 | 1656971 | 407 | — | S | Uncharacterized ACR |
| 1703 | 1657257 | 1658210 | 432121 | 431168 | 1547 | r-2 | 1657269 | 1658208 | 465 | — | R | MoxR-like ATPases |
| 1704 | 1658633 | 1658857 | 430745 | 430521 | 1890 | r-3 | 1658633 | 1658831 | 97 | PppA | N | Signal peptidase |
| 1705 | 1659540 | 1660034 | 429838 | 429344 | 1011 | f-3 | 1659564 | 1659858 | 32 | — | S | Uncharacterized ArCR |
| 1706 | 1660137 | 1660616 | 429241 | 428762 | 1012 | f-3 | 1660143 | 1660560 | 142 | SlpA | O | FKBP-type peptidyl-prolyl |
| | | | | | | | | | | | | cis-trans isomerases 2 |
| 1707 | 1660605 | 1661033 | 428773 | 428345 | 1546 | r-2 | 1660605 | 1661031 | 155 | — | S | Predicted membrane protein |
| 1708 | 1661293 | 1661439 | 428085 | 427939 | 278 | f-1 | | | | | | |
| 1709 | 1661519 | 1662583 | 427859 | 426795 | 1889 | r-3 | 1661531 | 1662581 | 392 | — | S | Predicted membrane protein |
| 1710 | 1662585 | 1666019 | 426793 | 423359 | 1545 | r-2 | 1663962 | 1665537 | 735 | — | L | Inteins |
| 1711 | 1666185 | 1666505 | 423193 | 422873 | 1544 | r-2 | 1666254 | 1666413 | 29 | AcoA | C | Thiamine |
| | | | | | | | | | | | | pyrophosphate-dependent |
| | | | | | | | | | | | | dehydrogenases |
| 1712 | 1667046 | 1668500 | 422332 | 420878 | 1543 | r-2 | 1667046 | 1668477 | 231 | — | S | Uncharacterized ArCR |
| 1713 | 1668573 | 1668914 | 420805 | 420464 | 1013 | f-3 | 1668708 | 1668849 | 30 | — | L | Predicted transposase |
| 1714 | 1668871 | 1669944 | 420507 | 419434 | 279 | f-1 | 1668952 | 1669942 | 506 | — | R | Predicted GTPases |
| 1715 | 1669941 | 1671896 | 419437 | 417482 | 1542 | r-2 | 1670538 | 1670883 | 48 | — | R | ABC-type transport systems |
| 1716 | 1671856 | 1672545 | 417522 | 416833 | 1180 | r-1 | 1671859 | 1672504 | 200 | PhnL | R | ABC-type transport systems |
| 1717 | 1672642 | 1672686 | 416736 | 416692 | 1179 | r-1 | | | | | | |
| 1718 | 1672713 | 1673096 | 416665 | 416282 | 1541 | r-2 | 1672713 | 1673079 | 144 | DppC | EP | ABC-type |
| | | | | | | | | | | | | dipeptide/oligopeptide/nickel |
| | | | | | | | | | | | | transport systems |
| 1719 | 1673965 | 1674999 | 415413 | 414379 | 1178 | r-1 | 1673965 | 1674997 | 226 | DppB | EP | ABC-type |
| | | | | | | | | | | | | dipeptide/oligopeptide/nickel |
| | | | | | | | | | | | | transport systems |
| 1720 | 1675448 | 1676545 | 413930 | 412833 | 637 | f-2 | 1675448 | 1676543 | 556 | — | L | Predicted N6-adenine-specific |
| | | | | | | | | | | | | DNA methylases |
| 1721 | 1676630 | 1677790 | 412748 | 411588 | 638 | f-2 | 1676780 | 1677785 | 572 | PstS | P | ABC-type phosphate transport |
| | | | | | | | | | | | | system |
| 1722 | 1677812 | 1678636 | 411566 | 410742 | 639 | f-2 | 1677812 | 1678583 | 259 | IolE | G | Sugar phosphate |
| | | | | | | | | | | | | isomerases/epimerases |
| 1723 | 1678705 | 1679553 | 410673 | 409825 | 280 | f-1 | 1678705 | 1679548 | 414 | PstC | P | ABC-type phosphate transport |
| | | | | | | | | | | | | system |
| 1724 | 1679540 | 1680370 | 409838 | 409008 | 640 | f-2 | 1679555 | 1680299 | 326 | PstA | P | ABC-type phosphate transport |
| | | | | | | | | | | | | system |
| 1725 | 1680367 | 1681128 | 409011 | 408250 | 281 | f-1 | 1680373 | 1681126 | 395 | PstB | P | ABC-type phosphate transport |
| | | | | | | | | | | | | system |
| 1726 | 1681383 | 1681730 | 407995 | 407648 | 1014 | f-3 | 1681476 | 1681683 | 44 | PhoU | P | Phosphate uptake regulator |
| 1727 | 1681740 | 1682333 | 407638 | 407045 | 1015 | f-3 | 1681740 | 1682328 | 251 | PhoU | P | Phosphate uptake regulator |
| 1728 | 1682428 | 1682817 | 406950 | 406561 | 282 | f-1 | 1682536 | 1682704 | 33 | WcaA | M | Glycosyltransferases involved in |
| | | | | | | | | | | | | cell wall biogenesis |
| 1729 | 1682818 | 1683495 | 406560 | 405883 | 1177 | r-1 | 1682821 | 1683493 | 387 | MhpD | Q | 2-keto-4-pentenoate |
| | | | | | | | | | | | | hydratase/2-oxohepta-3-ene-1 |
| 1730 | 1683568 | 1684578 | 405810 | 404800 | 1176 | r-1 | 1683847 | 1684462 | 56 | PepN | E | Aminopeptidase N |
| 1731 | 1684439 | 1684564 | 404939 | 404814 | 641 | f-2 | 1684475 | 1684559 | 26 | Lon | O | ATP-dependent Lon protease |
| 1732 | 1685535 | 1686689 | 403843 | 402689 | 1540 | r-2 | 1685535 | 1686684 | 652 | TrpS | J | Tryptophanyl-tRNA synthetase |
| 1733 | 1686869 | 1687045 | 402509 | 402333 | 642 | f-2 | 1686875 | 1687043 | 62 | — | S | Uncharacterized ArCR |
| 1734 | 1687089 | 1687931 | 402289 | 401447 | 1016 | f-3 | 1687152 | 1687899 | 185 | RhaT | GER | Permeases of the drug/metabolite |
| | | | | | | | | | | | | transporter (DMT) superfamily |
| | | | | | | | | | | | | COG0697 RhaT |
| 1735 | 1687932 | 1689299 | 401446 | 400079 | 1539 | r-2 | 1687932 | 1689249 | 416 | — | R | Predicted ATPase of the AAA |
| | | | | | | | | | | | | superfamily |
| 1736 | 1689399 | 1690175 | 399979 | 399203 | 1017 | f-3 | 1689399 | 1690173 | 345 | PhnP | R | Metal-dependent hydrolases of |
| | | | | | | | | | | | | the beta-lactamase superfamily I |
| 1737 | 1691003 | 1692442 | 398375 | 396936 | 1888 | r-3 | 1691042 | 1692428 | 796 | — | C | Acyl-CoA synthetase (NDP |
| | | | | | | | | | | | | forming) |
| 1738 | 1692515 | 1693180 | 396863 | 396198 | 643 | f-2 | 1692605 | 1693172 | 303 | ArsR | K | Predicted transcriptional |
| | | | | | | | | | | | | regulators |
| 1739 | 1693184 | 1693489 | 396194 | 395889 | 644 | f-2 | 1693184 | 1693484 | 186 | — | S | Uncharacterized ArCR |
| 1740 | 1693499 | 1694056 | 395879 | 395322 | 645 | f-2 | 1693508 | 1694048 | 163 | ArsR | K | Predicted transcriptional |
| | | | | | | | | | | | | regulators |
| 1741 | 1694157 | 1695629 | 395221 | 393749 | 1018 | f-3 | 1694355 | 1695186 | 159 | AmyA | G | Glycosidases |
| 1742 | 1695642 | 1696265 | 393736 | 393113 | 1538 | r-2 | 1695957 | 1696233 | 33 | PurC | F | Phosphoribosylaminoimidazolesuccinocarboxamide |
| | | | | | | | | | | | | (SAICAR) |
| | | | | | | | | | | | | synthase |
| 1743 | 1696275 | 1697726 | 393103 | 391652 | 1537 | r-2 | 1696845 | 1697721 | 342 | — | G | Predicted sugar kinase |
| 1744 | 1697807 | 1698145 | 391571 | 391233 | 646 | f-2 | 1697810 | 1697912 | 30 | MelB | G | Na+/melibiose symporter and |
| | | | | | | | | | | | | related transporters |
| 1745 | 1699092 | 1699178 | 390286 | 390200 | 1019 | f-3 | | | | | | |
| 1746 | 1699622 | 1700173 | 389756 | 389205 | 1887 | r-3 | 1699640 | 1700171 | 246 | — | S | Uncharacterized ACR related to |
| | | | | | | | | | | | | the C-terminal domain of histone |
| | | | | | | | | | | | | macroH2A1 |
| 1747 | 1700210 | 1701493 | 389168 | 387885 | 1886 | r-3 | 1700210 | 1701479 | 464 | SsnA | FR | Cytosine deaminase and related |
| | | | | | | | | | | | | metal-dependent hydrolases |
| | | | | | | | | | | | | COG0402 SsnA |
| 1748 | 1703531 | 1704163 | 385847 | 385215 | 647 | f-2 | 1703534 | 1704155 | 92 | — | R | Predicted transglutaminase-like |
| | | | | | | | | | | | | proteases |
| 1749 | 1704224 | 1704970 | 385154 | 384408 | 1885 | r-3 | 1704326 | 1704965 | 243 | GckA | G | Putative glycerate kinase |
| 1750 | 1704989 | 1705141 | 384389 | 384237 | 1884 | r-3 | 1704989 | 1705127 | 25 | — | S | Uncharacterized membrane |
| | | | | | | | | | | | | protein |
| 1751 | 1705367 | 1706314 | 384011 | 383064 | 1883 | r-3 | 1705532 | 1706312 | 441 | Pnp | F | Purine nucleoside phosphorylase |
| 1752 | 1706139 | 1706984 | 383239 | 382394 | 1020 | f-3 | 1706256 | 1706982 | 384 | — | R | Archaeal enzymes of ATP-grasp |
| | | | | | | | | | | | | superfamily |
| 1753 | 1706986 | 1707378 | 382392 | 382000 | 283 | f-1 | 1706995 | 1707373 | 151 | — | S | Uncharacterized ACR |
| 1754 | 1707375 | 1708133 | 382003 | 381245 | 1536 | r-2 | 1707387 | 1708125 | 346 | — | L | Predicted nuclease of the RecB |
| | | | | | | | | | | | | family |
| 1755 | 1708168 | 1710714 | 381210 | 378664 | 1175 | r-1 | 1710097 | 1710712 | 349 | RecA | L | RecA/RadA recombinase |
| 1756 | 1710855 | 1711487 | 378523 | 377891 | 1535 | r-2 | 1710987 | 1711224 | 54 | Kch | P | Kef-type K+ transport systems |
| 1757 | 1712778 | 1714040 | 376600 | 375338 | 1021 | f-3 | 1712805 | 1713984 | 651 | CDC6 | LO | Cdc6-related protein |
| 1758 | 1714040 | 1716247 | 375338 | 373131 | 648 | f-2 | 1714652 | 1716230 | 621 | HYS2 | L | DNA polymerase small subunit |
| 1759 | 1716248 | 1721644 | 373130 | 367734 | 649 | f-2 | 1716272 | 1719128 | 1536 | — | L | Novel archaeal DNA polymerase |
| | | | | | | | | | | | | (contains Zn-fingers) |
| 1760 | 1721669 | 1722406 | 367709 | 366972 | 650 | f-2 | 1721813 | 1722029 | 31 | CpsG | G | Phosphomannomutase |
| 1761 | 1722894 | 1723436 | 366484 | 365942 | 1022 | f-3 | 1723122 | 1723365 | 39 | — | L | Predicted nuclease of the RecB |
| | | | | | | | | | | | | family |
| 1762 | 1725222 | 1725860 | 364156 | 363518 | 1023 | f-3 | 1725222 | 1725828 | 250 | — | S | Uncharacterized ACR |
| 1763 | 1725857 | 1726705 | 363521 | 362673 | 1882 | r-3 | 1725956 | 1726703 | 376 | LplA | H | Lipoate-protein ligase A |
| 1764 | 1727964 | 1729022 | 361414 | 360356 | 1024 | f-3 | 1727964 | 1728660 | 358 | WcaA | M | Glycosyltransferases involved in |
| | | | | | | | | | | | | cell wall biogenesis |
| 1765 | 1729029 | 1729787 | 360349 | 359591 | 1025 | f-3 | 1729104 | 1729779 | 218 | RAD55 | T | RecA-superfamily ATPases |
| | | | | | | | | | | | | implicated in signal transduction |
| 1766 | 1729784 | 1730227 | 359594 | 359151 | 651 | f-2 | 1729898 | 1730222 | 41 | RacX | M | Aspartate racemase |
| 1767 | 1730270 | 1731955 | 359108 | 357423 | 652 | f-2 | 1730270 | 1731941 | 651 | Iap | R | Predicted aminopeptidases |
| 1768 | 1731945 | 1732280 | 357433 | 357098 | 1534 | r-2 | 1731963 | 1732158 | 40 | — | K | Predicted transcriptional |
| | | | | | | | | | | | | regulators |
| 1769 | 1732332 | 1732982 | 357046 | 356396 | 1533 | r-2 | 1732377 | 1732974 | 216 | — | R | Predicted ICC-like |
| | | | | | | | | | | | | phosphoesterases |
| 1770 | 1732998 | 1733120 | 356380 | 356258 | 1532 | r-2 | | | | | | |
| 1771 | 1733473 | 1734267 | 355905 | 355111 | 284 | f-1 | 1733473 | 1734256 | 398 | — | R | Predicted amidohydrolase |
| 1772 | 1734255 | 1735046 | 355123 | 354332 | 1531 | r-2 | 1734255 | 1735020 | 255 | SmtA | QR | SAM-dependent |
| | | | | | | | | | | | | methyltransferases COG0500 |
| | | | | | | | | | | | | SmtA |
| 1773 | 1735212 | 1735793 | 354166 | 353585 | 1026 | f-3 | 1735221 | 1735443 | 29 | PstA | P | ABC-type phosphate transport |
| | | | | | | | | | | | | system |
| 1774 | 1736419 | 1736520 | 352959 | 352858 | 285 | f-1 | | | | | | |
| 1775 | 1736456 | 1736896 | 352922 | 352482 | 653 | f-2 | 1736540 | 1736717 | 32 | — | K | Predicted transcriptional regulator |
| 1776 | 1736893 | 1737423 | 352485 | 351955 | 1174 | r-1 | 1737130 | 1737328 | 30 | CcmB | O | ABC-type transport system |
| | | | | | | | | | | | | involved in cytochrome c |
| | | | | | | | | | | | | biogenesis |
| 1777 | 1737620 | 1738414 | 351758 | 350964 | 1881 | r-3 | 1738181 | 1738397 | 33 | FeoB | P | Ferrous ion uptake system protein |
| | | | | | | | | | | | | FeoB (predicted GTPase) |
| 1778 | 1738777 | 1739505 | 350601 | 349873 | 1173 | r-1 | 1738843 | 1738912 | 33 | ChrA | P | Chromate transport protein ChrA |
| 1779 | 1739502 | 1739852 | 349876 | 349526 | 1530 | r-2 | 1739508 | 1739850 | 169 | — | S | Uncharacterized ACR |
| 1780 | 1739935 | 1740549 | 349443 | 348829 | 1172 | r-1 | 1740337 | 1740451 | 32 | CarA | EF | Carbamoylphosphate synthase |
| | | | | | | | | | | | | small subunit COG0505 CarA |
| 1781 | 1740792 | 1741826 | 348586 | 347552 | 1027 | f-3 | 1740801 | 1741818 | 515 | DPH2 | J | Diphthamide synthase subunit |
| | | | | | | | | | | | | DPH2 |
| 1782 | 1741926 | 1743704 | 347452 | 345674 | 1028 | f-3 | 1742919 | 1743285 | 38 | FlaD | N | Putative archaeal flagellar protein |
| | | | | | | | | | | | | D/E |
| 1783 | 1743694 | 1743957 | 345684 | 345421 | 1171 | r-1 | 1743727 | 1743910 | 31 | RpoE | K | DNA-directed RNA polymerase |
| | | | | | | | | | | | | specialized sigma subunits |
| 1784 | 1743938 | 1744243 | 345440 | 345135 | 1880 | r-3 | 1744073 | 1744232 | 30 | SIR2 | H | NAD-dependent protein |
| | | | | | | | | | | | | deacetylases |
| 1785 | 1744245 | 1745591 | 345133 | 343787 | 1529 | r-2 | 1744263 | 1745559 | 346 | RAD55 | T | RecA-superfamily ATPases |
| | | | | | | | | | | | | implicated in signal transduction |
| 1786 | 1745650 | 1746300 | 343728 | 343078 | 286 | f-1 | 1745671 | 1746277 | 250 | — | J | Predicted RNA methylase |
| 1787 | 1746894 | 1747268 | 342484 | 342110 | 1029 | f-3 | 1746915 | 1747134 | 31 | — | L | Superfamily I DNA and RNA |
| | | | | | | | | | | | | helicases and helicase subunits |
| 1788 | 1747308 | 1748660 | 342070 | 340718 | 1030 | f-3 | 1747314 | 1748610 | 504 | Sun | J | tRNA and rRNA |
| | | | | | | | | | | | | cytosine-C5-methylases |
| 1789 | 1749755 | 1749931 | 339623 | 339447 | 1879 | r-3 | 1749755 | 1749899 | 26 | TatC | N | Sec-independent protein secretion |
| | | | | | | | | | | | | pathway component TatC |
| 1790 | 1749900 | 1749992 | 339478 | 339386 | 1031 | f-3 | | | | | | |
| 1791 | 1750416 | 1751543 | 338962 | 337835 | 1528 | r-2 | 1750896 | 1751238 | 32 | CirA | P | Outer membrane receptor proteins |
| 1792 | 1751717 | 1752793 | 337661 | 336585 | 1878 | r-3 | 1751852 | 1752785 | 449 | MscS | M | Small-conductance |
| | | | | | | | | | | | | mechanosensitive channel |
| 1793 | 1752795 | 1753493 | 336583 | 335885 | 1527 | r-2 | 1752852 | 1753491 | 155 | — | S | Uncharacterized ACR |
| 1794 | 1753468 | 1755291 | 335910 | 334087 | 1170 | r-1 | 1755019 | 1755211 | 37 | Mfd | LK | Transcription-repair coupling |
| | | | | | | | | | | | | factor - superfamily II helicase |
| | | | | | | | | | | | | COG1197 Mfd |
| 1795 | 1755444 | 1756100 | 333934 | 333278 | 1526 | r-2 | 1755450 | 1756041 | 210 | — | S | Uncharacterized ACR |
| 1796 | 1756133 | 1756924 | 333245 | 332454 | 1877 | r-3 | 1756133 | 1756826 | 127 | — | S | Uncharacterized ACR |
| 1797 | 1757029 | 1757460 | 332349 | 331918 | 1169 | r-1 | 1757053 | 1757452 | 175 | — | R | Uncharacterized proteins of PilT |
| | | | | | | | | | | | | N-term./Vapc superfamily |
| 1798 | 1757494 | 1758735 | 331884 | 330643 | 1168 | r-1 | 1757503 | 1758730 | 716 | TufB | JE | GTPases - translation elongation |
| | | | | | | | | | | | | factors COG0050 TufB |
| 1799 | 1758870 | 1758998 | 330508 | 330380 | 1525 | r-2 | | | | | | |
| 1800 | 1760394 | 1760735 | 328984 | 328643 | 1032 | f-3 | 1760619 | 1760721 | 27 | — | L | Adenine-specific DNA methylase |
| 1801 | 1762166 | 1762558 | 327212 | 326820 | 1876 | r-3 | 1762181 | 1762556 | 176 | RPS6A | J | Ribosomal protein S6E (S10) |
| 1802 | 1762676 | 1762846 | 326702 | 326532 | 654 | f-2 | 1762772 | 1762844 | 27 | Kup | P | K+ transporter |
| 1803 | 1762843 | 1763493 | 326535 | 325885 | 1167 | r-1 | 1763275 | 1763446 | 33 | Smc | D | Chromosome segregation |
| | | | | | | | | | | | | ATPases |
| 1804 | 1763590 | 1764141 | 325788 | 325237 | 287 | f-1 | 1763593 | 1764109 | 251 | — | R | Predicted GTPases |
| 1805 | 1764136 | 1764609 | 325242 | 324769 | 1166 | r-1 | 1764163 | 1764607 | 251 | Lrp | K | Transcriptional regulators |
| 1806 | 1764704 | 1765804 | 324674 | 323574 | 655 | f-2 | 1764752 | 1765748 | 348 | — | R | Predicted GTPase or |
| | | | | | | | | | | | | GTP-binding protein |
| 1807 | 1765840 | 1766682 | 323538 | 322696 | 288 | f-1 | 1765849 | 1766680 | 343 | UbiA | H | 4-hydroxybenzoate |
| | | | | | | | | | | | | polyprenyltransferase |
| 1808 | 1766679 | 1767068 | 322699 | 322310 | 1033 | f-3 | 1766814 | 1766988 | 29 | Arp | R | Ankyrin repeat proteins |
| 1809 | 1767079 | 1767885 | 322299 | 321493 | 1165 | r-1 | 1767079 | 1767619 | 281 | — | S | Uncharacterized ArCR |
| 1810 | 1767919 | 1768269 | 321459 | 321109 | 1164 | r-1 | 1768081 | 1768183 | 32 | MukB | D | Uncharacterized protein involved |
| | | | | | | | | | | | | in chromosome partitioning |
| 1811 | 1768271 | 1769350 | 321107 | 320028 | 1875 | r-3 | 1768280 | 1769300 | 431 | — | L | Replication factor A large subunit |
| | | | | | | | | | | | | and related ssDNA-binding |
| | | | | | | | | | | | | proteins |
| 1812 | 1769469 | 1770143 | 319909 | 319235 | 1524 | r-2 | 1769559 | 1770099 | 308 | — | K | Predicted transcriptional regulator |
| | | | | | | | | | | | | containing the HTH domain |
| 1813 | 1770892 | 1772169 | 318486 | 317209 | 289 | f-1 | 1770901 | 1772104 | 447 | SfcA | C | Malic enzyme |
| 1814 | 1772144 | 1772719 | 317234 | 316659 | 1874 | r-3 | 1772201 | 1772711 | 199 | FumA | C | Tartrate dehydratase beta |
| | | | | | | | | | | | | subunit/Fumarate hydratase class I |
| 1815 | 1772653 | 1773303 | 316725 | 316075 | 1163 | r-1 | 1772680 | 1773301 | 226 | TtdA | C | Tartrate dehydratase alpha |
| | | | | | | | | | | | | subunit/Fumarate hydratase class I |
| 1816 | 1773571 | 1774485 | 315807 | 314893 | 1162 | r-1 | 1773571 | 1774483 | 523 | SerA | E | Phosphoglycerate dehydrogenase |
| | | | | | | | | | | | | and related dehydrogenases |
| 1817 | 1774489 | 1775145 | 314889 | 314233 | 1161 | r-1 | 1774504 | 1775140 | 266 | — | P | Phosphate transport regulator |
| | | | | | | | | | | | | (distant homolog of PhoU) |
| 1818 | 1775139 | 1776068 | 314239 | 313310 | 1523 | r-2 | 1775139 | 1776039 | 357 | ApbA | H | Ketopantoate reductase |
| 1819 | 1776073 | 1776540 | 313305 | 312838 | 1160 | r-1 | | | | | | |
| 1820 | 1776586 | 1777293 | 312792 | 312085 | 290 | f-1 | 1776589 | 1777270 | 186 | LasT | J | rRNA methylase |
| 1821 | 1777281 | 1777811 | 312097 | 311567 | 1034 | f-3 | 1777287 | 1777806 | 173 | Ada | L | Methylated DNA-protein cysteine |
| | | | | | | | | | | | | methyltransferase (O6 |
| | | | | | | | | | | | | methylguanine DNA |
| | | | | | | | | | | | | methyltransferase) |
| 1822 | 1777799 | 1778830 | 311579 | 310548 | 656 | f-2 | 1777799 | 1778813 | 413 | NrfG | R | TPR-repeat-containing proteins |
| 1823 | 1779069 | 1779554 | 310309 | 309824 | 1035 | f-3 | 1779219 | 1779549 | 131 | EGD2 | K | Transcription factor homologous |
| | | | | | | | | | | | | to NACalpha-BTF3 |
| 1824 | 1779558 | 1779923 | 309820 | 309455 | 1522 | r-2 | 1779657 | 1779912 | 68 | — | S | Uncharacterized ACR |
| 1825 | 1779979 | 1781619 | 309399 | 307759 | 1159 | r-1 | 1780849 | 1781521 | 40 | NtpC | C | Archaeal/vacuolar-type |
| | | | | | | | | | | | | H+-ATPase subunit C |
| 1826 | 1781597 | 1782928 | 307781 | 306450 | 657 | f-2 | 1781600 | 1782872 | 573 | HflX | R | GTPases |
| 1827 | 1782866 | 1783828 | 306512 | 305550 | 1873 | r-3 | 1782914 | 1783826 | 312 | PitA | P | Phosphate/sulphate permeases |
| 1828 | 1784010 | 1784594 | 305368 | 304784 | 1036 | f-3 | 1784037 | 1784592 | 213 | PorG | C | Pyruvate:ferredoxin |
| | | | | | | | | | | | | oxidoreductase and related |
| | | | | | | | | | | | | 2-oxoacid:ferredoxin |
| | | | | | | | | | | | | oxidoreductases |
| 1829 | 1784774 | 1784953 | 304604 | 304425 | 658 | f-2 | 1784774 | 1784951 | 125 | — | C | Pyruvate:ferredoxin |
| | | | | | | | | | | | | oxidoreductase and related |
| | | | | | | | | | | | | 2-oxoacid:ferredoxin |
| | | | | | | | | | | | | oxidoreductases |
| 1830 | 1784955 | 1786151 | 304423 | 303227 | 1037 | f-3 | 1784964 | 1786149 | 643 | PorA | C | Pyruvate:ferredoxin |
| | | | | | | | | | | | | oxidoreductase and related |
| | | | | | | | | | | | | 2-oxoacid:ferredoxin |
| | | | | | | | | | | | | oxidoreductases |
| 1831 | 1786148 | 1787092 | 303230 | 302286 | 659 | f-2 | 1786157 | 1787090 | 559 | PorB | C | Pyruvate:ferredoxin |
| | | | | | | | | | | | | oxidoreductase and related |
| | | | | | | | | | | | | 2-oxoacid:ferredoxin |
| | | | | | | | | | | | | oxidoreductases |
| 1832 | 1787147 | 1787473 | 302231 | 301905 | 660 | f-2 | 1787156 | 1787471 | 207 | — | C | Pyruvate:ferredoxin |
| | | | | | | | | | | | | oxidoreductase and related |
| | | | | | | | | | | | | 2-oxoacid:ferredoxin |
| | | | | | | | | | | | | oxidoreductases |
| 1833 | 1787485 | 1788669 | 301893 | 300709 | 291 | f-1 | 1787485 | 1788664 | 609 | PorA | C | Pyruvate:ferredoxin |
| | | | | | | | | | | | | oxidoreductase and related |
| | | | | | | | | | | | | 2-oxoacid:ferredoxin |
| | | | | | | | | | | | | oxidoreductases |
| 1834 | 1788671 | 1789675 | 300707 | 299703 | 661 | f-2 | 1788677 | 1789673 | 537 | PorB | C | Pyruvate:ferredoxin |
| | | | | | | | | | | | | oxidoreductase and related |
| | | | | | | | | | | | | 2-oxoacid:ferredoxin |
| | | | | | | | | | | | | oxidoreductases |
| 1835 | 1789714 | 1790697 | 299664 | 298681 | 292 | f-1 | 1790005 | 1790227 | 33 | MhpC | R | Predicted hydrolases or |
| | | | | | | | | | | | | acyltransferases (alpha/beta |
| | | | | | | | | | | | | hydrolase superfamily) |
| 1836 | 1790705 | 1791568 | 298673 | 297810 | 662 | f-2 | 1791065 | 1791434 | 32 | HemE | H | Uroporphyrinogen-III |
| | | | | | | | | | | | | decarboxylase |
| 1837 | 1791624 | 1791959 | 297754 | 297419 | 1038 | f-3 | 1791801 | 1791948 | 29 | RfaG | M | Predicted glycosyltransferases |
| 1838 | 1791963 | 1792769 | 297415 | 296609 | 1039 | f-3 | 1792029 | 1792191 | 32 | MoaD | H | Molybdopterin converting factor |
| 1839 | 1792792 | 1793328 | 296586 | 296050 | 293 | f-1 | 1792792 | 1793008 | 33 | Qor | CR | NADPH:quinone reductase and |
| | | | | | | | | | | | | related Zn-dependent |
| | | | | | | | | | | | | oxidoreductases COG0604 Qor |
| 1840 | 1793325 | 1794524 | 296053 | 294854 | 1521 | r-2 | 1793325 | 1794519 | 702 | CsdB | E | Selenocysteine lyase |
| 1841 | 1794521 | 1794823 | 294857 | 294555 | 1872 | r-3 | 1794566 | 1794758 | 35 | — | S | Uncharacterized ACR |
| 1842 | 1794964 | 1796124 | 294414 | 293254 | 294 | f-1 | 1794988 | 1796095 | 285 | | | |
| 1843 | 1796129 | 1797154 | 293249 | 292224 | 1871 | r-3 | 1796147 | 1797152 | 553 | HypE | O | Hydrogenase maturation factor |
| 1844 | 1797235 | 1797561 | 292143 | 291817 | 1158 | r-1 | 1797256 | 1797493 | 70 | — | R | Predicted nucleotidyltransferases |
| 1845 | 1797561 | 1797665 | 291817 | 291713 | 1520 | r-2 | 1797561 | 1797663 | 43 | VapC | R | Predicted nucleic acid-binding |
| | | | | | | | | | | | | protein |
| 1846 | 1797874 | 1798116 | 291504 | 291262 | 1157 | r-1 | | | | | | |
| 1847 | 1798158 | 1800545 | 291220 | 288833 | 1519 | r-2 | 1798227 | 1800540 | 1259 | HypF | O | Hydrogenase maturation factor |
| 1848 | 1800686 | 1801306 | 288692 | 288072 | 1870 | r-3 | 1800704 | 1801031 | 33 | Eno | G | Enolase |
| 1849 | 1801592 | 1802125 | 287786 | 287253 | 663 | f-2 | 1801595 | 1802084 | 187 | Ftn | P | Ferritin-like protein |
| 1850 | 1802245 | 1803363 | 287133 | 286015 | 1156 | r-1 | 1802260 | 1803361 | 605 | HypD | O | Hydrogenase maturation factor |
| 1851 | 1803363 | 1803602 | 286015 | 285776 | 1518 | r-2 | 1803375 | 1803597 | 108 | HypC | O | Hydrogenase maturation factor |
| 1852 | 1803666 | 1804280 | 285712 | 285098 | 1040 | f-3 | 1803675 | 1804212 | 246 | MobA | H | Molybdopterin-guanine |
| | | | | | | | | | | | | dinucleotide biosynthesis protein A |
| 1853 | 1804317 | 1804535 | 285061 | 284843 | 1517 | r-2 | 1804335 | 1804389 | 25 | CelB | G | Phosphotransferase system |
| | | | | | | | | | | | | cellobiose-specific component IIC |
| 1854 | 1804571 | 1805047 | 284807 | 284331 | 1869 | r-3 | 1804607 | 1804994 | 135 | HyaD | C | Ni(Hydrogenase maturation |
| | | | | | | | | | | | | factor) |
| 1855 | 1805521 | 1805853 | 283857 | 283525 | 1155 | r-1 | 1805653 | 1805707 | 28 | SrmB | LKJ | Superfamily II DNA and RNA |
| | | | | | | | | | | | | helicases COG0513 SrmB |
| 1856 | 1805911 | 1806657 | 283467 | 282721 | 1154 | r-1 | 1805920 | 1806655 | 359 | Mrp | D | ATPases involved in chromosome |
| | | | | | | | | | | | | partitioning(Hydrogenase |
| | | | | | | | | | | | | maturation factor) |
| 1857 | 1806654 | 1807073 | 282724 | 282305 | 1516 | r-2 | 1806654 | 1807068 | 204 | HybF | R | Zn finger protein HypA/HybF |
| | | | | | | | | | | | | (possibly regulating hydrogenase |
| | | | | | | | | | | | | expression)(Hydrogenase |
| | | | | | | | | | | | | maturation factor) |
| 1858 | 1807161 | 1808084 | 282217 | 281294 | 1041 | f-3 | 1807203 | 1808076 | 384 | CzcD | P | Co/Zn/Cd efflux system |
| | | | | | | | | | | | | component |
| 1859 | 1808249 | 1808404 | 281129 | 280974 | 664 | f-2 | 1808249 | 1808387 | 80 | — | S | Uncharacterized ACR |
| 1860 | 1808394 | 1808819 | 280984 | 280559 | 1515 | r-2 | 1808403 | 1808814 | 190 | — | C | Ferredoxin 3 |
| 1861 | 1808985 | 1811618 | 280393 | 277760 | 1042 | f-3 | 1810719 | 1811187 | 32 | ArtI | E | ABC-type amino acid transport |
| | | | | | | | | | | | | system |
| 1862 | 1811744 | 1812487 | 277634 | 276891 | 665 | f-2 | 1811753 | 1812473 | 339 | — | R | Predicted permeases |
| 1863 | 1812518 | 1813510 | 276860 | 275868 | 1868 | r-3 | 1812518 | 1813508 | 476 | TehA | P | Tellurite resistance protein and |
| | | | | | | | | | | | | related permeases |
| 1864 | 1813353 | 1813550 | 276025 | 275828 | 1043 | f-3 | 1813368 | 1813533 | 29 | ZntA | P | Cation transport ATPases |
| 1865 | 1813638 | 1814054 | 275740 | 275324 | 1514 | r-2 | 1813665 | 1814004 | 163 | — | S | Uncharacterized ACR |
| 1866 | 1814141 | 1814644 | 275237 | 274734 | 1867 | r-3 | 1814216 | 1814633 | 227 | — | S | Uncharacterized ACR |
| 1867 | 1814559 | 1814648 | 274819 | 274730 | 1044 | f-3 | | | | | | |
| 1868 | 1814829 | 1815962 | 274549 | 273416 | 1045 | f-3 | 1814829 | 1815960 | 486 | FecB | P | ABC-type Fe3+-siderophores |
| | | | | | | | | | | | | transport systems |
| 1869 | 1815959 | 1817002 | 273419 | 272376 | 666 | f-2 | 1815974 | 1816997 | 415 | BtuC | PH | ABC-type |
| | | | | | | | | | | | | cobalamin/Fe3+-siderophores |
| | | | | | | | | | | | | transport systems |
| 1870 | 1816999 | 1817745 | 272379 | 271633 | 295 | f-1 | 1817017 | 1817737 | 273 | FepC | PH | ABC-type |
| | | | | | | | | | | | | cobalamin/Fe3+-siderophores |
| | | | | | | | | | | | | transport systems |
| 1871 | 1817756 | 1818715 | 271622 | 270663 | 667 | f-2 | 1817828 | 1818653 | 497 | Mrp | D | ATPases involved in chromosome |
| | | | | | | | | | | | | partitioning |
| 1872 | 1819570 | 1819776 | 269808 | 269602 | 1153 | r-1 | 1819570 | 1819675 | 30 | — | S | Uncharacterized BCR |
| 1873 | 1820187 | 1820936 | 269191 | 268442 | 1513 | r-2 | 1820226 | 1820424 | 35 | XerC | L | Integrase |
| 1874 | 1820961 | 1821659 | 268417 | 267719 | 1512 | r-2 | 1821201 | 1821552 | 171 | TFA1 | K | Transcription initiation factor IIE |
| 1875 | 1821659 | 1821841 | 267719 | 267537 | 1866 | r-3 | 1821659 | 1821827 | 32 | DnaG | L | DNA primase (bacterial type) |
| 1876 | 1822105 | 1823073 | 267273 | 266305 | 296 | f-1 | 1822105 | 1823071 | 471 | CcmA | Q | ABC-type multidrug transport |
| | | | | | | | | | | | | system |
| 1877 | 1823702 | 1823782 | 265676 | 265596 | 1865 | r-3 | | | | | | |
| 1878 | 1823857 | 1824675 | 265521 | 264703 | 297 | f-1 | 1823857 | 1824673 | 314 | — | R | ABC-type multidrug transport |
| | | | | | | | | | | | | system |
| 1879 | 1824662 | 1825624 | 264716 | 263754 | 1864 | r-3 | 1824740 | 1825610 | 353 | RbsK | G | Sugar kinases |
| 1880 | 1825648 | 1826151 | 263730 | 263227 | 298 | f-1 | 1825648 | 1826035 | 153 | — | E | Predicted regulator of amino acid |
| | | | | | | | | | | | | metabolism (contains the ACT |
| | | | | | | | | | | | | domain) |
| 1881 | 1826226 | 1826504 | 263152 | 262874 | 1511 | r-2 | 1826229 | 1826502 | 167 | AcyP | C | Acylphosphatases |
| 1882 | 1826572 | 1826886 | 262806 | 262492 | 299 | f-1 | 1826581 | 1826866 | 147 | CutA | P | Uncharacterized protein involved |
| | | | | | | | | | | | | in tolerance to divalent cations |
| 1883 | 1826859 | 1827470 | 262519 | 261908 | 1046 | f-3 | 1826883 | 1827468 | 267 | — | S | Uncharacterized ACR |
| 1884 | 1827563 | 1828408 | 261815 | 260970 | 1863 | r-3 | 1827782 | 1828406 | 229 | UspA | T | Universal stress protein UspA and |
| | | | | | | | | | | | | related nucleotide-binding |
| | | | | | | | | | | | | proteins |
| 1885 | 1828493 | 1829698 | 260885 | 259680 | 668 | f-2 | 1828493 | 1829693 | 715 | GcvT | E | Glycine cleavage system T |
| | | | | | | | | | | | | protein (aminomethyltransferase) |
| 1886 | 1829731 | 1830558 | 259647 | 258820 | 300 | f-1 | 1829740 | 1830544 | 264 | RhaT | GER | Permeases of the drug/metabolite |
| | | | | | | | | | | | | transporter (DMT) superfamily |
| | | | | | | | | | | | | COG0697 RhaT |
| 1887 | 1830621 | 1831115 | 258757 | 258263 | 1510 | r-2 | 1830621 | 1831113 | 183 | LepB | N | Signal peptidase I |
| 1888 | 1831076 | 1831645 | 258302 | 257733 | 1862 | r-3 | 1831085 | 1831622 | 216 | — | S | Uncharacterized ArCR |
| 1889 | 1831699 | 1832772 | 257679 | 256606 | 301 | f-1 | 1831702 | 1832746 | 182 | NrfG | R | TPR-repeat-containing proteins |
| 1890 | 1832777 | 1833709 | 256601 | 255669 | 669 | f-2 | 1832777 | 1833704 | 455 | — | E | Zn-dependent dipeptidase |
| 1891 | 1833706 | 1834158 | 255672 | 255220 | 1152 | r-1 | 1833727 | 1834135 | 32 | — | K | Predicted transcriptional |
| | | | | | | | | | | | | regulators |
| 1892 | 1834155 | 1834856 | 255223 | 254522 | 1509 | r-2 | 1834173 | 1834839 | 282 | RAD55 | T | RecA-superfamily ATPases |
| | | | | | | | | | | | | implicated in signal transduction |
| 1893 | 1834992 | 1835603 | 254386 | 253775 | 1047 | f-3 | 1835103 | 1835448 | 32 | EntF | Q | Non-ribosomal peptide synthetase |
| | | | | | | | | | | | | modules and related proteins |
| 1894 | 1835581 | 1836201 | 253797 | 253177 | 302 | f-1 | 1835662 | 1835971 | 31 | MalG | G | Sugar permeases |
| 1895 | 1836239 | 1837111 | 253139 | 252267 | 670 | f-2 | 1836248 | 1837079 | 383 | — | R | Predicted archaeal |
| | | | | | | | | | | | | methyltransferase |
| 1896 | 1837108 | 1838508 | 252270 | 250870 | 1151 | r-1 | 1838029 | 1838308 | 37 | — | S | Uncharacterized ACR |
| 1897 | 1838515 | 1839846 | 250863 | 249532 | 1150 | r-1 | 1838542 | 1839790 | 132 | — | S | Predicted membrane protein |
| 1898 | 1839843 | 1842821 | 249535 | 246557 | 1508 | r-2 | 1840932 | 1841325 | 43 | — | L | Micrococcal nuclease |
| | | | | | | | | | | | | (thermonuclease) homologs |
| 1899 | 1842996 | 1844864 | 246382 | 244514 | 1507 | r-2 | 1842996 | 1844859 | 1005 | DAP2 | E | Dipeptidyl |
| | | | | | | | | | | | | aminopeptidases/acylaminoacyl-peptidases |
| 1900 | 1844947 | 1845273 | 244431 | 244105 | 303 | f-1 | 1845022 | 1845157 | 33 | RhaT | GER | Permeases of the drug/metabolite |
| | | | | | | | | | | | | transporter (DMT) superfamily |
| | | | | | | | | | | | | COG0697 RhaT |
| 1901 | 1845241 | 1845942 | 244137 | 243436 | 1149 | r-1 | 1845325 | 1845895 | 161 | — | T | Predicted Ser/Thr protein kinase |
| 1902 | 1845932 | 1846168 | 243446 | 243210 | 671 | f-2 | 1845941 | 1846166 | 142 | Lrp | K | Transcriptional regulators |
| 1903 | 1846267 | 1847184 | 243111 | 242194 | 1148 | r-1 | 1846267 | 1847173 | 317 | CcmA | Q | ABC-type multidrug transport |
| | | | | | | | | | | | | system |
| 1904 | 1847191 | 1848111 | 242187 | 241267 | 1147 | r-1 | 1847221 | 1847701 | 73 | NosY | R | ABC-type transport system |
| | | | | | | | | | | | | involved in multi-copper enzyme |
| | | | | | | | | | | | | maturation |
| 1905 | 1848117 | 1849664 | 241261 | 239714 | 1506 | r-2 | 1849086 | 1849260 | 38 | NosY | R | ABC-type transport system |
| | | | | | | | | | | | | involved in multi-copper enzyme |
| | | | | | | | | | | | | maturation |
| 1906 | 1853437 | 1853742 | 235941 | 235636 | 1146 | r-1 | 1853590 | 1853701 | 36 | Lon | O | ATP-dependent Lon protease |
| 1907 | 1853826 | 1853894 | 235552 | 235484 | 1048 | f-3 | | | | | | |
| 1908 | 1853933 | 1854607 | 235445 | 234771 | 1861 | r-3 | 1853933 | 1854602 | 294 | — | P | Phosphate transport regulator |
| | | | | | | | | | | | | (distant homolog of PhoU) |
| 1909 | 1854612 | 1855832 | 234766 | 233546 | 1505 | r-2 | 1854621 | 1855830 | 596 | PitA | P | Phosphate/sulphate permeases |
| 1910 | 1855928 | 1857586 | 233450 | 231792 | 1860 | r-3 | 1856972 | 1857395 | 47 | Icc | R | Predicted phosphohydrolases |
| 1911 | 1857656 | 1858012 | 231722 | 231366 | 672 | f-2 | 1857656 | 1857998 | 178 | — | S | Uncharacterized ACR |
| 1912 | 1858017 | 1859300 | 231361 | 230078 | 1504 | r-2 | 1858017 | 1859286 | 652 | MiaB | J | 2-methylthioadenine synthetase |
| 1913 | 1859380 | 1859607 | 229998 | 229771 | 1145 | r-1 | 1859389 | 1859596 | 64 | — | S | Uncharacterized ArCR |
| 1914 | 1859695 | 1860141 | 229683 | 229237 | 1144 | r-1 | 1859701 | 1860133 | 179 | HyaD | C | Ni(Hydrogenase maturation |
| | | | | | | | | | | | | factor) |
| 1915 | 1860556 | 1860741 | 228822 | 228637 | 1143 | r-1 | | | | | | |
| 1916 | 1860814 | 1862100 | 228564 | 227278 | 1142 | r-1 | 1860814 | 1862098 | 674 | — | C | Coenzyme F420-reducing |
| | | | | | | | | | | | | hydrogenase(hydrogenase |
| | | | | | | | | | | | | subunit) |
| 1917 | 1862097 | 1862900 | 227281 | 226478 | 1503 | r-2 | 1862118 | 1862898 | 438 | — | C | Coenzyme F420-reducing |
| | | | | | | | | | | | | hydrogenase(hydrogenase |
| | | | | | | | | | | | | subunit) |
| 1918 | 1862902 | 1863786 | 226476 | 225592 | 1141 | r-1 | 1862908 | 1863784 | 571 | UbiB | HC | 2-polyprenylphenol hydroxylase |
| | | | | | | | | | | | | and related flavodoxin |
| | | | | | | | | | | | | oxidoreductases˜ COG0543 UbiB |
| | | | | | | | | | | | | (hydrogenase subunit) |
| 1919 | 1863783 | 1864895 | 225595 | 224483 | 1502 | r-2 | 1863783 | 1864887 | 705 | NapF | C | Ferredoxin 2(hydrogenase |
| | | | | | | | | | | | | subunit) |
| 1920 | 1865656 | 1866711 | 223722 | 222667 | 304 | f-1 | 1865683 | 1866691 | 263 | GltD | ER | NADPH-dependent glutamate |
| | | | | | | | | | | | | synthase beta chain and related |
| | | | | | | | | | | | | oxidoreductases COG0493 GltD |
| 1921 | 1866693 | 1867223 | 222685 | 222155 | 1049 | f-3 | 1866717 | 1867119 | 156 | HybA | C | Fe—S-cluster-containing |
| | | | | | | | | | | | | hydrogenase components 1 |
| 1922 | 1867473 | 1868666 | 221905 | 220712 | 1050 | f-3 | 1867578 | 1868649 | 350 | BisC | C | Anaerobic dehydrogenases |
| | | | | | | | | | | | | (formate dehydrogenase) |
| 1923 | 1868696 | 1869637 | 220682 | 219741 | 673 | f-2 | 1868696 | 1869554 | 303 | BisC | C | Anaerobic dehydrogenases |
| | | | | | | | | | | | | (formate dehydrogenase) |
| 1924 | 1869643 | 1870143 | 219735 | 219235 | 305 | f-1 | 1869652 | 1870060 | 172 | HybA | C | Fe—S-cluster-containing |
| | | | | | | | | | | | | hydrogenase components 1 |
| | | | | | | | | | | | | (formate dehydrogenase) |
| 1925 | 1870833 | 1871861 | 218545 | 217517 | 1051 | f-3 | 1871043 | 1871682 | 145 | FocA | P | Formate/nitrite family of |
| | | | | | | | | | | | | transporters (formate |
| | | | | | | | | | | | | dehydrogenase) |
| 1926 | 1872015 | 1872557 | 217363 | 216821 | 1052 | f-3 | 1872054 | 1872555 | 286 | MnhE | P | Multisubunit Na+/H+ antiporter |
| 1927 | 1872533 | 1872811 | 216845 | 216567 | 674 | f-2 | 1872563 | 1872809 | 128 | MnhF | P | Multisubunit Na+/H+ antiporter |
| 1928 | 1872808 | 1873179 | 216570 | 216199 | 306 | f-1 | 1872817 | 1873159 | 172 | MnhG | P | Multisubunit Na+/H+ antiporter |
| 1929 | 1873176 | 1873442 | 216202 | 215936 | 1053 | f-3 | 1873251 | 1873440 | 35 | — | P | Predicted subunit of the |
| | | | | | | | | | | | | Multisubunit Na+/H+ antiporter |
| 1930 | 1873439 | 1873735 | 215939 | 215643 | 675 | f-2 | 1873439 | 1873733 | 66 | MnhB | P | Multisubunit Na+/H+ antiporter |
| 1931 | 1873732 | 1874181 | 215646 | 215197 | 307 | f-1 | 1873741 | 1874176 | 199 | MnhB | P | Multisubunit Na+/H+ antiporter |
| 1932 | 1874169 | 1874537 | 215209 | 214841 | 1054 | f-3 | 1874178 | 1874535 | 167 | MnhC | P | Multisubunit Na+/H+ antiporter |
| 1933 | 1874534 | 1876078 | 214844 | 213300 | 676 | f-2 | 1874546 | 1876073 | 720 | HyfB | CP | Formate hydrogenlyase subunit |
| | | | | | | | | | | | | 3/Multisubunit Na+/H+ antiporter |
| 1934 | 1876071 | 1876427 | 213307 | 212951 | 1055 | f-3 | 1876080 | 1876188 | 30 | WcaJ | M | Sugar transferases involved in |
| | | | | | | | | | | | | lipopolysaccharide synthesis |
| 1935 | 1876465 | 1876995 | 212913 | 212383 | 308 | f-1 | 1876465 | 1876993 | 309 | — | C | Ni |
| 1936 | 1876992 | 1877561 | 212386 | 211817 | 1056 | f-3 | 1877043 | 1877556 | 248 | HycE | C | Ni |
| 1937 | 1877558 | 1878838 | 211820 | 210540 | 677 | f-2 | 1877567 | 1878836 | 699 | HycE | C | Ni |
| 1938 | 1878843 | 1879835 | 210535 | 209543 | 1057 | f-3 | 1878861 | 1879833 | 389 | HyfC | C | Formate hydrogenlyase subunit 4 |
| 1939 | 1879832 | 1880263 | 209546 | 209115 | 678 | f-2 | 1879847 | 1880195 | 198 | NuoI | C | Formate hydrogenlyase subunit |
| | | | | | | | | | | | | 6/NADH:ubiquinone |
| | | | | | | | | | | | | oxidoreductase 23 kD subunit |
| | | | | | | | | | | | | (chain I) |
| 1940 | 1880264 | 1880797 | 209114 | 208581 | 1859 | r-3 | 1880270 | 1880729 | 91 | — | S | Uncharacterized ACR |
| 1941 | 1880784 | 1881278 | 208594 | 208100 | 1501 | r-2 | 1880790 | 1881246 | 85 | — | S | Uncharacterized ACR |
| 1942 | 1881271 | 1881759 | 208107 | 207619 | 1140 | r-1 | 1881289 | 1881745 | 103 | — | S | Uncharacterized ACR |
| 1943 | 1881790 | 1882272 | 207588 | 207106 | 1139 | r-1 | 1881790 | 1882261 | 149 | — | S | Uncharacterized protein sharing a |
| | | | | | | | | | | | | conserved domain with thiamine |
| | | | | | | | | | | | | biosynthesis protein ThiI |
| 1944 | 1882334 | 1883542 | 207044 | 205836 | 679 | f-2 | 1882352 | 1883525 | 602 | HolB | L | ATPase involved in DNA |
| | | | | | | | | | | | | replication |
| 1945 | 1883543 | 1884076 | 205835 | 205302 | 680 | f-2 | 1883549 | 1884074 | 176 | — | R | Predicted membrane-bound |
| | | | | | | | | | | | | metal-dependent hydrolases |
| 1946 | 1884157 | 1885149 | 205221 | 204229 | 309 | f-1 | 1884157 | 1885144 | 503 | TrxB | O | Thioredoxin reductase |
| 1947 | 1885281 | 1886627 | 204097 | 202751 | 1058 | f-3 | 1885290 | 1886607 | 544 | ArgD | E | PLP-dependent aminotransferases |
| 1948 | 1886671 | 1887270 | 202707 | 202108 | 310 | f-1 | 1886914 | 1886980 | 30 | NarK | P | Nitrate/nitrite transporter |
| 1949 | 1887267 | 1887560 | 202111 | 201818 | 1500 | r-2 | 1887291 | 1887549 | 33 | — | R | Predicted RNA-binding proteins |
| 1950 | 1887544 | 1888218 | 201834 | 201160 | 1138 | r-1 | 1887553 | 1888216 | 254 | DeoC | F | Deoxyribose-phosphate aldolase |
| 1951 | 1888724 | 1890025 | 200654 | 199353 | 681 | f-2 | 1888727 | 1890020 | 724 | Eno | G | Enolase |
| 1952 | 1890006 | 1890557 | 199372 | 198821 | 1499 | r-2 | 1890105 | 1890522 | 58 | — | K | Predicted transcriptional |
| | | | | | | | | | | | | regulators |
| 1953 | 1890634 | 1894026 | 198744 | 195352 | 311 | f-1 | 1891621 | 1893961 | 221 | — | R | Predicted drug exporters of the |
| | | | | | | | | | | | | RND superfamily |
| 1954 | 1894318 | 1894365 | 195060 | 195013 | 312 | f-1 | | | | | | |
| 1955 | 1894442 | 1895158 | 194936 | 194220 | 682 | f-2 | 1894442 | 1895156 | 386 | — | S | Uncharacterized ACR |
| 1956 | 1895222 | 1895692 | 194156 | 193686 | 1858 | r-3 | 1895252 | 1895690 | 245 | Lrp | K | Transcriptional regulators |
| 1957 | 1895730 | 1896284 | 193648 | 193094 | 1498 | r-2 | 1895730 | 1896279 | 270 | — | F | Xanthosine triphosphate |
| | | | | | | | | | | | | pyrophosphatase |
| 1958 | 1896330 | 1896818 | 193048 | 192560 | 1497 | r-2 | 1896330 | 1896813 | 298 | — | S | Uncharacterized ACR |
| 1959 | 1896886 | 1897806 | 192492 | 191572 | 313 | f-1 | 1896895 | 1897795 | 332 | Lrp | K | Transcriptional regulators |
| 1960 | 1897803 | 1898744 | 191575 | 190634 | 1496 | r-2 | 1897803 | 1898718 | 293 | — | R | Predicted Fe-S oxidoreductases |
| 1961 | 1898830 | 1899255 | 190548 | 190123 | 1137 | r-1 | 1898833 | 1899241 | 162 | MoaE | H | Molybdopterin converting factor |
| 1962 | 1899309 | 1900178 | 190069 | 189200 | 1059 | f-3 | 1899738 | 1899900 | 33 | Acs | I | Acyl-coenzyme A |
| | | | | | | | | | | | | synthetases/AMP-(fatty) acid |
| | | | | | | | | | | | | ligases |
| 1963 | 1900171 | 1900881 | 189207 | 188497 | 1136 | r-1 | 1900183 | 1900876 | 335 | ThiF | H | Dinucleotide-utilizing enzymes |
| | | | | | | | | | | | | involved in molybdopterin and |
| | | | | | | | | | | | | thiamine biosynthesis family 2 |
| 1964 | 1901205 | 1901720 | 188173 | 187658 | 1495 | r-2 | 1901214 | 1901718 | 248 | CdsA | I | CDP-diglyceride synthetase |
| 1965 | 1901783 | 1902706 | 187595 | 186672 | 683 | f-2 | 1901933 | 1902416 | 32 | BaeS | T | Sensory transduction histidine |
| | | | | | | | | | | | | kinases |
| 1966 | 1902746 | 1903273 | 186632 | 186105 | 684 | f-2 | 1902941 | 1903163 | 32 | — | R | Predicted methyltransferase |
| 1967 | 1903277 | 1904434 | 186101 | 184944 | 685 | f-2 | 1903283 | 1904432 | 596 | Sun | J | tRNA and rRNA |
| | | | | | | | | | | | | cytosine-C5-methylases |
| 1968 | 1904431 | 1905462 | 184947 | 183916 | 314 | f-1 | 1904446 | 1905403 | 212 | — | R | Predicted integral membrane |
| | | | | | | | | | | | | protein |
| 1969 | 1905501 | 1906337 | 183877 | 183041 | 1060 | f-3 | 1905501 | 1906332 | 397 | — | R | Predicted kinase |
| 1970 | 1906334 | 1907098 | 183044 | 182280 | 1857 | r-3 | 1906616 | 1906817 | 32 | AcrR | K | Transcriptional regulator |
| 1971 | 1907089 | 1908066 | 182289 | 181312 | 1135 | r-1 | 1907089 | 1908061 | 538 | QRI7 | O | Metal-dependent proteases with |
| | | | | | | | | | | | | possible chaperone activity |
| 1972 | 1908127 | 1909461 | 181251 | 179917 | 1134 | r-1 | 1908145 | 1909459 | 683 | — | C | Acyl-CoA synthetase (NDP |
| | | | | | | | | | | | | forming) |
| 1973 | 1909517 | 1910014 | 179861 | 179364 | 686 | f-2 | 1909526 | 1909982 | 250 | — | R | Predicted nucleotidyltransferase |
| 1974 | 1910023 | 1910727 | 179355 | 178651 | 315 | f-1 | 1910053 | 1910725 | 372 | TpiA | G | Triosephosphate isomerase |
| 1975 | 1912010 | 1912546 | 177368 | 176832 | 687 | f-2 | 1912019 | 1912544 | 278 | BtuR | H | ATP:corrinoid |
| | | | | | | | | | | | | adenosyltransferase |
| 1976 | 1912651 | 1912902 | 176727 | 176476 | 316 | f-1 | 1912651 | 1912900 | 138 | — | S | Uncharacterized ArCR |
| 1977 | 1912921 | 1913589 | 176457 | 175789 | 1133 | r-1 | 1913035 | 1913575 | 240 | AraD | G | Ribulose-5-phosphate |
| | | | | | | | | | | | | 4-epimerase and related |
| | | | | | | | | | | | | epimerases and aldolases |
| 1978 | 1913472 | 1914050 | 175906 | 175328 | 1494 | r-2 | 1913595 | 1913922 | 33 | RplV | J | Ribosomal protein L22 |
| 1979 | 1914387 | 1914812 | 174991 | 174566 | 1493 | r-2 | 1914387 | 1914810 | 226 | Lrp | K | Transcriptional regulators |
| 1980 | 1914882 | 1916204 | 174496 | 173174 | 1492 | r-2 | 1914954 | 1916193 | 541 | TrmA | J | SAM-dependent |
| | | | | | | | | | | | | methyltransferases related to |
| | | | | | | | | | | | | tRNA |
| | | | | | | | | | | | | (uracil-5-)-methyltransferase |
| 1981 | 1916252 | 1916479 | 173126 | 172899 | 688 | f-2 | 1916282 | 1916402 | 28 | MarR | K | Transcriptional regulators |
| 1982 | 1916521 | 1917351 | 172857 | 172027 | 317 | f-1 | 1916572 | 1917262 | 240 | — | D | ATPases involved in chromosome |
| | | | | | | | | | | | | partitioning |
| 1983 | 1917310 | 1917879 | 172068 | 171499 | 1132 | r-1 | 1917334 | 1917847 | 221 | PyrE | F | Orotate phosphoribosyltransferase |
| 1984 | 1918215 | 1918709 | 171163 | 170669 | 1061 | f-3 | 1918230 | 1918401 | 32 | — | R | Predicted metal-dependent |
| | | | | | | | | | | | | membrane protease |
| 1985 | 1918693 | 1920390 | 170685 | 168988 | 1131 | r-1 | 1918711 | 1920385 | 880 | CDC9 | L | ATP-dependent DNA ligase |
| 1986 | 1920429 | 1921331 | 168949 | 168047 | 1491 | r-2 | 1920429 | 1921329 | 375 | — | R | Predicted archaeal kinases of the |
| | | | | | | | | | | | | sugar kinase superfamily |
| 1987 | 1921407 | 1923065 | 167971 | 166313 | 1490 | r-2 | 1921407 | 1923051 | 700 | NhaC | C | Na+/H+ antiporter |
| 1988 | 1923377 | 1923970 | 166001 | 165408 | 1856 | r-3 | 1923425 | 1923968 | 301 | — | L | Uracil-DNA glycosylase |
| 1989 | 1923967 | 1924317 | 165411 | 165061 | 1130 | r-1 | 1924060 | 1924255 | 31 | Spo0J | K | Predicted transcriptional |
| | | | | | | | | | | | | regulators |
| 1990 | 1924478 | 1926250 | 164900 | 163128 | 689 | f-2 | 1924478 | 1926233 | 1040 | — | R | Predicted Fe—S oxidoreductases |
| 1991 | 1926252 | 1926566 | 163126 | 162812 | 1062 | f-3 | 1926297 | 1926447 | 28 | LysR | K | Transcriptional regulator |
| 1992 | 1926707 | 1929025 | 162671 | 160353 | 690 | f-2 | 1926872 | 1929020 | 723 | Tar | N | Methyl-accepting chemotaxis |
| | | | | | | | | | | | | protein |
| 1993 | 1929037 | 1930491 | 160341 | 158887 | 1129 | r-1 | 1930174 | 1930438 | 30 | LysU | J | Lysyl-tRNA synthetase class II |
| 1994 | 1930573 | 1930920 | 158805 | 158458 | 318 | f-1 | 1930582 | 1930909 | 125 | — | R | Putative effector of murein |
| | | | | | | | | | | | | hydrolase LrgA |
| 1995 | 1930917 | 1931588 | 158461 | 157790 | 1063 | f-3 | 1930917 | 1931586 | 258 | LrgB | M | Putative effector of murein |
| | | | | | | | | | | | | hydrolase |
| 1996 | 1931535 | 1932002 | 157843 | 157376 | 1489 | r-2 | 1931541 | 1931976 | 224 | — | S | Uncharacterized ArCR |
| 1997 | 1932193 | 1932927 | 157185 | 156451 | 319 | f-1 | 1932292 | 1932925 | 325 | — | S | Uncharacterized ACR |
| 1998 | 1932928 | 1933236 | 156450 | 156142 | 1128 | r-1 | 1932997 | 1933207 | 32 | PheS | J | Phenylalanyl-tRNA synthetase |
| | | | | | | | | | | | | alpha subunit |
| 1999 | 1933306 | 1933578 | 156072 | 155800 | 320 | f-1 | 1933306 | 1933561 | 93 | — | S | Uncharacterized ACR |
| 2000 | 1933671 | 1934051 | 155707 | 155327 | 1064 | f-3 | 1933671 | 1934034 | 98 | — | R | Predicted nucleic acid-binding |
| | | | | | | | | | | | | protein |
| 2001 | 1934029 | 1935735 | 155349 | 153643 | 1127 | r-1 | 1934029 | 1935685 | 764 | — | J | Queuine |
| | | | | | | | | | | | | tRNA-ribosyltransferases |
| 2002 | 1935745 | 1936650 | 153633 | 152728 | 1126 | r-1 | 1935754 | 1936648 | 433 | — | S | Uncharacterized archaeal |
| | | | | | | | | | | | | coiled-coil domain |
| 2003 | 1936888 | 1937835 | 152490 | 151543 | 1125 | r-1 | 1936891 | 1937824 | 501 | ArcC | B | Carbamate kinase |
| 2004 | 1937965 | 1939305 | 151413 | 150073 | 1124 | r-1 | 1938043 | 1939021 | 52 | HemY | H | Protoporphyrinogen oxidase |
| 2005 | 1941378 | 1941863 | 148000 | 147515 | 1065 | f-3 | 1941390 | 1941849 | 78 | CcmA | Q | ABC-type multidrug transport |
| | | | | | | | | | | | | system |
| 2006 | 1942184 | 1942507 | 147194 | 146871 | 691 | f-2 | 1942184 | 1942454 | 32 | CstA | T | Carbon starvation protein |
| 2007 | 1942618 | 1944576 | 146760 | 144802 | 1123 | r-1 | 1942618 | 1944571 | 1032 | — | C | Aldehyde:ferredoxin |
| | | | | | | | | | | | | oxidoreductase |
| 2008 | 1944729 | 1945865 | 144649 | 143513 | 1488 | r-2 | 1944729 | 1945863 | 697 | — | S | Fructose 1,6-bisphosphatase |
| 2009 | 1945993 | 1946349 | 143385 | 143029 | 1122 | r-1 | 1946074 | 1946263 | 31 | BglX | G | Beta-glucosidase-related |
| | | | | | | | | | | | | glycosidases |
| 2010 | 1947328 | 1948446 | 142050 | 140932 | 321 | f-1 | 1947346 | 1948276 | 98 | ArgE | E | Acetylornithine |
| | | | | | | | | | | | | deacetylase/Succinyl-diaminopimelate |
| | | | | | | | | | | | | desuccinylase and related |
| | | | | | | | | | | | | deacylases |
| 2011 | 1948368 | 1949834 | 141010 | 139544 | 1066 | f-3 | 1949061 | 1949766 | 320 | CysH | EH | 3′-phosphoadenosine |
| | | | | | | | | | | | | 5′-phosphosulfate sulfotransferase |
| | | | | | | | | | | | | (PAPS reductase)/FAD synthetase |
| | | | | | | | | | | | | and related enzymes COG0175 |
| | | | | | | | | | | | | CysH |
| 2012 | 1949788 | 1951875 | 139590 | 137503 | 1121 | r-1 | 1949938 | 1951828 | 691 | — | R | Archaeal serine proteases |
| 2013 | 1951825 | 1953192 | 137553 | 136186 | 322 | f-1 | 1951831 | 1953190 | 555 | TldD | R | Predicted Zn-dependent proteases |
| | | | | | | | | | | | | and their inactivated homologs |
| 2014 | 1953189 | 1954478 | 136189 | 134900 | 1067 | f-3 | 1953189 | 1954458 | 345 | TldD | R | Predicted Zn-dependent proteases |
| | | | | | | | | | | | | and their inactivated homologs |
| 2015 | 1954540 | 1955208 | 134838 | 134170 | 323 | f-1 | 1954828 | 1955083 | 30 | PPX1 | C | Inorganic |
| | | | | | | | | | | | | pyrophosphatase/exopolyphosphatase |
| 2016 | 1955253 | 1957394 | 134125 | 131984 | 1068 | f-3 | 1955337 | 1957014 | 271 | AmyA | G | Glycosidases(cyclodextrin |
| | | | | | | | | | | | | glucanotransferase) |
| 2017 | 1957397 | 1958206 | 131981 | 131172 | 1855 | r-3 | 1957754 | 1958027 | 31 | AlsD | H | Glutamate-1-semialdehyde |
| | | | | | | | | | | | | aminotransferase |
| 2018 | 1958454 | 1958975 | 130924 | 130403 | 1487 | r-2 | 1958538 | 1958862 | 29 | ELP3 | K | ELP3 component of the RNA |
| | | | | | | | | | | | | polymerase II complex |
| 2019 | 1959384 | 1959980 | 129994 | 129398 | 1486 | r-2 | 1959423 | 1959549 | 29 | GCD1 | MJ | Nucleoside-diphosphate-sugar |
| | | | | | | | | | | | | pyrophosphorylases involved in |
| | | | | | | | | | | | | lipopolysaccharide |
| | | | | | | | | | | | | biosynthesis/translation initiation |
| | | | | | | | | | | | | factor eIF2B subunits COG1208 |
| | | | | | | | | | | | | GCD1 |
| 2020 | 1959997 | 1960209 | 129381 | 129169 | 1120 | r-1 | 1960015 | 1960108 | 26 | Smc | D | Chromosome segregation |
| | | | | | | | | | | | | ATPases |
| 2021 | 1961911 | 1965690 | 127467 | 123688 | 1119 | r-1 | 1963837 | 1964131 | 36 | RluA | J | Pseudouridylate synthases |
| 2022 | 1962226 | 1962360 | 127152 | 127018 | 324 | f-1 | 1962229 | 1962334 | 28 | | | |
| 2023 | 1964567 | 1964629 | 124811 | 124749 | 692 | f-2 | | | | | | |
| 2024 | 1965873 | 1966658 | 123505 | 122720 | 1069 | f-3 | 1965879 | 1966644 | 381 | SgcQ | R | Predicted TIM-barrel enzyme |
| 2025 | 1966899 | 1969403 | 122479 | 119975 | 1070 | f-3 | 1968654 | 1968987 | 35 | RecB | L | ATP-dependent exoDNAse |
| | | | | | | | | | | | | (exonuclease V) beta subunit |
| | | | | | | | | | | | | (contains helicase and |
| | | | | | | | | | | | | exonuclease domains) |
| 2026 | 1969396 | 1970652 | 119982 | 118726 | 325 | f-1 | 1969603 | 1969909 | 35 | AprE | O | Subtilisin-like serine proteases |
| 2027 | 1970804 | 1971262 | 118574 | 118116 | 693 | f-2 | 1970918 | 1971155 | 40 | MazG | R | Predicted pyrophosphatase |
| 2028 | 1971328 | 1971672 | 118050 | 117706 | 326 | f-1 | 1971481 | 1971613 | 37 | IlvE | EH | Branched-chain amino acid |
| | | | | | | | | | | | | aminotransferase/4-amino-4-deoxychorismate |
| | | | | | | | | | | | | lyase COG0115 IlvE |
| 2029 | 1971682 | 1972395 | 117696 | 116983 | 327 | f-1 | 1971904 | 1972216 | 32 | MetG | J | Methionyl-tRNA synthetase |
| 2030 | 1972493 | 1973851 | 116885 | 115527 | 694 | f-2 | 1972502 | 1973849 | 709 | CpsG | G | Phosphomannomutase |
| 2031 | 1974299 | 1975357 | 115079 | 114021 | 1854 | r-3 | 1975178 | 1975346 | 32 | — | S | Uncharacterized BCR |
| 2032 | 1975695 | 1977017 | 113683 | 112361 | 1071 | f-3 | 1975734 | 1976082 | 30 | BacA | S | Uncharacterized ACR |
| 2033 | 1976971 | 1977399 | 112407 | 111979 | 1118 | r-1 | 1977055 | 1977343 | 31 | | | |
| 2034 | 1977396 | 1977704 | 111982 | 111674 | 1485 | r-2 | 1977402 | 1977678 | 118 | ArsR | K | Predicted transcriptional |
| | | | | | | | | | | | | regulators |
| 2035 | 1977819 | 1978400 | 111559 | 110978 | 1484 | r-2 | 1977819 | 1978377 | 218 | — | S | Uncharacterized ACR |
| 2036 | 1978397 | 1978993 | 110981 | 110385 | 1853 | r-3 | 1978406 | 1978982 | 263 | CoaE | H | Dephospho-CoA kinase |
| 2037 | 1978966 | 1979769 | 110412 | 109609 | 1117 | r-1 | 1978966 | 1979275 | 76 | — | R | Uncharacterized ATPases of the |
| | | | | | | | | | | | | PP-loop superfamily |
| 2038 | 1979866 | 1980489 | 109512 | 108889 | 328 | f-1 | 1979929 | 1980376 | 134 | — | S | Uncharacterized membrane |
| | | | | | | | | | | | | protein |
| 2039 | 1980484 | 1980942 | 108894 | 108436 | 1116 | r-1 | 1980496 | 1980937 | 229 | PyrI | F | Aspartate carbamoyltransferase |
| | | | | | | | | | | | | regulatory subunit |
| 2040 | 1980946 | 1981878 | 108432 | 107500 | 1115 | r-1 | 1980946 | 1981843 | 487 | PyrB | F | Aspartate carbamoyltransferase |
| 2041 | 1981986 | 1982897 | 107392 | 106481 | 1072 | f-3 | 1982367 | 1982880 | 159 | — | S | Uncharacterized ACR |
| 2042 | 1982894 | 1983307 | 106484 | 106071 | 695 | f-2 | 1982894 | 1983305 | 193 | — | S | Uncharacterized ACR |
| 2043 | 1983573 | 1984325 | 105805 | 105053 | 1483 | r-2 | 1983972 | 1984284 | 35 | — | R | Predicted metal-binding domain |
| | | | | | | | | | | | | (associated with helicases in |
| | | | | | | | | | | | | Pyrococcus and Mtub) |
| 2044 | 1984369 | 1985724 | 105009 | 103654 | 1114 | r-1 | 1984369 | 1985722 | 822 | — | S | Uncharacterized ACR |
| 2045 | 1985942 | 1987522 | 103436 | 101856 | 696 | f-2 | 1986548 | 1986680 | 33 | TehA | P | Tellurite resistance protein and |
| | | | | | | | | | | | | related permeases |
| 2046 | 1987535 | 1988848 | 101843 | 100530 | 1852 | r-3 | 1987562 | 1988771 | 205 | — | R | Uncharacterized ATPases of the |
| | | | | | | | | | | | | AAA superfamily |
| 2047 | 1988883 | 1989671 | 100495 | 99707 | 1482 | r-2 | 1988907 | 1989048 | 30 | CpsG | G | Phosphomannomutase |
| 2048 | 1989712 | 1990701 | 99666 | 98677 | 1113 | r-1 | 1990111 | 1990264 | 30 | — | R | ATPase components of various |
| | | | | | | | | | | | | ABC-type transport systems |
| 2049 | 1991043 | 1992029 | 98335 | 97349 | 1481 | r-2 | 1991049 | 1991937 | 223 | ThrC | E | Threonine synthase |
| 2050 | 1992178 | 1993323 | 97200 | 96055 | 1112 | r-1 | 1992334 | 1992553 | 32 | — | F | Deoxyguanosine/deoxyadenosine |
| | | | | | | | | | | | | kinase |
| 2051 | 1993320 | 1993928 | 96058 | 95450 | 1480 | r-2 | 1993362 | 1993914 | 320 | HslV | O | Proteasome protease subunit |
| 2052 | 1993956 | 1994684 | 95422 | 94694 | 1479 | r-2 | 1993974 | 1994667 | 297 | FepC | PH | ABC-type |
| | | | | | | | | | | | | cobalamin/Fe3+-siderophores |
| | | | | | | | | | | | | transport systems |
| 2053 | 1994681 | 1995694 | 94697 | 93684 | 1851 | r-3 | 1994681 | 1995686 | 301 | BtuC | PH | ABC-type |
| | | | | | | | | | | | | cobalamin/Fe3+-siderophores |
| | | | | | | | | | | | | transport systems |
| 2054 | 1995731 | 1997062 | 93647 | 92316 | 1850 | r-3 | 1995761 | 1997033 | 280 | — | S | Uncharacterized ArCR |
| 2055 | 1997062 | 1999713 | 92316 | 89665 | 1111 | r-1 | 1997062 | 1998448 | 284 | SbcC | L | ATPase involved in DNA repair |
| 2056 | 1999710 | 2001092 | 89668 | 88286 | 1478 | r-2 | 1999710 | 2000895 | 354 | SbcD | L | DNA repair exonuclease |
| 2057 | 2001233 | 2003020 | 88145 | 86358 | 1849 | r-3 | 2001272 | 2002916 | 595 | — | R | Predicted ATPase |
| 2058 | 2003136 | 2003711 | 86242 | 85667 | 1073 | f-3 | 2003229 | 2003700 | 233 | RimI | R | Acetyltransferases |
| 2059 | 2003696 | 2004217 | 85682 | 85161 | 697 | f-2 | 2003705 | 2004215 | 243 | SEN2 | J | tRNA splicing endonuclease |
| 2060 | 2004220 | 2004576 | 85158 | 84802 | 1110 | r-1 | 2004421 | 2004565 | 31 | AcrR | K | Transcriptional regulator |
| 2061 | 2004890 | 2004943 | 84488 | 84435 | 698 | f-2 | | | | | | |
| 2062 | 2005188 | 2006615 | 84190 | 82763 | 1477 | r-2 | 2005419 | 2006613 | 699 | BioF | H | 7-keto-8-aminopelargonate |
| | | | | | | | | | | | | synthetase and related enzymes |
| 2063 | 2006536 | 2009136 | 82842 | 80242 | 329 | f-1 | 2006722 | 2008342 | 773 | — | L | Inteins |
| 2064 | 2009133 | 2010641 | 80245 | 78737 | 1074 | f-3 | 2009142 | 2010378 | 666 | HolB | L | ATPase involved in DNA |
| | | | | | | | | | | | | replication |
| 2065 | 2010697 | 2012013 | 78681 | 77365 | 330 | f-1 | 2010787 | 2011984 | 213 | — | R | UncharacterizedATPases of the |
| | | | | | | | | | | | | AAA superfamily |
| 2066 | 2012072 | 2012314 | 77306 | 77064 | 699 | f-2 | 2012099 | 2012246 | 34 | — | S | Uncharacterized ACR |
| 2067 | 2012311 | 2012514 | 77067 | 76864 | 1109 | r-1 | 2012377 | 2012512 | 66 | — | R | Predicted ATPase of the AAA |
| | | | | | | | | | | | | superfamily |
| 2068 | 2012712 | 2013572 | 76666 | 75806 | 1476 | r-2 | 2012814 | 2013549 | 133 | — | R | Predicted ATPase of the AAA |
| | | | | | | | | | | | | superfamily |
| 2069 | 2013609 | 2014661 | 75769 | 74717 | 1475 | r-2 | 2013648 | 2014656 | 423 | — | R | Predicted methyltransferase |
| 2070 | 2014525 | 2015568 | 74853 | 73810 | 1108 | r-1 | 2014672 | 2014822 | 30 | NosY | R | ABC-type transport system |
| | | | | | | | | | | | | involved in multi-copper enzyme |
| | | | | | | | | | | | | maturation |
| 2071 | 2015632 | 2016564 | 73746 | 72814 | 1107 | r-1 | 2015641 | 2016559 | 429 | MoaA | H | Molybdenum cofactor |
| | | | | | | | | | | | | biosynthesis enzyme |
| 2072 | 2016684 | 2017421 | 72694 | 71957 | 1075 | f-3 | 2016699 | 2017242 | 41 | Smc | D | Chromosome segregation |
| | | | | | | | | | | | | ATPases |
| 2073 | 2017378 | 2018802 | 72000 | 70576 | 331 | f-1 | 2017378 | 2018800 | 704 | CafA | J | Ribonucleases G and E |
| 2074 | 2019182 | 2019406 | 70196 | 69972 | 1848 | r-3 | 2019182 | 2019401 | 108 | AbrB | K | Regulators of |
| | | | | | | | | | | | | stationary/sporulation gene |
| | | | | | | | | | | | | expression |
| 2075 | 2019763 | 2020425 | 69615 | 68953 | 1106 | r-1 | 2019766 | 2020420 | 286 | RecA | L | RecA/RadA recombinase |
| 2076 | 2020435 | 2021076 | 68943 | 68302 | 1105 | r-1 | 2020441 | 2021074 | 272 | — | R | Predicted Zn-dependent |
| | | | | | | | | | | | | hydrolases of the beta-lactamase |
| | | | | | | | | | | | | fold |
| 2077 | 2021157 | 2021522 | 68221 | 67856 | 1076 | f-3 | 2021199 | 2021334 | 35 | — | R | Predicted GTPases |
| 2078 | 2021495 | 2022214 | 67883 | 67164 | 700 | f-2 | 2021807 | 2022128 | 33 | LrgB | M | Putative effector of murein |
| | | | | | | | | | | | | hydrolase |
| 2079 | 2022269 | 2023111 | 67109 | 66267 | 701 | f-2 | 2022269 | 2023103 | 422 | PrsA | FE | Phosphoribosylpyrophosphate |
| | | | | | | | | | | | | synthetase COG0462 PrsA |
| | | | | | | | | | | | | (ribose phosphate |
| | | | | | | | | | | | | pyrophosphokinase) |
| 2080 | 2025340 | 2025417 | 64038 | 63961 | 332 | f-1 | | | | | | |
| 2081 | 2028631 | 2028912 | 60747 | 60466 | 333 | f-1 | 2028631 | 2028814 | 32 | BaeS | T | Sensory transduction histidine |
| | | | | | | | | | | | | kinases |
| 2082 | 2028914 | 2029489 | 60464 | 59889 | 702 | f-2 | 2028923 | 2029481 | 274 | — | S | Uncharacterized ACR |
| 2083 | 2029483 | 2030094 | 59895 | 59284 | 1104 | r-1 | 2029573 | 2030032 | 47 | SEC59 | I | Dolichol kinase |
| 2084 | 2030142 | 2031023 | 59236 | 58355 | 1474 | r-2 | 2030157 | 2030400 | 35 | FadR | K | Transcriptional regulators |
| 2085 | 2031138 | 2032727 | 58240 | 56651 | 1077 | f-3 | 2031147 | 2032725 | 770 | LysS | J | Lysyl-tRNA synthetase class I |
| 2086 | 2032734 | 2033420 | 56644 | 55958 | 1473 | r-2 | 2032734 | 2033415 | 334 | SmtA | QR | SAM-dependent |
| | | | | | | | | | | | | methyltransferases COG0500 |
| | | | | | | | | | | | | SmtA |
| 2087 | 2033501 | 2034466 | 55877 | 54912 | 703 | f-2 | 2033519 | 2034458 | 515 | — | R | Predicted archaeal sugar kinases |
| 2088 | 2034330 | 2035610 | 55048 | 53768 | 1078 | f-3 | 2034459 | 2035602 | 596 | — | C | Predicted butyrate kinase |
| 2089 | 2035637 | 2036254 | 53741 | 53124 | 704 | f-2 | 2035670 | 2036246 | 336 | PorG | C | Pyruvate:ferredoxin |
| | | | | | | | | | | | | oxidoreductase and related |
| | | | | | | | | | | | | 2-oxoacid:ferredoxin |
| | | | | | | | | | | | | oxidoreductases |
| 2090 | 2036331 | 2036594 | 53047 | 52784 | 1079 | f-3 | 2036331 | 2036574 | 124 | PhoU | P | Phosphate uptake regulator |
| 2091 | 2036609 | 2037244 | 52769 | 52134 | 705 | f-2 | 2036609 | 2037239 | 296 | PhoU | P | Phosphate uptake regulator |
| 2092 | 2037290 | 2038219 | 52088 | 51159 | 706 | f-2 | 2037299 | 2038217 | 544 | — | E | Asparaginase |
| 2093 | 2038219 | 2039394 | 51159 | 49984 | 334 | f-1 | 2038231 | 2039368 | 442 | | | |
| 2094 | 2039429 | 2040040 | 49949 | 49338 | 707 | f-2 | 2039429 | 2040026 | 255 | — | R | Biotin synthase-related enzyme |
| 2095 | 2039994 | 2040326 | 49384 | 49052 | 1080 | f-3 | 2040009 | 2040312 | 111 | — | R | Biotin synthase-related enzyme |
| 2096 | 2040316 | 2040816 | 49062 | 48562 | 1103 | r-1 | 2040316 | 2040739 | 45 | NrfG | R | TPR-repeat-containing proteins |
| 2097 | 2040797 | 2041732 | 48581 | 47646 | 1847 | r-3 | 2040797 | 2041718 | 498 | — | T | Predicted serine/threonine protein |
| | | | | | | | | | | | | kinases |
| 2098 | 2043010 | 2044203 | 46368 | 45175 | 1102 | r-1 | 2043010 | 2044201 | 669 | RPT1 | O | ATP-dependent 26S proteasome |
| | | | | | | | | | | | | regulatory subunit |
| 2099 | 2044340 | 2045170 | 45038 | 44208 | 708 | f-2 | 2044421 | 2045141 | 252 | — | S | Uncharacterized ACR |
| 2100 | 2045127 | 2046032 | 44251 | 43346 | 1472 | r-2 | 2045154 | 2045985 | 298 | Rfe | M | UDP-N-acetylmuramyl |
| | | | | | | | | | | | | pentapeptide |
| | | | | | | | | | | | | phosphotransferase/UDP-N- |
| | | | | | | | | | | | | acetylglucosamine-1-phosphate |
| | | | | | | | | | | | | transferase |
| 2101 | 2046077 | 2047399 | 43301 | 41979 | 709 | f-2 | 2046677 | 2047397 | 303 | WcaA | M | Glycosyltransferases involved in |
| | | | | | | | | | | | | cell wall biogenesis |
| 2102 | 2047406 | 2047780 | 41972 | 41598 | 710 | f-2 | 2047478 | 2047751 | 75 | — | S | Uncharacterized ACR |
| 2103 | 2047777 | 2048313 | 41601 | 41065 | 1101 | r-1 | 2047783 | 2048305 | 325 | ComEB | F | Deoxycytidylate deaminase |
| 2104 | 2048320 | 2049099 | 41058 | 40279 | 1100 | r-1 | 2048482 | 2049088 | 175 | HtpX | O | Zn-dependent protease with |
| | | | | | | | | | | | | chaperone function |
| 2105 | 2049106 | 2049471 | 40272 | 39907 | 1099 | r-1 | 2049106 | 2049469 | 184 | — | K | Predicted transcriptional regulator |
| 2106 | 2050697 | 2051614 | 38681 | 37764 | 711 | f-2 | 2050721 | 2051612 | 493 | PyrD | F | Dihydroorotate dehydrogenase |
| 2107 | 2051664 | 2051900 | 37714 | 37478 | 1081 | f-3 | 2051664 | 2051838 | 85 | AbrB | K | Regulators of |
| | | | | | | | | | | | | stationary/sporulation gene |
| | | | | | | | | | | | | expression |
| 2108 | 2051888 | 2052298 | 37490 | 37080 | 712 | f-2 | 2051894 | 2052257 | 32 | — | R | Uncharacterized proteins of PilT |
| | | | | | | | | | | | | N-term./Vapc superfamily |
| 2109 | 2052295 | 2053014 | 37083 | 36364 | 335 | f-1 | 2052295 | 2053012 | 391 | — | R | Predicted ATPase (PP-loop |
| | | | | | | | | | | | | superfamily) |
| 2110 | 2053125 | 2053190 | 36253 | 36188 | 1082 | f-3 | | | | | | |
| 2111 | 2055992 | 2057146 | 33386 | 32232 | 1846 | r-3 | 2055992 | 2057141 | 554 | | | |
| 2112 | 2057204 | 2057467 | 32174 | 31911 | 1845 | r-3 | 2057216 | 2057441 | 53 | — | S | Predicted membrane protein |
| 2113 | 2057477 | 2058655 | 31901 | 30723 | 1844 | r-3 | 2057486 | 2058653 | 561 | AvtA | E | PLP-dependent aminotransferases |
| 2114 | 2058742 | 2059149 | 30636 | 30229 | 1098 | r-1 | 2058769 | 2059132 | 89 | — | S | Uncharacterized ACR |
| 2115 | 2059310 | 2059501 | 30068 | 29877 | 713 | f-2 | 2059310 | 2059427 | 59 | — | K | Predicted transcriptional |
| | | | | | | | | | | | | regulators containing the |
| | | | | | | | | | | | | CopG/Arc/MetJ DNA-binding |
| | | | | | | | | | | | | domain |
| 2116 | 2059560 | 2060801 | 29818 | 28577 | 1083 | f-3 | 2059560 | 2060775 | 454 | FtsZ | D | Cell division GTPase |
| 2117 | 2060819 | 2061598 | 28559 | 27780 | 714 | f-2 | 2060828 | 2061596 | 420 | Soj | D | ATPases involved in chromosome |
| | | | | | | | | | | | | partitioning |
| 2118 | 2061501 | 2061911 | 27877 | 27467 | 1084 | f-3 | 2061690 | 2061861 | 32 | — | R | WD40 repeat protein |
| 2119 | 2061997 | 2062446 | 27381 | 26932 | 1097 | r-1 | 2062012 | 2062444 | 222 | TagD | MI | Cytidylyltransferase COG0615 |
| | | | | | | | | | | | | TagD |
| 2120 | 2062448 | 2062966 | 26930 | 26412 | 1843 | r-3 | 2062448 | 2062964 | 292 | — | J | PUA domain (predicted |
| | | | | | | | | | | | | RNA-binding domain) |
| 2121 | 2062966 | 2063607 | 26412 | 25771 | 1096 | r-1 | 2062981 | 2063593 | 312 | PyrF | F | Orotidine-5′-phosphate |
| | | | | | | | | | | | | decarboxylase |
| 2122 | 2063612 | 2064214 | 25766 | 25164 | 1842 | r-3 | 2063678 | 2063858 | 35 | DeoR | K | Transcriptional regulator |
| 2123 | 2064280 | 2065428 | 25098 | 23950 | 1095 | r-1 | 2064280 | 2065423 | 586 | INO1 | I | Myo-inositol-1-phosphate |
| | | | | | | | | | | | | synthase |
| 2124 | 2065471 | 2066778 | 23907 | 22600 | 1094 | r-1 | 2065492 | 2066215 | 311 | — | M | Predicted sugar |
| | | | | | | | | | | | | nucleotidyltransferases |
| 2125 | 2066863 | 2067558 | 22515 | 21820 | 336 | f-1 | 2066878 | 2067541 | 320 | — | R | Predicted ATPases of PP-loop |
| | | | | | | | | | | | | superfamily |
| 2126 | 2067623 | 2068384 | 21755 | 20994 | 715 | f-2 | 2067623 | 2068379 | 355 | CcmA | Q | ABC-type multidrug transport |
| | | | | | | | | | | | | system |
| 2127 | 2068384 | 2069838 | 20994 | 19540 | 337 | f-1 | 2068387 | 2069740 | 140 | — | R | Predicted permease |
| 2128 | 2069828 | 2070184 | 19550 | 19194 | 1841 | r-3 | 2069828 | 2070182 | 176 | — | S | Uncharacterized ACR |
| 2129 | 2070189 | 2070728 | 19189 | 18650 | 1471 | r-2 | 2070216 | 2070720 | 238 | — | F | ADP-ribose pyrophosphatase |
| 2130 | 2070778 | 2071599 | 18600 | 17779 | 1093 | r-1 | 2070778 | 2071522 | 124 | RbsK | G | Sugar kinases |
| 2131 | 2071722 | 2072069 | 17656 | 17309 | 1085 | f-3 | 2071722 | 2071995 | 130 | GAR1 | J | RNA-binding protein involved in |
| | | | | | | | | | | | | rRNA processing |
| 2132 | 2072066 | 2072986 | 17312 | 16392 | 716 | f-2 | 2072075 | 2072978 | 343 | SUA7 | K | Transcription initiation factor IIB |
| 2133 | 2073002 | 2073490 | 16376 | 15888 | 717 | f-2 | 2073002 | 2073488 | 145 | — | R | Predicted phosphoesterase |
| 2134 | 2073534 | 2073737 | 15844 | 15641 | 1470 | r-2 | 2073534 | 2073735 | 114 | HHT1 | L | Histones H3 and H4 (Histon |
| | | | | | | | | | | | | A&B) |
| 2135 | 2074012 | 2075424 | 15366 | 13954 | 338 | f-1 | 2074111 | 2075422 | 649 | RbcL | G | Ribulose 1 |
| 2136 | 2075557 | 2076162 | 13821 | 13216 | 339 | f-1 | 2075569 | 2076085 | 224 | — | K | Predicted transcriptional |
| | | | | | | | | | | | | regulators |
| 2137 | 2076199 | 2076411 | 13179 | 12967 | 1092 | r-1 | 2076208 | 2076409 | 113 | RPS17A | J | Ribosomal protein S17E |
| 2138 | 2076528 | 2076959 | 12850 | 12419 | 1086 | f-3 | 2076528 | 2076909 | 182 | — | S | Uncharacterized ArCR |
| 2139 | 2076986 | 2077663 | 12392 | 11715 | 718 | f-2 | 2076995 | 2077661 | 351 | — | S | Uncharacterized ACR |
| 2140 | 2077703 | 2078152 | 11675 | 11226 | 719 | f-2 | 2077772 | 2077931 | 31 | CcmC | O | ABC-type transport system |
| | | | | | | | | | | | | involved in cytochrome c |
| | | | | | | | | | | | | biogenesis |
| 2141 | 2078164 | 2078964 | 11214 | 10414 | 1091 | r-1 | 2078167 | 2078932 | 275 | SplB | L | DNA repair photolyase |
| 2142 | 2079001 | 2080026 | 10377 | 9352 | 1090 | r-1 | 2079019 | 2080021 | 335 | NrfG | R | TPR-repeat-containing proteins |
| 2143 | 2080319 | 2082169 | 9059 | 7209 | 720 | f-2 | 2080319 | 2082164 | 1008 | NrdD | F | Oxygen-sensitive |
| | | | | | | | | | | | | ribonucleoside-triphosphate |
| | | | | | | | | | | | | reductase |
| 2144 | 2082376 | 2082897 | 7002 | 6481 | 340 | f-1 | 2082376 | 2082874 | 194 | PflA | O | Pyruvate-formate lyase-activating |
| | | | | | | | | | | | | enzyme |
| 2145 | 2082919 | 2083284 | 6459 | 6094 | 1089 | r-1 | 2082925 | 2083282 | 171 | — | S | Uncharacterized ACR |
| 2146 | 2083288 | 2084007 | 6090 | 5371 | 1088 | r-1 | 2083288 | 2083987 | 359 | Cof | R | Predicted hydrolases of the HAD |
| | | | | | | | | | | | | superfamily |
| 2147 | 2084057 | 2085316 | 5321 | 4062 | 1840 | r-3 | 2084090 | 2085308 | 503 | — | S | Uncharacterized ACR |
| 2148 | 2085470 | 2087110 | 3908 | 2268 | 721 | f-2 | 2085470 | 2087042 | 899 | GroL | O | Chaperonin GroEL (HSP60 |
| | | | | | | | | | | | | family)(Chaperonin B) |
| 2149 | 2087216 | 2088568 | 2162 | 810 | 1839 | r-3 | 2087216 | 2088566 | 753 | Sun | J | tRNA and rRNA |
| | | | | | | | | | | | | cytosine-C5-methylases |
| 2150 | 2088670 | 2088921 | 708 | 457 | 341 | f-1 | 2088691 | 2088823 | 30 | FliA | K | DNA-directed RNA polymerase |
| | | | | | | | | | | | | specialized sigma subunit |
| 2151 | 2088905 | 2089378 | 473 | 0 | 722 | f-2 | 2088911 | 2089364 | 73 | — | R | Predicted nucleic acid-binding |
| | | | | | | | | | | | | protein |

In Table 2, f-1 through f-3, as described as reading frames, refers to open reading frames in the sense strand, and r-1 through r-3 refers to open reading frames in the antisense strand. In the classification, J refers to polypeptides relating to translation, ribosome structure or biological development; K refers to polypeptides relating to transcription; L refers to polypeptides relating to DNA replication, recombination or repair; D refers to polypeptides relating to chromosomal fractionation; O refers to polypeptides relating to post-translational events, protein metabolism turnover or chaperone proteins; M refers to polypeptides relating to cellular envelope biological development or outer membranes; N refers to polypeptides relating to cellular movement or secretion; P refers to polypeptides relating to inorganic ion transportation or metabolism; T refers to polypeptides relating to signaling mechanisms; C refers to polypeptides relating to energy production and conversion; G refers to polypeptides relating to carbohydrate transportation and metabolism; E refers to polypeptides relating to amino acid transportation and metabolism; F refers to polypeptides relating to nucleotide transportation and metabolism; H refers to polypeptides relating to coenzyme metabolism; I refers to polypeptides relating to lipid metabolism; Q refers to polypeptides relating to secondary metabolites biosynthesis, transportation or catabolism; R refers to polypeptides predicted to have general function; and S refers to polypeptides with an unknown function. Classification is interim, and two or more classifications may be appropriate, and in such cases, both letters are described therein.

[0336] (Biomolecule Chip)

[0337] In another aspect, the present invention provides a biomolecule chip. The present biomolecule chip comprises a substrate and at least one nucleic acid molecule having at least eight contiguous or non-contiguous nucleotide sequences of the sequence set forth in SEQ ID NOs: 1, or 1087, or a variant thereof located therein.

[0338] Accordingly, in one embodiment, the present invention provides a nucleic acid molecule comprising a) a sequence set forth in SEQ ID NO: 1 or 1087, or a complementary sequence or fragment thereof; (b) a polynucleotide encoding a polypeptide consisting of an amino acid sequence selected from the group consisting of SEQ ID NO: 2-341, 343-722, 724-1086, 1088-1468, 1470-1837 and 1839-2157, or a fragment thereof; (c) a polynucleotide encoding a polypeptide having an amino acid sequence selected from the group consisting of SEQ ID NO: 2-341, 343-722, 724-1086, 1088-1468, 1470-1837 and 1839-2157, or a variant thereof having at least one mutation selected from the group consisting of one or more amino acid substitutions, additions, and deletions, wherein the variant polypeptide has biological activity; (d) a polynucleotide capable of hybridizing to a polynucleotide of any of (a)-(c), and encoding a polypeptide having an amino acid sequence having at least 70% identity to any one of the polypeptides of (a) to (c), wherein the polypeptide has biological activity.

[0339] In one preferred embodiment, the number of substitutions, additions and deletions described in (c) above may be limited to, for example, preferably 50 or less, 40 or less, 30 or less, 20 or less, 15 or less, 10 or less, 9 or less, 8 or less, 7 or less, 6 or less, 5 or less, 4 or less, 3 or less, or 2 or less. The number of substitutions, additions and deletions is preferably small, but may be large as long as the biological activity is maintained (preferably, the activity is similar to or substantially the same as that as set forth in Table 2, or an abnormal activity thereof (for example, inhibition of normal biological activity).

[0340] In other preferable embodiments, the biological activities possessed by the polypeptides of the present invention include, but are not limited to, for example, interactions with specific antibodies against at least one polypeptide selected from the group consisting of SEQ ID NOs: 2-341, 343-722, 724-1086, 1088-1468, 1470-1837 and 1839-2157; a biological activity listed in Table 2, and the like. These may be measured by, for example, immunological assays, labeling assays and the like.

[0341] In other preferable embodiments, allelic gene variants as described in (d) above, advantageously have at least 99% homology to the nucleic acid sequences set forth in SEQ ID NO: 1 or 1087, or a portion thereof (for example, when the reading frame of Table 2 is f-1, f-2 or f-3, the nucleic acid molecule has a sequence from the position of nucleic acid number (sense strand, start) of SEQ ID NO: 1 of Table 2, to the position of nucleic acid number (sense strand, stop), or when the reading frame of Table 2 is r-1, r-2 or r-3, the nucleic acid molecule has a sequence from the position of nucleic acid number (antisense strand, start) of SEQ ID NO: 1087 of Table 2, to the position of nucleic acid number (antisense strand, stop)).

[0342] If a gene sequence database for the subject species is available, the above-mentioned species homologs may be identified by searching against the database using a gene sequence of the present invention as a query sequence. Alternatively, a nucleic acid sequence of the present invention, or a portion thereof (for example, when the reading frame of Table 2 is f-1, f-2 or f-3, the nucleic acid molecule has a sequence from the position of nucleic acid number (sense strand, start) of SEQ ID NO: 1 of Table 2, to the position of nucleic acid number (sense strand, stop), or when the reading frame of Table 2 is r-1, r-2 or r-3, the nucleic acid molecule has a sequence from the position of nucleic acid number (antisense strand, start) of SEQ ID NO: 1087 of Table 2, to the position of nucleic acid number (antisense strand, stop)) may be used as a probe or primer to screen a genetic library of the subject species for identification thereof. Such identification methods are well known in the art, and are also described in references cited herein. Species homologs have preferably at least 30% homology to a nucleic acid sequence set forth in SEQ ID NO: 1 or 1087, or a portion thereof (for example, when the reading frame of Table 2 is f-1, f-2 or f-3, the nucleic acid molecule has a sequence from the position of nucleic acid number (sense strand, start) of SEQ ID NO: 1 of Table 2, to the position of nucleic acid number (sense strand, stop), or when the reading frame of Table 2 is r-1, r-2 or r-3, the nucleic acid molecule has a sequence from the position of nucleic acid number (antisense strand, start) of SEQ ID NO: 1087 of Table 2, to the position of nucleic acid number (antisense strand, stop)). Preferably, the species homologs of the present invention may have at least about 40% homology, at least about 50% homology, at least about 60% homology, at least about 70% homology, at least about 80% homology, at least about 90% homology, at least about 95% homology, at least about 98% homology with the above-mentioned standard sequence.

[0343] In preferable embodiments, identity against at least one polynucleotide of the above (a)-(e) or the complementary sequence thereto, maybe at least about 80%, more preferably at least 90%, still more preferably at least about 98%,most preferably at least about 99%. Most preferably, the gene sequence of the present invention, has a sequence 100% identical to a nucleic acid sequence set forth in SEQ ID NO: 1 or 1087, or a portion thereof (for example, when the reading frame of Table 2 is f-1, f-2 or f-3, the nucleic acid molecule has a sequence from the position of nucleic acid number (sense strand, start) of SEQ ID NO: 1 of Table 2, to the position of nucleic acid number (sense strand, stop), or when the reading frame of Table 2 is r-1, r-2 or r-3, the nucleic acid molecule has a a sequence from the position of nucleic acid number (antisense strand, start) of SEQ ID NO: 1087 of Table 2, to the position of nucleic acid number (antisense strand, stop)).

[0344] In a preferred embodiment, the nucleic acid molecule of the present invention encoding the gene of the present invention may have a length of at least 8 contiguous nucleotides. The appropriate nucleotide length of the nucleic acid molecule of the present invention may vary depending on the purpose of use of the present invention. More preferably, the nucleic acid molecule of the present invention may have a length of at least 10 contiguous nucleotides, even more preferably at least 15 contiguous nucleotides, still even more preferably at least 20 contiguous nucleotides, and yet still even more preferably at least 30 contiguous or non-contiguous nucleotides. These lower limits of the nucleotide length may be present between the above-specified numbers (e.g., 9, 11, 12, 13, 14, 16, and the like) or above the above-specified numbers (e.g., 21, 22, . . . 30, and the like). The upper limit of the length of the polypeptide of the present invention may be greater than or equal to the full length of the sequence as set forth in SEQ ID NO. 1, as long as the polynucleotide can be used for the intended purpose (e.g. antisense, RNAi, marker, primer, probe, capable of interacting with a given agent). Alternatively, when the nucleic acid molecule of the present invention is used as a primer, the nucleic acid molecule typically may have a nucleotide length of at least about 8, preferably a nucleotide length of about 10. When used as a probe, the nucleic acid molecule typically may have a nucleotide length of at least about 15, and preferably a nucleotide length about 17.

[0345] In one embodiment, the nucleic acid molecule encoding the gene of the present invention comprises the entire range of the open reading frame of SEQ ID NO: 1. More preferably, the nucleic acid molecule of the present invention consists of at least one sequence set forth in SEQ ID NO: 1 or 1087, or a portion thereof (for example, when the reading frame of Table 2 is f-1, f-2 or f-3, the nucleic acid molecule has a sequence from the position of nucleic acid number (sense strand, start) of SEQ ID NO: 1 of Table 2, to the position of nucleic acid number (sense strand, stop), or when the reading frame of Table 2 is r-1, r-2 or r-3, the nucleic acid molecule has a sequence from the position of nucleic acid number (antisense strand, start) of SEQ ID NO: 1087 of Table 2, to the position of nucleic acid number (antisense strand, stop)).

[0346] Accordingly, the biomolecule chip of the present invention preferably uses nucleic acid molecules or variants thereof which encompass the sequence set forth in SEQ ID NO: 1 or 1087. By using nucleic acid molecules of such an encompassing nature, it is possible to analyze functions of the genome in an exhaustive manner. This was first made possible by reading the entire sequence of the genome, and thus has not been attained by prior art technologies, and thus should present significant effects.

[0347] In other embodiments, the nucleic acid molecules, or variants thereof of the present invention, to be used in the biomolecule chip, comprise any open reading frame, as set forth in SEQ ID NO: 1 or 1087. As such, the effect by which any open reading frame can be selected on the genome, should be recognized as significant as this has not been possible using prior art technology. In particular, it should be noted that analysis of the entire genome of an organism living in high temperature environments, such as at 90° C., is possible.

[0348] In another embodiment, the nucleic acid molecule or variants thereof, to be used in the biomolecule chip of the present invention, preferably comprise substantially all the open reading frames set forth in SEQ ID NO: 1 or 1087. As used herein the term “substantially all” refers to a number sufficient for global genomic needs. Accordingly, the term “substantially all” is not necessarily all, and depending on the purpose of interest, those skilled in the art may select an appropriate number therefor. Exemplary “substantially all” includes, but is not limited to, for example, at least about 30%, preferably at least about 40%, more preferably at least about 50%, still preferably at least about 80%, still more preferably at least about 90%, yet more preferably at least about 95%, at least about 96%, at least about 97%, at least about 98%, at least about 99%, and the like, of the total number of entire open reading frames. In other typical examples of the present invention, substantially all may be about 900 genes whose function has already been identified in the present application. The effect by which analysis of substantially all the open reading frame is allowed, is not attainable using prior art technologies.

[0349] Accordingly, in another preferable embodiment, the nucleic acid molecule or variants thereof, to be used in the biomolecule chip of the present invention, comprises a sequence encoding at least one sequence selected from the group consisting of SEQ ID NO: 2-341, 343-722, 724-1086, 1088-1468, 1470-1837 and 1839-2157.

[0350] In other preferable embodiments, the nucleic acid molecules or variants thereof comprise substantially all sequences encoding sequences selected from the group consisting of SEQ ID NOs: 2-341, 343-722, 724-1086, 1088-1468, 1470-1837 and 1839-2157.

[0351] In more preferable embodiments, the nucleic acid molecule or the variant thereof, to be used as the biomolecule of the present invention, comprises at least an eight contiguous nucleotide length of substantially all the sequences encoding sequences selected from the group consisting of SEQ ID NOs: 2-341, 343-722, 724-1086, 1088-1468, 1470-1837 and 1839-2157. As used herein the selection of the sequence may be determined in consideration of a variety of factors as described above. A nulciec acid molecule at least eight contiguous nucleotides in length may comprise a sequence unique to the hyperthermophillic archeabacteria, and thus is advantageous for such analyses.

[0352] In another preferable embodiment, the nucleic acid molecule or the variant thereof to be used as the biomolecule of the present invention, comprises at least a fifteen contiguous nucleotide length of substantially all the sequences encoding sequences selected from the group consisting of SEQ ID NOs: 2-341, 343-722, 724-1086, 1088-1468, 1470-1837 and 1839-2157. A nucleic acid molecule at least fifteen nucleotides in length allows substantially specific identification of sequences unique to the hyperthermophillic archeabacteria, and thus is advantageous for such analyses.

[0353] In another more preferable embodiment, the nucleic acid molecule or the variant thereof, to be used in the biomolecule chip of the present invention, comprises at least a thirty contiguous or non-contiguous nucleotide length of substantially all the sequences encoding sequences selected from the group consisting of SEQ ID NOs: 2-341, 343-722, 724-1086, 1088-1468, 1470-1837 and 1839-2157. A nucleic acid molecule at least thirty contiguous or non-contiguous nucleotides in length allows substanitally specific identification of sequences unique to the hyperthermophillic archeabacteria, even when used as a probe, and thus is advantageous for such analyses.

[0354] In another more preferable embodiment, the nucleic acid molecule or the variant thereof to be used in the biomolecule chip of the present invention, comprises substantially all the sequences encoding sequences selected from the group consisting of SEQ ID NOs: 2-341, 343-722, 724-1086, 1088-1468, 1470-1837 and 1839-2157, or sequences with one or more amino acid substitution, addition and/or deletion thereto. Such sequences allow exhaustive analyses of nucleic acid molecules encoding polypeptides included or suspected to be included in an archeabacteria, and thus are advantageous for such analyses.

[0355] In another more preferable embodiment, the nucleic acid molecule or the variant thereof to be used in the biomolecule chip of the present invention, comprises at least an eight contiguous nucleotide length of substantially all the sequences encoding sequences selected from the group consisting of SEQ ID NOs: 2-341, 343-722, 724-1086, 1088-1468, 1470-1837 and 1839-2157, or sequences with one or more amino acid substitution, addition and/or deletion thereto. Chips containing such sequences may be used for analysis of the behavior of all genes.

[0356] In another more preferable embodiment, the nucleic acid molecule or the variant thereof to be used in the biomolecule chip of the present invention, comprises a molecule where the reading frame of Table 2 is f-1, f-2 or f-3, has a sequence from the position of nucleic acid number (sense strand, start) of SEQ ID NO: 1 of Table 2, to the position of nucleic acid number (sense strand, stop) or a sequence having at least 70% homology thereto, or when the reading frame of Table 2 is r-1, r-2 or r-3, the nucleic acid molecule has a sequence from the position of nucleic acid number (antisense strand, start) of SEQ ID NO: 1087 of Table 2, to the position of nucleic acid number (antisense strand, stop) or a sequence having at least 70% homology thereto. Such sequences contain open reading frames actually possessed by hyperthermophillic archeabacteria and thus provide an accurate assay at the genomic level. Thus, the present embodiment may be used for global analysis at such a genomic level.

[0357] In another embodiment, the substrate comprising the biomolecule of the present inventin is addressable. Giving addresses facilitates the analyses of all of the nucleic acid molecules. Methods for addressing are well known in the art.

[0358] In another aspect, the present invention provides a biomolecule chip with a polypeptide or a variant thereof, having at least an amino acid sequence selected from the group consisting of SEQ ID NO: 2-341, 343-722, 724-1086, 1088-1468, 1470-1837 and 1839-2157, or a sequence having at least 70% homology thereto, located therein.

[0359] Accordingly, in one embodiment, the present invention provides a polypeptide of (a) a polypeptide consisting of an amino acid sequence selected from the group consisting of SEQ ID NO: 2-341, 343-722, 724-1086, 1088-1468, 1470-1837 and 1839-2157, or a fragment thereof; (b) a polypeptide having an amino acid sequence selected from the group consisting of SEQ ID NO: 2-341, 343-722, 724-1086, 1088-1468, 1470-1837 and 1839-2157, or a variant thereof having at least one mutation selected from the group consisting of one or more amino acid substitutions, additions, and deletions, wherein the variant polypeptide has a biological activity; (c) a polypeptide encoded by a sequence or splicing variants or allelic variants thereof, wherein the nucleic acid molecule or the variant thereof, when the reading frame of Table 2 is f-1, f-2 or f-3, has a sequence from the position of nucleic acid number (sense strand, start) of SEQ ID NO: 1 of Table 2, to the position of nucleic acid number (sense strand, stop), or when the reading frame of Table 2 is r-1, r-2 or r-3, the nucleic acid molecule has a sequence from the position of nucleic acid number (antisense strand, start) of SEQ ID NO: 1087 of Table 2, to the position of nucleic acid number (antisense strand, stop); (d) a polypeptide of at least one species homolog of an amino acid sequence selected from the group consisting of SEQ ID NO: 2-341, 343-722, 724-1086, 1088-1468, 1470-1837 and 1839-2157; or (e) a polypeptide having an amino acid sequence having at least 70% identity to any one of the polypeptides of (a) to (c), wherein the polypeptide has biological activity.

[0360] In one preferred embodiment, the number of substitutions, additions and deletions described in (b) above may be limited to, for example, preferably 50 or less, 40 or less, 30 or less, 20 or less, 15 or less, 10 or less, 9 or less, 8 or less, 7 or less, 6 or less, 5 or less, 4 or less, 3 or less, or 2 or less. The number of substitutions, additions and deletions is preferably small, but may be large as long as biological activity, is maintained (preferably, the activity is similar to or substantially the same as that of the biological activity of a normal genetic type of a polypeptide having an amino acid sequence selected from the group consisting of SEQ ID NO: 2-341, 343-722, 724-1086, 1088-1468, 1470-1837 and 1839-2157, or an abnormal activity of a polypeptide having an amino acid sequence selected from the group consisting of SEQ ID NO: 2-341, 343-722, 724-1086, 1088-1468, 1470-1837 and 1839-2157).

[0361] In another preferred embodiment, the above-described splicing or allelic variants of the polypeptides described in (c) above preferably have at least about 99% homology to a polypeptide having an amino acid sequence selected from the group consisting of SEQ ID NO: 2-341, 343-722, 724-1086, 1088-1468, 1470-1837 and 1839-2157.

[0362] In another preferable embodiment, the above-mentioned species homologs preferably have at least about 30% homology to a polypeptide having an amino acid sequence selected from the group consisting of SEQ ID NO: 2-341, 343-722, 724-1086, 1088-1468, 1470-1837 and 1839-2157. Preferably, the species homologs have homology to the above standard sequence with at least about 40% homology, at least about 50% homology, at least about 60% homology, at least about 70% homology, at least about 80% homology, at least about 90% homology, at least about 95% homology, at least about 98% homology.

[0363] When a genetic sequence database of the species exists, the above species homologs may be identified by performing a search against the database using a polypeptide having an amino acid sequence selected from the group consisting of SEQ ID NO: 2-341, 343-722, 724-1086, 1088-1468, 1470-1837 and 1839-2157, as a query sequence. Alternatively, the entire amino acid sequence of a polypeptide having an amino acid sequence selected from the group consisting of SEQ ID NO: 2-341, 343-722, 724-1086, 1088-1468, 1470-1837 and 1839-2157, or a portion thereof, may be used as a probe or primer for screening a genetic library of the species. Such methods for identification are well known in the art, and are described in the references cited herein. Species homologs have preferably at least about 30% homology when the reading frame of Table 2 is f-1, f-2 or f-3, a sequence from the position of nucleic acid number (sense strand, start) of SEQ ID NO: 1 of Table 2, to the position of nucleic acid number (sense strand, stop), or when the reading frame of Table 2 is r-1, r-2 or r-3, a sequence from the position of nucleic acid number (antisense strand, start) of SEQ ID NO: 1087 of Table 2, to the position of nucleic acid number (antisense strand, stop); or an amino acid sequence selected from the group consisting of SEQ ID NO: 2-341, 343-722, 724-1086, 1088-1468, 1470-1837 and 1839-2157. Preferably, the species homologs may have homology to the above standard sequence with at least about 40% homology, at least about 50% homology, at least about 60% homology, at least about 70% homology, at least about 80% homology, at least about 90% homology, at least about 95% homology, at least about 98% homology.

[0364] In another preferable embodiment, the biological activity possessed by the variant polypeptide in (e) above, includes, but is not limited to, for example, interaction with an antibody specific to the polypeptide having an amino acid sequence selected from the group consisting of SEQ ID NO: 2-341, 343-722, 724-1086, 1088-1468, 1470-1837 and 1839-2157, or a fragment thereof; an enzymatic function as described in Table 2; and the like. Such functions may be measured by enzymatic assays, immunological assays, fluorescence assays and the like.

[0365] In preferable embodiments, the above-described homology to any one of the polypeptides described in (a) to (d) above may be at least about 80%, more preferably at least about 90%, even more preferably at least about 98%, and most preferably at least about 99%. Most preferably, the genetic product of the present invention is a sequence consisting of at least one amino acid sequence selected from the group consisting of SEQ ID NO: 2-341, 343-722, 724-1086, 1088-1468, 1470-1837 and 1839-2157.

[0366] The polypeptide of the present invention typically has a sequence of at least 3 contiguous amino acids. The amino acid length of the polypeptide of the present invention may be short as long as the peptide is suitable for an intended application, but preferably a longer sequence may be used. Therefore, the amino acid length may be preferably at least 4, more preferably at least 5, at least 6, at least 7, at least 8, at least 9 and at least 10, even more preferably at least 15, and still even more preferably at least 20. These lower limits of the amino acid length may be present between the above-specified numbers (e.g., 11, 12, 13, 14, 16, and the like) or above the above-specified numbers (e.g., 21, 22, . . . , 30, and the like). The upper limit of the length of the polypeptide of the present invention may be greater than or equal to the full length of the sequence as set forth in amino acid sequence selected from the group consisting of SEQ ID NO: 2-341, 343-722, 724-1086, 1088-1468, 1470-1837 and 1839-2157 as long as the peptide is capable of interacting with a given agent. As used herein, more preferable forms and constitutions with respect to the sequence to be included, may take any embodiment described herein above for preferable forms and constitutions.

[0367] The genetic product of the polypeptide form of the present invention is preferably labeled or may be capable of being labeled. Such a genetic product which is labeled or may be capable of being labeled, may be used to measure the antibody levels against the genetic product, thereby allowing indirect measurement of the level of expression of the genetic product.

[0368] In another preferable embodiment, the polypeptide or the variant thereof to be located on to a support of the biomolecule chip of the present invention has a length of at least three contiguous amino acids of an amino acid sequence selected from the group consisting of SEQ ID NO: 2-341, 343-722, 724-1086, 1088-1468, 1470-1837 and 1839-2157, or a sequence having at least 70% homology thereto. By having a sequence of at least three contiguous three amino acids, it is possible to constitute a specific epitope. As used herein, preferable forms of the sequence to be used, takes any form described herein above.

[0369] In preferable embodiments, the polypeptide or the variant thereof to be located on a support of the biomolecule chip of the present invention, has a length of at least eight contiguous amino acids of an amino acid sequence selected from the group consisting of SEQ ID NO: 2-341, 343-722, 724-1086, 1088-1468, 1470-1837 and 1839-2157, or a sequence having at least 70% homology thereto. By having a sequence of at least eight contiguous amino acids, it is possible to constitute specific epitopes in a more efficient manner. As used herein, preferable forms and constitutions of the sequence to be used, takes any form described herein above.

[0370] In preferable embodiments, the polypeptide or the variant thereof to be located on a support of the biomolecule chip of the present invention, has a length of at least three contiguous or non-contiguous amino acids of an amino acid sequence selected from the group consisting of SEQ ID NO: 2-341, 343-722, 724-1086, 1088-1468, 1470-1837 and 1839-2157, or a sequence having at least 70% homology thereto, and having a biological function. As used herein, the biological activities preferably include a function described in Table 2. In another embodiment, the biological activity includes epitope activity. As used herein, preferable forms and constitutions relating to preferable sequences may have the advantage of any of the forms and constitutions described herein above.

[0371] In another aspect, the present invention provides a storage medium having stored therein, information about a nucleic acid sequence of a nucleic acid molecule having a sequence of at least eight contiguous or non-contiguous nucleotides of the sequence set forth in SEQ ID NOs: 1 or 1087, or a variant thereof. As used herein, the information about the nucleic acid sequence includes, in addition to information about the nucleic acid sequence per se, information relating to that set forth in a conventional sequence listing. Such additional information includes, but is not limited to, for example, coding region, intron region, specific expression, promoter sequence and activity, biological function, similar sequences, homologs, reference information, and the like.

[0372] In a preferable embodiments, the nucleic acid molecule or the variant thereof to be stored in the storage medium of the present invention, comprises a sequence of at least eight contiguous nucleotides of substantially all the sequences encoding sequences selected from the group consisting of SEQ ID NOs: 2-341, 343-722, 724-1086, 1088-1468, 1470-1837 and 1839-2157, or sequences with one or more amino acid substitution, addition and/or deletion thereto. Such information could not be provided by prior art technologies, and thus should be recognized to be an effect attained for the first time by the present invention.

[0373] In other embodiments, the reading frame of Table 2 is f-1, f-2 or f-3, the nucleic acid molecule or the variant thereof to be recorded in the storage medium of the present invention, has a sequence from the position of nucleic acid number (sense strand, start) of SEQ ID NO: 1 of Table 2, to the position of nucleic acid number (sense strand, stop) or a sequence having at least 70% homology thereto, or when the reading frame of Table 2 is r-1, r-2 or r-3, the nucleic acid molecule has a sequence from the position of nucleic acid number (antisense strand, start) of SEQ ID NO: 1087 of Table 2, to the position of nucleic acid number (antisense strand, stop) or a sequence having at least 70% homology thereto. Such storage medium with information recorded thereon has never been conventionally provided, and thus the storage medium of the present invention has an advantageous effect in allowing analysis of the entire genome. Preferably, the storage medium of the present invention includes information about substantially all the open reading frame sequences. As used herein, preferable forms and constitutions relating such preferable sequences may take advantages of any forms and constitutions described herein above.

[0374] In another aspect, the present invention provides a storage medium, comprising information about a polypeptide or a variant thereof having at least an amino acid sequence selected from the group consisting of SEQ ID NO: 2-341, 343-722, 724-1086, 1088-1468, 1470-1837 and 1839-2157, or a sequence having at least 70% homology thereto, located therein. As used herein, preferable forms and constitutions relating such preferable sequences may take advantage of any forms and constitutions described herein above.

[0375] In another embodiment, the polypeptide or the variant thereof to be stored in the storage medium of the present, invention with respect to information thereabout, has a sequence of at least three contiguous amino acids of at least an amino acid sequence selected from the group consisting of SEQ ID NO: 2-341, 343-722, 724-1086, 1088-1468, 1470-1837 and 1839-2157, or a sequence having at least 70% homology thereto. As used herein, the referable forms and constitutions of such preferable sequences may take advantage of any of the forms and constitutions described herein above.

[0376] In another embodiment, the polypeptide or the variant thereof to be stored in the storage medium of the present invention with respect to information thereabout, has a sequence of at least eight contiguous amino acids of at least an amino acid sequence selected from the group consisting of SEQ ID NO: 2-341, 343-722, 724-1086, 1088-1468, 1470-1837 and 1839-2157, or a sequence having at least 70% homology thereto. As used herein, the preferable forms and constitutions of such preferable sequences may take advantages of any of the forms and constitutions described herein above.

[0377] In another embodiment, the polypeptide or the variant thereof to be stored in the storage medium of the present invention with respect to information thereabout, has a sequence of at least three contiguous or non-contiguous amino acids of an amino acid sequence selected from the group consisting of SEQ ID NO: 2-341, 343-722, 724-1086, 1088-1468, 1470-1837 and 1839-2157, or a sequence having at least 70% homology thereto, having biological function. As used herein, preferable forms and constitutions of such preferable sequences may take advantages of any of the forms and constitutions described herein above.

[0378] In another embodiment, the biological activity to be included in the storage medium of the present invention with respect to information thereof, comprises a function set forth in Table 2. As used herein, preferable forms and constitutions of such preferable activities may take advantage of any forms and constitutions described herein above.

[0379] In another aspect, the present invention provides a biomolecule chip having at least one antibody against a polypeptide or a variant thereof, located on a substrate, the polypeptide or the variant thereof comprises at least one amino acid sequence of sequences selected from the group consisting of SEQ ID NOs: 2-341, 343-722, 724-1086, 1088-1468, 1470-1837 and 1839-2157, or a sequence having at least 70% homology thereto. As used herein, preferable forms and constitutions of preferable sequences may take advantage of any forms and constitutions described herein above.

[0380] In another aspect, the present invention provides an RNAi molecule having a sequence homologous to a reading frame sequence wherein, when the reading frame of Table 2 is f-1, f-2 or f-3, the reading frame sequence has a sequence from the position of nucleic acid number (sense strand, start) of SEQ ID NO: 1 of Table 2, to the position of nucleic acid number (sense strand, stop) or a sequence having at least 70% homology thereto, or when the reading frame of Table 2 is r-1, r-2 or r-3, the reading frame sequence has a a sequence from the position of nucleic acid number (antisense strand, start) of SEQ ID NO: 1087 of Table 2, to the position of nucleic acid number (antisense strand, stop) or a sequence having at least 70% homology thereto. As used herein, such an RNAi molecule may take any form described herein above in detail, and those skilled in the art may make and use any appropriate RNAi molecule once the sequence information of the present invention is given.

[0381] In preferable embodiments, the RNAi molecule of the present invention is an RNA or a variant thereof comprising double-stranded portion of at least 10 nucleotide length.

[0382] In a more preferable embodiment, the RNAi molecule comprises a 3′ overhand.

[0383] In another preferable embodiment, the above-3′ overhang terminus has a DNA molecule of two or more nucleotides in length.

[0384] In other preferable embodiments, the 3′ overhang has a DNA molecule of 2-4 nucleotides.

[0385] Such RNAi molecules may be used for suppressing particular functions of hyperthermophillic archeabacteria. Any RNAi molecules may be used which were not attainable by the prior art, and thus the present invention attains significant effects in this regard.

[0386] All patents, patent applications, journal articles and other references mentioned herein are incorporated by reference in their entirety.

[0387] The present invention is heretofore described with reference to preferred embodiments to facilitate understanding of the present invention. Hereinafter, the present invention will be described by way of examples. Examples described below are provided for illustrative purposes only. Accordingly, the scope of the present invention is limited only by the appended claims.

### EXAMPLES

[0388] Hereinafter, the present invention will be described in more detail by way of examples. Thus it should be understood that the present invention is not limited to the examples below.

### EXAMPLE 1

### Genomic Sequencing

[0389] (Preparation of Chromosomal DNA the KOD-1 Strain)

[0390] The KOD-1 strain was inoculated into 1000 ml of 0.5×2216 Marine Broth medium as described in Appl. Environ. Microbiol. 60 (12), 4559-4566 (1994) (2216 Marine Broth: 18.7 g/L, PIPES 3.48 g/L, CaCl₂.H₂O 0.725 g/L, 0.4 mL 0.2% resazurin, 475 mL artificial sea water (NaCl 28.16 g/L, KCl 0.7 g/L, MgCl₂.6H₂O 5.5 g/L, MgSO₄.7H₂O 6.9 g/L), distilled water 500 mL, pH 7.0) and cultured using 2 liter fermenter. During culture, nitrogen gas was introduced into the fermenter, and was maintained at an internal pressure of 0.1 kg/cm². Culture was maintained at the temperature of 85±1° C. for fourteen hours. Further, the culture was carried out by static culture, and no aeration and agitation was performed with the nitrogen gas in the culture. After culture, the bacteria (about 1,000 ml) were recovered by centrifugation at 10,000 rpm for 10 minutes.

[0391] One g of the resulting bacterial pellet was suspended in 10 ml of Solution A (50 mM Tris-HCl, 50 mM EDTA, pH 8.0), and centrifuged (8,000 rpm, 5 minutes, 4° C.) to pellet the bacteria and suspended in 3 ml of Solution A containing 15% sucrose, maintained the temperature at 37° C. for 30 minutes, and added 3 ml of Solution A containing 1% N-lauryl sarcosine thereto. 5.4 g of cesium chloride and 300 μl of10 mg/ml of ethidium bromide were added to the solution, and ultracentrifuged at 55,000 rpm, 16 hours, at 18° C. and chromosomal DNA was fractionated. The resultant chromosomal DNA fractions were subjected to n-butanol extraction to remove ethidium bromide, and dialyzed against TE solution (10 mM Tris-HCl (pH 8.0), 0.1 mM EDTA) to yield chromosomal DNA.

[0392] (Screening/Sequencing Analysis of the Chromosomal Library)

[0393] Determination of the genomic sequence was peformed according to the bottom-down approach, as generally performed in the art. In brief, the outline is as follows: first, isolated DNA was fragmented to clone into a cloning vector such as pUC. Next, cloned fragments were sequenced by shot-gun sequencing. These sequencing reactions were performed at about 15,000 per 1 Mbp. The sequences determined for each reaction, were assembled for clarification in a group of sequences called “contig”. Thereafter, gaps between the contigs (physical and sequence gaps) were cloned, and the gaps were sequenced to fill the gaps. Thereafter, the analysis of base sequence data was performed to identify open reading frame for performing annotation. The details are as follows:

[0394] First, genomic libraries were constructed. As used herein, in order to prevent bias derived from genetic sequences, physical digestions rather than partial digestion using restriction enzymes were performed. In this case, libraries of a plurality of lengths were constructed. Plasmid libaries containing 2-3 kbp fragments, and lambda phage libraries containing about 20 kbp were constructed.

[0395] Second, shot gun sequencing of plasmid libraries was performed. A sequencer commercially available from Applied Biosystems was used for sequencing. As used herein, such sequencing was performed so that 400-500 bp base sequences may be obtained for about 150,000/1 Mbp. Similarly, terminal shot gun sequencing of the lambda phage library was performed. As such, theoretically, it was calculated the entire full-length genome was sequenced six times or more.

[0396] Third, base sequence data (about 40,000 pieces of data for about 2 Mbp genome) was assembled to fill in the gaps. In this instance, terminal sequence data from the lambda phage library consisting of long fragments was determined for relative positions and the direction of each region. What is obtained by this proceedure is usually called a “contig”. In the present Example, a number of contigs were obtained. Sequence undetermined regions (gaps) therebetween were filled. When fragments were identified to fill the gap between contigs, such gaps are called sequence gaps, and gaps in which such fragments were not cloned, are called physical gaps. Filling such physical gaps was performed by engineering techniques, such as amplification of LA-PCR and the like, and base sequence determination and the like. As such, substantially all the sequencing data fell within one contig, and the sequencing was thus completed.

[0397] Fourth, the sequence data was analyzed. Open reading frames (ORF) were identified and the annotation thereof was performed. In this task, programs such as Hidden Markov model (HMM) and Interpolated Markov model (GLIMMER) and the like were used for identification of ORFs. Thereafter, the search functions of BLAST, BLASTX and FASTA and the like were used to identify the function of each ORF. Thereafter, genetic and biochemical analyses were performed (see, for example, Fraser C. M., Res Microbiol., 151, 79-84 (2000); Fraser C. M. et al., Nature, 406, 799-803 (2000); Nelson et al., Nat Biotechnol., 18, 1049-1054 (2000); Kawarabayasi Y. et al., DNA Res., 6, 83-101, 145-222 (1999) and the like).

[0398] The nucleic acid sequences determined as above are sequences set forth in SEQ ID NO: 1 (SEQ ID NOs: 1, 342, and 723 are plus (sense) strand, and SEQ ID NOs: 1087, 1469 and 1838 are minus (antisense) strand).

[0399] (Functional Analysis of Each Gene)

[0400] Next, the amino acid sequence of each gene was compared to those known in the art, as registered in databases such as EMBL, PDB and the like, by using software such as DNASIS, BLAST, and CLUSTAL W. As a result, a variety of polypeptides having high homology with said amino acid sequences were identified, and the function of each gene inferred therefrom (see Table 2).

### Example 2

### Targeting

[0401] (Double Cross-Over Disruption)

[0402] (Bacterial Strains and Growth Conditions)

[0403] T. kodakaraensis KOD1 and derivatives thereof were cultured under stringent anaerobic conditions at 85° C. in rich growth medium (ASW-YT) and amino acid-containing synthetic medium (ASW-AA). ASW-YT medium contains 5.0 g/L yeast extract, 5.0 g/L trypton and 0.2 g/L sulfur (pH 6.6) in a diluted artificial sea water to 1.25 fold (ASW×0.8). The composition of ASW is as follows: NaCl 20 g; MgCl₂.6H₂O 3 g; MgSO₄.7H₂O 6 g; (NH₄)₂SO₄ 1 g; NaHCO₃ 0.2 g; CaCl₂.2H₂O 0.3 g; KCl 0.5 g; NaBr 0.05 g; SrCl₂.6H₂O 0.02 g; and Fe(NH₄) citrate 0.01 g. ASW-AA medium is 0.8×ASW supplemented with 5.0 ml/L modified Wolfe minor mineral (containing in 1 L, 0.5 g MnSO₄. 2H₂O; 0.1 g CoCl₂; 0.1 g ZnSO₄; 0.01 g CuSO₄.5H₂O; 0.01 g AlK(SO₄)₂; 0.01 g H₃BO₃; and 0.01 g NaMoO₄.2H₂O), 5.0 ml/L vitamin mixture (see the following literature), twenty amino acids (containing 250 mg cystein.HCl; 75 mg alanine; 125 mg arginine.HCl; 100 mg asparagine.H₂O; 50 mg aspartic acid; 50 mg glutamine, 200 mg glutamic acid; 200 mg glycine; 100 mg histidine.HCl.H₂O; 100 mg isoleucine; 100 mg leucine; 100 mg lysine.HCl; 75 mg methionine; 75 mg phenylalanine; 125 mg proline; 75 mg serine; 100 mg threonine; 75 mg tryptophane; 100 mg tyrosine; and 50 mg valine in 1 L) and 0.2 g/L sulfur element (pH is adjusted to 6.9 with NaOH) (Robb, F. T., and A. R. Place. 1995. Media for Thermophiles, p. 167-168. In F. T. Robb and A. R. Place (ed.) Archea: a laboratory manual-Thermophiles.Cold Spring Harbor Press, Cold Spring Harbor, N.Y.). Optionally, 5-FOA (Wako Pure Chemical, Osaka, Japan) and uracil (Kojin, Tokyo, Japan) were added to ASW-AA medium at the concentrations described in Robb. In order to examine tryptophan nutrient requirement, tryptophan-free ASW-AA, ASW-AAW⁻ were used. In order to reduce dissolved oxygen in the medium, 5.0% Na₂S.9H₂O was added until the color of sodium resazurin salt (1.0 mg/L) disappeared. In the case of plate culture, 1.0% (w/v) Gelrite (Wako Pure Chemical) was added, and in lieu of the sulphur element 5.0% Na₂S.9H₂O solution, 2.0 ml/L polysulfide solution (10 g Na₂S.9H₂O and 3.0 g sulphur element/15 ml) weas used for solidification. The cells were incubated in anaerobic chamber (Tabai Espec, Osaka, Japan), at 85° C.

[0404] DH5-alpha, an E. coli used for general DNA engineering, was routinely cultured on LB medium (Sambrook, J., and D. Russel. 2001. Molecular cloning: a laboratory manual, 3rd edn. Cold Spring Harbor Press, Cold Spring Harbor, N.Y.) which was supplemented with 50 μg/ml ????? as necessary.

[0405] (Mutation by UV Radiation and Isolation of 5-FOA Resistant Variants)

[0406] T. kodakaraensis KOD1 was cultured in 2.0 L of ASW-AA liquid medium for 39 hours. Cells within the stationary phase were recovered by centrifugation (6,000×g, 30 minutes). The following procedures were performed anaerobically in an anaerobic chamber as follows: cells were resuspended in 60 mL of ASW, and a portion of the suspension (10 mL) was placed into a petri dish. The suspension was UV radiated for an appropriate time (0, 30, 60, 90 and 120 seconds) at a distance of 20 cm from 15 W sterilization lamp, with agaitation. Aliquots (200 μl) were plated on ASW-AA plate medium containing 0.75% 5-FOA, and uracil nutrition requirement (Pyr⁻) variants were dominantly screened. In order to support growth of the resultant variants, 10 μg/ml uracil was included in the growth media. The cells were incubated at 85° C. for five days. The number of viable cells was deterimined by inoculation onto a ASW-AA plate medium free of 5-FOA at an appropriate dilution ratio, and counting the number of colonies formed.

[0407] 5-FOA colonies were separated, and cultured in ASW-YT liquid medium. The cells were incubated in ASW-AA liquid medium for two days in order to avoid carry over of uracil, and passaged into ASW-AA liquid medium with or without 5 μg/ml uracil to study the nutritional requirement of the isolates for uracil of isolates.

[0408] (Enzymatic Assay)

[0409] Cell-free extracts of T. kodakaraensis KOD1 and variants thereof were prepared as follows: cells were cultured in ASW-Y liquid medium for twenty hours, and collected by centrifugaion (6,000×g, 30 minutes), and the cells were resuspended in 50 mM Tris-HCl (pH 7.5) containing 0.1% v/v Triton X-100. The samples were vortexed for ten minutes, centrifuged at 3,000×g for twenty minutes, and the resultant supernatant retained as cell-free extract. Protein concentration was determined using the Bio-Rad Protein Assay System (Bio-Rad, Hercules, Calif., USA) using bovine serum albumin as a standard.

[0410] Orotidine-5′-monophosphate decarboxylase (OMPdecase, PyrF) activity was determined by monitoring the reduction in optical density at 285 nm (OD_{λ285nm}), derived from the conversion of orotidine-5′-monophosphate (OMP) into uridine-5′-monophosphate (UMP) (Beckwith, J. R., A. B. Pardee, R. Austrian, and F. Jacob. 1962. Coordination of the synthesis of the enzymes in the pyrimidine pathway of E. coli. J. Mol. Biol. 5: 618-634.). The assay mixture consists of 100 mM Tris-HCl (pH 8.6), 1.5 mM MgCl₂, 0.125 mM OMP and enzyme solution in 1 ml in total. This mixture was preincubated at 85° C. for 5 minutes in a capped cuvette, and the reaction was initiated by adding an enzyme solution and monitored for 10 minutes at the same temperature.

[0411] Orotinate phoshoribosyltransfrase (OPRTase, PyrE) activity was assayed by spectrometrically measuring orotinic acid at 295 nm. When measuring enzyme sample from pyrE⁺ strain, continuous decarboxylation by intrinsic OMP decase of the reactant product OMP should be taken into account. As OMP decase activity is higher than OPRTase in T. kodakadaensis, OPRTase activity may be determined at □□₂₉₅ of 3,670 M⁻¹cm⁻¹. This does not correspond to the conversion from orotinic acid to UMP via OMP. In the case of the pyrF⁻ strain, we monitored the conversion of the vstarting substrate to OMP by means of □□₂₉₅ of 2,520 M⁻¹cm⁻¹. This reaction was performed in 1 ml mixture comprising Tris-HCl (pH 8.6), 1.5 mM MgCl₂, 0.125 mM orotinic acid, cell-free extract, and 1.6 mM 5-phosphoribosylpyrophosphate (PRPP). The same assay mixture free of PRPP was placed in a capped cuvette, and preincubated at 85° C. for 10 minutes, and the reaction was initiated by the addition of PRPP. The decrease in A₂₉₅ was measured at the same temperature for three minutes.

[0412] (DNA Engineering and Sequencing)

[0413] General DNA engineering was performed as described in Sambrook and Russel (Sambrook, J., and D. Russel. 2001. Molecular cloning: a laboratory manual, 3rd edn. Cold Spring Harbor Press, Cold Spring Harbor, N.Y.). The genomic DNA of T. kodakaraensis was isolated as described above. PCR was performed using KOD-Plus-(TOYOBO, OSAKA, JAPAN) as the DNA polymerase. The sequence of the primers used for PCR are shown below. Optionally, DNA fragments amplified by PCR were phosphorylated by T4 kinase (TOYOBO). Restriction enzymes and modification enzymes were purchased from TaKaRa (Kyoto, Japan) or Toyobo. DNA fragments were collected after agarose gel electrophoresis, and GFX PCR DNA and a Gel Band Purification Kit (Amersham Pharmacia Biotech, Uppsala, Sweden) were used for purification thereof. Plasmid DNA was isolated using Qiagen Plasmid Kits (Qiagen, Hilden, Germany). DNA sequencing was performed using ABI PRISM kit and a Model 3100 capillary sequencer (Applied Biosystems, Foster City, Calif., USA).

[0414] (Construction of pUDT and pUDT2)

[0415] Two disruption vectors pUDT1 (SEQ ID NO: 2158) and pUDT2 (SEQ ID NO 2159) were constructed for respective homologous recombination of single and double cross-over events in T. kodakaraensis. They were constructed as follows: a DNA fragment (676 bp) containing Tk-pyrF was amplified from T. kodakaraensis KOD1 genomic DNA using the following primers
[0416] TK1-DUR/TK1-DUF:
[0417] TK1-DUR/TK1-DUF: 5′-GGGCATATGGAGGAGAGCAGGCTCATTCTGGCG-3′ (SEQ ID NO; 2160)/5′-CTGAGGGGGTGTTTGACTTTCAA-3′ (SEQ ID NO: 2161), wherein underlined sequences indicate NdeI sites.

[0418] Deduced promoter region (130 bp) was amplified from primers TK2-DPR/TK2-DPF:
[0419] TK2-DPR/TK2-DPF: 5′-GGGCTGCAGCCGCAACGCGCATTTTGCTCACCCGAA AA-3′ (SEQ ID NO: 2162)/5′-GGGCATATGCATCACCTTTTTAACGGCCCTCTCCAAGAG-3′ (SEQ ID NO: 2163), wherein underlined sequences indicates PstI and NdeI sites, respectively.

[0420] Both fragments were subcloned into pUC118 in an appropriate promoter pyrF direction. The resultant plasmid was designated as pUD (3,944). A short fragment (788 bp) of Tk-trpE was amplified using the following primers TK3-DTR/TK3-DTF:
[0421] TK3-DTR/TK3-DTF: 5′-GGGGCATGCGGTGGCTT CGTTGGCTACGTCTCCTACG-3′ (SEQ ID NO: 2164)/5′-GGGCTGCAGTTCGGGGCTCCGGTTAGTGTTCCCGCCG-3′ (SEQ ID NO: 2165), wherein underlined sequences indicate SphI and PstI sites. Next, this was ligated with pUD at SphtI and PstI sites to yield pUDT1 (4732 bp).

[0422] In order to construct pUDT2, fragments containing Tk-trpE and flanking regions (2223 bp) were amplified using the following primers TK4-DT2R/TK4-DT2F:
[0423] TK4-DT2R/TK4-DT2F: 5′-GGGGTCGACCGGG TCTGGCGAGGGCAATGAGGGAC-3′ (SEQ ID NO: 2166)/5′-GGGGAATTCGGTTATAGTGTTCGGAACGACCTTCACTC-3′ (SEQ ID NO: 21267), wherein underlined sequences indicate SalI and EcoRI sites, respectively)

[0424] This was subcloned into SalI and EcoRI sites of pUC119. The resultant plasmid was designated pUT4 (5,340 bp). pUD was digested with PvuII, and the fragment containing pyrF and the deduced promoter region (1104 bp) was isolated. pUDT2 (6,012 bp) was obtained by inserting the isolated fragment in pUT4, into the blunt ended SacI sites of Tk-trpE.

[0425] Linear DNA fragments for homologous recombination in T. kodakaraensis were prepared by PCR using pUDT2 as a template, and purified after agarose gel electrophoresis.

[0426] (Transformation of T. kodakaraensis)

[0427] The calcium chloride method for Methanococcus voltae PS (Bertani, G., and L. Baresi. 1987. Genetic transformation in the methanogen Methanococcus voltae PS. J. Bacteriol. 169: 2730-2738.) was modified for transformation of T. kodakaraensis. T.kodakaraensis KU25 was cultured for twelve hours in ASW-YT liquid medium, and cells were collected from 3 ml broth during later log phase (17,000×g, 5 minutes), and resuspended in 200 μl transformatinon buffer (in order to avoid precipitation phenomensa between calcium cations and phosphate groups, in 80 mM CaCl₂ in 0.8 modified ASW free of KH₂PO₄) ( 1/15 vol.). This was maintained on ice for 30 minutes. Next, 3 μg DNA was dissolved in TE buffer, and added to the suspension. Further, the cells were incubated on ice for one hour, followed by heat shock at 85° C. for 45 seconds, and further incubated on ice for 10 minutes. As control experiments, an equal volume of TE buffer was added to the cell in lieu of DNA. Processed cells were screened for Pyr⁺ transformant by passaging two generations in the absence of uracil in 20 ml of ASW-AA liquid medium. Next, the cells were diffused on an ASW-AA plate, free of uracil, and incubated for 5-8 days at 85° C. Resultant Pyr⁺ strain was analyzed by Southern hybridization using colony PCR and DIG-DNA labeling and detection kit (Boehringer Mannheim, Mannheim, Germany).

[0428] (Experimental Procedures)

[0429] Double targeting disruption was performed using circular DNA molecules for double cross-over gene disruption. The exemplary scheme is shown in FIG. 1.

[0430] (Preparation of a Disruption Vector)

[0431] (Preparation of KOD-1)

[0432] The KOD-1 strain was prepared as described above.

[0433] (Transformation and Homologous Recombination)

[0434] As described above, transformed KOD-1 strain was maintained in ASW-AA. In this instance, KOD-1 strain growth is sustained by carried-over uracil.

[0435] Next, the KOD-1 strain was inoculated into fresh amino acid liquid medium. PyrF+ is the only strain in which homologous recombination occurred, and therefore grows in fresh amino acid liquid medium, this allowed screening and isolation of strians in which homologous recombination had occurred.

[0436] Next, isolated strains were inoculated into ASW-AA. Colonies grown on solid medium were confirmed with colony PCR and Southern blotting analysis. The procedure therefor is described as follows:

[0437] Reaction mixture: 2.5 unit KOD polymerase (TOYOBO) 0.5 μl; 10× KOD polymerase buffer (TOYOBO) 5.0 μl; 25 mM MgCl₂ 4.0 μl; dNTP mixture 4.0 μl; 20 pmol/μl primer 1 0.5 μl; 20 pmol/μl primer 2 0.5 μl; sterilized water 37.0 μl; cell suspension 0.5 μl.

[0438] This reaction mixture was incubated under the following reaction conditions: 96° C., 2 minutes, 96° C., 30 seconds, 55° C., 3 seconds, 72° C., 30 seconds, 30 cycles; 72° C. 3 minutes.

[0439] Colony PCR and Southern blotting analyses were performed to yield the following results:

TABLE 3
Double cross-over gene targeted disruption

| | Control | Transformant1 | Transformant2 |
|---|---|---|---|
| CaCl₂ | + | + | + |
| DNA | TE buffer | pUDT2 | pUDT2 |
| Growth in | No growth | Growth | Growth |
| amino acid | | | |
| liquid medium | | | |
| in the | | | |
| presence of | | | |
| carried-over | | | |
| uracil | | | |
| T/C | not | 12/12 | 5/12 |

| | available | |
|---|---|---|
| Total T/C | not | 17/24 |
| | available | |

T/C refers to the number of clones which were screened by transformant/colony PCR of interest (i.e., PyrF⁺ strain).

[0440] As shown in the above results, it was demonstrated that targeted double cross-over disruption of genes using circular molecules proceeds at a very high ratio.

### Example 3

### Examples of Double Cross-Over Disruption; Cases Where Linear DNA was Used

[0441] Next, examples of double cross-over using linear DNA molecules were shown.

[0442] (Production of the Disruption Vector)

[0443] Linear DNA was prepared as shown in FIG. 2 as a linear disruption vector. Linear DNA was obtained by amplification using pUDT2 prepared in Example 2 as a template using appropriate primers.

[0444] (Preparation of KOD1)

[0445] The KOD-1 strain was prepared as described in Example 2.

[0446] (Transformation and Homologous Recombination)

[0447] Prepared KOD-1 strain was transformed using the calcium chloride method. The transformed KOD-1 strain was maintained in ASW-AA. In this instance, KOD-1 strain growth is sustained by carried-over uracil.

[0448] Next, the KOD-1 strain was inoculated into fresh amino acid liquid medium. PyrF+ strain is the only strain in which homologous recombination occurrs, and therefore grows in fresh amino acid liquid medium, allowing screening and isolation of strains in which homologous recombination has occurred.

[0449] Next, isolated strains were inoculated into ASW-AA. Then colonies grown on the solid medium were confirmed by colony PCR and Southern blotting analysis. The procedure therefor is described as follows:

[0450] Colony PCR and Southern blotting were performed as described above.

[0451] As analyzed above, the following results were obtained.

TABLE 4
Gene targeted disruption by double cross-over

| | Control | Transformant3 | Transformant4 |
|---|---|---|---|
| CaCl₂ | + | + | + |
| DNA | TE buffer | Linear DNA | Linear DNA |
| Growth in | No growth | Growth | Growth |
| amino acid | | | |
| liquid medium | | | |
| in the | | | |
| presence of | | | |
| carried-over | | | |
| uracil | | | |
| T/C | not | 7/12 | 0/12 |

| | available | |
|---|---|---|
| Total T/C | not | 7/24 |
| | available | |

T/C refers to the number of clones which were screened by transformant/colony PCR of interest (i.e., PyrF⁺ strain).

[0452] As shown in the above results, it was demonstrated that targeted double cross-over disruption of genes using linear molecules proceeds at a sufficiently high ratio, although lower than those using circular molecules. It is thought that the reason for lower ratios than that observed using circular molecules include digestion of linear molecules by host nucleases.

[0453] Further, in light of the above-mentioned results, when determining a preferable length for linear DNA, if there are at least 500 bases at both termini, targeted disruption progresses at about 5% or more, and if there are at least respective 1000 bases at both termini, targeted disruption progresses at about 20% or more. Accordingly, it is understood that targeted disruption using a linear molecule requires at least 500 bases, and preferably at least 1,000 bases of nucleic acid sequences at both termini.

### Example 4

### Examples of Double Cross-Over Disruption Other Genes

[0454] A gene other than the above-mentioned genes (for example, a sequence encoding SEQ ID NO: 395 (Tryptophane synthase)) is selected to perform similar experiments based on tryptophane nutritional requirement, and similar targeted disruption was performed.

### Example 5

### Single Cross-Over Disruption

[0455] Gene targeted disruption was performed using a circular molecule using a single cross-over dirsuption system. Schematic drawing is shown in FIG. 3. pUDT (SEQ ID NO: 2158) was prepared as described above.

[0456] (Preparation of KOD1)

[0457] The KOD-1 strain was prepared as described in Example 2.

[0458] (Transformation and Homologous Recombination)

[0459] Prepared KOD-1 strain was transformed with the calcium chloride method. The Transformed KOD-1 strain was maintained in ASW-AA. In this instance, the KOD-1 strain grows with carried-over uracil.

[0460] Next, the KOD-1 strain was inoculated to a fresh amino acid liquid medium. As PyrF+ strain, in which homologous recombination occurred, only grows in fresh amino acid liquid medium, this allows screening and concentration for those in which homologous recombination has occurred.

[0461] Next, grown strains were inoculated into ASW-AA. Then colonies grown in the solid medium were confirmed with colony PCR and Southern blotting analysis. The procedure therefor is described as follows:

[0462] Colony PCR and Southern blotting were performed as described above.

[0463] As analyzed above, the following results were obtained.

TABLE 5
Gene targeted disruption by single cross-over

| | Control | Transformant5 | Transformant6 |
|---|---|---|---|
| CaCl₂ | + | + | + |
| DNA | TE buffer | pUDT1 | pUDT1 |
| Growth in | No growth | Growth | Growth |
| amino acid | | | |
| liquid medium | | | |
| in the | | | |
| presence of | | | |
| carried-over | | | |
| uracil | | | |
| T/C | not | 1/96 | 2/96 |

| | available | |
|---|---|---|
| total T/C | not | 3/192 |
| | available | |

T/C refers to the number of clones which were reviewed by transformant/colony PCR of interest (i.e., PyrF⁺ strain).

[0464] As described above, it is understood that gene targeted disruption by single cross-over using a circular molecule progresses at a much lower rate than the gene targeted disruption by double cross-over. A reason why efficiency by single cross-over is lower than that by double cross-over is believed to be the digestion of pUDT1 by restriction enzymes from the host.

[0465] As such, the present invention is demonstrated to work in a system using single disruption. Further, when using a linear molecule, the system using single disruption works, although at much lower rate.

### Example 6

### Examples of Single Cross-Over Disruption; Other Genes

[0466] Genes were disrupted by single cross-over as in Example 4, and it was demonstrated that disruption was permissible, although efficiency thereof was not as good as in Example 5.

### Example 7

### Expression of DNA Ligase Gene

[0467] In order to express an ATP dependent DNA ligase in Escherichia coli, the following protocols were used. Fragments of the phage clone comprising the sequence of DNA ligase identified in the present invention (for example, SEQ ID NO: 1131) was used as a template to yield fragments of two types of DNA ligase coding regions, which were inserted into pUC18. The sequences of the inserted fragments were confirmed and the fragments comprising the DNA ligase from the plasmid was inserted into the plasmid pET21a (Novagen) to construct the plasmids. The expression and the activity were confirmed as follows:

[0468] Escherichia coli BL21 (DE3) was transformed with the plasmid. The resultant ampicillin resistant transformants were inoculated on to the NZCYM medium (1% NZ amine, 0.5% NaCl, 0.5% yeast extract, 0.1% casamino acid, 0.2% MgSO4.7H₂O (pH 7)), cultured at 37° C. until the OD₆₆₀ reached 0.4. Isopropyl-β-D-thiogalactopyranoside (IPTG, 0.1 mM) was then added thereto to continue the culture at 37° C. After culture, cells were collected by centrifugation, broken by sonication, and centrifuged to yield a cell extract, which was disrupted by sonication, and this was again centrifuged to recover soluble fractions. The resultant fraction was processed at 70° C. for ten minutes and the thermostable soluble fraction was centrifuged again to yield a sample. This sample may be further purified using a variety of well known purification methods and a combination thereof.

[0469] Enzymatic activities are measured by a method for observing a change of mobility of DNA fragments after the obtained samples were digested with lambda phage DNA Hind III, and the resultant was agarose gel electrophoresed; or a method for reacting the obtained sample to an oligo dT labeled with ³²P and removing unreacted ³²P with alkaline phosphatase, and then measuring radioactivity thereof (see Rossi, R et al, (1997) Nucleic Acids Research, 25(11):2106-2113; Odell, M. et al., (1996) Virology 221:120-129; Sriskanda, V. et al, (1998) Nucleic Acids Research, 26(20):4618-4625; Takahashi, M. et al., (1984) The Journal of Biological Chemistry, 259(16):10041-10047)).

### Examples 8

### Expression and Confirmation of Formic Acid Dehydrogenase

[0470] Formic acid dehydrogenase is an enzyme catalyzing a reaction oxydizing formic ion into CO₂. The reaction thereof is represented by the formula: HCOO∓NAD+⇄CO₂+NADH. As used herein, NAD (nicotine amide adenine dinucleotide; reductive type is NADH) is one of the coenzymes relating to the redox reaction.

[0471] Formic acid dehydrogenase activity is measured using, for example, NADP+ (340 nm, ε=6.22×10³), methyl viologen (600 nm, ε=1.13×10⁴), or benzyl viologen (605 nm, ε=1.47×10⁴) (Andreesen, J. R. et al., (1974) J. Bacteriol., 120:6-14).

[0472] Known formic dehydrogenases include a homodimer consisting only of alpha subunits, a heterodimer and heterotetramer consisting of alpha and beta subunits, and a dodecamer consisting of alpha, beta and gamma subunits.

[0473] Formic acid dehydrogenases of the present invention may consist of single or plural subunits. Preferably, the formic acid dehydrogenases consist of two or more subunits.

[0474] (Expression of Thermostable Formic Acid Dehydrogenase)

[0475] In order to express the formic acid dehydrogenases (SEQ ID NO: 305, 673, 1050 and 1051) encoded by an open reading frames obtained by the present invention, in Escherichia coli, the following operations were performed: fragments containing the open reading frames were amplified by PCR technology and inserted in plasmid pET21a(+) (Novagen) to yield an expression plasmid. These plasmids were used to transform Escherichia coli BL1 (DE3) strain.

[0476] The resultant ampicillin resistant transformants were inoculated on to the NZCYM medium (1% NZ amine, 0.5%. NaCl, 0.5% yeast extract, 0.1% casamino acid, 0.2% MgSO4.7H₂O (pH 7)), cultured at 37° C. until the OD₆₆₀ reached 0.4. Isopropyl-β-D-thiogalactopyranoside (IPTG, 0.1 mM) was then added thereto and the culture was continued at 37° C. for four hours. After culture, cells were collected by centrifugation, broken by sonication, and centrifuged to yield a cell extract. The resultant cell extract was heated at 80° C. for fifteen minutes, and then centrifuged to yield the supernatant thereof, which was used as a crude enzyme solutions.

[0477] The crude enzyme solution was measured for its formic acid dehydrogenase enzymatic activity according to routine method (Andreesen, J. R. et al., (1974) J. Bacteriol., 120: 6-14). Further, the enzyme has an optimum temperature at 90° C.

### Example 9

### Hyperthermostable Beta-Glycosidase

[0478] Beta-glycosidases collectively refer to a group of enzymes hydrolyzing a beta-glycoside bond. Beta glycosidases include, for example, beta-glucosidase, beta-galactosidase, beta-mannosidase, beta-fructosidase and the like.

[0479] Beta-galactosidase, a type of beta-glycosidase, is an enzyme hydrolyzing beta-D-galactoside to yield D-galactose. Degrading lactose (glucose-beta-D-galactoside) into glucose and galactose using a galactosidase is a method for producing low-lactose milk by processing the lactose in cow milk. For these purposes, in addition to adding the enzyme into milk, the use of a fixed enzyme is also considered. Generally, enzymes used as a fixation enzyme present preferably high activity at the reaction condition used (pH, temperature and the like), and is structurally stable.

[0480] As used herein, beta-galactosidase is an enzyme hydrolyzing beta-D-galactoside to produce D-galactose, and is systematically called beta-D-galactoside galactohydrolase. Beta-glycosidase of the present invention may have beta-glucosidase, beta-mannosidase and/or beta-xylosidase activities in addition to beta-galactosidase activity. Beta-glycosidase of the present invention may have transferring activity in addition to hydrolyzing activity of oligosaccharides.

[0481] (Expression of Beta-Glycosidase)

[0482] Beta-glycosidase (SEQ ID NO: 1122) was expressed using the same method as described above in the Examples. The resultant ampicillin resistant transformants were inoculated on to the NZCYM medium (1% NZ amine, 0.5% NaCl, 0.5% yeast extract, 0.1% casamino acid, 0.2% MgSO4.7H₂O (pH 7)) containing amplicillin (50 μg/ml), cultured at 37° C. until the OD₆₆₀ reached 0.5. Isopropyl-β-D-thiogalactopyranoside (IPTG, 0.1 mM) was then added thereto and the culture was continued at 37° C. After culture, cells were collected by centrifugation, broken by sonication in 100 mM vicine/KOH (pH 8.3)/10 mM MgCl₂, and centrifuged again to yield a soluble fraction, which was then heated at 85° C. for thirty minutes. Heat-stable soluble fractions were centrifuged and concentrated, and then were subjected to sodium dodecyl sulfate polyacrylamide electrophoresis (SDS-PAGE) to detect a expected band of molecular weight, and the band was seen to increase over time after the induction by IPTG.

[0483] The sample was heat treated as above and used for determining the enzymatic chemical properties of beta-glycosidase of the present invention. As for methods of measuring enzymatic activities, see Pisani, F. M. et al., Eur. J. Biochem., 187, 321-328 (1990). Enzymatic acitivity of liberalizing 1 μmol p-nitrophenol per minute was considered 1 U.

[0484] The optimum pH of beta-glycosidase of the present invention was examined. The reaction was performed in a variety of buffers, including 1.5 μg/ml of the enzyme with 2.8 mM pNp beta-glucopyranoside as the substrate at 75° C. The buffers used were sodium phosphate buffer (pH 6-8), citrate buffer (pH 4-6), borate buffer (pH 8-9), glycine buffer (pH 8.5-10) (data not shown). These results show that the beta-glycosidase has its optimum pH at around pH 6.5.

[0485] Optimum temperature for beta-glycosidase of the present invention was also examined. Reactions were performed in sodium phosphate buffer (pH 6.5) including 1.5 μg/ml of the enzyme with 2.8 mM pNp beta-glucopyranoside as the substrate at a variety of temperatures (data not shown). As a result, the beta-glycoidase of the present invention has its optimum temperature at around 100° C. Further, Arrhenius plotting was performed using this result, and it was demonstrated that the gradient of the line is changed around 75° C. (1/T*10−3=2.87). The results were applied to the formula k=Ae−E/RT (wherein k is reaction rate constant, E is activation energy, R is gas constant, T is absolute temprature, A is frequency factor), it was calculated that E=53.4 kJ/mol in the range of 25-75° C., and E=17.7 kJ/mol in the range of 75-100° C.

[0486] Thermostability of beta-glycosidase of the present invention was examined. After the above samples were incubated for a variety of times at 90 or 100° C., enzymatic activity was measured at 80° C. in 50 mM sodium phosphate buffer (pH 6.5), including 1.5 μg/ml of the enzyme and using 2.8 mM pNp-beta-glucopyranoside as a substrate (data not shown). This result indicates that the beta-glycosidase has about 18 hours and 1 hour of thermostability at 90° C. and 100° C., respectively. Similar experiments were performed at 110° C., the enzyme was inactivated after about 15 minutes.

[0487] Substrate specificity of beta-glycosidase of the present invention was examined. Activities against a variety of substrates at 2.8 mM were measured at 80° C. in 50 mM sodium phosphate buffer (pH 6.5) containing 1.5 μg/ml of enzyme, and it was demonstrated that the beta-glycosidase of the present invention has high beta-glycosidase activity, and further, has beta-mannosidase, beta-glycosidase and beta-xylosidase activities.

[0488] Reaction rate constants for these four enzymes were determined by measuring the activity against substrates by incubating each 2 mM of oligosaccharide (beta-lactose, cellobiose, cellotriose, cellotetraose and cellopentaose) with 3.0 μg/ml enzyme at the concentration of 0.28 mM to 5.6 mM, in 50 mM sodium phosphate buffer (pH 6.5) containing 1.5 μg/ml at 80° C. for seven hours. Next, the reactant solution was subjected to thin layer chromatography (TLC) (data not shown). Spots of glucoses were observed in lanes other than the beta-lactose lane. Cellotetraose, a tetrasaccharide, was divided into trisaccharide and monosaccharide, and cellopentaose, a pentasaccharide, was divided into tetrasaccharide and monosaccharide, respectively. These results show that the beta-glycosidase of the present invention has an exo-type of hydrolyzing activity.

[0489] 5 mM solutions of cellobiose, cellotriose, cellotetraose and cellopentaose in 50 mM sodium phosphate buffer (pH 6.5) containing 3 μg/ml of enzyme were incubated at 80° C. for four hours. Cellotetraose was also incubated for 0, 1, 2, 4 and 7 hours in a similar reaction system. Next, the reaction solution was subjected to thin layer chromatography (TLC). Cellobiose, cellotriose, cellotetraose and cellopentaose are disaccharides, trisaccharides, tetrasaccharides and pentasaccharides, respectively, and larger spots than these saccharides were observed after reaction. This result demonstrates that the beta-glycosidase of the present invention has sugar-transferase activity in addition to an exo-type sugar-degrading activity In this reaction condition, glucose and cellobiose were increased over time, and this means that hydrolyzing activity, rather than transferring activity, is increased over time. That is, beta-glycosidase of the present invention can be applied to the synthesis of oligosaccharides having any combination of beta linkage such as oligosaccharide in which cellobiose is linked to mannose, and the like.

### Example 10

### Hyperthermophillic Chitinase

[0490] Chitin is a type of mucopolysaccharides, and has a structure of beta-poly-N-acetylglucosamine. Chitinase is an enzyme present as a cell-wall substance of arthropods, molluscs, crustaceans, insects, fungi, bacteria and the like, in an abundant amount, which hydrolyzes a chitin, and is found in the gastric juice of snails, exuvial fluid of an insect, fruit skin, microorganisms and the like. This enzyme produces N-acetylglucosamine by hydrolysis of beta-1,4 linkage of a chitin, and has a systematic name of poly(1,4-beta-(2-acetamide-2-deoxy-D-glucoside)) glucanohydrolase.

[0491] Chitinase may be industrially useful for the purpose of decomposing chitin, which is present in an abundant amount in nature, into forms more available to microorganisms and the like. Further, chitinase is also believed to play an important role as a protection mechanism against pathogens in plants, and thus attempts have been made to develop a disease-desistant plant by introducing a gene encoding the subject enzyme.

[0492] (Expression of Hyperthermophillic Chitinase)

[0493] As described in the above-mentioned Examples, hyperthermophillic chitinase (SEQ ID NO: 991) was expressed. The resultant ampicillin resistant transformants were inoculated on to the NZCYM medium (1% NZ amine, 0.5% NaCl, 0.5% yeast extract, 0.1% casamino acid, 0.2% MgSO4.7H₂O (pH 7)), cultured at 37° C. until the OD₆₆₀ reached 0.3. Isopropyl-β-D-thiogalactopyranoside (IPTG, 0.1 mM) was then added thereto and the culture was continued at 37° C. After culture, cells were collected by centrifugation, broken by sonication, and centrifuged to yield a cell extract. The resultant cell extract was heated at 70° C. for ten minutes, and then the obtained thermophillic fraction was centrifuged to yield the supernatant thereof as a sample, which was subjected to sodium dodecyl sulfate polyacrylamide gel electrophoresis (SDS-PAGE), and the expected band was detected at about 130 kDa.

[0494] The sample was heat-processsed as above and purified using ammonium sulfate precipitation (40% saturation), anionic exchange column (HiTrapQ), gel filtration column, and anionic exchange column (MonoQ) so that only single band is observed on an SDS-PAGE.

[0495] The enzymatic activities were measured in accordance with a method “Chitin, Chitosan Experimental Manual” (Chitin Chitosan Research Ed., Gihodo Publishing) using colloidal chitin. The amount of enzyme required to produce a reduced saccharide corresponding to 1 μmol N-acetylglucosamine per minute was defined as 1 U.

[0496] Colloidal chitin as a substrate was prepared as follows: 10 g Chitin (Wako Pure Chemical) was solubilized in 500 ml of 85% phosphoric acid and agitated for 24 hours at −4° C. The viscous liquid was added to a ten-fold volume of deionized water while agitating. The precipitate was obtained by centrifugation, and the resultant was repeatedly washed by deionized water until the pH thereof was 5.0 or higher. NaOH was adjusted to pH 7.0, and then washed with deionized water for one more time. This was solubilized in a small volume of water and autoclaved.

[0497] The optimum temperature of hyperthermostable chitinase of the present invention was determined by measuring the activities of the above-mentioned purified enzymes in 50 mM sodium phosphate (pH 7.0) for sixty minutes at a variety of temperatures. The reaction was terminated by cooling on ice (data not shown). The hyperthermostable chitinase of the present invention was shown to have an optimum temperature at about 80° C.

[0498] Optimum pH of the hyperthermostable chitinase of the present invention was determined by measuring the activities of the above-mentioned purified enzymes for sixty minutes at a variety of pH levels using the following buffers: 50 mM disodium hydrogen citrate-HCl (pH 2.5˜4.0); 50 mM sodium acetate (pH 4.0˜5.5); 50 mM MES-NaOH (pH 5.5˜7.0); 50 mM Tris-HCl (pH 7.0˜9.0); 50 mM glycine-NaOH (pH 9.0˜10.0). The reaction was terminated by cooling on ice. The result is shown in FIG. 5. The hyperthermostable chitinase of the present invention was demonstrated to have an optimum pH at about 4.0. Further, peaks were observed at about pH 8.0.

[0499] The effects of salt on the activity of hyperthermostable chitinase of the present invention was studied by measuring the activities of the above-mentioned purified enzymes in 50 mM sodium phosphate (pH 7.0) with a variety of concentrations of salt (NaCl or KCl) added thereto for 120 minutes at 80° C. The reaction was terminated by cooling on ice (data not shown). The activity of the hyperthermostable chitinase of the present invention was increased by the addition of the salt, and in particular, the addition of KCl increased the activity by about two fold.

[0500] The hyperthermostable chitinase of the present invention was studied for the effects thereof on oligosaccharide and colloidal chitin. Oligosaccharides used were N-acetyl-D-glucosamine (G1), di-N-acetyl-chitobiose (G2), tri-N-acetyl-chitotriose (G3), tetra-N-acetyl-chitotetraose (G4), penta-N-acetyl-chitopentaose (G5) and hexa-N-acetyl-chitohezaose (G6). Fifty μl of reaction mixture containing 0.7 mg of each oligosaccharide, 70 mM sodium acetate buffer (pH 6.0), 200 mM KCl, and purified enzyme (for G1-G3, 0.9 μg, and for G4-G6, 1.8 μg) was incubated at 80° C. and sampled at 0, 5, 15, 30, 60 or 120 minutes thereafter. As for colloidal chitin, 1 ml total reaction mixture containing 0.16 mg colloidal chitin, 50 mM sodium acetate buffer (pH 5.0), and 0.6 μg of purified enzyme was incubated at 80° C., and sampled at 1.5, 3.0 and 4.5 hours thereafter, and centrifuged to concentrate 20 fold. Next, the samples were subjected to TLC as follows: sampled solution was spotted on Kieselgel 60 silica gel plate (Merck), and development solution (n-butanol:methanol:25% ammonia solution:water=5:4:2:1) was used for the development thereof. After development, the plates were dried, and developing reagents (anillin 4 ml, diphenylamine 4 g, acetone 200 mL, 85% phosphoric acid 30 mL were mixed for preparation) was atomized and this was heated at 180° C. for about five minutes for coloring (data not shown).

[0501] From this result, it was demonstrated that the hyperthermophillic chitinase of the present invention has no degrading action against disaccharides or lower, and when chitin was used as a substrate, the enzyme mainly produced chitobiose, a disaccharide, as a main product.

[0502] The hyperthermostable chitinase of the present invention was also studied for effects on 4-methyl umbellipherone (4-MU). GlcNAc-4-MU, GlcNAc2-4-MU or GlcNAc3-4-MU (0.01 mM) 10 μl, 100 mM acetate buffer (pH 5.0) 990 μl, and the purified enzyme 20 μl (18 ng) were incubated at 80° C. At 0, 5, 15, 30, 45, 60, or 180 minutes, 100 μl of the reaction solution was sampled, and added to 900 μl of ice-cold 100 mM glycine-NaOH (pH 11) to terminate the reaction. The samples were measured for their excitation at 350 nm and fluorscence at 440 nm by spectrofluorometer (data not shown). As a result, reation rates against each substrate were determined.

[0503] It was reported that reaction rates against disaccharide derivatives and against trisaccharide derivatives were compared and thus the digestion type of the enzymes was either endo-type or exo-type (Robbins, P. W., J. Biol. Chem., 263 (1), 443-447 (1988)). In this case, when the reaction rate against disaccharide derivative is greater than that of the other, the enzyme is expected to be exo-type, whereas when the reaction rate against trisaccharide is greater than that of the other, the enzyme is expected to be endo-type. Based on this description, the hyperthermostable chitinase of the present invention is determined to be endo-type.

[0504] Functions possessed by each domain of the hyperthermostable chitinase of the present invention were studied by creating a variety of deletion mutants. Deletion mutants Pk-ChiAΔ1 (containing the first Bacillus circulans chitinase homologous region and two cellulose binding domains), Pk-ChiAΔ2 (containing the fourth Streptomyces erythraeus chitinase homologous region and two cellulose binding domains), Pk-ChiAΔ3 (containing the first Bacillus circulans chitinase homologous region), and Pk-ChiAΔ4 (containing the fourth Streptomyces erythraeus chitinase homologous region), were produced based on the previous reference (Japanese Laid-Open Publication 11-313688).

[0505] From the culture of E. coli transformant strains possessing each plasmid, crude enzyme solution was obtained by heat treating at 70° C. for 10 minutes. This crude enzyme solution was spotted on a colloidal chitin plate (0.5% colloidal chitin, 1.5% agar) and was incubated to study the activities thereof (data not shown). Deletion mutants having only the first chitinase homologous region showed some activity, and the deletion mutants having the fourth chitinase homologous region only showed little activity. All of the deletion mutants having any chitinase homologous regions and the two cellulose binding domains showed high activities.

[0506] Thirty a μl of the crude enzyme solution of deletion mutants Pk-ChiAΔ2 and Pk-ChiAΔ4 was mixed with 30 μl of 1% collidal chitin, and incubated at 70° C. for one hour. Next, the reaction solution was centrifuged and the supernatant and a precipitate containing the colloidal chitin was obtained. The precipitate was washed twice with 50 mM sodium phosphate (pH 7.0), and was subjected to SDS-PAGE (data not shown). This result shows that the two cellulose binding domains are necessary for binding to a chitin and for chitinase activity.

### Example 11

### Hyperthermostable Ribulose Bisphosphate Carboxylate

[0507] Ribulose bisphosphate carboxylase is an enzyme catalyzing photosynthetic reactions and is present in plant chloroplasts and microorganisms having photosynthetic ability. Ribulose bisphosphate carboxylase of higher plants is a macromolecule consisting of eight large subunits and eight small subunits (Type I), and is a major soluble protein in leaves of plants. On the other hand, ribulose bisphosphate carboxylase of microorganisms such as bacteria consists of only small subunits (Type II).

[0508] Ribulose bisphosphate carboxylase is used as a marker for plant classification, and for example, as a cell marker for cell fusion. Further, in view of the possible improvement of the global environment, it has been attempted to modify ribulose bisphosphate carboxylase gene to produce a plant with increased fixation ability of CO₂ in the air. Breeding of photosynthetic bacteria and device having photosynthetic ability may be intended for development. For such purposes, it is useful to have a gene encoding ribulose bisphosphate carboxylase having increased enzymatic activity and structural stablility.

[0509] As used herein, the term “ribulose bisphosphate carboxylase refers to an enzyme adding CO₂ to ribulose phosphate to produce two molecules of 3-phosphoglycerinic acid. Further, ribulose bisphosphate carboxylase has an activity of adding O₂ to ribulose phosphate to produce 2-phosphoglycolic acid and 3-phosphoglycerinic acid (oxygenase activity).

[0510] (Expression of Hyperthermostable Ribulose Bisphosphate Carboxylase)

[0511] According to the method as described in the Examples above, hyperthermostable ribulose bisphosphate carboxylase (SEQ ID NO: 338) was expressed using PCR method. The resultant ampicillin resistant transformants were inoculated on to the NZCYM medium (1% NZ amine, 0.5% NaCl, 0.5% yeast extract, 0.1% casamino acid, 0.2% MgSO4.7H₂O (pH 7)) containing amplicillin (50 μg/ml), cultured at 37° C. until the OD₆₆₀ reached 0.5. Isopropyl-β-D-thiogalactopyranoside (IPTG, 0.1 mM) was then added thereto and the culture was continued at 37° C. After culture, cells were collected by centrifugation, broken by sonication in 100 mM vicine/KOH (pH 8.3)/10 mM MgCl₂, and centrifuged again to yield a soluble fraction, which was then heated at 85° C. for thirty minutes. Heat-stable soluble fractions were centrifuged and concetrated, and then were subjected to sodium dodecyl sulfate polyacrylamide electrophoresis (SDS-PAGE) to detect an expected band of a particular molecular weight, and the band was increased over time after the induction of IPTG (data not shown).

[0512] The samples obtained by centrifugation of the above-mentioned heat-stable soluble fractions were further purified using anion exchange column Resource Q (Amersham Pharmacia Biotech, Uppsala, Sweden), and gel filtration column Superdex 200 HR 10/30 (Amersham Pharmacia Biotech, Uppsala, Sweden), and confirmed that the band was single by SDS-PAGE (data not shown).

[0513] Purification was performed using AKTA explorer 10S (Amersham Pharmacia Biotech, Uppsala, Sweden). As for anionic exchange column, separation was performed by using gradient of 0-1.0 M NaCl, against buffer of 100 mM vicine/KOH (pH 8.3)/10 mM MgCl₂. As for gel filtration, 50 mM sodium phosphate/0.15 M NaCl buffer was used.

[0514] Analysis using gel filtration suggests that the expressed enzyme forms an octamer consisting of only large subunits.

[0515] The carboxylase activity of samples as purified above were measured by using D-ribulose 1,5-bisphosphate (RuBP) (Sigma) as substrate, in accordance with a method described in Uemura, K. et al., Plant Cell Physiol., 37(3),325-331 (1996).

[0516] First, optimal pH of the hyperthermostable ribulose bisphosphate carboxylase of the present invention was studied. Reactions were performed using a buffer containing citrate buffer (pH 5.6), sodium phosphate buffer (pH 6.3), vicine buffer (pH 7.3, 7.8, 8.0 or 8.3), or glycine buffer (pH 9.1 or 10.1), 10 mM MgCl₂, and 30 mM RuBP as substrate at a variety of temperatures. One unit of activity was characterized as fixing 1 μmol CO2 per mg per minute. The results were expressed as a ratio against activity at pH 8.3. These results demonstrate that the hyperthermostable ribulose bisphosphate carboxylase has an optimum pH at about 8.3.

[0517] The hyperthermostable ribulose bisphophate carboxylase of the present invention was investigated for its optimum temperature. Reactions were performed in buffer containing 100 mM vicine-KOH (pH 8.3) and 10 mM MgCl₂, using 30 mM RuBP as substrate at a variety of temperatures (data not shown). It was demonstrated that the hyperthemostable ribulose bisphosphate carboxylase of the present invention has an optimum temperature of about 90° C.

[0518] The thermostablity of hyperthermostable ribulose bisphosphate carboxylase of the present invention was studied. The purified enzyme was measured for its remnant activities after incubation for a variety of time periods at 80° C. and 100° C. (data not shown). It was demonstrated that the thermostable ribulose bisphosphate carboxylase of the present invention has a half life of about 15 hours at 80° C.

[0519] The carboxylase activity and oxygensase activity of the hyperthermostable ribulose phosphate carboxylase of the present invention was measured at 50-90° C. Further, τ value, which is carboxy activity/oxigenase activity, was calculated (see Ezaki et al., J. Biol. Chem. (J Biol Chem. 1999 February 19;274(8):5078-82)).

[0520] From the increase in carbon dioxide in the air, environmental problems such as green house effects have occurred. As a solution thereto, ribulose phosphate carboxylase catalyzing carbon dioxide fixation is noted. The ratio of oxygen versus carbon dioxide in the air is about 20:0.03, and oxygen is much more abundant than carbon dioxide. Accordingly, for the purpose of the above, a high specificity against carboxylase reaction, that is greater τ value, is required. The enzymes from KOD-1 strain have higher τ values than those of conventional type II enzymes (about 30-200×) or those of type I enzymes (about 10×), and thus are expected to be useful for the application of more efficient carbon dioxide fixation.

### Example 12

### fructose 1,6-bisphophate aldolase

[0521] In order to express the fructose 1,6-bisphophate aldolase (SEQ ID NO: 1275) encoded by an open reading frame obtained by the present invention in Escherichia coli, the following operations were performed: fragments containing the open reading frames was amplified by PCR technology and inserted to plasmid pET21a(+) (Novagen) to yield an expression plasmid. This plasmid was used to transform the Escherichia coli BL1 (DE3) strain.

[0522] The resultant ampicillin resistant transformants were inoculated on to the NZCYM medium (1% NZ amine, 0.5% NaCl, 0.5% yeast extract, 0.1% casamino acid, 0.2% MgSO4.7H₂O (pH 7)), cultured at 37° C. until the OD₆₆₀ reached 0.4. Isopropyl-β-D-thiogalactopyranoside (IPTG, 0.1 mM) was then added thereto and culture was continued at 37° C. for four hours. After culture, cells were collected by centrifugation, broken by sonication, and centrifuged to yield a cell extract. The resultant cell extract was heated at 80° C. for fifteen minutes, and then centrifuged to yield the supernatant thereof, which was used as a crude enzyme solution.

[0523] The crude enzyme solution was measured according to KOSOGAKU HANDOBUKKU (Enzyme handbook) edited by Bunji MARUO, and Nobuo TAMIYA, published by Asakura shoten (1982), to confirm that the crude enzyme solutions have the fructose 1,6-bisphophate aldolase activity of interest. Further, the enzyme has an optimum temperature of 90° C.

### Example 13

### Glycerol Kinase

[0524] In order to express the glycerol kinase (SEQ ID NO: 1646) encoded by an open reading frame obtained by the present invention, in Escherichia coli, the following operations were performed: fragments containing the open reading frames was amplified by PCR technology and inserted into plasmid pET21a(+) (Novagen) to yield expression plasmids. This plasmid was used to transform the Escherichia coli BL1 (DE3) strain.

[0525] The resultant ampicillin resistant transformants were inoculated on to the NZCYM medium (1% NZ amine, 0.5% NaCl, 0.5% yeast extract, 0.1% casamino acid, 0.2% MgSO4.7H₂O (pH 7)), cultured at 37° C. until the OD₆₆₀ reached 0.4. Isopropyl-β-D-thiogalactopyranoside (IPTG, 0.1 mM) was then added thereto and the culture was continued at 37° C. for four hours. After culture, cells were collected by centrifugation, broken by sonication, and centrifuged to yield a cell extract. The resultant cell extract was heated at 80° C. for fifteen minutes, and then centrifuged to yield the supernatant thereof, which was used as crude enzyme solutions.

[0526] The crude enzyme solution was measured according to KOSOGAKU HANDOBUKKU (Enzyme handbook) edited by Bunji MARUO, and Nobuo TAMIYA, published by Asakura shoten (1982), to confirm that the crude enzyme solutions have the enzymatic activity of interest. Further, the enzyme has an optimum temperature at 90° C.

### Example 14

### Glutamate Dehydrogenase

[0527] In order to express the glutamate dehydeogenases (SEQ ID NO: 1239 and 1637) encoded by an open reading frame obtained by the present invention, in Escherichia coli, the following operations were performed: fragments containing the open reading frames was amplified by PCR technology and inserted to plasmid pET21a(+) (Novagen) to yield expression plasmids. These plasmids were used to transform the Escherichia coli BL1 (DE3) strain.

[0528] The resultant ampicillin resistant transformants were inoculated on to the NZCYM medium (1% NZ amine, 0.5% NaCl, 0.5% yeast extract, 0.1% casamino acid, 0.2% MgSO4.7H₂O (pH 7)), cultured at 37° C. until the OD660 reached 0.4. Isopropyl-β-D-thiogalactopyranoside (IPTG, 0.1 mM) was then added thereto and the culture was continued at 37° C. for four hours. After culture, cells were collected by centrifugation, broken by sonication, and centrifuged to yield a cell extract. The resultant cell extract was heated at 80° C. for fifteen minutes, and then centrifuged to yield the supernatant thereof, which were used as crude enzyme solutions.

[0529] These crude enzyme solutions were measured according to KOSOGAKU HANDOBUKKU (Enzyme handbook) edited by Bunji MARUO, and Nobuo TAMIYA, published by Asakura shoten (1982), to confirm that the crude enzyme solutions have the enzymatic activity of interest. Further, these enzymes have an optimum temperature at 90° C.

### Example 15

### Pyruvate Kinase

[0530] In order to express the pyruvate kinase (SEQ ID NO: 1776) encoded by an open reading frame obtained by the present invention, in Escherichia coli, the following operations were performed: a fragment containing the open reading frame was amplified by PCR technology and inserted into plasmid pET21a(+) (Novagen) to yield an expression plasmid. This plasmid was used to transform the Escherichia coli BL1 (DE3) strain.

[0531] The resultant ampicillin resistant transformant was inoculated on to the NZCYM medium (1% NZ amine, 0.5% NaCl, 0.5% yeast extract, 0.1% casamino acid, 0.2% MgSO4.7H₂O (pH 7)), cultured at 37° C. until the OD₆₆₀ reached 0.4. Isopropyl-β-D-thiogalactopyranoside (IPTG, 0.1 mM) was then added thereto and the culture was continued at 37° C. for four hours. After culture, cells were collected by centrifugation, broken by sonication, and centrifuged to yield a cell extract. The resultant cell extract was heated at 80° C. for fifteen minutes, and then centrifuged to yield the supernatant thereof, which was used as a crude enzyme solution.

[0532] This crude enzyme solution was measured according to KOSOGAKU HANDOBUKKU (Enzyme handbook) edited by Bunji MARUO, and Nobuo TAMIYA, published by Asakura shoten (1982), to confirm that the crude enzyme solution has the enzymatic activity of interest. Further, this enzyme has an optimum temperature at 90° C.

### Example 16

### Enolase

[0533] In order to express the enolase (SEQ ID NO:681) encoded by an open reading frame obtained by the present invention, in Escherichia coli, the following operations were performed: a fragment containing the open reading frame was amplified by PCR technology and inserted into plasmid pET21a(+) (Novagen) to yield an expression plasmid. This plasmid was used to transform the Escherichia coli BL1 (DE3) strain.

[0534] The resultant ampicillin resistant transformant was inoculated on to the NZCYM medium (1% NZ amine, 0.5% NaCl, 0.5% yeast extract, 0.1% casamino acid, 0.2% MgSO4.7H₂O (pH 7)), cultured at 37° C. until the OD₆₆₀ reached 0.4. Isopropyl-β-D-thiogalactopyranoside (IPTG, 0.1 mM) was then added thereto and the culture was continued at 37° C. for four hours. After culture, cells were collected by centrifugation, broken by sonication, and centrifuged to yield a cell extract. The resultant cell extract was heated at 80° C. for fifteen minutes, and then centrifuged to yield the supernatant thereof, which was used as a crude enzyme solution.

[0535] This crude enzyme solution was measured according to KOSOGAKU HANDOBUKKU (Enzyme handbook) edited by Bunji MARUO, and Nobuo TAMIYA, published by Asakura shoten (1982), to confirm that the crude enzyme solution has the enzymatic activity of interest. Further, this enzyme has an optimum temperature at 90° C.

### Example 17

### fructose 1,6-bisphophatase

[0536] In order to express the fructose 1,6-bisphophatase (SEQ ID NO:1488) encoded by an open reading frame obtained by the present invention, in Escherichia coli, the following operations were performed: a fragment containing the open reading frame was amplified by PCR technology and inserted into plasmid pET21a(+) (Novagen) to yield an expression plasmid. This plasmid was used to transform the Escherichia coli BL1 (DE3) strain.

[0537] The resultant ampicillin resistant transformant was inoculated on to the NZCYM medium (1% NZ amine, 0.5% NaCl, 0.5% yeast extract, 0.1% casamino acid, 0.2% MgSO4.7H₂O (pH 7)), cultured at 37° C. until the OD₆₆₀ reached 0.4. Isopropyl-β-D-thiogalactopyranoside (IPTG, 0.1 mM) was then added thereto and the culture was continued at 37° C. for four hours. After culture, cells were collected by centrifugation, broken by sonication, and centrifuged to yield a cell extract. The resultant cell extract was heated at 80° C. for fifteen minutes, and then centrifuged to yield the supernatant thereof, which was used as a crude enzyme solution.

[0538] This crude enzyme solution was measured according to KOSOGAKU HANDOBUKKU (Enzyme handbook) edited by Bunji MARUO, and Nobuo TAMIYA, published by Asakura shoten (1982), to confirm that the crude enzyme solution has the enzymatic activity of interest. Further, this enzyme has an optimum temperature at 90° C.

### Example 18

### Hydrogenase

[0539] In order to express the hydrogenase (each subunits correspond to SEQ ID NO:1141, 1142, 1502, and 1503) encoded by an open reading frames obtained by the present invention, in Escherichia coli, the following operations were performed: fragments containing the open reading frames were amplified by PCR technology and inserted into plasmid pET21a(+) (Novagen) to yield expression plasmids. These plasmids were used to transform the Escherichia coli BL1 (DE3) strains.

[0540] The resultant ampicillin resistant transformants were inoculated on to the NZCYM medium (1% NZ amine, 0.5% NaCl, 0.5% yeast extract, 0.1% casamino acid, 0.2% MgSO4.7H₂O (pH 7)), cultured at 37° C. until the OD₆₆₀ reached 0.4. Isopropyl-β-D-thiogalactopyranoside (IPTG, 0.1 mM) was then added thereto and the culture was continued at 37° C. for four hours. After culture, cells were collected by centrifugation, broken by sonication, and centrifuged to yield a cell extract. The resultant cell extracts were heated at 80° C. for fifteen minutes, and then centrifuged to yield the supernatants thereof, which were used as crude enzyme solutions.

[0541] The crude enzyme solutions were measured according to KOSOGAKU HANDOBUKKU (Enzyme handbook) edited by Bunji MARUO, and Nobuo TAMIYA, published by Asakura shoten (1982), to confirm that the crude enzyme solution has the enzymatic activity of interest. Further, this enzyme has an optimum temperature at 90° C.

### Example 19

### β-glycosidase

[0542] In order to express the β-glycosidase (SEQ ID NO:990) encoded by an open reading frame obtained by the present invention, in Escherichia coli, the following operations were performed: a fragment containing the open reading frame was amplified by PCR technology and inserted into plasmid pET21a(+) (Novagen) to yield an expression plasmid. This plasmid was used to transform the Escherichia coli BL1 (DE3) strain.

[0543] The resultant ampicillin resistant transformant was inoculated on to the NZCYM medium (1% NZ amine, 0.5% NaCl, 0.5% yeast extract, 0.1% casamino acid, 0.2% MgSO4.7H₂O (pH 7)), cultured at 37° C. until the OD660 reached 0.4. Isopropyl-β-D-thiogalactopyranoside (IPTG, 0.1 mM) was then added thereto and the culture was continued at 37° C. for four hours. After culture, cells were collected by centrifugation, broken by sonication, and centrifuged to yield a cell extract. The resultant cell extract was heated at 80° C. for fifteen minutes, and then centrifuged to yield the supernatant thereof, which was used as a crude enzyme solution.

[0544] This crude enzyme solution was measured according to KOSOGAKU HANDOBUKKU (Enzyme handbook) edited by Bunji MARUO, and Nobuo TAMIYA, published by Asakura shoten (1982), to confirm that the crude enzyme solution has the enzymatic activity of interest. Further, this enzyme has an optimum temperature at 90° C.

### Example 20

### α-amylase

[0545] In order to express the α-amylase (SEQ ID NO:268) encoded by an open reading frame obtained by the present invention, in Escherichia coli, the following operations were performed: a fragment containing the open reading frame was amplified by PCR technology and inserted into plasmid pET21a(+) (Novagen) to yield an expression plasmid. This plasmid was used to transform the Escherichia coli BL1 (DE3) strain.

[0546] The resultant ampicillin resistant transformant was inoculated on to the NZCYM medium (1% NZ amine, 0.5% NaCl, 0.5% yeast extract, 0.1% casamino acid, 0.2% MgSO4.7H₂O (pH 7)), cultured at 37° C. until the OD₆₆₀ reached 0.4. Isopropyl-β-D-thiogalactopyranoside (IPTG, 0.1 mM) was then added thereto and the culture was continued at 37° C. for four hours. After culture, cells were collected by centrifugation, broken by sonication, and centrifuged to yield a cell extract. The resultant cell extract was heated at 80° C. for fifteen minutes, and then centrifuged to yield the supernatant thereof, which was used as a crude enzyme solution.

[0547] This crude enzyme solution was measured according to KOSOGAKU HANDOBUKKU (Enzyme handbook) edited by Bunji MARUO, and Nobuo TAMIYA, published by Asakura shoten (1982), to confirm that the crude enzyme solution has the enzymatic activity of interest. Further, this enzyme has an optimum temperature at 90° C.

### Example 21

### Deacetylase

[0548] In order to express the deacetylase (SEQ ID NO:1190) encoded by an open reading frame obtained by the present invention, in Escherichia coli, the following operations were performed: a fragment containing the open reading frame was amplified by PCR technology and inserted into plasmid pET21a (+) (Novagen) to yield an expression plasmid. This plasmid was used to transform the Escherichia coli BL1 (DE3) strain.

[0549] The resultant ampicillin resistant transformant was inoculated on to the NZCYM medium (1% NZ amine, 0.5% NaCl, 0.5% yeast extract, 0.1% casamino acid, 0.2% MgSO4.7H₂O (pH 7)), cultured at 37° C. until the OD₆₆₀ reached 0.4. Isopropyl-β-D-thiogalactopyranoside (IPTG, 0.1 mM) was then added thereto and the culture was continued at 37° C. for four hours. After culture, cells were collected by centrifugation, broken by sonication, and centrifuged to yield a cell extract. The resultant cell extract was heated at 80° C. for fifteen minutes, and then centrifuged to yield the supernatant thereof, which was used as a crude enzyme solution.

[0550] This crude enzyme solution was measured according to KOSOGAKU HANDOBUKKU (Enzyme handbook) edited by Bunji MARUO, and Nobuo TAMIYA, published by Asakura shoten (1982), to confirm that the crude enzyme solution has the enzymatic activity of interest. Further, this enzyme has an optimum temperature at 90° C.

### Example 22

### Cyclodextrin Glucanotransfrase

[0551] In order to express the cyclodextrin glucanotransfrase (SEQ ID NO:1068) encoded by an open reading frame obtained by the present invention, in Escherichia coli, the following operations were performed: a fragment containing the open reading frame was amplified by PCR technology and inserted into plasmid pET21a(+) (Novagen) to yield an expression plasmid. This plasmid was used to transform the Escherichia coli BL1 (DE3) strain.

[0552] The resultant ampicillin resistant transformant was inoculated on to the NZCYM medium (1% NZ amine, 0.5% NaCl, 0.5% yeast extract, 0.1% casamino acid, 0.2% MgSO4.7H₂O (pH 7)), cultured at 37° C. until the OD₆₆₀ reached 0.4. Isopropyl-β-D-thiogalactopyranoside (IPTG, 0.1 mM) was then added thereto and the culture was continued at 37° C. for four hours. After culture, cells were collected by centrifugation, broken by sonication, and centrifuged to yield a cell extract. The resultant cell extract was heated at 80° C. for fifteen minutes, and then centrifuged to yield the supernatant thereof, which was used as a crude enzyme solution.

[0553] This crude enzyme solution was measured according to KOSOGAKU HANDOBUKKU (Enzyme handbook) edited by Bunji MARUO, and Nobuo TAMIYA, published by Asakura shoten (1982), to confirm that the crude enzyme solution has the enzymatic activity of interest. Further, this enzyme has an optimum temperature at 90° C.

### Example 23

### 4-α-D-glucanotransferase

[0554] In order to express the 4-α-D-glucanotransferase (SEQ ID NO:1185) encoded by an open reading frame obtained by the present invention, in Escherichia coli, the following operations were performed: a fragment containing the open reading frame was amplified by PCR technology and inserted into plasmid pET21a(+) (Novagen) to yield an expression plasmid. This plasmid was used to transform the Escherichia coli BL1 (DE3) strain.

[0555] The resultant ampicillin resistant transformant was inoculated on to the NZCYM medium (1% NZ amine, 0.5% NaCl, 0.5% yeast extract, 0.1% casamino acid, 0.2% MgSO4.7H₂O (pH 7)), cultured at 37° C. until the OD₆₆₀ reached 0 .4. Isopropyl-β-D-thiogalactopyranoside (IPTG, 0.1 mM) was then added thereto and the culture was continued at 37° C. for four hours. After culture, cells were collected by centrifugation, broken by sonication, and centrifuged to yield a cell extract. The resultant cell extract was heated at 80° C. for fifteen minutes, and then centrifuged to yield the supernatant thereof, which was used as a crude enzyme solution.

[0556] This crude enzyme solution was measured according to KOSOGAKU HANDOBUKKU (Enzyme handbook) edited by Bunji MARUO, and Nobuo TAMIYA, published by Asakura shoten (1982), to confirm that the crude enzyme solution has the enzymatic activity of interest. Further, this enzyme has an optimum temperature at 90° C.

### Example 24

### DNA Polymerases

[0557] In order to express the DNA polymerases (SEQ ID NO:2, 93, 379, 648, 649, 743, 1386, 1740 and 1830) encoded by open reading frames obtained by the present invention, in Escherichia coli, the following operations were performed: fragments containing the open reading frames were amplified by PCR technology and inserted into plasmid pET21a(+) (Novagen) to yield expression plasmids. These plasmids were used to transform the Escherichia coli BL1 (DE3) strains.

[0558] The resultant ampicillin resistant transformants were inoculated on to the NZCYM medium (1% NZ amine, 0.5% NaCl, 0.5% yeast extract, 0.1% casamino acid, 0.2% MgSO4.7H₂O (pH 7)), cultured at 37° C. until the OD₆₆₀ reached 0.4. Isopropyl-β-D-thiogalactopyranoside (IPTG, 0.1 mM) was then added thereto and culture was continued at 37° C. for four hours. After culture, cells were collected by centrifugation, broken by sonication, and centrifuged to yield a cell extract. The resultant cell extracts were heated at 80° C. for fifteen minutes, and then centrifuged to yield the supernatants thereof, which were used as crude enzyme solutions.

[0559] These crude enzyme solutions were measured according to KOSOGAKU HANDOBUKKU (Enzyme handbook) edited by Bunji MARUO, and Nobuo TAMIYA, published by Asakura shoten (1982), to confirm that the crude enzyme solution has the enzymatic activity of interest for the respective sequences. Further, this enzyme has an optimum temperature at 90° C. for the respective sequences.

### Example 25

### Homing Endonuclease

[0560] In order to express the homing endonuclease (SEQ ID NO:2) encoded by an open reading frame obtained by the present invention, in Escherichia coli, the following operations were performed: a fragment containing the open reading frame was amplified by PCR technology and inserted into plasmid pET21a(+) (Novagen) to yield an expression plasmid. This plasmid was used to transform the Escherichia coli BL1 (DE3) strain.

[0561] The resultant ampicillin resistant transformant was inoculated on to the NZCYM medium (1% NZ amine, 0.5% NaCl, 0.5% yeast extract, 0.1% casamino acid, 0.2% MgSO4.7H₂O (pH 7)), cultured at 37° C. until the OD₆₆₀ reached 0.4. Isopropyl-β-D-thiogalactopyranoside (IPTG, 0.1 mM) was then added thereto and culture was continued at 37° C. for four hours. After culture, cells were collected by centrifugation, broken by sonication, and centrifuged to yield a cell extract. The resultant cell extract was heated at 80° C. for fifteen minutes, and then centrifuged to yield the supernatant thereof, which was used as a crude enzyme solution.

[0562] This crude enzyme solution was measured by a modified method of endonuclease assay according KOSOGAKU HANDOBUKKU (Enzyme handbook) edited by Bunji MARUO, and Nobuo TAMIYA, published by Asakura shoten (1982), to confirm that the crude enzyme solution has the enzymatic activity of interest. Further, this enzyme has an optimum temperature at 90° C.

### Example 26

### Histones

[0563] In order to express the histones (SEQ ID NO:173, 1470 and 1963 and the like) encoded by an open reading frame obtained by the present invention, in Escherichia coli, the following operations were performed: a fragment containing the open reading frame was amplified by PCR technology and inserted into plasmid pET21a(+) (Novagen) to yield an expression plasmid. This plasmid was used to transform the Escherichia coli BL1 (DE3) strain.

[0564] The resultant ampicillin resistant transformant was inoculated on to the NZCYM medium (1% NZ amine, 0.5% NaCl, 0.5% yeast extract, 0.1% casamino acid, 0.2% MgSO4.7H₂O (pH 7)), cultured at 37° C. until the OD₆₆₀ reached 0.4. Isopropyl-β-D-thiogalactopyranoside (IPTG, 0.1 mM) was then added thereto and the culture was continued at 37° C. for four hours. After culture, cells were collected by centrifugation, broken by sonication, and centrifuged to yield a cell extract. The resultant cell extract was heated at 80° C. for fifteen minutes, and then centrifuged to yield the supernatant thereof, which was used as a crude protein solution.

[0565] This crude protein solution was measured by a method using histone kinase as described in KOSOGAKU HANDOBUKKU (Enzyme handbook) edited by Bunji MARUO, and Nobuo TAMIYA, published by Asakura shoten (1982), to confirm that the crude protein solutions hasve an activity as a substrate for the activity of interest. Further, this protein was stable at 90° C.

### Example 27

### Histones A&B

[0566] In order to express the histones A and B (SEQ ID NO: 1470 and 1962) encoded by open reading frames obtained by the present invention, in Escherichia coli, the following operations were performed: a fragment containing the open reading frame was amplified by PCR technology and inserted into plasmid pET21a(+) (Novagen) to yield an expression plasmid. This plasmid was used to transform the Escherichia coli BL1 (DE3) strain.

[0567] The resultant ampicillin resistant transformant was inoculated on to the NZCYM medium (1% NZ amine, 0.5% NaCl, 0.5% yeast extract, 0.1% casamino acid, 0.2% MgSO4.7H₂O (pH 7)), cultured at 37° C. until the OD660 reached 0.4. Isopropyl-β-D-thiogalactopyranoside (IPTG, 0.1 mM) was then added thereto and the culture was continued at 37° C. for four hours. After culture, cells were collected by centrifugation, broken by sonication, and centrifuged to yield a cell extract. The resultant cell extract was heated at 80° C. for fifteen minutes, and then centrifuged to yield the supernatants thereof, which were used as crude protein solutions.

[0568] These crude protein solutions were measured by a method using histone kinase as described in KOSOGAKU HANDOBUKKU (Enzyme handbook) edited by Bunji MARUO, and Nobuo TAMIYA, published by Asakura shoten (1982), to confirm that the crude protein solutions have an activity as a substrate for the activity of interest. Further, these proteins were stable at 90° C.

### Example 28

### Rec Protein

[0569] In order to express the Rec protein (SEQ ID NO:1106) encoded by an open reading frame obtained by the present invention, in Escherichia coli, the following operations were performed: a fragment containing the open reading frame was amplified by PCR technology and inserted into plasmid pET21a(+) (Novagen) to yield an expression plasmid. This plasmid was used to transform the Escherichia coli BL1 (DE3) strain.

[0570] The resultant ampicillin resistant transformant was inoculated on to the NZCYM medium (1% NZ amine, 0.5% NaCl, 0.5% yeast extract, 0.1% casamino acid, 0.2% MgSO4.7H₂O (pH 7)), cultured at 37° C. until the OD₆₆₀ reached 0.4. Isopropyl-β-D-thiogalactopyranoside (IPTG, 0.1 mM) was then added thereto and the culture was continued at 37° C. for four hours. After culture, cells were collected by centrifugation, broken by sonication, and centrifuged to yield a cell extract. The resultant cell extract was heated at 80° C. for fifteen minutes, and then centrifuged to yield the supernatant thereof, which was used as a crude protein solution.

[0571] This crude protein solution was measured according to Methods in Enzymology 262 (1995) to confirm that the crude protein solution has an activity of the Rec protein. Further, this protein was stable at 90° C.

### Example 29

### O⁶-methylguanine DNA methyl transferase

[0572] In order to express the O⁶-methylguanine DNA methyl transferase (SEQ ID NO:1034) encoded by an open reading frame obtained by the present invention, in Escherichia coli, the following operations were performed: a fragment containing the open reading frame was amplified by PCR technology and inserted into plasmid pET21a(+) (Novagen) to yield an expression plasmid. This plasmid was used to transform the Escherichia coli BL1 (DE3) strain.

[0573] The resultant ampicillin resistant transformant was inoculated on to the NZCYM medium (1% NZ amine, 0.5% NaCl, 0.5% yeast extract, 0.1% casamino acid, 0.2% MgSO4.7H₂O (pH 7)), cultured at 37° C. until the OD₆₆₀ reached 0.4. Isopropyl-β-D-thiogalactopyranoside (IPTG, 0.1 mM) was then added thereto and the culture was continued at 37° C. for four hours. After culture, cells were collected by centrifugation, broken by sonication, and centrifuged to yield a cell extract. The resultant cell extract was heated at 80° C. for fifteen minutes, and then centrifuged to yield the supernatant thereof, which was used as a crude enzyme solution.

[0574] This crude enzyme solution was measured according to Methods in Enzymology 262 (1995) to confirm that the crude enzyme solution has the enzymatic activity of interest. Further, this enzyme has an optimum temperature at 90° C.

### Example 30

### PCNA

[0575] In order to express the PCNA (Proliferating Cell Nuclear Antigen) (SEQ ID NO:93) encoded by an open reading frame obtained by the present invention, in Escherichia coli, the following operations were performed: a fragment containing the open reading frame was amplified by PCR technology and inserted into plasmid pET21a(+) (Novagen) to yield an expression plasmid. This plasmid was used to transform the Escherichia coli BL1 (DE3) strain.

[0576] The resultant ampicillin resistant transformant was inoculated on to the NZCYM medium (1% NZ amine, 0.5% NaCl, 0.5% yeast extract, 0.1% casamino acid, 0.2% MgSO4.7H₂O (pH 7)), cultured at 37° C. until the OD₆₆₀ reached 0.4. Isopropyl-β-D-thiogalactopyranoside (IPTG, 0.1 mM) was then added thereto and the culture was continued at 37° C. for four hours. After culture, cells were collected by centrifugation, broken by sonication, and centrifuged to yield a cell extract. The resultant cell extract was heated at 80° C. for fifteen minutes, and then centrifuged to yield the supernatant thereof, which was used as a crude protein solution.

[0577] This crude protein solution was measured according to Methods in Enzymology 262 (1995) to confirm that the crude protein solution has the activity of the PCNA protein. Further, this protein was stable at 90° C.

### Example 31

### Indole Pyruvate Ferredoxin Oxydoreductases

[0578] In order to express the indole pyruvate ferredoxin oxydoreductases (SEQ ID NOs:) encoded by open reading frames obtained by the present invention, in Escherichia coli, the following operations were performed: fragments containing the open reading frames were amplified by PCR technology and inserted into plasmid pET21a(+) (Novagen) to yield expression plasmids. These plasmids were used to transform Escherichia coli BL1 (DE3) strains.

[0579] The resultant ampicillin resistant transformants were inoculated on to the NZCYM medium (1% NZ amine, 0.5% NaCl, 0.5% yeast extract, 0.1% casamino acid, 0.2% MgSO4.7H₂O (pH 7)), cultured at 37° C. until the OD₆₆₀ reached 0.4. Isopropyl-β-D-thiogalactopyranoside (IPTG, 0.1 mM) was then added thereto and the culture was continued at 37° C. for four hours. After culture, cells were collected by centrifugation, broken by sonication, and centrifuged to yield a cell extract. The resultant cell extracts were heated at 80° C. for fifteen minutes, and then centrifuged to yield the supernatants thereof, which were used as crude enzyme solutions.

[0580] These crude enzyme solutions were measured according to KOSOGAKU HANDOBUKKU (Enzyme handbook), edited by Bunji MARUO and Nobuo TAMIYA, published by Asakura shoten (1982), to confirm that the crude enzyme solutions have the enzymatic activity of interest for the respective sequences. Further, these enzymes have an optimum temperature at 90° C. for the respective sequences.

### Example 32

### Glutamine Synthase

[0581] In order to express the glutamine synthase (SEQ ID NO:627) encoded by an open reading frame obtained by the present invention, in Escherichia coli, the following operations were performed: a fragment containing the open reading frame was amplified by PCR technology and inserted into plasmid pET21a(+) (Novagen) to yield an expression plasmid. This plasmid was used to transform the Escherichia coli BL1 (DE3) strain.

[0582] The resultant ampicillin resistant transformant was inoculated on to the NZCYM medium (1% NZ amine, 0.5% NaCl, 0.5% yeast extract, 0.1% casamino acid, 0.2% MgSO4.7H₂O (pH 7)), cultured at 37° C. until the OD660 reached 0.4. Isopropyl-β-D-thiogalactopyranoside (IPTG, 0.1 mM) was then added thereto and the culture was continued at 37° C. for four hours. After culture, cells were collected by centrifugation, broken by sonication, and centrifuged to yield a cell extract. The resultant cell extract was heated at 80° C. for fifteen minutes, and then centrifuged to yield the supernatant thereof, which was used as a crude enzyme solution.

[0583] This crude enzyme solution was measured according to KOSOGAKU HANDOBUKKU (Enzyme handbook) edited by Bunji MARUO, and Nobuo TAMIYA, published by Asakura shoten (1982), to confirm that the crude enzyme solution has the enzymatic activity of interest. Further, this enzyme has an optimum temperature at 90° C.

### Example 33

### Anthranilate Phosphoribosyl Transferases

[0584] In order to express the anthranilate phosphoribosyl transferases (SEQ ID NO:.394 and 1767) encoded by an open reading frame obtained by the present invention, in Escherichia coli, the following operations were performed: a fragment containing the open reading frame was amplified by PCR technology and inserted into plasmid pET21a(+) (Novagen) to yield an expression plasmid. This plasmid was used to transform the Escherichia coli BL1 (DE3) strain.

[0585] The resultant ampicillin resistant transformant was inoculated on to the NZCYM medium (1% NZ amine, 0.5% NaCl, 0.5% yeast extract, 0.1% casamino acid, 0.2% MgSO4.7H₂O (pH 7)), cultured at 37° C. until the OD₆₆₀ reached 0.4. Isopropyl-β-D-thiogalactopyranoside (IPTG, 0.1 mM) was then added thereto and the culture was continued at 37° C. for four hours. After culture, cells were collected by centrifugation, broken by sonication, and centrifuged to yield a cell extract. The resultant cell extract was heated at 80° C. for fifteen minutes, and then centrifuged to yield the supernatants thereof, which were used as crude enzyme solutions.

[0586] The crude enzyme solutions were measured according to KOSOGAKU HANDOBUKKU (Enzyme handbook) edited by Bunji MARUO, and Nobuo TAMIYA, published by Asakura shoten (1982), to confirm that the crude enzyme solutions have the enzymatic activity of interest. Further, this enzyme has an optimum temperature at 90° C.

### Example 34

### Cobyric Acid Synthase

[0587] In order to express the cobyric acid synthases (SEQ ID NO:137 and 1904) encoded by an open reading frame obtained by the present invention, in Escherichia coli, the following operations were performed: a fragment containing the open reading frame was amplified by PCR technology and inserted into plasmid pET21a(+) (Novagen) to yield an expression plasmid. This plasmid was used to transform the Escherichia coli BL1 (DE3) strain.

[0588] The resultant ampicillin resistant transformant was inoculated on to the NZCYM medium (1% NZ amine, 0.5% NaCl, 0.5% yeast extract, 0.1% casamino acid, 0.2% MgSO4.7H₂O (pH 7)), cultured at 37° C. until the OD₆₆₀ reached 0.4. Isopropyl-β-D-thiogalactopyranoside (IPTG, 0.1 mM) was then added thereto and the culture was continued at 37° C. for four hours. After culture, cells were collected by centrifugation, broken by sonication, and centrifuged to yield a cell extract. The resultant cell extract was heated at 80° C. for fifteen minutes, and then centrifuged to yield the supernatants thereof, which were used as crude enzyme solutions.

[0589] The crude enzyme solutions were measured according to Methods in Enzymology, Acadmic Press, to confirm that the crude enzyme solutions have the enzymatic activity of interest. Further, this enzyme has an optimum temperature of 90° C.

### Example 35

### Phosphoribosyl Anthranilate Isomerase

[0590] In order to express the phosphoribosyl anthranilate isomerase (SEQ ID NO:44) encoded by an open reading frame obtained by the present invention, in Escherichia coli, the following operations were performed: a fragment containing the open reading frame was amplified by PCR technology and inserted into plasmid pET21a(+) (Novagen) to yield an expression plasmid. This plasmid was used to transform the Escherichia coli BL1 (DE3) strain.

[0591] The resultant ampicillin resistant transformant was inoculated on to the NZCYM medium (1% NZ amine, 0.5% NaCl, 0.5% yeast extract, 0.1% casamino acid, 0.2% MgSO4.7H₂O (pH 7)), cultured at 37° C. until the OD660 reached 0.4. Isopropyl-β-D-thiogalactopyranoside (IPTG, 0.1 mM) was then added thereto and the culture was continued at 37° C. for four hours. After culture, cells were collected by centrifugation, broken by sonication, and centrifuged to yield a cell extract. The resultant cell extract was heated at 80° C. for fifteen minutes, and then centrifuged to yield the supernatant thereof, which was used as a crude enzyme solution.

[0592] This crude enzyme solution was measured according to KOSOGAKU HANDOBUKKU (Enzyme handbook) edited by Bunji MARUO, and Nobuo TAMIYA, published by Asakura shoten (1982), to confirm that the crude enzyme solution has the enzymatic activity of interest. Further, this enzyme has an optimum temperature of 90° C.

### Example 36

### Cobalamin Synthase

[0593] In order to express the cobalamin synthase (SEQ ID NO:181, 910, 1720 and 1973) encoded by open reading frames obtained by the present invention, in Escherichia coli, the following operations were performed: a fragment containing the open reading frame was amplified by PCR technology and inserted into plasmid pET21a(+) (Novagen) to yield an expression plasmid. This plasmid was used to transform the Escherichia coli BL1 (DE3) strain.

[0594] The resultant ampicillin resistant transformants were inoculated on to the NZCYM medium (1% NZ amine, 0.5% NaCl, 0.5% yeast extract, 0.1% casamino acid, 0.2% MgSO4.7H₂O (pH 7)), cultured at 37° C. until the OD660 reached 0.4. Isopropyl-β-D-thiogalactopyranoside (IPTG, 0.1 mM) was then added thereto and the culture was continued at 37° C. for four hours. After culture, cells were collected by centrifugation, broken by sonication, and centrifuged to yield a cell extract. The resultant cell extract was heated at 80° C. for fifteen minutes, and then centrifuged to yield the supernatants thereof, which were used as crude enzyme solutions.

[0595] The crude enzyme solutions were measured according to Methods in Enzymology, Acadmic Press, to confirm that the crude enzymes solutions have the enzymatic activity of interest. Further, these enzymes have an optimum temperature of 90° C.

### Example 37

### indole-3-glycerole-phophate synthase

[0596] In order to express the indole-3-glycerole-phophate synthase (SEQ ID NO: 772) encoded by an open reading frame obtained by the present invention, in Escherichia coli, the following operations were performed: a fragment containing the open reading frame was amplified by PCR technology and inserted into plasmid pET21a(+) (Novagen) to yield an expression plasmid. This plasmid was used to transform the Escherichia coli BL1 (DE3) strain.

[0597] The resultant ampicillin resistant transformant was inoculated on to the NZCYM medium (1% NZ amine, 0.5% NaCl, 0.5% yeast extract, 0.1% casamino acid, 0.2% MgSO4.7H₂O (pH 7)), cultured at 37° C. until the OD₆₆₀ reached 0.4. Isopropyl-β-D-thiogalactopyranoside (IPTG, 0.1 mM) was then added thereto and the culture was continued at 37° C. for four hours. After culture, cells were collected by centrifugation, broken by sonication, and centrifuged to yield a cell extract. The resultant cell extract was heated at 80° C. for fifteen minutes, and then centrifuged to yield the supernatant thereof, which was used as a crude enzyme solution.

[0598] This crude enzyme solution was measured according to KOSOGAKU HANDOBUKKU (Enzyme handbook) edited by Bunji MARUO, and Nobuo TAMIYA, published by Asakura shoten (1982), to confirm that the crude enzyme solution has the enzymatic activity of interest. Further, this enzyme has an optimum temperature of 90° C.

### Example 38

### Tryptophane Synthase

[0599] In order to express the tryptophane synthase (SEQ ID NO:395, 774, 954 and 2032) encoded by open reading frames obtained by the present invention, in Escherichia coli, the following operations were performed: a fragment containing the open reading frame was amplified by PCR technology and inserted into plasmid pET21a(+) (Novagen) to yield an expression plasmid. This plasmid was used to transform the Escherichia coli BL1 (DE3) strain.

[0600] The resultant ampicillin resistant transformants were inoculated on to the NZCYM medium (1% NZ amine, 0.5% NaCl, 0.5% yeast extract, 0.1% casamino acid, 0.2% MgSO4.7H₂O (pH 7)), cultured at 37° C. until the OD₆₆₀ reached 0.4. Isopropyl-β-D-thiogalactopyranoside (IPTG, 0.1 mM) was then added thereto and the culture was continued at 37° C. for four hours. After culture, cells were collected by centrifugation, broken by sonication, and centrifuged to yield a cell extract. The resultant cell extract was heated at 80° C. for fifteen minutes, and then centrifuged to yield the supernatants thereof, which were used as crude enzyme solutions.

[0601] The crude enzyme solutions were measured according to KOSOGAKU HANDOBUKKU (Enzyme handbook) edited by Bunji MARUO, and Nobuo TAMIYA, published by Asakura shoten (1982), to confirm that the crude enzyme solutions have the enzymatic activity of interest. Further, these enzymes have an optimum temperature at 90° C.

### Example 39

### Ribose Phosphate Pyrophosphokinase

[0602] In order to express the ribose phosphate pyrophosphokinase (SEQ ID NO: 701) encoded by an open reading frame obtained by the present invention, in Escherichia coli, the following operations were performed: a fragment containing the open reading frame was amplified by PCR technology and inserted into plasmid pET21a(+) (Novagen) to yield an expression plasmid. This plasmid was used to transform the Escherichia coli BL1 (DE3) strain.

[0603] The resultant ampicillin resistant transformant was inoculated on to the NZCYM medium (1% NZ amine, 0.5% NaCl, 0.5% yeast extract, 0.1% casamino acid, 0.2% MgSO4.7H₂O (pH 7)), cultured at 37° C. until the OD₆₆₀ reached 0.4. Isopropyl-β-D-thiogalactopyranoside (IPTG, 0.1 mM) wasthen added thereto and the culture was continued at 37° C. for four hours. After culture, cells were collected by centrifugation, broken by sonication, and centrifuged to yield a cell extract. The resultant cell extract was heated at 80° C. for fifteen minutes, and then centrifuged to yield the supernatant thereof, which was used as a crude enzyme solution.

[0604] This crude enzyme solution was measured according to KOSOGAKU HANDOBUKKU (Enzyme handbook) edited by Bunji MARUO, and Nobuo TAMIYA, published by Asakura shoten (1982), to confirm that the crude enzyme solution has the enzymatic activity of interest. Further, this enzyme has an optimum temperature at 90° C.

### Example 40

### Glutamate Synthase

[0605] In order to express the glutamate synthase (SEQ ID NO: 1578) encoded by an open reading frame obtained by the present invention, in Escherichia coli, the following operations were performed: a fragment containing the open reading frame was amplified by PCR technology and inserted into plasmid pET21a(+) (Novagen) to yield an expression plasmid. This plasmid was used to transform the Escherichia coli BL1 (DE3) strain.

[0606] The resultant ampicillin resistant transformant was inoculated on to the NZCYM medium (1% NZ amine, 0.5% NaCl, 0.5% yeast extract, 0.1% casamino acid, 0.2% MgSO4.7H₂O (pH 7)), cultured at 37° C. until the OD₆₆₀ reached 0.4. Isopropyl-β-D-thiogalactopyranoside (IPTG, 0.1 mM) was then added thereto and the culture was continued at 37° C. for four hours. After culture, cells were collected by centrifugation, broken by sonication, and centrifuged to yield a cell extract. The resultant cell extract was heated at 80° C. for fifteen minutes, and then centrifuged to yield the supernatant thereof, which was used as a crude enzyme solution.

[0607] This crude enzyme solution was measured according to KOSOGAKU HANDOBUKKU (Enzyme handbook) edited by Bunji MARUO, and Nobuo TAMIYA, published by Asakura shoten (1982), to confirm that the crude enzyme solution has the enzymatic activity of interest. Further, this enzyme has an optimum temperature at 90° C.

### Example 41

### orotidine-5′-phosphate decarboxylase

[0608] In order to express the orotidine-5′-phosphate decarboxylase (SEQ ID NO: 1096) encoded by an open reading frame obtained by the present invention, in Escherichia coli, the following operations were performed: a fragment containing the open reading frame was amplified by PCR technology and inserted into plasmid pET21a(+) (Novagen) to yield an expression plasmid. This plasmid was used to transform the Escherichia coli BL1 (DE3) strain.

[0609] The resultant ampicillin resistant transformant was inoculated on to the NZCYM medium (1% NZ amine, 0.5% NaCl, 0.5% yeast extract, 0.1% casamino acid, 0.2% MgSO4.7H₂O (pH 7)), cultured at 37° C. until the OD₆₆₀ reached 0.4. Isopropyl-β-D-thiogalactopyranoside (IPTG, 0.1 mM) was then added thereto and the culture was continued at 37° C. for four hours. After culture, cells were collected by centrifugation, broken by sonication, and centrifuged to yield a cell extract. The resultant cell extract was heated at 80° C. for fifteen minutes, and then centrifuged to yield the supernatant thereof, which was used as a crude enzyme solution.

[0610] This crude enzyme solution was measured according to KOSOGAKU HANDOBUKKU (Enzyme handbook) edited by Bunji MARUO, and Nobuo TAMIYA, published by Asakura shoten (1982), to confirm that the crude enzyme solution has the enzymatic activity of interest. Further, this enzyme has an optimum temperature at 90° C.

### Example 42

### Anthranilate Synthase

[0611] In order to express the anthranilate synthase (SEQ ID NO:43 and 773) encoded by open reading frames obtained by the present invention, in Escherichia coli, the following operations were performed: a fragment containing the open reading frame was amplified by PCR technology and inserted into plasmid pET21a(+) (Novagen) to yield an expression plasmid. These plasmids were used to transform the Escherichia coli BL1 (DE3) strain.

[0612] The resultant ampicillin resistant transformants were inoculated on to the NZCYM medium (1% NZ amine, 0.5% NaCl, 0.5% yeast extract, 0.1% casamino acid, 0.2% MgSO_{4.7}H₂O (pH 7)), cultured at 37° C. until the OD660 reached 0.4. Isopropyl-β-D-thiogalactopyranoside (IPTG, 0.1 mM) was then added thereto and the culture was continued at 37° C. for four hours. After culture, cells were collected by centrifugation, broken by sonication, and centrifuged to yield a cell extract. The resultant cell extract was heated at 80° C. for fifteen minutes, and then centrifuged to yield the supernatants thereof, which were used as crude enzyme solutions.

[0613] The crude enzyme solutions were measured according to KOSOGAKU HANDOBUKKU (Enzyme handbook) edited by Bunji MARUO, and Nobuo TAMIYA, published by Asakura shoten (1982), to confirm that the crude enzyme solutions have the enzymatic activity of interest. Further, these enzymes have an optimum temperature at 90° C.

### Example 43

### Aspartyl-tRNA Synthase

[0614] In order to express the aspartyl-tRNA synthase (SEQ ID NO: 808) encoded by an open reading frame obtained by the present invention, in Escherichia coli, the following operations were performed: a fragment containing the open reading frame was amplified by PCR technology and inserted into plasmid pET21a(+) (Novagen) to yield an expression plasmid. This plasmid was used to transform the Escherichia coli BL1 (DE3) strain.

[0615] The resultant ampicillin resistant transformant was inoculated on to the NZCYM medium (1% NZ amine, 0.5% NaCl, 0.5% yeast extract, 0.1% casamino acid, 0.2% MgSO_{4.7}H₂O (pH 7)), cultured at 37° C. until the OD₆₆₀ reached 0.4. Isopropyl-β-D-thiogalactopyranoside (IPTG, 0.1 mM) was then added thereto and the culture was continued at 37° C. for four hours. After culture, cells were collected by centrifugation, broken by sonication, and centrifuged to yield a cell extract. The resultant cell extract was heated at 80° C. for fifteen minutes, and then centrifuged to yield the supernatant thereof, which was used as a crude enzyme solution.

[0616] This crude enzyme solution was measured according to KOSOGAKU HANDOBUKKU (Enzyme handbook) edited by Bunji MARUO, and Nobuo TAMIYA, published by Asakura shoten (1982), to confirm that the crude enzyme solution has the enzymatic activity of interest. Further, this enzyme has an optimum temperature at 90° C.

### Example 44

### Phenylalanyl-tRNA-Synthase

[0617] In order to express the phenylalanyl-tRNA-synthase (SEQ ID NO:506 and 878) encoded by open reading frames obtained by the present invention, in Escherichia coli, the following operations were performed: a fragment containing the open reading frame was amplified by PCR technology and inserted into plasmid pET21a(+) (Novagen) to yield an expression plasmid. These plasmids were used to transform the Escherichia coli BL1 (DE3) strain.

[0618] The resultant ampicillin resistant transformants were inoculated on to the NZCYM medium (1% NZ amine, 0.5% NaCl, 0.5% yeast extract, 0.1% casamino acid, 0.2% MgSO_{4.7}H₂O (pH 7)), cultured at 37° C. until the OD₆₆₀ reached 0.4. Isopropyl-β-D-thiogalactopyranoside (IPTG, 0.1 mM) was then added thereto and the culture was continued at 37° C. for four hours. After culture, cells were collected by centrifugation, broken by sonication, and centrifuged to yield a cell extract. The resultant cell extract was heated at 80° C. for fifteen minutes, and then centrifuged to yield the supernatants thereof, which were used as crude enzyme solutions.

[0619] The crude enzyme solutions were measured according to KOSOGAKU HANDOBUKKU (Enzyme handbook) edited by Bunji MARUO, and Nobuo TAMIYA, published by Asakura shoten (1982), to confirm that the crude enzyme solutions have the enzymatic activity of interest. Further, these enzyme has an optimum temperature at 90° C.

### Example 45

### Chaperonins

[0620] In order to express the chaperonin A (SEQ ID NO: 1368) and the chaperonin B (SEQ ID NO: 721) encoded by open reading frames obtained by the present invention, in Escherichia coli, the following operations were performed: a fragment containing the open reading frames were amplified by PCR technology and inserted into plasmid pET21a(+) (Novagen) to yield an expression plasmid. These plasmids were used to transform the Escherichia coli BL1 (DE3) strain.

[0621] The resultant ampicillin resistant transformants were inoculated on to the NZCYM medium (1% NZ amine, 0.5% NaCl, 0.5% yeast extract, 0.1% casamino acid, 0.2% MgSO4.7H₂O (pH 7)), cultured at 37° C. until the OD₆₆₀ reached 0.4. Isopropyl-β-D-thiogalactopyranoside (IPTG, 0.1 mM) was then added thereto and the culture was continued at 37° C. for four hours. After culture, cells were collected by centrifugation, broken by sonication, and centrifuged to yield a cell extract. The resultant cell extract was heated at 80° C. for fifteen minutes, and then centrifuged to yield the supernatants thereof, which were used as crude protein solutions.

[0622] These crude protein solutions were measured by a method described in Frydman, J. et al. (1994) Nature 370, 111., to confirm that the crude protein solutions have activity as a substrate for the enzyme of interest. Further, these proteins were stable at 90° C.

### Example 46

### TATA Binding Protein

[0623] In order to express the TATA binding protein (SEQ ID NO: 31) encoded by an open reading frame obtained by the present invention, in Escherichia coli, the following operations were performed: a fragment containing the open reading frame was amplified by PCR technology and inserted into plasmid pET21a(+) (Novagen) to yield an expression plasmid. This plasmid was used to transform the Escherichia coli BL1 (DE3) strain.

[0624] The resultant ampicillin resistant transformant was inoculated on to the NZCYM medium (1% NZ amine, 0.5% NaCl, 0.5% yeast extract, 0.1% casamino acid, 0.2% MgSO4.7H₂O (pH 7)), cultured at 37° C. until the OD₆₆₀ reached 0.4. Isopropyl-β-D-thiogalactopyranoside (IPTG, 0.1 mM) wasthen added thereto and the culture was continued at 37° C. for four hours. After culture, cells were collected by centrifugation, broken by sonication, and centrifuged to yield a cell extract. The resultant cell extract was heated at 80° C. for fifteen minutes, and then centrifuged to yield the supernatant thereof, which was used as a crude protein solution.

[0625] This crude protein solution was measured according to Methods in Enzymology, Academic Press, to confirm that the crude protein solution has the activity of the protein. Further, this protein was stable at 90° C.

### Example 47

### TBP-Interacting Protein

[0626] In order to express the TBP-interacting protein (SEQ ID NO: 1289) encoded by an open reading frame obtained by the present invention, in Escherichia coli, the following operations were performed: a fragment containing the open reading frame was amplified by PCR technology and inserted into plasmid pET21a(+) (Novagen) to yield an expression plasmid. This plasmid was used to transform the Escherichia coli BL1 (DE3) strain.

[0627] The resultant ampicillin resistant transformant was inoculated on to the NZCYM medium (1% NZ amine, 0.5% NaCl, 0.5% yeast extract, 0.1% casamino acid, 0.2% MgSO4.7H₂O (pH 7)), cultured at 37° C. until the OD660 reached 0.4. Isopropyl-β-D-thiogalactopyranoside (IPTG, 0.1 mM) was then added thereto and the culture was continued at 37° C. for four hours. After culture, cells were collected by centrifugation, broken by sonication, and centrifuged to yield a cell extract. The resultant cell extract was heated at 80° C. for fifteen minutes, and then centrifuged to yield the supernatant thereof, which was used as a crude protein solution.

[0628] This crude protein solution was measured according to Methods in Enzymology, Academic Press, to confirm that the crude protein solution has the activity of the protein. Further, this protein was stable at 90° C.

### Example 48

### RNase HII

[0629] In order to express the RNase HII (SEQ ID NO:856) encoded by an open reading frame obtained by the present invention, in Escherichia coli, the following operations were performed: a fragment containing the open reading frame was amplified by PCR technology and inserted into plasmid pET21a(+) (Novagen) to yield an expression plasmid. This plasmid was used to transform the Escherichia coli BL1 (DE3) strain.

[0630] The resultant ampicillin resistant transformant was inoculated on to the NZCYM medium (1% NZ amine, 0.5% NaCl, 0.5% yeast extract, 0.1% casamino acid, 0.2% MgSO4.7H₂O (pH 7)), cultured at 37° C. until the OD₆₆₀ reached 0.4. Isopropyl-β-D-thiogalactopyranoside (IPTG, 0.1 mM) was then added thereto and the culture was continued at 37° C. for four hours. After culture, cells were collected by centrifugation, broken by sonication, and centrifuged to yield a cell extract. The resultant cell extract was heated at 80° C. for fifteen minutes, and then centrifuged to yield the supernatant thereof, which was used as a crude enzyme solution.

[0631] This crude enzyme solution was measured according to KOSOGAKU HANDOBUKKU (Enzyme handbook) edited by Bunji MARUO, and Nobuo TAMIYA, published by Asakura shoten (1982), to confirm that the crude enzyme solution has the enzymatic activity of interest. Further, this enzyme has an optimum temperature at 90° C.

### Example 49

### Hydrogenase Maturation Factor

[0632] In order to express the hydrogenase maturation factors (SEQ ID NO: 1144, 1154, 1156, 1516, 1518, 1519, 1869 and 1871) encoded by open reading frames obtained by the present invention, in Escherichia coli, the following operations were performed: a fragment containing the open reading frames were amplified by PCR technology and inserted into plasmid pET21a (+) (Novagen) to yield an expression plasmid. These plasmids were used to transform the Escherichia coli BL1 (DE3) strain.

[0633] The resultant ampicillin resistant transformants were inoculated on to the NZCYM medium (1% NZ amine, 0.5% NaCl, 0.5% yeast extract, 0.1% casamino acid, 0.2% MgSO4.7H₂O (pH 7)), cultured at 37° C. until the OD₆₆₀ reached 0.4. Isopropyl-β-D-thiogalactopyranoside (IPTG, 0.1 mM) was then added thereto and the culture was continued at 37° C. for four hours. After culture, cells were collected by centrifugation, broken by sonication, and centrifuged to yield a cell extract. The resultant cell extract was heated at 80° C. for fifteen minutes, and then centrifuged to yield the supernatants thereof, which were used as crude protein solutions.

[0634] This crude protein solutions were measured according to KOSOGAKU HANDOBUKKU (Enzyme handbook) edited by Bunji MARUO, and Nobuo TAMIYA, published by Asakura shoten (1982), to confirm that the crude protein solutions have activity as substrates for the enzyme of interest. Further, these proteins were stable at 90° C.

### Example 50

### Lon Protease

[0635] In order to express the Lon protease (SEQ ID NO: 929) encoded by an open reading frame obtained by the present invention, in Escherichia coli, the following operations were performed: a fragment containing the open reading frame was amplified by PCR technology and inserted into plasmid pET21a(+) (Novagen) to yield an expression plasmid. This plasmid was used to transform the Escherichia coli BL1 (DE3) strain.

[0636] The resultant ampicillin resistant transformant was inoculated on to the NZCYM medium (1% NZ amine, 0.5% NaCl, 0.5% yeast extract, 0.1% casamino acid, 0.2% MgSO4.7H₂O (pH 7)), cultured at 37° C. until the OD₆₆₀ reached 0.4. Isopropyl-β-D-thiogalactopyranoside (IPTG, 0.1 mM) was then added thereto and the culture was continued at 37° C. for four hours. After culture, cells were collected by centrifugation, broken by sonication, and centrifuged to yield a cell extract. The resultant cell extract was heated at 80° C. for fifteen minutes, and then centrifuged to yield the supernatant thereof, which was used as a crude enzyme solution.

[0637] This crude enzyme solution was measured according to KOSOGAKU HANDOBUKKU (Enzyme handbook) edited by Bunji MARUO, and Nobuo TAMIYA, published by Asakura shoten (1982), to confirm that the crude enzyme solution has the enzymatic activity of interest. Further, this enzyme has an optimum temperature at 90° C.

### Example 51

### Thiol Protease

[0638] In order to express the thiol protease encoded by an open reading frame obtained by the present invention, in Escherichia coli, the following operations were performed: a fragment containing the open reading frame was amplified by PCR technology and inserted into plasmid pET21a(+) (Novagen) to yield an expression plasmid. This plasmid was used to transform the Escherichia coli BL1 (DE3) strain.

[0639] The resultant ampicillin resistant transformant was inoculated on to the NZCYM medium (1% NZ amine, 0.5% NaCl, 0.5% yeast extract, 0.1% casamino acid, 0.2% MgSO4.7H₂O (pH 7)), cultured at 37° C. until the OD₆₆₀ reached 0.4. Isopropyl-β-D-thiogalactopyranoside (IPTG, 0.1 mM) was then added thereto and the culture was continued at 37° C. for four hours. After culture, cells were collected by centrifugation, broken by sonication, and centrifuged to yield a cell extract. The resultant cell extract was heated at 80° C. for fifteen minutes, and then centrifuged to yield the supernatant thereof, which was used as a crude enzyme solution.

[0640] This crude enzyme solution was measured according to KOSOGAKU HANDOBUKKU (Enzyme handbook) edited by Bunji MARUO, and Nobuo TAMIYA, published by Asakura shoten (1982), to confirm that the crude enzyme solution has the enzymatic activity of interest. Further, this enzyme has an optimum temperature at 90° C.

### Example 52

### Fragellins

[0641] In order to express the fragellins (SEQ ID NO: 11, 350, 351, 727, and 728) encoded by open reading frames obtained by the present invention, in Escherichia coli, the following operations were performed: a fragment containing the open reading frames were amplified by PCR technology and inserted into plasmid pET21a(+) (Novagen) to yield an expression plasmid. These plasmids were used to transform the Escherichia coli BL1 (DE3) strain.

[0642] The resultant ampicillin resistant transformants were inoculated on to the NZCYM medium (1% NZ amine, 0.5% NaCl, 0.5% yeast extract, 0.1% casamino acid, 0.2% MgSO4.7H₂O (pH 7)), cultured at 37° C. until the OD₆₆₀ reached 0.4. Isopropyl-β-D-thiogalactopyranoside (IPTG, 0.1 mM) was then added thereto and the culture was continued at 37° C. for four hours. After culture, cells were collected by centrifugation, broken by sonication, and centrifuged to yield a cell extract. The resultant cell extract was heated at 80° C. for fifteen minutes, and then centrifuged to yield the supernatants thereof, which were used as crude protein solutions.

[0643] This crude protein solutions were measured according to Aldridge P, Hughes K T., Curr Opin Microbiol. 2002 April; 5(2):160-5 and the references cited therein, to confirm that the crude protein solutions have activity as a substrate for the protein of interest. Further, these proteins were stable at 90° C.

### Example 53

### Subtilin-Like Protease

[0644] In order to express the subtilin-like protease (SEQ ID NO: 979) encoded by an open reading frame obtained by the present invention, in Escherichia coli, the following operations were performed: a fragment containing the open reading frame was amplified by PCR technology and inserted into plasmid pET21a(+) (Novagen) to yield an expression plasmid. This plasmid was used to transform the Escherichia coli BL1 (DE3) strain.

[0645] The resultant ampicillin resistant transformant was inoculated on to the NZCYM medium (1% NZ amine, 0.5% NaCl, 0.5% yeast extract, 0.1% casamino acid, 0.2% MgSO4.7H₂O (pH 7)), cultured at 37° C. until the OD₆₆₀ reached 0.4. Isopropyl-β-D-thiogalactopyranoside (IPTG, 0.1 mM) was then added thereto and the culture was continued at 37° C. for four hours. After culture, cells were collected by centrifugation, broken by sonication, and centrifuged to yield a cell extract. The resultant cell extract was heated at 80° C. for fifteen minutes, and then centrifuged to yield the supernatant thereof, which was used as a crude enzyme solution.

[0646] This crude enzyme solution was measured according to KOSOGAKU HANDOBUKKU (Enzyme handbook) edited by Bunji MARUO, and Nobuo TAMIYA, published by Asakura shoten (1982), to confirm that the crude enzyme solution has the enzymatic activity of interest. Further, this enzyme has an optimum temperature at 90° C.

### Example 54

### Cell Division Control Protein A

[0647] In order to express the cell division control protein A (SEQ ID NO: 1369) encoded by an open reading frame obtained by the present invention, in Escherichia coli, the following operations were performed: a fragment containing the open reading frame was amplified by PCR technology and inserted into plasmid pET21a(+) (Novagen) to yield an expression plasmid. This plasmid was used to transform the Escherichia coli BL1 (DE3) strain.

[0648] The resultant ampicillin resistant transformant was inoculated on to the NZCYM medium (1% NZ amine, 0.5% NaCl, 0.5% yeast extract, 0.1% casamino acid, 0.2% MgSO4.7H₂O (pH 7)), cultured at 37° C. until the OD₆₆₀ reached 0.4. Isopropyl-β-D-thiogalactopyranoside (IPTG, 0.1 mM) was then added thereto and the culture was continued at 37° C. for four hours. After culture, cells were collected by centrifugation, broken by sonication, and centrifuged to yield a cell extract. The resultant cell extract was heated at 80° C. for fifteen minutes, and then centrifuged to yield the supernatant thereof, which was used as a crude protein solution.

[0649] This crude protein solution was measured for cell division controlling activity, to confirm that the crude protein solution has the activity of the protein of interest. Further, this protein was stable at 90° C.

### Example 55

### Endonucleases

[0650] In order to express the endonucleases (SEQ ID NOs: 547, 697, 900, 1450, 1702, 1716, 1731, and 2010) encoded by open reading frames obtained by the present invention, in Escherichia coli, the following operations were performed: fragments containing the open reading frames were amplified by PCR technology and inserted into plasmid pET21a(+) (Novagen) to yield expression plasmids. These plasmids were used to transform the Escherichia coli BL1 (DE3) strains.

[0651] The resultant ampicillin resistant transformants were inoculated on to the NZCYM medium (1% NZ amine, 0.5% NaCl, 0.5% yeast extract, 0.1% casamino acid, 0.2% MgSO_{4.7}H₂O (pH 7)), cultured at 37° C. until the OD₆₆₀ reached 0.4. Isopropyl-β-D-thiogalactopyranoside (IPTG, 0.1 mM) was then added thereto and the culture was continued at 37° C. for four hours. After culture, cells were collected by centrifugation, broken by sonication, and centrifuged to yield a cell extract. The resultant cell extracts were heated at 80° C. for fifteen minutes, and then centrifuged to yield the supernatants thereof, which were used as crude enzyme solutions.

[0652] These crude enzyme solutions were measured according to KOSOGAKU HANDOBUKKU (Enzyme handbook) edited by Bunji MARUO, and Nobuo TAMIYA, published by Asakura shoten (1982), to confirm that the crude enzyme solutions have the enzymatic activity of interest for the respective sequences. Further, these enzymes have an optimum temperature at 90° C. for the respective sequences.

### Example 56

### Ferredoxin

[0653] In order to express the ferredoxin (SEQ ID NO:253) encoded by an open reading frame obtained by the present invention, in Escherichia coli, the following operations were performed: a fragment containing the open reading frame was amplified by PCR technology and inserted into plasmid pET21a(+) (Novagen) to yield an expression plasmid. This plasmid was used to transform the Escherichia coli BL1 (DE3) strain.

[0654] The resultant ampicillin resistant transformant was inoculated on to the NZCYM medium (1% NZ amine, 0.5% NaCl, 0.5% yeast extract, 0.1% casamino acid, 0.2% MgSO4.7H₂O (pH 7)), cultured at 37° C. until the OD₆₆₀ reached 0.4. Isopropyl-β-D-thiogalactopyranoside (IPTG, 0.1 mM) was then added thereto and the culture was continued at 37° C. for four hours. After culture, cells were collected by centrifugation, broken by sonication, and centrifuged to yield a cell extract. The resultant cell extract was heated at 80° C. for fifteen minutes, and then centrifuged to yield the supernatant thereof, which was used as a crude protein solution.

[0655] This crude protein solution was measured according to KOSOGAKU HANDOBUKKU (Enzyme handbook) edited by Bunji MARUO, and Nobuo TAMIYA, published by Asakura shoten (1982), to confirm that the crude protein solution has the activity of the protein of interest. Further, this protein was stable at 90° C.

### Example 57

### exo-β-D-glucosaminidase

[0656] In order to express the exo-β-D-glucosaminidase (SEQ ID NO:1902) encoded by an open reading frame obtained by the present invention, in Escherichia coli, the following operations were performed: a fragment containing the open reading frame was amplified by PCR technology and inserted into plasmid pET21a(+) (Novagen) to yield an expression plasmid. This plasmid was used to transform the Escherichia coli BL1 (DE3) strain.

[0657] The resultant ampicillin resistant transformant was inoculated on to the NZCYM medium (1% NZ amine, 0.5% NaCl, 0.5% yeast extract, 0.1% casamino acid, 0.2% MgSO4.7H₂O (pH 7)), cultured at 37° C. until the OD₆₆₀ reached 0.4. Isopropyl-β-D-thiogalactopyranoside (IPTG, 0.1 mM) was then added thereto and the culture was continued at 37° C. for four hours. After culture, cells were collected by centrifugation, broken by sonication, and centrifuged to yield a cell extract. The resultant cell extract was heated at 80° C. for fifteen minutes, and then centrifuged to yield the supernatant thereof, which was used as a crude enzyme solution.

[0658] This crude enzyme solution was measured according to KOSOGAKU HANDOBUKKU (Enzyme handbook) edited by Bunji MARUO, and Nobuo TAMIYA, published by Asakura shoten (1982), to confirm that the crude enzyme solution has the enzymatic activity of interest. Further, this enzyme has an optimum temperature at 90° C.

### Example 58

### Confirmation of Other Deduced Functions

[0659] In order to express the gene products encoded by open reading frames obtained by the present invention, in Escherichia coli, the following operations are performed: fragments containing the open reading frames are amplified by PCR technology and inserted into plasmid pET21a(+) (Novagen) to yield expression plasmids. These plasmids are used to transform the Escherichia coli BL1 (DE3) strains.

[0660] The resultant ampicillin resistant transformants are inoculated on to the NZCYM medium (1% NZ amine, 0.5% NaCl, 0.5% yeast extract, 0.1% casamino acid, 0.2% MgSO4.7H₂O (pH 7)), cultured at 37° C. until the OD660 reached 0.4. Isopropyl-β-D-thiogalactopyranoside (IPTG, 0.1 mM) is then added thereto and the culture is continued at 37° C. for four hours. After culture, cells are collected by centrifugation, broken by sonication, and centrifuged to yield a cell extract. The resultant cell extracts are heated at 80° C. for fifteen minutes, and then centrifuged to yield the supernatants thereof, which are used as crude enzyme solutions.

[0661] These crude enzyme solutions are measured according to KOSOGAKU HANDOBUKKU (Enzyme handbook) edited by Bunji MARUO, and Nobuo TAMIYA, published by Asakura shoten (1982), to confirm that the crude enzyme solution has the activity of interest for the respective sequences. Further, this enzyme has an optimum temperature or is stable at 90° C. for the respective sequences.

### EXAMPLE 59

### Biomolecule Chip—DNA Chip

[0662] Next, an exemplary prepration of a biomolecule chip is demonstrated. In this Example, methods for DNAs having different sequences being aligned and immobilized thereon are described.

[0663] Aggregates of DNA fragments having specific sequences of the present invention are immobilized in a DNA spot form on a substrate. As a substrate, glass is usually used but plastic may also be used. Formats for DNA chips may be rectangular or circular. Each DNA dot comprises a DNA encoding a different gene of the present invention, and is immobilized onto the substrate. The size of the DNA dot is 100-200 μm in diameter in case of microarrays, and in the case of a DNA chip, about 10-30 μm.

[0664] Next, methods for forming each DNA spot are described. For example, a DNA solution of interest is located onto a DNA substrate using pin methods, inkjet format and the like.

[0665] Exemplary preparation of such DNA chips prepared thereby is shown in FIG. 7.

### Example 60

### Biomolecule Chip—Protein Chip

[0666] Next, an exemplary preparation of biomolecule chips is demonstrated. In this Example, methods for aligning proteins having different sequences on a substrate and immobilized thereto, are described.

[0667] Aggregates of the protein fragments of specific sequences of the present invention are immobilized on a substrate in a form of a dot. Glass is usually used as a substrate, but plastic may also be used. Formats may be rectangular, as with a DNA chip, or circular. Each protein dot comprises a protein from a different gene of the present invention and is immobilized onto the substrate. The size of the protein dot is 100-200 μm in diameter in case of microarrays, and in the case of DNA chip, about 10-30 μm.

[0668] Next, methods for forming each protein spot are described. For example, the protein solution of interest is located onto a protein substrate using pin methods, inkjet format and the like.

[0669] Exemplary preparation of such protein chips prepared thereby is shown in FIG. 7. Outlooks thereof are similar to that of DNA chip.

[0670] Although certain preferred embodiments have been described herein, it is not intended that such embodiments be construed as limitations on the scope of the invention except as set forth in the appended claims. Various other modifications and equivalents will be apparent to and can be readily made by those skilled in the art, after reading the description herein, without departing from the scope and spirit of this invention. All patents, published patent applications and publications cited herein are incorporated by reference as if set forth fully herein.

### EFFECTS OF THE INVENTION

[0671] The present invention provides a method and kit for gene targeting in an efficient and accurate manner at any position in the genome of an organism. Further, information of the entire genomic sequence of Thermococcus kodakaraensis KOD1, and the gene information contained therein are also provided.

### INDUSTRIAL APPLICABILITY

[0672] The present invention provides a variety of hyperthermostable gene products, and thus is useful in providing a method and kit for gene targeting in an efficient and accurate manner at any position in the genome of an organism. Such a variety of hyperthermostable gene products are applicable to global analysis of a hyperthermostable organism in genomic analysis and the like.

The application's sequence listing, which the Patent Office published only in electronic form, follows.

SEQUENCE LISTING (2167 sequences)

SEQ ID NO: 1 - DNA, 2089378 bp, Thermococcus kodakaraensis KOD1 (residues 1-1,044,689 of 2,089,378)
  CDS (1)..(5016): DNA polymerase elongation subunit (family B)
  CDS (5134)..(5733): Predicted metal-dependent hydrolase
  CDS (6586)..(7014): Predicted CoA-binding protein
  CDS (16696)..(17697): ABC-type sulfate/molybdate transport systems
  CDS (23947)..(24834): Zn-dependent hydrolases
  CDS (27565)..(28620): ATPase involved in DNA repair
  CDS (29782)..(30681): Uncharacterized proteins of WD40-like repeat family
  CDS (31102)..(31266): Uncharacterized ArCR
  CDS (31414)..(32235): SAM-dependent methyltransferases COG0500 SmtA
  CDS (36553)..(37380): Archaeal flagellins
  CDS (39760)..(40332): Putative archaeal flagellar protein G
  CDS (40360)..(41070): Predicted ATPases involved in biogenesis of archaeal flagella
  CDS (47317)..(47799): Phosphoserine phosphatase
  CDS (49393)..(49731): Serine/threonine protein kinases
  CDS (54169)..(55020): Uncharacterized ACR
  CDS (56674)..(57267): Nicotinamide mononucleotide adenylyltransferase
  CDS (58855)..(59703): Predicted methyltransferase
  CDS (62830)..(63723): Integrase
  CDS (67399)..(68973): Subtilisin-like serine proteases
  CDS (69583)..(69795)
  CDS (70504)..(71112): Phytoene dehydrogenase and related proteins
  CDS (73336)..(74643): Zn-dependent hydrolases
  CDS (83431)..(83628): Fe-S  oxidoreductases
  CDS (83908)..(84267): Serine proteases of the peptidase family S9A
  CDS (87211)..(87663): Mn-dependent transcriptional regulator
  CDS (90079)..(90267): Predicted Zn-ribbon RNA-binding protein with a function in transl ation
  CDS (91363)..(92979): Na+/proline
  CDS (94552)..(95712): Glycine/D-amino acid oxidases (deaminating)
  CDS (104398)..(106101): Uncharacterized ACR
  CDS (106210)..(106779): Transcription initiation factor TFIID (TATA-binding protein)
  CDS (106834)..(107454): RecA-superfamily ATPases implicated in signal transduction
  CDS (122431)..(122667)
  CDS (122668)..(123594): Triphosphoribosyl-dephospho-CoA synthetase
  CDS (132745)..(133890): L-aminopeptidase/D-esterase COG3191 DmpA
  CDS (188074)..(189315): Nucleoside-diphosphate-sugar pyrophosphorylases involved in lipop olysaccharide biosynthesis/translation initiation factor eIF2B su bunits COG1208 GCD1
  CDS (189865)..(190278): Uncharacterized ACR
  CDS (192535)..(192981): Fimbrial assembly protein
  CDS (195097)..(195405): ABC-type multidrug transport system
  CDS (201067)..(201738): Predicted amidohydrolase
  CDS (204472)..(205083): ATP phosphoribosyltransferase (histidine biosynthesis)
  CDS (209476)..(210486): Histidinol-phosphate aminotransferase/Tyrosine aminotransferase
  CDS (212938)..(214239): Anthranilate/para-aminobenzoate synthases component I COG0147 Trp E
  CDS (214807)..(215433): Phosphoribosylanthranilate isomerase
  CDS (244591)..(245055): Uncharacterized ACR
  CDS (251161)..(251265)
  CDS (251557)..(251760): Phosphoglycerate mutase 1
  CDS (270052)..(270306): Uncharacterized ArCR
  CDS (276688)..(277758): Aldehyde:ferredoxin oxidoreductase
  CDS (277759)..(278526): ABC-type thiamine transport system
  CDS (281104)..(282072): Putative periplasmic protein kinase ArgK and related GTPases of G 3E family
  CDS (286543)..(287079): Predicted nucleic acid-binding protein
  CDS (294346)..(294663)
  CDS (298699)..(300825): Predicted membrane protein
  CDS (306190)..(306858): Glycosyltransferases involved in cell wall biogenesis
  CDS (312637)..(312903)
  CDS (320239)..(320928): Integrase
  CDS (321508)..(321696): Predicted nucleic acid-binding protein
  CDS (322012)..(322365): Uncharacterized protein involved in cysteine biosynthesis
  CDS (327013)..(327282): Cation transport ATPases
  CDS (328333)..(328815): Uncharacterized BCR
  CDS (329290)..(330090): Chromosome segregation ATPases
  CDS (332449)..(332736)
  CDS (335068)..(335664): Uncharacterized CBS domain-containing proteins
  CDS (337045)..(337260): Glycosyl transferases
  CDS (342397)..(343461): Transcriptional regulators
  CDS (343888)..(344076): CTP synthase (UTP-ammonia lyase)
  CDS (346174)..(346356): TPR-repeat-containing proteins
  CDS (346528)..(346881): Replication factor A large subunit and related ssDNA-binding prot eins
  CDS (351592)..(352155): Riboflavin synthase alpha chain
  CDS (353923)..(354102): Transcriptional regulator
  CDS (355393)..(355872): Riboflavin synthase beta-chain
  CDS (359407)..(360171): Flavoproteins
  CDS (374488)..(374550)
  CDS (376000)..(376092)
  CDS (394894)..(398109): Methyl-accepting chemotaxis protein
  CDS (408052)..(408807): Cell division GTPase
  CDS (409459)..(409647): Nucleoside-diphosphate-sugar epimerases COG0451 WcaG
  CDS (413926)..(414252): Parvulin-like peptidyl-prolyl isomerase
  misc_feature (414542)..(414542): n is a or c or g or t.
  CDS (414877)..(415209): Arginyl-tRNA synthetase
  CDS (417109)..(417270): Proline dehydrogenase
  CDS (418636)..(419175): Uncharacterized proteins of WD40-like repeat family
  CDS (426547)..(426711)
  CDS (432397)..(432738): Uncharacterized ACR
  CDS (432751)..(433449): Aspartate racemase
  CDS (434530)..(435735): Predicted GTPase
  CDS (440578)..(441444): Uncharacterized ArCR
  CDS (441511)..(441882): Integral membrane protein possibly involved in chromosome condens ation
  CDS (444220)..(444681): Cation transport ATPases
  CDS (450481)..(450996): Rubrerythrin
  CDS (452770)..(453123): ATPases involved in chromosome partitioning
  CDS (455338)..(455502): Cellobiose phosphorylase
  CDS (456838)..(457587): DNA polymerase III beta subunit
  CDS (457618)..(458184): Uncharacterized ArCR
  CDS (458476)..(459126): Peroxiredoxin
  CDS (459718)..(460674): Predicted transcriptional regulators
  CDS (466975)..(467631): Predicted phosphoesterases
  CDS (475702)..(477042): Predicted DNA-binding protein containing a Zn-ribbon domain
  CDS (477049)..(477657): Uncharacterized ACR
  CDS (481315)..(482679): Adenylosuccinate lyase
  CDS (484981)..(485445): 6-pyruvoyl-tetrahydropterin synthase
  CDS (490744)..(491844): ABC-type dipeptide/oligopeptide/nickel transport systems
  CDS (493561)..(495408): ABC-type thiamine transport system
  CDS (527689)..(528324): Protein containing the IMP4 domain present in small nuclear ribon ucleoproteins; implicated in RNA processing
  CDS (528364)..(528969): Multisubunit Na+/H+ antiporter
  CDS (529978)..(530385): Multisubunit Na+/H+ antiporter
  CDS (530659)..(532146): Formate hydrogenlyase subunit 3/Multisubunit Na+/H+ antiporter
  CDS (532615)..(533754): Kef-type K+ transport systems
  CDS (536998)..(537846): Methylase of chemotaxis methyl-accepting proteins COG1352 CheR
  CDS (537847)..(538209): CheY-like receiver domains
  CDS (545191)..(545688): Chemotaxis protein; stimulates methylation of MCP proteins COG187 1 CheD
  CDS (548218)..(548553): Predicted oxidoreductases (related to aryl-alcohol dehydrogenases )
  CDS (563371)..(564303): Uncharacterized ABC-type transport system
  CDS (568711)..(570129): Acyl-CoA synthetase (NDP forming)
  CDS (570898)..(570957)
  CDS (577750)..(578565): Dehydrogenases with different specificities (related to short-cha in alcohol dehydrogenases) COG1028 FabG
  CDS (593914)..(594495): Uncharacterized ACR
  CDS (605506)..(605823): Predicted pyrophosphatase
  CDS (611281)..(612924): ABC-type Fe3+-siderophores transport systems
  CDS (613855)..(614616): ABC-type cobalamin/Fe3+-siderophores transport systems
  CDS (615379)..(616116): Uncharacterized ACR
  CDS (632617)..(633099): Predicted nucleic acid-binding protein
  CDS (633112)..(633933): Metal-dependent hydrolases of the beta-lactamase superfamily II
  CDS (633964)..(634764): Dehydrogenases with different specificities (related to short-cha in alcohol dehydrogenases) COG1028 FabG
  CDS (639553)..(639651)
  CDS (650587)..(651087): Uncharacterized ACR
  CDS (664498)..(665586): Glyceraldehyde-3-phosphate dehydrogenase/erythrose-4-phosphate de hydrogenase
  CDS (667123)..(667176)
  CDS (682717)..(684711): Rad3-related DNA helicases
  CDS (688516)..(689571): Glycerol dehydrogenase and related enzymes
  CDS (711859)..(712440): DNA-directed RNA polymerase specialized sigma subunits
  CDS (721789)..(722304): Uncharacterized ACR
  CDS (725704)..(726249): Predicted membrane protein
  CDS (729844)..(730989): Phosphoribosylaminoimidazole carboxylase (NCAIR synthetase)
  CDS (740584)..(741294): Uncharacterized ACR
  CDS (742684)..(743376): Predicted transposases
  CDS (745369)..(746826): Cobyric acid synthase
  CDS (751954)..(752967): Histidinol-phosphate aminotransferase/Tyrosine aminotransferase
  CDS (753046)..(754110): ABC-type Fe3+-siderophores transport systems
  CDS (758689)..(759645): Ornithine carbamoyltransferase
  CDS (763396)..(764058): Uncharacterized ACR
  CDS (765637)..(766047): Translation elongation factor P/translation initiation factor eIF -5A
  CDS (766138)..(766683): Uncharacterized ACR
  CDS (769459)..(769962): CBS domains
  CDS (771820)..(773541): Chloride channel protein EriC
  CDS (774838)..(775089): Regulators of stationary/sporulation gene expression
  CDS (782329)..(783108): Gamma-glutamyltranspeptidase
  misc_feature (786890)..(786890): n is a or c or g or t.
  misc_feature (786907)..(786907): n is a or c or g or t.
  misc_feature (786944)..(786946): n is a or c or g or t.
  CDS (790672)..(790737)
  CDS (792505)..(792675): Uncharacterized ArCR
  CDS (793111)..(795000): Archaeal Glu-tRNAGln amidotransferase subunit E (contains GAD dom ain)
  CDS (802669)..(802890): Predicted RNA-binding protein (contains KH domains)
  CDS (812635)..(813648): Predicted periplasmic binding protein
  CDS (813652)..(814113): Helicase subunit of the DNA excision repair complex
  CDS (816754)..(817728): Predicted archaeal sugar kinases
  CDS (818623)..(819468): ABC-type transport system involved in multi-copper enzyme maturat ion
  CDS (819475)..(820395): ABC-type multidrug transport system
  CDS (830551)..(832368): ATPases of the PilT family
  misc_feature (839139)..(839139): n is a or c or g or t.
  CDS (840097)..(840471): UDP-N-acetylmuramyl pentapeptide phosphotransferase/UDP-N- acetyl glucosamine-1-phosphate transferase
  CDS (842275)..(842628): Predicted nucleotidyltransferases
  CDS (845725)..(846387): Predicted hydrolases of the HAD superfamily
  CDS (860080)..(860340): Membrane carboxypeptidase (penicillin-binding protein)
  CDS (865387)..(866304): DhnA-type fructose-1
  CDS (868444)..(870222): Carbon starvation protein
  CDS (870532)..(870840): ABC-type dipeptide/oligopeptide/nickel transport system
  CDS (871942)..(872775): Chromosome segregation ATPases
  CDS (872833)..(873117): Regulators of stationary/sporulation gene expression
  CDS (879211)..(880500)
  CDS (887275)..(887487): Uncharacterized ArCR
  CDS (896626)..(899040): ERCC4-like helicases
  CDS (906982)..(907974): Hydrogenase maturation factor
  CDS (909301)..(910116): Predicted glutamine amidotransferase
  CDS (910513)..(912024): Predicted phosphohydrolases
  CDS (914305)..(914493): Histones H3 and H4
  CDS (915118)..(916428): Uncharacterized ArCR
  CDS (931594)..(932070): Uncharacterized ACR
  CDS (934564)..(935379): Small-conductance mechanosensitive channel
  CDS (954301)..(955020): Predicted transcriptional regulators
  CDS (955204)..(956391): Dehydrogenases (flavoproteins)
  CDS (964168)..(964827): Uncharacterized membrane protein
  CDS (966166)..(967002): Translation initiation factor eIF2alpha
  CDS (968134)..(968757): Cobalamin biosynthesis protein CbiM
  CDS (968995)..(969663): ABC-type cobalt transport system
  CDS (970555)..(971892): Subtilisin-like serine proteases
  CDS (995047)..(995112)
  CDS (995380)..(995844): Predicted membrane protein
  CDS (1013371)..(1013883): Molecular chaperone (small heat shock protein)
  CDS (1014829)..(1017228): ATPases of the AAA+ class
  CDS (1017331)..(1020711): Type II restriction enzyme
  CDS (1027657)..(1029558): Threonyl-tRNA synthetase
  CDS (1032406)..(1032792): Holliday junction resolvase - archaeal type
  CDS (1032841)..(1034373): Predicted membrane protein
  CDS (1034458)..(1035498): Cellulase M and related proteins
  CDS (1035541)..(1036101): Predicted Zn-dependent proteases
  CDS (1036636)..(1037469): TPR-repeat-containing proteins
  CDS (1047016)..(1048092): Predicted GTPase
  CDS (1053859)..(1055274): DNA helicase TIP49
  CDS (1060582)..(1061310): Cytochrome c biogenesis protein
  CDS (1061878)..(1063221): PLP-dependent aminotransferases
  CDS (1089160)..(1089210)
  CDS (1096375)..(1096839): Ribosomal protein S15P/S13E
  CDS (1096870)..(1098303): Single-stranded DNA-specific exonuclease
  CDS (1099468)..(1099908): Predicted nucleic acid-binding protein
  CDS (1099954)..(1100991): Uncharacterized protein sharing a conserved domain with thiamine biosynthesis protein ThiI
  CDS (1123810)..(1124472): Predicted subunit of tRNA(5-methylaminomethyl-2-thiouridylate) me thyltransferase
  CDS (1125727)..(1126902): Predicted GTPase
  misc_feature (1128488)..(1128488): n is a or c or g or t.
  misc_feature (1128499)..(1128499): n is a or c or g or t.
  misc_feature (1128505)..(1128506): n is a or c or g or t.
  misc_feature (1128517)..(1128518): n is a or c or g or t.
  misc_feature (1128539)..(1128540): n is a or c or g or t.
  CDS (1144054)..(1145121): Predicted butyrate kinase
  CDS (1146553)..(1148040): Kef-type K+ transport systems
  CDS (1148086)..(1149231): Uncharacterized ACR
  CDS (1150093)..(1151094): Asparagine synthase (glutamine-hydrolyzing)
  CDS (1167001)..(1167234): Ribosomal protein L20A (L18A)
  CDS (1172047)..(1172277): Amino acid transporters
  CDS (1178296)..(1178862): Dephospho-CoA kinase
  CDS (1210174)..(1210893): Uncharacterized membrane protein
  CDS (1211128)..(1211787): Integrase
  CDS (1217374)..(1217490): CBS domains
  CDS (1222282)..(1223655)
  CDS (1223758)..(1225113)
  CDS (1230580)..(1233081): Glucan phosphorylase
  CDS (1254304)..(1255470): Archaeal adenylate kinase
  CDS (1258972)..(1259079): Parvulin-like peptidyl-prolyl isomerase
  CDS (1265593)..(1266390): Sugar-binding periplasmic proteins/domains
  CDS (1284667)..(1285869): Uncharacterized archaeal coiled-coil domain
  CDS (1285975)..(1289823): Type II restriction enzyme
  CDS (1290019)..(1292922): Leucyl-tRNA synthetase
  CDS (1316410)..(1317765): Signal recognition particle GTPase
  CDS (1318585)..(1319298): Adenine/guanine phosphoribosyltransferases and related PRPP-bindi ng proteins
  CDS (1319308)..(1319637): Superfamily II DNA and RNA helicases COG0513 SrmB
  CDS (1365589)..(1366155): CBS domains
  CDS (1366195)..(1367346): Kef-type K+ transport systems
  CDS (1371847)..(1372125): Uncharacterized archaeal coiled-coil domain
  CDS (1373902)..(1376664): Alanyl-tRNA synthetase
  CDS (1382767)..(1384572): ELP3 component of the RNA polymerase II complex
  CDS (1388485)..(1388589): Uncharacterized ArCR
  CDS (1390108)..(1390617): Predicted Fe-S-cluster oxidoreductase
  CDS (1398271)..(1399176): Preprotein translocase subunit SecF
  CDS (1401502)..(1401813): Archaeal/vacuolar-type H+-ATPase subunit H
  CDS (1403824)..(1404309): F0F1-type ATP synthase c subunit/Archaeal/vacuolar-type H+-ATPase subunit K
  CDS (1404349)..(1404960): Archaeal/vacuolar-type H+-ATPase subunit E
  CDS (1407475)..(1408257): Archaeal/vacuolar-type H+-ATPase subunit A
  CDS (1409674)..(1410327): Archaeal/vacuolar-type H+-ATPase subunit D
  CDS (1413235)..(1413960): Cystathionine beta-lyases/cystathionine gamma-synthases
  CDS (1422217)..(1422759): ATPase involved in DNA repair
  CDS (1424266)..(1424787): Uncharacterized CBS domain-containing proteins
  CDS (1434874)..(1435398): Periplasmic ligand-binding sensor domain
  CDS (1442602)..(1444524): Pyruvate:ferredoxin oxidoreductase and related 2-oxoacid:ferredox in oxidoreductases
  CDS (1447018)..(1447827): Predicted permease
  CDS (1451362)..(1452348): L-asparaginase/archaeal Glu-tRNAGln amidotransferase subunit D CO G0252 AnsB
  CDS (1467655)..(1467744)
  CDS (1467769)..(1467906)
  CDS (1471870)..(1472673): Dehydrogenases with different specificities (related to short-cha in alcohol dehydrogenases) COG1028 FabG
  CDS (1484422)..(1486413): Subtilisin-like serine proteases
  CDS (1489417)..(1490157): Uncharacterized ATPases of the PP-loop superfamily
  CDS (1490896)..(1491087): Ferredoxin 1
  CDS (1501234)..(1501755): Uncharacterized ACR
  CDS (1502782)..(1504029): Membrane protein involved in the export of O-antigen and teichoic acid
  CDS (1506454)..(1507683): Putative glycosyl/glycerophosphate transferases involved in teich oic acid biosynthesis TagF/TagB/EpsJ/RodC
  CDS (1513756)..(1514835): Predicted glycosyltransferases
  CDS (1515877)..(1516842): Predicted glycosyltransferases
  CDS (1519816)..(1521600): Outer membrane lipoprotein-sorting protein
  CDS (1525075)..(1526076): Predicted archaeal membrane protein
  CDS (1536298)..(1536771): Predicted phosphoribosyltransferases
  CDS (1536811)..(1537365): 2'-5' RNA ligase
  CDS (1546165)..(1549362): Isoleucyl-tRNA synthetase
  CDS (1552330)..(1553088): Cytochrome b subunit of the bc complex
  misc_feature (1561400)..(1561400): n is a or c or g or t.
  misc_feature (1561477)..(1561477): n is a or c or g or t.
  misc_feature (1561545)..(1561545): n is a or c or g or t.
  CDS (1564489)..(1564938): Predicted nucleic acid-binding protein
  CDS (1570858)..(1571220): RNase P subunit P14 and its archaeal orthologs
  CDS (1578037)..(1579284): Sugar permeases
  CDS (1579294)..(1582596): Alpha-amylase/alpha-mannosidase
  CDS (1584289)..(1585641): Phosphomannomutase
  CDS (1588597)..(1588962): Transcriptional regulator
  CDS (1590298)..(1591578): Threonyl-tRNA synthetase
  CDS (1595017)..(1595325): Predicted phosphate-binding enzymes
  CDS (1599886)..(1600935): Eukaryotic-type DNA primase
  CDS (1616860)..(1617561): 2-polyprenylphenol hydroxylase and related flavodoxin oxidoreduct ases~ COG0543 UbiB
  CDS (1633129)..(1633257): Isoleucyl-tRNA synthetase
  CDS (1634125)..(1634739): Arabinose efflux permease
  CDS (1652842)..(1653462): Predicted site-specific integrase-resolvase
  CDS (1661293)..(1661439)
  CDS (1668871)..(1669944): Predicted GTPases
  CDS (1678705)..(1679553): ABC-type phosphate transport system
  CDS (1680367)..(1681128): ABC-type phosphate transport system
  CDS (1682428)..(1682817): Glycosyltransferases involved in cell wall biogenesis
  CDS (1706986)..(1707378): Uncharacterized ACR
  CDS (1733473)..(1734267): Predicted amidohydrolase
  CDS (1736419)..(1736520)
  CDS (1745650)..(1746300): Predicted RNA methylase
  CDS (1763590)..(1764141): Predicted GTPases
  CDS (1765840)..(1766682): 4-hydroxybenzoate polyprenyltransferase
  misc_feature (1767941)..(1767941): n is a or c or g or t.
  CDS (1770892)..(1772169): Malic enzyme
  CDS (1776586)..(1777293): rRNA methylase
  CDS (1787485)..(1788669): Pyruvate:ferredoxin oxidoreductase and related 2-oxoacid:ferredox in oxidoreductases
  CDS (1789714)..(1790697): Predicted hydrolases or acyltransferases (alpha/beta hydrolase su perfamily)
  CDS (1792792)..(1793328): NADPH:quinone reductase and related Zn-dependent oxidoreductases COG0604 Qor
  CDS (1794964)..(1796124)
  CDS (1816999)..(1817745): ABC-type cobalamin/Fe3+-siderophores transport systems
  CDS (1822105)..(1823073): ABC-type multidrug transport system
  CDS (1823857)..(1824675): ABC-type multidrug transport system
  CDS (1825648)..(1826151): Predicted regulator of amino acid metabolism (contains the ACT do main)
  CDS (1826572)..(1826886): Uncharacterized protein involved in tolerance to divalent cations
  CDS (1829731)..(1830558): Permeases of the drug/metabolite transporter (DMT) superfamily CO G0697 RhaT
  CDS (1831699)..(1832772): TPR-repeat-containing proteins
  CDS (1835581)..(1836201): Sugar permeases
  CDS (1844947)..(1845273): Permeases of the drug/metabolite transporter (DMT) superfamily CO G0697 RhaT
  CDS (1865656)..(1866711): NADPH-dependent glutamate synthase beta chain and related oxidore ductases COG0493 GltD
  CDS (1869643)..(1870143): Fe-S-cluster-containing hydrogenase components 1
  CDS (1872808)..(1873179): Multisubunit Na+/H+ antiporter
  CDS (1873732)..(1874181): Multisubunit Na+/H+ antiporter
  CDS (1876465)..(1876995): Ni
  CDS (1884157)..(1885149): Thioredoxin reductase
  CDS (1886671)..(1887270): Nitrate/nitrite transporter
  CDS (1890634)..(1894026): Predicted drug exporters of the RND superfamily
  CDS (1894318)..(1894365)
  CDS (1896886)..(1897806): Transcriptional regulators
  CDS (1904431)..(1905462): Predicted integral membrane protein
  CDS (1910023)..(1910727): Triosephosphate isomerase
  CDS (1912651)..(1912902): Uncharacterized ArCR
  CDS (1916521)..(1917351): ATPases involved in chromosome partitioning
  CDS (1930573)..(1930920): Putative effector of murein hydrolase LrgA
  CDS (1932193)..(1932927): Uncharacterized ACR
  CDS (1933306)..(1933578): Uncharacterized ACR
  CDS (1947328)..(1948446): Acetylornithine deacetylase/Succinyl-diaminopimelate desuccinylas e and related deacylases
  CDS (1951825)..(1953192): Predicted Zn-dependent proteases and their inactivated homologs
  CDS (1954540)..(1955208): Inorganic pyrophosphatase/exopolyphosphatase
  CDS (1962226)..(1962360)
  CDS (1969396)..(1970652): Subtilisin-like serine proteases
  CDS (1971328)..(1971672): Branched-chain amino acid aminotransferase/4-amino-4-deoxychorism ate lyase COG0115 IlvE
  CDS (1971682)..(1972395): Methionyl-tRNA synthetase
  CDS (1979866)..(1980489): Uncharacterized membrane protein
  CDS (2006536)..(2009136): Inteins
  CDS (2010697)..(2012013): Uncharacterized ATPases of the AAA superfamily
  CDS (2017378)..(2018802): Ribonucleases G and E
  CDS (2025340)..(2025417)
  CDS (2028631)..(2028912): Sensory transduction histidine kinases
  CDS (2038219)..(2039394)
  CDS (2052295)..(2053014): Predicted ATPase (PP-loop superfamily)
  CDS (2066863)..(2067558): Predicted ATPases of PP-loop superfamily
  CDS (2068384)..(2069838): Predicted permease
  CDS (2074012)..(2075424): Ribulose 1
  CDS (2075557)..(2076162): Predicted transcriptional regulators
  CDS (2082376)..(2082897): Pyruvate-formate lyase-activating enzyme
  CDS (2088670)..(2088921): DNA-directed RNA polymerase specialized sigma subunit
atgatcctcgacactgactacataaccgaggatggaaagcctgtcataagaattttcaagaaggaaaacggcgagtttaagattgagtacgaccggacttttgaaccctacttctacgccctcctgaaggacgattctgccattgaggaagtcaagaagataaccgccgagaggcacgggacggttgtaacggttaagcgggttgaaaaggttcagaagaagttcctcgggagaccagttgaggtctggaaactctactttactcatccgcaggacgtcccagcgataagggacaagatacgagagcatccagcagttattgacatctacgagtacgacatacccttcgccaagcgctacctcatagacaagggattagtgccaatggaaggcgacgaggagctgaaaatgctcgccttcgacattgaaactctctaccatgagggcgaggagttcgccgaggggccaatccttatgataagctacgccgacgaggaaggggccagggtgataacttggaagaacgtggatctcccctacgttgacgtcgtctcgacggagagggagatgataaagcgcttcctccgtgttgtgaaggagaaagacccggacgttctcataacctacaacggcgacaacttcgacttcgcctatctgaaaaagcgctgtgaaaagctcggaataaacttcgccctcggaagggatggaagcgagccgaagattcagaggatgggcgacaggtttgccgtcgaagtgaagggacggatacacttcgatctctatcctgtgataagacggacgataaacctgcccacatacacgcttgaggccgtttatgaagccgtcttcggtcagccgaaggagaaggtttacgctgaggaaataaccacagcctgggaaaccggcgagaaccttgagagagtcgcccgctactcgatggaagatgcgaaggtcacatacgagcttgggaaggagttccttccgatggaggcccagctttctcgcttaatcggccagtccctctgggacgtctcccgctccagcactggcaacctcgttgagtggttcctcctcaggaaggcctatgagaggaatgagctggccccgaacaagcccgatgaaaaggagctggccagaagacggcagagctatgaaggaggctatgtaaaagagcccgagagagggttgtgggagaacatagtgtacctagattttagatgccatccagccgatacgaaggttgtcgtcaaggggaaggggattataaacatcagcgaggttcaggaaggtgactatgtccttgggattgacggctggcagagagttagaaaagtatgggaatacgactacaaaggggagcttgtaaacataaacgggttaaagtgtacgcccaatcataagcttcccgttgttacaaagaacgaacgacaaacgagaataagagacagtcttgctaagtctttccttactaaaaaagttaagggcaagataataaccactccccttttctatgaaataggcagagcgacaagtgagaatattccagaagaagaggttctcaagggagagctcgctggcatactattggctgaaggaacgctcttgaggaaagacgttgaatactttgattcatcccgcaaaaaacggaggatttcacaccagtatcgtgttgagataaccattgggaaagacgaggaggagtttagggatcgtatcacatacatttttgagcgtttgtttgggattactccaagcatctcggagaagaaaggaactaacgcagtaacactcaaagttgcgaagaagaatgtttatcttaaagtcaaggaaattatggacaacatagagtccctacatgccccctcggttctcaggggattcttcgaaggcgacggttcagtaaacagggttaggaggagtattgttgcaacccagggtacaaagaacgagtggaagattaaactggtgtcaaaactgctctcccagcttggtatccctcatcaaacgtacacgtatcagtatcaggaaaatgggaaagatcggagcaggtatatactggagataactggaaaggacggattgatactgttccaaacactcattggattcatcagtgaaagaaagaacgctctgcttaataaggcaatatctcagagggaaatgaacaacttggaaaacaatggattttacaggctcagtgaattcaatgtcagcacggaatactatgagggcaaggtctatgacttaactcttgaaggaactccctactactttgccaatggcatattgacccataactccctgtacccctcaatcatcatcacccacaacgtctcgccggatacgctcaacagagaaggatgcaaggaatatgacgttgccccacaggtcggccaccgcttctgcaaggacttcccaggatttatcccgagcctgcttggagacctcctagaggagaggcagaagataaagaagaagatgaaggccacgattgacccgatcgagaggaagctcctcgattacaggcagagggccatcaagatcctggcaaacagcatcctacccgaggaatggcttccagtcctcgaggaaggggaggttcacttcgtcaggattggagagctcatagaccggatgatggaggaaaatgctgggaaagtaaagagagagggcgagacggaagtgcttgaggtcagtgggcttgaagtcccgtcctttaacaggagaactaagaaggccgagctcaagagagtaaaggccctgattaggcacgattattctggcaaggtctacaccatcagactgaagtcggggaggagaataaagataacctctggccacagcctcttctctgtgagaaacggggagctcgttgaagttacgggcgatgaactaaagccaggtgacctcgttgcagtcccgcggagattggagcttcctgagagaaaccacgtgctgaacctcgttgaactgctccttggaacgccagaagaagaaactttggacatcgtcatgacgatcccagtcaagggtaagaagaacttctttaaagggatgctcaggactttgcgctggattttcggagaggaaaagaggcccagaaccgcgagacgctatctcaggcaccttgaggatctgggctatgtccggcttaagaagatcggctacgaagtcctcgactgggactcacttaagaactacagaaggctctacgaggcgcttgtcgagaacgtcagatacaacggcaacaagagggagtacctcgttgaattcaattccatccgggatgcagttggcataatgcccctaaaagagctgaaggagtggaagatcggcacgctgaacggcttcagaatgagcccgctcattgaagtggacgagtcgttagcaaagctcctcggctactacgtgagcgagggctatgcaagaaagcagaggaatcccaaaaacggctggagctacagcgtgaagctctacaacgaagaccctgaagtgctggacgatatggagagactcgccagcaggtttttcgggaaggtgaggcggggcaggaactacgttgagataccgaagaagatcggctacctgctctttgagaacatgtgcggtgtcctagcggagaacaagaggattcccgagttcgtcttcacgtccccgaaaggggttcggctggccttccttgaggggtacttcatcggcgatggcgacgtccacccgaacaagagactcaggctctcaacgaaaagcgagcttttagcgaaccagctcgtcctcctcttgaactcggtgggggtctctgctgtaaaacttgggcacgacagcggcgtttacagggtctatataaacgaggagctcccgttcgtaaagctggacaagaaaaagaacgcctactactcacacgtgatccccaaggaagtcctgagcgaggtctttgggaaggttttccagaaaaacgtcagtcctcagaccttcaggaagatggtcgaggacggaagactcgatcccgaaaaggcccagaggctctcctggctcattgagggggacgtagtgctcgaccgcgttgagtccgttgatgtggaagactacgatggttatgtctatgacctgagcgtcgaggacaacgagaacttcctcgttggctttgggttggtctatgctcacaacagctactacggttactacggctatgcaagggcgcgctggtactgcaaggagtgtgcagagagcgtaacggcctggggaagggagtacataacgatgaccatcaaggagatagaggaaaagtacggctttaaggtaatctacagcgacaccgacggattttttgccacaatacctggagccgatgctgaaaccgtcaaaaagaaggctatggagttcctcaagtatatcaacgccaaacttccgggcgcgcttgagctcgagtacgagggcttctacaaacgcggcttcttcgtcacgaagaagaagtatgcggtgatagacgaggaaggcaagataacaacgcgcggacttgagattgtgaggcgtgactggagcgagatagcgaaagagacgcaggcgagggttcttgaagctttgctaaaggacggtgacgtcgagaaggccgtgaggatagtcaaagaagttaccgaaaagctgagcaagtacgaggttccgccggagaagctggtgatccacgagcagataacgagggatttaaaggactacaaggcaaccggtccccacgttgccgttgccaagaggttggccgcgagaggagtcaaaatacgccctggaacggtgataagctacatcgtgctcaagggctctgggaggataggcgacagggcgataccgttcgacgagttcgacccgacgaagcacaagtacgacgccgagtactacattgagaaccaggttctcccagccgttgagagaattctgagagccttcggttaccgcaaggaagacctgcgctaccagaagacgagacaggttggtttgagtgcttggctgaagccgaagggaacttgacctttccatttgttttccagcggataaccctttaacttccctttcaaaaactccctttagggaaagaccatgaagatagaaatccggcggcgcccggttaaatacgctaggatagaagtgaagccagacggcagggtagtcgtcactgcccccgaggggttcaacgttgagaagttcatagcaaagaacgccgcctggctggaggggaagctggcccagattgaaggtctgaaagagcttgcagagtcgggctttcccctgaacggcgagttctacaaggtcatacacggaaggagggcgaaagttcatgacagctttaggaccgttgttctccccccttatcccgaagacatgcgggaagaactgaaaaggcttctccggccggagatatttgggcttattgaaaaatacgcaggaaaaatgggagtatcccccggcaaggtcttcatccgttcgcagaggacaaggtggggcagctgttctggaaagggcaacctgaacttcaaccttcgcctgatagcccttccgccggagctcagggagtacgttgtcgtccacgagcttgctcaccttaagcacagaaaccactcaaaggccttctggagccttgtctcccgcttctacccggactaccgctccgcaagggaagagctgaagaagtggtggagcattctggagctgaacccgtactggcggtggctggagggaagggagtgacgctgaagggagttttaaagctcctccttctttcagcggacgaaatagctgtcgcggtctttatctttgtagttctccccggatttggggttgatgtgcccttgaaagtatccgttccacttttggtgctcctgctcctcaaggatattttaatcgccccatacgtcctcggaggcggactcgaaaagaggcctttaactggccctgaggctttgatagggatggaggcggtggtcgttgaagacctatctccagagggtatcgtcaaagttgggaacgagctgtggagaggggtctgcttaaacggaagggccaagaggggagaaaaagtcaggatcgttggattcagggggaacctcctactactggaacgcccagagtcctgagaacctctgccagctcttcgggcctgttggtggtgaatgagatgctccagcctttagttctttcaatgagaacgcaggccttccctgggtaagtgtagtgtatcgtcccgctgcagctcatccagccctctgaaattctgacgagctttatctcgtcgagccggatcgtctttctggcgaggagaccgagggcacttctgattttcagtctctcctcatccacttcaatctttagctgcatcaggtcaagggctattgccacaaacggaagaagaaaaacgaggagaaacgtcatgtcttcgcctgccaggtatgaagctcctattcctatggtcattcctaggaaggctgggagcattatgaggagcatcttccagctcctgacggtctcggagtagatggccaccaccgagggattttccactacctctttaaagcccttttccaaaggttaccaggtgataagatggttcggataatgcccgttgacaggctgagcgatgaggaggtaagagaaattctcacaaagtaccggaagatagcgctcgtcggcgcctcaccaaagccggagcgcgatgctaacagggtcatgcgctatctcctcgaacacggctatgaggtctatcccgtgaacccgcgctacgatgaggttctcgggaggaagtgctatcctagcgttcttgacatcccggatgaggttgaaatcgttgacctcttcgttaggccagagttcactatggactacgtggaacaggcgataaagaagggtgcgaaggtggtctggttccagttcaacacctacaacagggaggcgttcaggaaagcgaaagaagcgggccttacagcagtcgctcacaggtgcataaagcaggagcacgagaggcttatcgggtaattccaaggagctcaaggagttctttggtgttcaccacgtcaatctcctctatttccttcagtctcttgtcgttgttccacagggggcttttacttttagggccagtgccacaaagtcagcgtcatctttgtcgggggttattcgagtgctagaggtatgaactcggcgtagaacccctcgtttacgaatatgacatgctctttaagaacggacagtatttcctcgaactctttctctccgatctttgcttttttcaggacttcgtccctgtgctcgtgaagctcttccagtgcaaactcgggacttataagtctccctgataccaagaacacgagctctctggttactgttgatttcccgaagaaagagaatagcacgtttgtgttaactacgagaagaatatcttctctcaaggtactcgccccttcccattttcgccttccgtccgagttctattgcatcctcttctgagagttcggagttcttgagcatctcattgagccttgcgagggttttcagtctctccgcgatagtctttgctatcaaatcggccagcttttcgtccacactcggggggaccttgaccactatgtctcccacgctatcaccgctcttactacgccgctctgcttataacggtttatcctctgtacctcagcacgtggatgtcccttacgaccctgtgcctctcctcgtagtcagggtacctcccgaggacttcaaagccgagcttcacgagccacttcctctccttccggtatattccaccgccgctcagcttgtaggccgggaagacaaagacaacctttccgtttcttttcagaacgtcggcaaagctctcgaagaccgaataatagaagcggtcgagctcgttggccagctttatggcctcgcccctactcgggtgtcttttgaggggctttccgaggtagggttcggtgactatagcatcgaacctctgtctaaaacacttcttcagctttctggcgtcgcagacttctaagtgagccgagtttttgagccggaactctttcctcagccaggtgagattcttcttggcatccctgatctgcccctcgtcgcggtcgctcccgtaggcagtaagcccctgaagaacgaactcctgaaccaccgttccaatgccgcagaacggatccaggaagctcccctttctaacctccgtcaggttcaccattatccttgccagtctcggcggaatcgagaggatgggcttctggacgggcctctcgacgtcgagcttcttcagctcgaaggggtccgttactctgatcgtctcgccgacgaggaagctcccgtcttccctgaacagaaagacgaagtccttaacctccggaaagcccttgaggatgagctccgcgggcatggcatatgtttttgcgggcttgaagaacttagctgacccctcctctttgaacctcttctttatctcgctcccgagcttacgccagagcttccagtcgctcttcccgtagagactgaccgtaaaaagcctggagtactccagctcctccagagcctcttctccctccccaactatcctgacgagcttgagagaaccgcctatccaccggaaatatctctccaccgaaggcttggattcaaagactatccagttatgctcttcctcaatcgatttaacttttagtccgaatcttctcccgaaagagtaaaattcagcacggctgagctctgaattctttcctaagattactccatacatggattgcgctttgagtaagcttttaaaaaggttccgcgtaaatataattgggatttaatcaaaaacatgagtccacggtgaccacctatgctgacggttgaggttcttaaatcagctgacatcatacctgatccatatacgcgcgcggtaacctacgcccggttaggtgagacgcttgtgcgcaggaaggatcccctttataaggaggcgtttttgaaggcgtttgacgcgttgaacgatataaacgatcccgaacttctactcagggcaaccctagccatagggtaccacatgggaaaagctgggatcaaagcgtactacaaggtgtttctgagggtggttgaagattcctctgctttatctcctccagttagagacgaaattttagcacttgccgtcaggtacctagtgagcctcgggaacctcggacaggccgtaacactcgcgacggaaatttcggataagaaacttgcacaggccactctcttctccatagtccgggcggggagcaggttaattcaggacagctccctaaaggcggcctacaagctcaggaaaatcaagctggcgcttgagtatataactgacgagccatatcgctcaaaggccctgatagagctggcaaaggcttttattgcggtggggagttatgagagggcgctggccacgattagggaaatagaatccccagattgggctaaggttgccttcaaggaacttacctttagtttgggcaggatgggcgtcatagacaagttcataagcgggctttctgagctggcggatgatttcagctcgcgttttggtgccgattttgttgtggagcttgcagaggcttttctgcttgctgggaaaccggatattgccgttggaatgctccgcaatcttgatgattcagttcaggtgatctctgaagttgcacttgaggttctggacaaaaatcccgcggttattccgggttttcttgaagttctctccgatgatgaggcacgtatcgttggaaagttgttgatggataaaatccttgagcatccgacaaaggcccttgaggaagttgtcaaggccgtggcgaggagggttagatcagaagccatgtgggtaaaggtcgccaggtactacactctgctgggggacgttgagacggctagaaatatcggggttgtactccagaatcccaagctccgctcgatagttcttgcggacgttgccagaagttacttgaaacagaacaaaatagaagaggccatagatgccgccctcgaagtcagggacaggaagtttgcttccttactaatgtcagaaatactggttagggcactgagcgtggggggaacctgaaatggaagttatccgtctgctgaagagaaagtcccaagacaaggttgagttcgtgcgcgatctggtagttttcatggcttctcccgacgttgatttttccaacgaggttctgtttaaggacgccgttgatgagatatactcaatcctgagggaggaagtcattgaaaatgggaacaaagagctagccagcgcgtatgaaaaagccgttctccttagagctgcggtttttggagaggaaatggatccgaaaaagctccttaagggtattctcgaggagctgaggtgattgagatgctgtatgaaatacccatatcgacgagggagaggctccagataatagatataacggacgaaattcaaaaaatggtttacaaatcaaaggtgaagcacggcatagcggttgttttcacacaccacacgacgaccggtctcatgataaacgaatatgagagcggcctaatcgaggacttcaaggccaagatgaaggagctgatcccgaagggggccggctactcccacgacaggatagacagcaacgcccacgcccacctcagggcctccctgctcctgaacccggaggtcgtcatacccatagaccaggccgaactccagctgggaacttggcagaggattcttttcgtcgagctcgacggcccgaggcacaggcgggtctacgtgatggtctgcccgtgccccgagtttccggaggagtgattacacgtactgggccatgtaggctatcctctcaagcagttcattaaagccctcgtaggtaaccagcgagagtgctatcggctcctgctcaagtctcttctttatgatttccctcagttcctcgacgcgctcccggggaacgaggtcaatcttgttgataaccactattatgggcttctcgtagcggaacttcagcatatggtggagcttctccatccccctatgaaggccgaccgtcgcgtcaaccatgtggataatgatgtcggccgaggttatctcattgattatttcgcggaatttctcctcgctcagaacctttcctctgagctccctctccgggtcaaagagaccggcagtgtctatgagaacgaattcatcggccccaccgtaggggttcttcatgccctttggtatcttaagctttccaaagcgccgccggatgactccctttgttgtccccggcaggttctcgacttcactcactttcccaccgatgagagcgttcataagcgttgatttgccaacgttctcagcacctataatcgcaacctttatcataccaccacccataaagtggtagagcggacgggatataaaggtgatgagcatgaagaggatcaagctgggtcatcactattattacgttgtaacccccgacgacctctcaacgagaaaatttaggggaaaaaacatcgttcttgagggggtcgtggaggacaagcctctcgtggagttccttccgatggagctccccagctggaggacaacgttcaagatccatgggttctccgtcgagttcgcgggaagtccatgcgttggaaaaggggacaccgtgaaagtctacggccgctttgttggggacggaataatagcgaccgccatcgagaccgaaagggccatcttcaccacggaggaatgaccatgctggggcttttcattgagctcggtaacctgaagaagctgaagaggacaggctgggttctgaggggcgttccaaatccggagagcatagccgaccattctttcagggtggctttgataactttcttcttggcagacgagcttaaaaagaggggcgttgaaatcaaccccgataaagccgttcgaatagccctcctccacgacattggggaggcgaggataacagatatcccccagccggccctcaagtacgtggacaagtccgaagcggaaagaaaggccgttgaagaccttctgaaaaccagtccgcttcccgaagaatactaccaactctggcttgagtatgaggaggggagcacgctggaaggccggctcgtcaggttcgccgacaagcttgaaatgctaatccaggcccttgagtacgagtccgccggggcttcaggcctcgacgagttctggaatgtccttgagaacctcaggagtagcgagttctacgggcatttcaaagatatagttgacggcctcgaagacatgagaaaacaaaagcgtttgctttaattcttttgtttacccaaaacgtttaaattacccacttctgtcctctttacggtggttcaaatgagaaaggtcggactgttgctgaccgcggttcttctgctggccgttttctcggccggctgtatatcgagctcttcggaaaatgccaacacatctgagaaggagacaaccctgatagttttccatgcgggttccctcagcatacctttccaggggctcgaaaacgagttctccgcatatgctgagaagaacctcggcctcaaggtgaagttccaggacgaggcgagcgggagcgttatggcagttagaaaggtcaccgacctgcacaggaaggccgacatagtggcaaccgccgactacaccctcataccccagatgctcgtccccaactacacggacttctacgtcctcttcgcgaccaacgagatcgtcatagccttcacagaggagagcaagtacgccgacgagatgaaggcccatccagagaagtggtacgagatactcgcgcgcgacgatgtttccttcggcttctcagaccctaaccaggacccctgcggctaccgctcggtaatggttatgaagcttgccgacctctactacggcaagcccatctttgagacgctggtagaaaagaatactaacatctacgccaacggcacgcacatctacgctccaaaggagattcaggttaagaacaacaggatcgtcataaggccgaaggagaccgacttaactggcctcgtcgagtccggaagcctagactacttcttcatctataagagcgtcgccgaacagcacaacctcagctacatcaccctgccggacgagatcaacctcaaggacttcagcaaggccgactactacggacaggtcgagataacactcggttcgaccgggaagactataaaagccaagcccatcgtctacggtgttacagtgctcaaggacgcacccaacagggagctggcgatagagttcctcaagttcctgctcggagaagaaggcaagaaggtattcatggagaaccaccaggacttcctgaacccgccggtggccttcggaaacgtgcccgaggagataaaggggctggtcgaggttcgggagcttactctaggacaaccctgatgtcaagcttttcaaagtccctgtcaaaggtgtagatttcacctatcccctcttctttcattttcacgtaagccagtgcgtcgtttatgccgaggttcttctcctctgctatcagtgttgcctttaggtagtccccataggatacatcaagaaccttcaggttttccatagttaaaagcgtcaggagaatctcagccgctcttttctttcccgcacggctctcgacgacgtttgcaacttcgctgagatgtactactgttgtgacaacttcctctccctcgcttactctcttgagtatctccttggcaacctccttcatcatgcggacgttctctggcggttccttcttgggtcttaagaaagcgtagatgaagacattggcgtcaatgaacctcatcactcccacagctcccgcttgagttcttcccactctttcagctcttctacttcaacgctgtcgaaaaacttcttcaggttggcctttctccgtggtagaacctcaactctgtcgcccaaatcaacgatgattacttcatcaccgagcttttccctgagttcctttgggagatggagccttccctgcgcgtctatcctcttcacaactacttccatgctctcaccaaaactgatatattcttggagcactaaatagtttttggtagaaatttggctttgtggagaaagcagtttagcttaacaaacccacaactcttaaataagcattcctccaactttggagcgatgcgccgggactacaccctctacctctttgcagcactggggaccttcctgatagcctacatagccgtcccgatagcggttattttcctcaaacaggcctccgacgtggaaatgcttgttaaaaccctccacgatccgtatgtgatagaggccatcagaaactcccttctaaccgcgaccgcgaccgccctgatagcccttctcttcggcgtcccgctcggctacgtcctggcgagaaaagatttccccggaaagagcgcggttcaggctttggtggacgttccgatagtcataccgcactcagtcgtcggcataatgcttctcgtcacgttctcaaactcaatcctcgacagttataaggggatagtagccgcgatgctcttcgtctctgctccgttcacgatcaacgccgcaagggatgggtttcttgcggttgatgagaagcttgaagccgtcgccagaacgctcggcgcttcccgctggcgggcgtttctgtctatttcactcccgatggcgtttccatccatagcgagcggggcgataatgacgtgggcgagggcaataagcgaggtcggtgcgatactgatagtcgcttactaccctaaaactgcccaggttctcatcctggagtacttcaacaactacggactgcgagcatcgaggcctatagcagtgattatggtgagcctgagcctcggaatcttcgtaatactccgctggctggtggggaggaagaacgcttgaggataaaactttaattagagtagcgtcgataacgaagaggggagagctatgataacatctcttcagattgagaacttcaggggcataaaaaagctgaatctgagtaatcttggtcagattaatgtaattgcgggtaaaaacaacgcaggcaagtcgagcgtgcttgaggcgttatctcttttcttggcggcttttggaggaattcagtcagttaagagcgctcttcaagaaatcctgatatggcgcggatggtatggttctcaggctatagaggacttatttcattcaaaggcagaacttgctaggattgtatctacgaagatagatgcttcatgggagcttgtgctaaaaaaggagatgtccggactcaatgcattgcccacccttaaagttacgctaaaacagatcgatgaggagcatccaaagtttagtgcgggatttcagattcataatctagttgacaacaatgtattgtctatatccctgctttcatcaaaatttgaccccagtcttaattttgaattcataactcctctgactctccgtaagtttggatatgttgagagcctctactccattggctatgagaggaaggttgtaaaagaaagcataaacatccttaacgaggcttatcctgaggttgaggggtttagtcccctgttcaaagcaaataaatggatactccacgtcgagaccaaatatggtgtttatccatattacttaatgggagaaggattcaaaaacgcgatgatcatagcgtttctggcatcgcttttaaaggggggataccttctcatagactccgcagaggccttccatcaccccaagtccctgagggtcatgtccaagaccctcgttaaaggggcaaagcaaaacgatgtccaggtgtttttaaccacccacagcattgagcttatcgacatgctaatcaaatatggcttagaaagcaaggttgatggaagggtgatttacatgaagcgtgagaacggaaacgtaaaagcctcaatagaaacctttgaagaatcgcaagaactaagggaaaccctgggattggatctgaggggatgaaacatggagactaggcttttgcttttggaaggtcggactgatgttagtttctttcttcctttgataaaagagctttatggattcaaagaggccaaatgtgaggatcttccagttttagaagaaggtccgaaaaagaaaggactatcacgggcaatctgcctgagtaaagatgatactaggttggttgtgtggcacgccaacggaaaggacaatctaaaaaacgcccttaaattgattttcaaagcgattgagaggcttgaggatacacccgccatcatcgggattgcgagggacgttgataccgaggagagcatcttaaactgggctaaaagcactttgcagagtgggggttttgaacccgatgtaaaagatggatatctcatgataaacgggataaaggtcattccatttggaattggggaagttgattttgatgcaagggacatcgatctaaaaaaagaacttgaactcttaatggctcttctagctaagaaggaaagcagcctctcaaagctagagggttctataagtcagctcaggaaagacttggggagaaagctcaccccaaaggatatcatgcatctcctggcaatcgcccggaactatggtggagactctatgtcgggactgtaccgaaacttcattgagaaactaatcagggaaaacagggagctcgtggaggagtttttgaacgagtcgggattgaaagaattcctaaacgctattgctcggtgagaatcatggttcttatggttgaaggaatctccaaggactaccgcgagttccatctgagggatgtaacgttctcggtagagaagggagagcacttcataatactggggccaagcggtgctggaaagacggttcttcttgaagtgatagcggggataatagagcccgactctggaaggatattcctgaacggggaggacataactgacctgccgcccgagaagaggggtctcgcttatatacctcagaactacgccctcttcccgaacatgagcgtcttcgacaacatagccttcggcctgaaagtgcggaaggttccgaaagccgaaattgggcggaaagtgagagagctctcggaagtcctcggcatttcccaccttctcaaaagaaagccgaagaccctgagcggcggtgagatgcagagggtagcgatagcgagggccctggcagttgagcctgaacttcttctcttggatgagccctttgccaacctcgacgtacagacaaggggaagactcattaacgaaatgaaaaggtggaggaaagagcttggcttcacagccctccatgtcacgcactcctttgaggaggccgtgagtctaggagatagagttggggtcatgctcaatggacggctcgttcaagttggccctgttagagaagtgttctcacggccagcgagcgaggaagttgcgaaattccttggctttgaaaacatcgttgaagggctcgcggagggcagaattctccgcgcaaacggcctcgtgatagagcttcccattgaggcttctggaagaatcagggtcgggataaggccagaggacatcgtgctgtctgatgaacctctgaagagctcgatgagaaacaccttccaggccgaagtccaggccgacgtcgaggagctcggggagctcggtccgcgtacgcgtaaggctaaaggccggtggagtggagctttcagcattcgttacccgctcttcggtgctggagctggggcttgaggctggaaaaaacgtgtgggtgggcttcaaggcaagtgccgtccacgtcttttaaaattgaaaatttgaaaacgcggaagactcattcaatcttggccccacagaccgggcagaacttcgctccttcaggaactatgtggccgttcggacagcgttttatctcgtggccgcagtagggacagaacctcgctccaggtggaaggggcttgccgcagtacgggcatatctcctgctgttgggcctgcggttgggcttgttgctgtgccggctggttctggtatcctgccggaggaactccacctccagcattgggctgggcgggctgagccggggcctgcggctgcatcagctggggaatgagaaccattcctgtgccaaccgaggcgcttccgctctttccgagttcagcagcaacctgcttcgcggtatctaactgcattacagcctgggcgttgccagtctgcattatccagaagagcctctgcctccactcgtctgtcgtgttcacgccctctatcttcacatccacaagttcaaggcccagcctcctgaagtcctccatgagctttaccttgacctgcgtgctgaccatgtcgaggttctggaagaggtcaacgatggaataagaactgaggtgcttcatcatgccctcgttgaagtaagcgcggatgaacttcgtaacgtcgctcgtgtcgtagaggctctggccacctacgacctccgtcaggaactggacaggatcagcaaccttgaaccagtagacaccgtagtactttatgggagcgagctctctcgtctgcgtctcgcctccgtaccttccctggaactccttggtgctgacgaagattaccgtcgctttaaaggggctgttgctcccgccgacgagtttgtaaagcaatggaaggttctgggtcgtcagcgtgtgcctgcccggcccgaagacgtcatagaccttcccgtcgcgcatgaagaccgcaacttcatactcgtggactaccagctgggcgccccactttatgacctcgtttgggtacctccagattatctcgtcctctcctggattgacccactcaataacctgcaccatatcactcacccctcagtattgcgctccttccttcgaggacttcctcgaagttcctcagcatgtcatcgagggcgaagacctccccaccaagtctttgaggatcggcaacggctccggagattgcgccggccttatccctgatcccttcggccagctctatcatcttcgcgtcgtactcgatgagcttctcaagctccttctcctttatcttcaccctgtcaaaaaagccggcgtagcctgcctcggcgtgcttgaccttcccttcgagcatgatcagcctcttcctcatgtcctctatcgccatgagcatgttgcagttcaccattgcgcacctctgtagggccctttcgagctctctccttgcccctgcgagtatctctgctacctttgccctcacaagcctgtcgtcctccctcaggagctccttcttcttgtagccgtggaagccgggaacgacgagctcaagcttttcccatatcgaagtttccttccccataataccacctcaaacgggcatgaagtaggtgttgcccttctttatccccataacttcgctaacaaccctcttgctaacagagccttttgaaaagactcctgcggctccggcgcctccaccaacgaggccgccgatgagtccccagactgttccagcgtaggccgacgctatgattccgagcaccgccccggcaccgataagtccgatgccgaggagagtagtcctcttcctggcctcgctcatcagcggatactccgctcttatcacccttccatcggtcccgtcaacgaagttgacgaagctctggccatcgtactcatagtggacttcccagactgggtagtgcacaagaccctggaagaccacttcaagctcgaactcaccggttctggcgctttcctccctcacctcctgctgcaacgccgtcgttatgtgggagcgggctatctcctccgccttctcccttggcatctccggctcgtagtacttccccttcttcactatggcctcgtcgaagaacttcttccccctgaccgggaacgggtagttcatcaggagcgttttgaagggcgaacctgctggaatcccgagaaagcggacttcttcaacggtctccttgtacttgtccctcccgtggaggtagaagaagtagaccggaacccagtggagctccttcttagttaccctcgcgtccacaatatcggcaggggcaccgtactgtcttgagaggaacttgaggagctttccggcgggatcttccctcataggcgagaagaagaagtgctccccaaccttctcgccgctctcgaccttgaaggttgccccacagtaggggcaggtcgcgaccgtgacggtgtcgggaaccttgaaagttgccgaacagacggggcaggttacctccatcaaatcacccccaaggagccttccctttcaaccctctgcccttcgagggccttactgccggcgacccagccgagggcagctccaccaaccatcaccagtattccgaagaccggcgatgttgagaccaatgccccgccgaaggccgctatcagcgccccgacccctgcccctgccaggtattcggctcttctgaacaggttcatcggctcggtggcagcgactgcctttccatcccagcccgcgaagaccgtctggaatatcgagttgctgtacctgtagtagattgtccacagaggaaggaggatgagcctgacgttctccggttctgatgcgtgtatatcaaaccgctctatcctgtcggatttcgctaaaaagcggttccttatcacgtccacggcgtcttccctcatcatgagcttcgcgtggagctcatccatctccgtgttgaggatttcgagctttattttgctccagctctcctcgtcgaggtcaaggagttttttctccttcggcctgctctttgagaagtgctttaccatatcttcaacgccgaggctctttacttgcctcctggccgagccgaggagtgaaaggttctcgttcaccctctccgtgtagtgcctctcgaccgtgtggcagtgggtatttcctttggaatccgtgtggcactcctgctcgcgcttcatgtaccttacagttccctcaacgtgcacctttcctgcccagtagggggcgtagtgcccttctatcccgactatctggatgtcatcctttatccttctcaggtcgaagtccttctcgaccctcttccagaaggattgggctatcgcgttcttgtcgagggaggggacgatgtagatgttctcggtctttatgttgccacttatatggttcggataaccgcagtagggacagaccgcgattatcgtttcgggagaaacctcaagcggcgccccacagcgctcacacctaaaagtgaactcctccatgttgaccactctcatagttagtaaaggactttagagtttttaaggatattttaaaagaaaaaccgaggcgttatgacgactgttaaactcccattataacatgcctttaacaagctccacgagctcccagaggtctttcacgtagtagtctgctccttcaacctttccaaacctgatcatgtttacggcattaactccagccccgtgagctgctaggacgtcgttcgaactgtcgcccacaactatagcctcctctggccggagattgagcattctgagcgccttttgaatcagatacggattgggcttcaccccgtcgagattcgagtagtccttcccgagaacgaggtcaaagtacttattgaggtcaaaggccctcagtacgaggagggtgttcccaagggaggcgttgctcactgccgcgagcttaaggttcagttttttcagctcttcgagtgccaaaacgtcgggaaaagcctttatcttcctctcggcgagcattttcttccgatatctgttattcgctgcgtcaatgattttccacagttccaccgggtctatgccgagtttcttcacgtaagtcctggggagctccagacgggcggtcttggagtagagctcgtagtcaaggtttattccgtgtttttcaagctcccgctttacccactcctcgaaccatttttttgggtcgtagccctcataataaacgagtgtctcgtcaacgtcgaagataacacccctcagcatttcagctcaccgagcttgtccttaatctcaacgggaaggctatcgtagacctcttttagggcctctatcaagtccttcagctctttggcggtcagcgttgttgtcttcgggccgatttcaaggatgagggcatcgtactccccaggtgagacctcctcaagctcatccagatgttcgctcctccgcgggatgatgttcacctcacctatcattctgccctcccgtatgtgggcttcccgttcctctatggggacttccttgggacagtcgtagcgctcgacgaatatctttatgtccaccacgggcgttccgtcgtgagcatcaatccaatcaatatagagcctgttttcatctattctgtgtaccctgactgtgtagagtgctatcgggttcggtctgtacggtgagcgcgtcgcgaaaaccccagtgagcgggttctttgggttgccgtagggatgaaccttaagaaccctccgcctggcaggggtgtcgctctcgtggaaccacaggacgagctttatccagtccccctcacggagaccatcaatggcccctctgaactcgggaaggatttcaatgaacgtctcatgaagctcctcgtcctttctcacgtagccgagggggactattttgaggggctcgaactccatactcccacctcaaaaatggaaagggagtcaggtgccgtgctcccagctttccagatatttcttttgctcttctgtgagttcctcaatttttatccccatcgaggcgagctttatcctcgccaccatctcgtctatctccctcggaagaacgtagaccttcggctcaagccttccgcggttctccttgatgtactcagcggctttcgcctggagcgcgaagctcatgtccattatctccgctggatgaccgtcggcagcggctagattcacaagcctgccctcagccaggaggtagagcctcctcccgtctgccattttgtactctgtgatgttcggccttggctcgcttatctcaactgcgagggcctcaaggtcaggctttgaaatctcgacatcgaagtggccggcgttggcgagaatagctccgtccttcatgagctcgaagtgctccttccttatgcagttgatgtctccggtggcagttatgaagatgtcccctaccttcgccgcctccatcatgtccatgacgaggaatccgtccattctggcttctagagcccttattgggtcaacctcaacgacgataacggtcgctccaagtcccctcgcgcgcattgctatgcccctgccgcaccagccatagccgacaacaacgacgttctttccagcgacgaggaggttagtagtccttatgatgccgtcccaggtggactgaccggttccatagcggttgtcgaagaggtatttggtgtaggaatcgttgaccgctatgatcgggaacttgaggacgccatccttctccatggcacggagccttatgacgccggttgtggtttcctcgcttgccccccatatttcgggaatcagctcctgcctctccttcaaaaccgtgctcaccatatccgctccgtcgtctatgatgatgttcggttttacgtcgagggccttgtgcatgaactcgtagtactgctccctgtcctctccccttatagcgtagaccttgacccccgcctttgccagagcggcaactacatcgtcctgggtggagagtgggttgctggcagctgccgaaacctcggctccagccgctttcagcgtcagaagcagaaaggcagtcttcatctcaaggtgtagagtcgctgctatcctaacgcccttaaacggtttcctctcttcaaagtccttcctgatgtgctggagaaccggcatgaagcgggagacccagtctatcttcttctccccgctcggtgccagggagatgtccttaacgcagtaatccttcgtgcagtccataaacttcaccgcccttaactcaacggaggagcttaaaagcctctccccgggaaggtttatctgctttgaaaacaatcccctttggtgaaaacgatgggagttagaaagctcggagacagcgcttacctctacccaggaagtccctcgactcttattcggattcatgagggaaatgccgtcctcgttgatcccggccacggaagcgggaggcacaaggacctgaggagggaagtcgggaagctcggacttgaggtaaatctccagctcgcaacccacgggcacgccgaccacgtctcggtatgtccaaagatcgacgctcccctcctcacccatcgctttgagttctcaatagctgaaagccctctcaacagggagattctgacatttggctcaaaggctccagaggggtttctggcctatgcttttccggaggaagtaaaagttcacggagtttttgagtggggcgatgaaatagccggcttaaaggcagttcagctcaacggccactcccctggcatgacgggctttttagatgaggagaacggcttaatttacgctggggactccttcttcggcgagaggctcctccagtcggttggcctgccgtacctcgtggatgttggacttttctggaagtcccttgagactctgcgagagtatgcaggctcaggctacctcctgataccatcccacggaaaatcagtctcgggtgaagaagccattgaaactctcgaattcaatatcaaacgagtcgaagactctgagaagcttgccttggagttcctcagagaacctctgacagttgacgagcttgctttcaggatcatgcgcgctttgggcgttgagcttactcccaagaagcttgccctgaaccttgtgcctgtgagggccctaatagcagaactctacaacaggggagaacttgaagcggtcgttgagaacggcctcaaatgggttcggcggaaggaatagtccgaaaaggtttatatggattagctcaaaatttcagtggtgggtctatgatagttgacctttccctttccctcaatgaggagacgccagtttatcccggcgacccggagataaaggttcgtccgtgggctttcatagatactgacggctactacatgaacgtcataaagatgggagagcactcaggaacgcatgtggatgccccagcccactttgttcccggcggaaagaccgtggatgagcttccactcgataagttcatcggcaaagcttttgtcatcgatgtacgtggtggggagggccctgtcaggcttgaagaaatccccgactctggctattacggcaagatagtcctgttcctcaccggcggcagggagctttccccggaggttgccctcttcctcgttgccgagggagttaaggccgttggaaccgaccacatgacgataggggacgagacgacccatacaatctttctctcagaggaaattccaatcttcgagaacttggcaaaccttgaagaagtccttggaagggagttcacgttcatagcgttcccgctgaagatagaaggtggctcaggaagtccagtcagggccgttgccattctcggttgatttagaggcatacttcctccgagctttcttctccctcaggtatggatagcgcattatgttgccgcagttcagacacgttataacgacgtggggatagggcttgtccctgagtctaaccctcgcgttcacacccgggacgaggaaggagtggcatttcttgcagtagcgccttttccatttcctcggcatccttatcttggccttctgttgaacagaaagggctatttccacgtacctgttggccagctctggcgaatacgggaagaccctctccgcgagtgtgaaaagggtttccaccctctcgcgggctatcctcttcttttccctctgctcctttctcctgatgtcttttttccccatgctaccaccttattagcctgagcttaccctggagaggttcgtaaaggtagccctcgcggaggaggttatctactatctcctcggccttacccttagcaatcccgtactctacaagtgcacttatgaactcttccctcgaaactgtgccgtccttcctcgttgcctctaggtcagcaaagattccgagtgccctgccggcgagcttatcactcccgacgtaccgctcatattccctcacaagcctcagcttctccctttcggggagttcgtttacccagaggtcggtgagttcctggtaaatcccgattaggtcagttatcagcggctttgagagccgtccctccagacgggccattgaacccaacagcctcgctcccagacggtagcgcaggttcgcgttgaagaccttcccggagagggtgagcgcatcgaacagctcgccgtactcccgtctgttctttgcgagaaaactctcaaattttcttccataatccttaagctcccaggggtttagggtaccgagcctttccctggcgagcattacggtaactatcaggtttgggatcagctcctcaagctccctgtttttttcataacttactggctctgtcaggacaaacggcgtttcagccaacagcgctgcttcatcctcgggtcttatccctgctctcggcgtaaggaaagttgcctcctttttctcaaaggttttcagagcccacttcgggactggaacttcactttctagcagggtcttgttgtgggggacatagtaaagggggcccgctcttgatggccgcgtgaacctgaagtctattccgagaagtccgtcgtccttaacttctccccatctgtccctccgcaactgcatctcccaaggaagaagagagtagatgtattttagagcctcccacagggaaagcgtgacgttctttgagccatcgagtcctttgaaccctgaaagtgtgaacccatcaagccagttcgtacccaccacaaaaggtgctgtaaggatggaatacataattgccctctctaactcgtagctggcgtagatagtatccgagactaagttctcaagttcgctttttgacagcgccagcgaacggtagtccttccagtattcggagtagtcagcaggcgatattctcctcgcgtggagcagtctcagagttccgaaaggataagcgtcgagtattccctcagcctctacgtattcaccaggttgtatccttgcgtctattcttgtgtcctcgtttatcttgacgacgaggtaagccctgggttcgcggtagcttttcatctcggagggagcgagtggagagagcaggtagtaaatcccgtctctgggcgcgtttggaggttttctcagaataatgaatcctctaactctgatatcctctccatttttggtcctttgcagggttttaaggaagtctttaacctttctttcaggggttaatgcgggctttctctcaaggtgaattagttttatgagctcctccatcgtgactcgcttgaccgtaaagtttataaagtcatctttggagcaatactcggtacggcggccatagcggcggggccacacccggtctcgtttcgaccccggaagttaagcccgccagcgttcccgggtgtactgccctccgagagggggcgggaaaccgggaacgccgccggccactaaccttctgtcgtaattatctacacaaaagctatttaaattttgaaacgttactgtttctggtcggttgttatgctcggcaaatccaaggggggcaagggggattgggattacatagttcagaatcatccggagataattgaggaactgaagagtttacacaattgggacgagattaagtcgattattcccgaggcggaaaacctaggagcttatcatctgatatccctccaggccatagccgcccttatccgggagcttaaaattcagagggggcaccttagtgagagaatagagaggctgtcctctaatcttgactacttccacagcacccagcgggagcagaatacttcttttgaaaagcgcctgaaggagcttgaggacaggatttccaccctggaacagagaaccctctttatggacagcgtggaggcgataattccccgcatgaacgagcttgaggagaagcttgaggggcttcctgctgagctctataaaaggctggagggcgcctattctcagaagcttgatgaggaaatgaggaagatagttgccgaaaaggttgaggagcttaagaaggagctagagcaggagacgctctcggtgggtgttgaacttgcaagaacactcaaagagattcaggagcactacgaacggctcgtccaggaaaacgtcaagttgaagggccttgccagggaaaatgaagccctgaaaagagagctgctcgaaaaggagagggagcttgaggaactgagaaagagactggcattgatggatgaaatgaccatgcgggttgagaagctgggagaaaagattaacgcctatgaggtccagcttaggaaaatgaaggcagttgaaaagcagctgcttgagattaccggtgccagggatgtttcttctgccattgagataatcaagaaggaattcattccgcgctcgaagtttgagaagattctgggagaggtaaaggcggcagtggcggagatggacgttttaaaggaggaaaacgagagactgcgtagggagaatgaaaagctcaaagatgcccttaagatgctcctccaggagaggacttcgagcgagaacactgagcaggaatcactccttctcaaggaggaggagtcttgagagggcttcctcgactttgtgctttactaggtcgcttgggtctttcatttccttgagcttttcgatgactatagcacgaagcttcttgtttttctccgccagcttctcaagggtctcgactgcactcgcgcgaacaacctcgtccttgtcatttaggagcgcaaagagctttggaaggaacggagtcacatacttaagcccgttatccccaagtgctgcgatgaagttgagggcggcgagcttgtctgcattgttctttgatgtgagcaatattcctatgtctttgaaaactccgctgaggagtgatgggtttgccctcatgatttcttcaagcacgtaagtcatgtttatcttaatctttggatcaccaaggcggtagtttgcgaagattatcggcacaacttttctgacttcctcggggttaatccttgccagtaagccgaatgttcttgctatttcctgagttagtggaacggcctcactcttccgaaccatgaccattagtttcgtaacaagggcttcctggagtgagggtatttcctccattattgcagaaataactctgagtgcgtttttctgaaccgtccagagatcatcgtcgaggagactgattacctctttgaggaactctctgtcgatgatggcccgtgctattatctcctgtatctgttctcctgttgctaggacctccctgaggtccagctctttttccatcttcccaccacggtagagatcggcaaggttttatattaatcttttcattaccttttcttggtgaaaaccatgggaaaggtaaagggtgtttcagcgctgttgctaatcatcgcaatgctgactctccctgccgtttcaagctcggaaaacccagtgctgtggaagggttcggtgtgcagtgatgtccagtatcagaagagcattgaggccgtggcgattgccaacactactgtctacgctgcctgctcctaccgccaggtcgcgaactcctcggggctgataggggtgtactaccttggtacgctctatgcgtattccttaaacggctcaaagctgtgggagaatgcttccggctacgttgtcaagctccatccaatcgatgggggtgttctcgcgggcagtctgggtggattgatactctttgacaactccagcagaatcctctccgtggccaacaccatgggcaagctctacgacttcacggttaaagatggcgtcatctatgcagccggcggtgactactttatatccggcccgaactcttcggtaacctacaggggcagtctctacgccgttaaccttggaaaaaatctaacttttatatggaacgtctccgttgacgacatgctctcgagggtgagggttggaaagggggtcatctatgcctcctcggggttcccatcggggtattctttctcgcaccagtttgggtcgctctacgcgttctccctcgatggaaggcccctatggaacataaccctcggccactgggtcagggacatggaggtgtggaacggcagtgcgctcctgggaacgggctttgacaattcaaggggcgagatttatctggtgtcccccaatggagaagtactgatgaaggggagtgccttctatgtggaggacatcctcgtggttggggacaccgcttatgtctcggggtacaatgggcaaaacggcagtgtgatgtccttgaagcttccgtcgggccaggtgatctgggagcaagagcttccatatagggccaaagtgatggcctactcagacggtctcctcctggttggcgtgggtaagtttgagcagaagaccgagaacggtacaacgtacatctacagcgtcggttccctctatgctcttgacccagagagcggagaagtcgttggaagtgtctctaacaccggctatgtaaggagcatcgcagttctcggtgacagagctgttgttgggactgccagttcggagttctacgtgattgacgtcagtgccctcaagggcaaaaatggaacgtgtgggccggcgggtatagtcctgctggctgtactatttgggcttctgattaagagactttgagaattttgcttttttcttaatctatttgtcgaacaacctgtgttggatatcctgcaactgattggtaataaaattctatgttgaagggtggcaatgtgactggatgttctcttattaatgggcgttaaggctaaataagggacatagtctatacgaaaaagttatatacttttcaaccgctaataaaactgtggcaacatgctcagtcaatatcagcaggctacaatcagccacagaatttccggaggtgacaggatgaactcggtagtaatcgaaccacaggtattgcgctcccttcaccgcagcgagctcagaaagaggatattgatgtatctcaatgagatatacccatccgcaacttacctgtccgagatagctcgggtaatcggctcggacccctccaacgtccgtggggcgctggtgggtcttgggaataggtacaacaacgaaagctccctcgtttacctgggtcttgtcgaggagataagcaggaacggcttcaagtactaccgtctcacagagtacggcaagagggtcgtggactacctcagggagtaccaccgctattatcggcgcttcctgtgaggtggagagatgcccacctccctagttcgcgccgtcgataccaacctagaccttatgaccgagatgtccctattttttataatctcccttggggtaaagcgcggtattttttcagcgctttcaaagcggccgtccctttcaaggttcatggacgaagttaggatcccaaacagaaggctcctttcccgctttctggcgaccctcgacagactgggcatggtcaaaacgaccaacgatcacattgagctggcggaattctctcacaaccttgtcgttgcggcagaacggtacggtgccctggtttcagactgggcatccgttcttgaggagatatacaagatggctgactacgctttcataacccccactcatccccagatccttatggacttcgataaggacgccgacttctgggacatgagaatgagcacctcattttccaacctctatcgtagggctatagccgaagttgcagagataaaacctggcatgtcggtcctggatatcggctgtgggtcggtttctccctcttatttcggcaggctcgttggctacaacggcttttatctgggtttggattactcttatgccctcctggacatagcccgggccagaatcgcgggcgaggccctccccgttgtcctcaaggagattgatgctaccattatacgcccggtgaactcttacgacgttgtgataatgagctttgtccttgagtacatccagaacaggaaaagggccataaaaaacgcccttgagggcctcagggaagggggaaagctcgttatcgttgatcccttccgggacaggtttaagtacgtcccagcgctggagttttttgaggctcttaacaaggactttgtagggtttccctcggtttcagagatagaggggatagtttccagtttgaacttcaaagtgagtgtaaggtctccgagcaggagcgttcttcttctggaaaaattatgagttcttatttttttgtttgtgtacctacatatgtaggtacactcctacttacactaccaacaacaaaaaaggcctttatataatcccgttgtaaagattagtgcaaagaacccctagggggtgcgtggctaatgaagaccagaacaaggaaaggtgcggttggtattggaaccctgattgttttcatagccatggttctagtggcggcagtggccgcggcagtgctgatcaacacgagcggctacctgcagcagaagagccaggctactggaagagagaccacccaggaagtagccagcggaataaaggtcgagagagtcgtcggtaagacagacctcccgtataccaacattggatccgattcaacggagcttgattacataaggcagctcgccatctacgtcagcccgaacgccggaagctcgggaatcgacctcagcaacaccaaggtcattctcagcaacggtgagaaggaggccgttctcaagtacgctggtggaccggatgatgattacgacgcattcaccaagggcgtccagaacgacatttttgacctgtactttaagtattcatcagatggtaccaactggaataatgagcacagtggtctcgccgcttggaagaacctctactacacgggtaccaaccacgacccggccaagaacttcggtatcatcgtcatccaggacgccgacaacagcctcaccgaagactacccgaccctcaacaagggcgacctcgtagtcctcacggtcctcgttggaagccttgaggagtacacaggtaatccttcaaatgacgacaatgctgtctacgaaactggtggcgccaagtacgactacattgacgttaatggcaatagcgatactactgataccatacagggcgtcttcggcgagggaatccccgccggtaccaagatcaccggtgaggtcgttccggagttcggcgctcctggcgtcatcgagttcaccaccccgagcacctacactgaggccgttatggagctccagtgatgtcatttcctttccacattattgaggaggtgagaggccatgtttaggggactgaagaagaggggtgctgtgggaataggcaccctgattgtgttcattgccatggttctagtggccgcggtagcggctgcagtgctgatcaacaccagcggctacctccagcagaaggcttccagcactggcagggaaaccacccaggaagttgcgagcggacttaagattatgaaggtcatcggttacgacccggccgacccgccggccagcggcaagatagagaggctcgccgtttacgtcagcccgaacgccggaagctctggcatcgacatgaagaaggttagagtgatactcagcaacggcgacaagcaggcgatatacaactactacgttccggagagcggaacgttcgtgagtgaaacgacaacgacattgaagctggcatttgcgacctcagagccagactggaccagcgggggaacagggctagacttctctgctggtttgaagatagtgttcgatgcaagcggcagcttaactattgctgatggtaatggtaactcagtgagtataaaccgatttaccattacaaccgatactagcaacaactactatggtgatagcggcaccaacgattacaaagaaaccttcaccactgatagcgccagtaactactacctctactcccagtacgatgcggttatagtcctcttcgaccagaatggcaacgtcgtcggaaagctcccgctcaaggcaggtgccaacaccatagtcgttgaggcatacgacattgatgccagctcactcagcaatatagactacctcgtcatctacaacaaggacttcccggacagcaagataacctggggtgttccgcagaaccttgacaaggcaggcactacggttacagttgtagacgttacgacaaacaaccaggtgaccctcgattcagatggtgacttctctttgggagcaatcaacgttgcggactacaacgaccccaactcaggcacgggagacgtaatgtttgagatagactacagcttgggttctgaaactacccccaagcttggtggtgacgacacagtaacccttaagttccttcaggacaatagtggtaccccgacacctgtttcattagaccttagtgtagttgatgaccaaacatccagtggtaccgactactatatctatactggccatgctgtattctacgcttcagagaacgctacaattgtattaggagacactaagattccgataaaagcgggcccgaacgttgttgatatatacgctgaggacaaaggcaatagtgctgatggaaccgatgtggactacatcaaggtgaccataaacggcgtcagctttgagtggggaacacagggccaagagaataacgcctttagtggaactgtggctcagatcaaggacgttaacatagacgtcatcgacagcacggatggcctctacggcgccgccttcacgggcttcgacaatgtgaacggtggaatcttcggtgacgcgaacggtgcgtgggctgccctcagggccaacaccaacttcggtatcatagccctccaggacgctgacggaagcctcaaggcaaccaccccgaccctcaccgagggcgacatagcggtactcacccttgacgtcaagggaatcttcggcggctttgctccaaggacccacatcaccggcaaagtcgtcccagagttcggtgctccaggcgtcatcgacttcaccacaccgaccagcttcaacagcaacgttatcgagcttcagtgagggggtgatgagagatgaggttccttaagaagcgtggtgcggttggtattggaactttgatagtgttcatcgccatggtgctcgttgcggcagttgccgcggcagtgctcatcaacaccagcggctacctccagcagaagagccagagcactggaaggcaaaccaccgaggaggtagccagcggaataaaggtaacgagcatcgttggctatgcaccatacgacgatagcaacaaggtgtacaagccaataagcaagcttgccatctacgtcagcccgaacgccggaagtgccggcatcgacatgaagaaggtcagggtaatactcagcgacggcagtatcgaggccgtgttgaagtatgacaattcggacgctgacagtgatggaacgcttgacaaagacgtcttcgccgtcggcatgcccgacaacgtgtttgaggatgacaccggcacaacggcctacgatggcgatcagtacatcacctggagcgaactcaacgacaagaccttcggcatcatagtcgtccaggacagcgacggctccctcaagccgctcaccccgaccctcaacaagggtgacatcgccataatcgccgtcagggttggcaattattacgttgacagcaacggtaacctccaggcatactcacccacaccagatggcgtcttcggcgaaggcatcaagcccaacacccacataaccggccaggtcgttccggagcacggtgcccctggcgtcattgacttcaccacaccgtcaacctatacccagagcgtcatggagctccagtgattccagcggctcttctttctccctttcgttctttaacaaccctttggaggtggtgctatgcgtaggaggggagcaataggcatcggcacgctgatcgtcttcatcgcaatggtgctggttgctgcagtggccgcaggggtcatcatcggtacagcgggctaccttgagcagaaggctcaggccgctggcaggcagaccacacaggaggtagccagcggaataaaggtgctcaacgtctacggctacaccaacgccacacccccgagcaacggcacaatagagaggatggctatcttcataactcccaacgcaggcagtgagggcatcgacctgagcaacgttaagatagttctcagcgacggaaggaggctggtcgtttacaactactcgggtagcttccagaacgccgagagcgttaaggacctcttcaacatgacctacgttggcgtgtggaacagcacaaatggaacggccagctttggcatagccgtcatcaacgacataggcagcgagatgcagggaacccacccgacgcttgagttcggtgacatggtcgcgctatgcgtctggacgacgatgttcgagtacgaggataaggacggcataggcccgagcaccaggataaccggaaaggtcatccccgagaggggcgccgccggtgtgctcgacttcaccacgccggccacgttcagctacaacgtgatggtgctccagtgaggtgatgtgagatgaggaggggagcaataggcattggaacgctcatcgtgttcattgccatggtgctggttgccgcggtggccgctggagtgctcataagcaccagcggctacctccagcagaaggcaatgagcgccggcaggcagaccacccaggaggtcgcgagcggaattaaggtgctcaacgtctacggctacatcaacggttcaacacccggcgcccacaatataaccagactcgtcctctacgtcagcccgaatgccggatccggtggcattgaccttgcccacgttaaggtcgtcataagcgacggcaagaggatggccgtttatcgttactacgaccccaatgaggacaaaaacagtgatatccagccagcttacatccactacacaggggacatcgctaacgtctttgcctatgagaagtgggagccgtactataaaggtaagtaccccaccgggtttgaccccaacaataagttctacataacggacaacatcgacataagcgccgtctggtggaacctctacagcgcctacaacaagaccagtaataatgataaggactacggtaaactcctctttggaattgcggtcgttcaggacggtgacgagagccttgacagtgagaaccaccccagcctcagctggggtgacatagcggccattatgctgtggacgttcccgtttgatgataacaacaatccgatcgatggattcggtctgccaccgagcaccaaggtcaccggaaaggtcatacctgagaacggtgcgggcggcgtcatagacttcacaacaccatcgacgtatactgacaacatactggaactccagtgatgggggtgggcttatggcgctagatttcctttcatctttattcaagaagaaaaagacggaaagccccgcccccgaggaagagcacatcgacctggaggaacttgaagaggccgtcgagaacagggaggagaacgaacagctgaaccagcttatggagagggtcaacgagatagagaacgacctcccgaggataaagataggcattgacaccctcaagaagcagatgcaggagctgagggacgagatagacaggcttgacaagaccatcaaagacgtcatgatgctctacgaggtcataagccaggagataaacccgttcaaggagcagatgagccaggaaaacccgctctccagcgaaattcaggacatcagaaaggagcttgaagacctcaagctcgaaatagcacagatcaaaaacgacattaaggtgctcgcaggatatggtgttgatctggactcgatcatatacgaggtcctagcggaggtgtgacgcatggagatggcaaggctcgtcacagaggcagacatcaacgccaagctttcagagctgaagggcaaggttcccagcgtcataatcaacgaactcagggagaagctcatagccagaaaggacaacctcacctacgagcagctggagaagatagtcaagaaggtgctggaaacctacggcaaccaggtgaccaagtacgaggaactcagcaagagagttgacgagctcggcaagaggctgaccgacctcagcatgcagctcaccaggctcgttgagacccttgaaacagcaaagtttgacgtccacgaaaagaaggctgagaaggtctctgaaaaggtagaggaagtccacgagaagatcggaaagcttgaggaaatccttgagggtggagaagagaaggaagaagttccgtctgaggttgttcagaagctcgaagagctccacaagaagatcgaggagcttgaggagaaggtggaagctaagaccgctgccgagaagcttgaagaagcccaagaaaggctcgaagagctccaggagaaaatacgggctggagaagaggtcagcgaggaagagctcgctgaggccgagagggcggttgccgaggcccaggaggaagttgcccgcgccgaggagcaggaaatcgaagaggcaccgattccggcggaagagagtgaggaagtctcaattcctgcggagatagaggaggtccccacggaggagaccgttgaagtccccgcagaggttgttcctgaagaagctcagcctgaggctgtagaagaagttcccgaggttggtgtcgaggaggtagcccccgaagcggaggaagcacctttggaggtgcagcctgaggaagttgtcccggccgaagaggccgctcccgagatggaaatggaagttgaagccctcccgcaggaggaagcccccgaagaggtttcggttgaagaggttcccgctcacgaagttgttgaggaagaaaagaaggaggaaggtggtgttgagatggcaagccagcttcagattcccgaggatatagctagtctcctcttcgaggaggagccgaggaaggccaggcttgagaagcttcccgaggacatagtctcgaccatgatagcgctcaagtggctcggcttcctgattgacagggtcggaatacagaaccttgagagggtgctggagttctactacgagataggctggataagcgaggaagtccttaaccagctcctcaactacgccaggggaacaaggccgcaccacagagacccagagtggaaaccagccgagaagctaactgtccaggaccacctcataagcctgctcttcatcgagaggctcaggggtctcaagataaacagggcagtccttgacaagcttgaaagggaaatcaagatgctcgaaaagaccctcgatgagttctacggaatctgaggcacaaaaatcggggggcggcctatggggttcagcgtgtcagcgagtgcagcgatcatctttatctcatttttaatagccgccagcacactctatactgcatgggacaacacctacaccactgtccaggccgcccgggaggattggtacgagctgaagctttcccagctgaatacgctcgttggattgaacgcgtcggttggagagtattcggtttccatcactaatggatattacaacgtcacgctctacattcagaactctggggacaccctctatgtttcaggttggagcgcgatttacgacggtaaatatgccacgatatacgacgtctccgacgataacgttggtctgcttgattatcgtccatatctgcttccgtcggagagcgttcccatcaacgtgacgaacataaagagtgatagtaccgttcacaacctcaccgtggtgtttgaaaacgggtgttggctcaggatgagctggcactacacgggaagttctgtggtgctcgatggcaccagcgagggttgtccagcggaggtgggatgatggccgcagggggaccagcgagcgagctgataatgttcatggtggcagtgctcgtcgcggggagcgtcgcgggggcactggcctatgtaaccaccgacatagctaacggcatgaacgacagaggcgctatgctcgccgatcagctcaggacagacttcgcgataatcaacgatcccaccaatataccggtagcgggaactgggccgtacacatatacgttttacatcaagaatattggcaagacatccatcccgttcacatccgacgccattcaggtcttcatcaacggggagatcgtacctcccgcaaacctagcctttactgatgttaacggcaactcaataacatccttgcccccctacgaagttggggtcatagtggttactagggaaactgccttaactccaggaaattactacaagctcacagtggttcttgagaatggcaagaagcgcagcctcgtgtttaaggctccatctccgtgagacctggggttaaataacaccttcccggtggtggtcacgttggtcgaggaactactcaagatagagctcaagggagacgagctgcacaggcgccttggcggtggaatccccgccgggacaataatgctagtcgagggtgataggggtagcggtaagtctatatttgtccagaggctcctctacggcttcctaatgaacggctacacggccagctacatctcaagtcagtacaccaccgttgagtacatcaaacagatggagtctctgggttacggcataatcccttttctaatcagaaaaaagctggtttttgtgtcgctttacccccttctctcgggtgtgagcgagaagaggaagtttttgagcaggcttttcggcgagccaaggttgtgggagccaaacgttatgatcatcgatgcgttttcatccctgctctccagggagcaggaccccgatgccgtgagggattttctcctctacgtcaagaagatggcctccctggacaaggtgataatcctcaccgccaacactgaggaaatagacagggactcgctcttcgtccttgaggaagcctcgaccatgctgatccgcctcaacgtcaaagtcttcggcggtgatctgaagaactccgcgactattgtgaagtacaacaacgctaagggagtcttccagaagataatacccttccgcgttgagccgaaggccgggcttatagtagaaatagcggcggtggtgtgatatggcgcaggcggttatcagtgacaccctcgaagacgcaatggcgaggaacccccaccttaggaggtacattgagcagttcagaaagaagtacggtaagatgccggagtttcacgcccagctcagcagggacatgaaggacataccgtatcccaacatactctaccccgtcggagacccaatattcgtccacatctatacggaccccgccaccgccgaaaagcgctacattgtcatagagccgaggatagagagcgctgaggaggaggaaaagtacaagctcatcaaggacaagatactagagcttgcgccgaccagggacatccccgaggatcaggaggagttcgagagattcctcgatgccctcttcgatgaggccgtcctcagcctggcgaagggaaggagggcaaagttcaccataaccaaggacgagatggagaagttccgctacctcataaagcgcgacatcatcggtataggcccgctggagccaatagccagggatccgtacattgaggatatccacatcataggtgcccacaacgtttccctcgtccacaagatattcgagatgatgcagaccaacatagacttcggcgacgatgtcaagctggccgactacttcaagaacatggcggagcgcataggaaggcctgtgagcgacaggacgcctatagtcgacggtgccttgccagacggctcccgtatcaacatcatctactcacctgacatctcaataaagggtccgagcgcgaccatccgtaagttctcggcgacaccaataagcatagtccagctcataggttggggcacgctcagcgccgaggtggcagcctacctgtggattgcccttgagtacggcatgagcgtcttcgtctgtggtgagacggcctctggtaagactactctcctcaatgccataatcccgttcatcaagcctgggtcaaagatttatactgctgaggacactcctgaggtccaggttccccacccggtctggcagagactcataacccgtgagaggggccctgaggagagcagggttacgctcttcgatctcctgaaggcggcgctgcgttcgaggccgaactacatcatcgtcggtgagattcgtggtgccgagggtgccatagccttccaagcaatgcagaccggccacccggttatggcgaccttccacgcgggcgacatcaagaagatgatccagcgttttactggccacccgatcaacgttccgataaccttcatcgacaacctgaacatagcggtcttccagcaggcggtctacgttaagggcaagttcctcaggagaacaatcagcgtcgttgagattgagggctactacgaggagcttggcggtgtggcaacgaggaacgtcttcgagtgggactcggtatctgacagacacatcttccgtggattcaacaactcgtacatcctggagaggaagatagcggagatagcgggttatgaggatcccaaggacatctataacgagcttttcctgagggcaaggatactccaaaggatggtcgagcttggcataaccaactactgggacgtctacagggagatcaaggccttctatctcaagggtatcgagggcctcagcttcaggatctgaggtgatgcaaatgcccgaagagaaagccagcgtcttcaccaaggccgacctaagcatggaggcttaccttaagggcattcttctgccctaccttggaatctcagcggtgcttttcatagtcatcggatttataacgaggattcttcctgttgcccggagtctccaagttttaatgttcttaatcccgatagttctgataatctacgctgctgcctatccgtacgtagtggccgactccaagaagatttcgataaactcgaagatgccgtacttcatcacgtactttgcggttctctccacgagcgagatgggcagaagcgatcttgtggcagtactcgccaaggatccaaagctgggtgcaatagcaagtgagctgaagaaagtccacacgattgttaacaaactccacctctcgatgccggaagcattccgctttctcgccaggagaaccccgagcaagatgttcgcagactttctcgacaggcttgcctactcccttgacagcggtgttgacctgaaggaatacctcttccaggagcagaagaccgttatggacgactatgagaccttctacgagggagcgctttatgatctcgatgttttcaaggagatatacgagtcgatcatcatttcagtcgttttcatagcgtcgttcatcatcatcggtccgatcattacgggaatggacataggcaggatgggcctctacgcgctcctcatgatcatagcggcagaagtcggtgttctgctcgtcgtcaagttcaggatgccagaagacccgatctgggccgacagcaggggaataagggatcccaagagggaacgcatcaaaatggcggcgatttactccagtattggaaccgttatcctgacgttggtttatctcctgtttatcaggcagaggttcagcattcccgagccgttcgtggtggccatggttcttaccccgttctactacctcggaatggtggtcgacagagaggaaaagcgcatcttcaggaaggacgagaacttcccggccttcatcaggagcctcagctcttcccttgccgccagcggtgcatccctcgtcctcgttctcaagtacctcagcgcccacgactttgggtcactcacggacgacatcaaagctctctacaggaggctcgccatcagggttgacagggacagggcttgggacttcttcatcgccggaactggaagctggctcataggaatattctccgagatattcagggagagcctgcacatgggtgccgagccagattacgtgggtctggtcataagcaggaacttcgagaggatcgttaggctcaggaggaagaggcagcagagcatagcgagctttataggtataatctacggtcttactggagcgtttgcttttgctctcgcggcgtcctttcaggtggctgtttcaataaacgatctgttctcgaagatggatctcggagctgccgcgaactacattggcgacataatacacgtgatacctccgactggtatgacttttctgatgtacataatgctgacgatgatggttctccactcattgctctcggccctggttatcaagctggccgatggggggcacatactaggctccgccaaatacttcgtcattctggcttggatattcgccgtcgggatgtatctcggccagaccttgatggcgaggatgatgggcacgagtagcggaggtacagaagttgcccaacttgtggggtatctgctgggggtgatgccatgaagaaggttcttctgtttttaaccctctttttcttggtttctacgagcgttccagtgagttcgctgtctgccgaagccatggtaaagctccccgggtctgttactgttgatggtatcaacttgaggtttggggacctctccattgatggcaaactgatggttgatgtctacgtggacggctctcactacagatcactgactctttcgccaggtgaaaacgtatccataaatgaccttaaatttaagtacgagggtgcgtacattggctctgagtcttttgcggtaattagcttgcagtactcttatttgctcgctggtgataagttggttatcggcgactaccgctttagggttttgagcgtcgatcagaagggttttaagattaacgcgacttataaaggggaaagcaaaatattcacacaatcgagtttcaagataggccatctccaagtaaaggtcaattctaccccgaatgtgtttgacggcattctaaatcccggcgagaacgttacggttggggatcattacgttaagctcgttaaaatatgggcatcaaagtccggcgagaaagtagtctcgggtgcggtgtttgaaattgatggaaactcttacacccttgaatctggaaagtcccagactgtaggatcgtttgtggtggatctgaagagtgccaccatagttggagagctgggtgaggaagactgcgacaactgtaagggatacgcggaggtttccattaatctcctggcagtttctatagatgctgagactgtcccggatgctcagataaagctcagccccggacaaacggcttcggttgggccttacattctgagatatgattatccactgggggacgctgtcaaggcgtcgctcctcaataactgtggccagaagttggcggagggccgccttagattgggtgagatatcctatgttctggcatatcccggtgcgataataggattggagagcatctctgacgaaagtgccgaattcattgtgttcttggatccaagcgagtttccagatgttaccaagactgcaaatctcttgatgtctcttgaagttaaggatacgaaaattaagcagtacgttccatttgacgtggtgcttagggtgaaaaacacgggcagtgtcgctcttaagaatgctctcataactttcgagccctcaaagggcctgaagctcgtttcggataacactgtttccattgactcgatcgccccgggtaaagaggcagcttttacgttcaaagtagttccaattcaaaatgggacggttgagctcgggaaggcctatgcaacagtgctggcgccctttgagctggcttgtggtcagtgtactatcttaactttcacgtccaatactgcaaacgtcaccgttgagccttccaccattaagtacaatgtctctccaacgggccccgaaagcgttccagtggggactcctttcaacctctccattaccgtggagaacaaaggtgacgtcagcatcccagcgaatctaagcataagaatacctcctggggttggtgttgaactctccaaggatatggcactgaaggatggtgcagttgtcgttcccctgagcctcggtcctggagacaaagagactcttgtattagaattggttccatcatctccgggtaactactccatcacggcgcttgttgagactccctacggtgaatactcaccagttaagtttttcttcacggttatctcgtcaaaaacgaccgtgataacaaaaactgaacatgtcactgagactgtctcccctgttgaaacttctcagggcaataagactactgtaactgcaaccataaccaacgtaaccacaactactgaatacaaaacagaaacgacaacgtccacggtggaagtgccttacacgccccttaccacaaagctcctctggtttggggttggtgttgccatcggtgttggggtgatcataggaattgcctggtacatgagcaggtcgtcatgaggatttttatttttctctctttcacttcttatcggtgataatcgtggacttggatgccctctggaaacgaactgttgagaacttggtcagggaagggataataaagagtgaggccgttaggagagcatttctcaaatatccccggtatctcttcgttgaggaccgctacaagaaatacgctcacgttgatgagccgcttcccatcccctcaggtcagactatatccgctccgcatatggttgccattatgctggagcttgccgacttgaagcccggcatgaacgtccttgagattggtactgggagtggatggaatgcggcgcttatctcggagctcgtgaagaccgatgtttacacaatcgagagaattccagaactcgttgaattcgcgaggaggaatctcgagagagcaggggttaagaacgtccatgtaattctcggcgatggcaccaaaggctttccgccgaaggctccttacgacaggattatagtgacggccggcgctccggatattccaaggcccctcgttgaacagctgaaacaggggggaagctgataatccccgttggaagctaccacctctggcaggacttgcttgaggtagttaagaagcccgatggctcaattaaggtctggaaccacggcggagttgcgtttgtccccctcatcggggagtatgggtggagggagtagccttttaagtagactacttcctccatttattcaggtggtaaaatggtcaggctcatagcttttgaccttgagggcacgcttgttaggtcagtttcgggatgggtcgaactccataagaggtttgggacttgggagaagggaaaggagtacgcggaggcctttttcaagggcgagatagactacgccacgtggcgagactggatgcttccctctggaaagggcataccaaagacgagatactggagtgggtcagctccgttgagtacatggagggtgcgaaggagttaatcgagctcctcaaggaaaacggctttaaaatagccatcttgagcagcggacttatgtgcctcgctaagagggtcggcgaagaacttggtgttgactacgtttacgctaacgagctgattttcgacgatgaagggaggataaccggcgaagttaacccggttgttgatttccagggaaaaggcgctatacttcgcaggctcaaggaggagctgaagccggagctgaccgtggccgttggcgacggctacaacgacatcagcatgttcatggaggccgatgtggcaatagccataaacccccatgaaggcgttgagggcgaccacaacgtcgagagcctctacgaggtcagggagataatcgaagagctgatacggggtcagtgaagggcgtgctcatcacagtcagcaaagcaaaagctcttcatcccccggtgtaggcctggcaggaagccccggttcacgtttccccggggagggcgggacgccaggcccagagacttttggtttcaatctttaaaactttaaaggcccatcattttaagctccagccaccagaagatgtccccccagaagtagcttatcaggaagccgaggaatatggcaggtgcaaagggcatcgccttctttctcaggaacctgttttccagcttcccctcttcaacgagcttcttcagctcttcgatctgctccttggtgaggccctcggcggttggtgaggctaccactcttcccacttttggcctaatctcggagaagtcccatgtcgagagtgctctcttgaacctctcaatggtcccttctctctcgcgctttacctcgccgttgagctcgtgaatggtctcaccaaggatatcccattcgtggagctcctcaactgggacttcttccacgaggacttttccccggagtatttttgccgtcgagagaagaaccttcacggcgtaaatagttgcaagcacctttagcagggcgaagagggtcgtatctggctggaggtacgtcaggtagagaacgcccgcaattccgaggatgtcccccactgtgcggtatctgaggaatatcggaaacgcaaggatggtcacgagaagtccgagcaggggtctgttgaggttcagcagggcagtaactgctatcccgaacattatccacagcgttgcttcaattgttgtcctaatgccttcagtgaaaactcttttgatatcttctgtttccttccgcaccaccagtactccaagcgcgtaggctattataaacggaaagaccgcaaggatgctgttgaacagtattgcgactggataaaacgggtatccatcgccgtacggtggcacaatcttggcggtcgggggggccagggggagaagcgcggagaacgcggctagtattactacatcaccgctggcccaggcgccgatgtaatacaggaaaaggccgagtccaaagcccacaaaaagcccaatgagtccggagagcgccaggagaacgtccccgcttttgagtccgaggtataggtagtaaagaattccgatctcggcggagggtatgattatcctttcaatccatctgggaagtccaacgtcctcttcctcctcttcccatccgagcagttttccaatgagctgaagtgttgggaacgcgtggacatcgaagacaaagcccgtttttatgtccgtatatgacgttaaaataccagttaggaggcccatcagaagaggtatcagctccattctatcaccgccatcacaggtcttctaggatttttttcctaatctcctttgtatagtttgtaaccgacttgttcagctcgtttgtcgagttcgtcgccactctaatggctatcgctacgagaacgagaaccgccgcaagcatgaacaggtactccagtgccccctgtgccctgcgcctcattttttgcaccttatattttttagactccaaacctttaaaagtttctatttgagcttatctcggtagggaaaaatgaaggtctacaggctctttgtcaaggacgagtatctaaatttcatccgttcgggtgagaagaggattgaggttagggttgcatacccccagttcaggaacattaggccgggggacaagataatattcaacgactccatcccggccgtcgtaacggaagtgaagaagtacgagacattcagacaggttctcagggaagaaccaataaagaaaatctttccagatgagccgagtttcgaacgggctgtgaagaggtttcacaacctctaccccaaatggaaggagaaccgctacggtgtgattgctatcaaattcaagctcctcggtgaggggagatgaggcacctcgaattcgacgggaggtatgcggaggacatactgagggggaaaaagcgggcgactgttagacttggcaggaagccaaacctcaaggagggcgacacagtgctcatccacgctggtggctatgcccttgggaaggcagtcatagagagagttgagagcaagaccgtcggtgagcttacggacgaagacgcctttctggacggtttctccagcagggaagagctgataagggcgctcaaggagcactataagtacgtaaacgataattcccctgctcatgttattgtctttcggctcattgagaagtttgataggcccgttatgagctctgactacgcctacgagggcaacctgccggttgaaatcgcggaaaaggcccttaaatatctcgatctcccagaggaggacagaaaactgatagagctgttcctcagaacgggaagcctgagaaaggccgcctataggctcggcggattgaacaaaaggtacctgataagggaggccctgaggagggcctatgaagagctgaaaaagaagggtatcatggggccgaaactttaacgctctccaggatcgttatcttctcctctccgtttacatcagttttactcgccgagagctttactggcatgagcttgaacgtgttgccgtttatgatctttctaaggagcctctcaaagtcctccatctcggagtcgctggagaagtccacccttgctatgaagtcgtactctccgtagagccactgcccctcgacgggaagttccctcaggatttcgtccctcacgccccatacgagcagtatcgcctcgatatccatcacctctggtttgtgctcaactgggagttatatctttttccaaagattttctgaatttgtgcccagttgtccaactattttcggtctattgttgtcataatgtcagaaagctcttttaagatatggagaataaggagtgctggtgatactaatgaaagctgtcttctttgacttcgttggcacgctcataacgaaggctggcgaaaacgtgactcacctgaacatagtcagggaagtactgaaaaaagctggccggggcgacctggacgctgaagaagtttggagggcctacgaggaagagagctccgcgctcttctcagaactcgcgggtaaggaagcagtgaaaataagggatgtggacactgaggccatgaggagggtcgctgagagatacggctttacagtgcccaaggacttctgggagataagcataaggatgcacgaaaaatacggccagctctttccagatgcagtggatacaataaaagccctcaagggtatgggccttcatgtaggtataatcaccgactctgacaacgattacatcactgcccacttgaaggccctcggaatatacgacctcttcgacagcataacaacgagtgaagaagctggctttttcaagccccatccgaggccgtttcagctcgctctggaaaaggctggtgtcaagccagaggaagctctttacgtcggggacaacccgaaaaaggactgtgtaggggcaaaaaacattggaatgaccagtgtgctcctcgatccaaatggggaaaagagggagctgtgggaaaactgcgacttcattgtctcaagactttcagaggtcgtggggataattaagggtctaaagggttagggggtcagcaacggcagggctcttcatcgtttgcctcgtttagcgaaattatcatcattcccctcttctttcactccttgagcctctgataggccgcccacattctctggaagaccgttatccacgcgagcacgccgacgatgtaaacaccccacttcacgtactctgccccagcaagggagaacgccatcaggatcaataacctctcagccctctcggctattccaactgcgagcgttcctgagcctgcaagctctgccctacagcgctcgtagctgacgaggtatgcacccataaaggtcaggaaagtcaagcgccagtccgcgaggttgccgagggctattccaaagaggactgcaccatcgcttatcctgtcaaaggtagaatccaggaacgctccaaagcggctcgtttttccagtcattcttgccagcgttccgtcgagggcatctatggcagagcctatgaggaggatcactgcggcgagccttgggcgctggaggtagaagagatacgctccaagcaggcttatcaggaggcctatgaacgttatcgtgttcggtgtgacaccggcttttgctagaggttttacgatggcctcaaggtaacctttgacgttctccctgtacctgttgagcatctctgccacctcattcgagctgaaggaccttcttacctcgctcctgggggactatcttgagcttcgcattatggaattccttcctaaggccggcaccgtcgagcaacctgtctagaaagacagccagagctgcaacctcgctgtggggctggttgccgacggccacgttgtagtccgccatctcatagacctctctcggcaccttttctgcaccgacgacgataaggaggtcttttccagatttcagctcatcctttatgcggggaattgcgtcatcaatgtgtattccgtacatagtgaggtgaactatgattcccctatctttccactctctcaggattttcttccagctggggttgaattcaatttcaaaaggaccgccccagcggttcacaacgtcttccacgctctctttgacatgctcgtcctcttctgcggctattattattttatcggctccaaaggcccttgccgtcagtgctacgtgtgtcgttatcctcttgtccctctcaggccggtgtccaagtctgaggactgcgatcatcttcctcaccctcttagtatctcccagtaagcactaaagtcatccttccatggtacgtcccagtagaattcataaagtgcttttatcgttttctgaatggtgtcaacgtccttcgtactcagcactatgttgagttcatcgttgggggctgaagcgaagaggaagagtgcataaagacgttcttcttcactcaggcctgcgagcaccatatcaagtttggaaaccagctgcgggtgaagccttttccttatgatgccgtagatacgggaatcaaggtttaccgtgaagtccgcagtaacgtcttcgtgttcgtggaggtatgcgtcctccggcatctgagctactattctatagttttcctgtgagatcgtctggtatatccttgggaaatatgggcttgctatgtactcgtccagagttccgatgaaactgtgttttacatcaactatgtaccagccgtctgcagtgtaaaattctgttatgggtcttaaggtacagtcgtctccatcaaacagtgacacgactcgcgcgggaatgtttagggacctgagaaatgccgtgaggagtatttgctcttctgtcgggcttatggcttcttttctaaagattctgccgggatcaagggtagttgtgttttctgagagggggtataaggcatttatccattggtatagcttcagtgctgcatcgtattcggagcttgcattttcaactatggccgttgcaatgggtttaaagaacgaagcctcaaaagccgatgttgagttgaacttgtcttcccagtacccgtcgactattctgttctcccgaaggatgttgtagtattcgccatatgctctgagaaggtcttctctacttgcctcccagggtttccaaatgactttcagaggaaaacttgttattgaagtccctcttgatgttcccaaagtataatggacaattactgacacaaagccctccctgtatgcgtagggggtggatatattgtacttaagaatggcttgatcgtggggatcaattgtaatgggcagttgcgatactgggcgaatctccattccagggagcggagagattttaacgtcaaatatctttatcggagattcgtattcgtttctgactttaagcacaacctgaacgacctccccacccctgacttctttgcttgcattgacttccaaacctattttagctggcactaggttttgctttgtgactgttatcctgaaattcccgtaaaaccccgtccacgttcttttcagctcgtccttaatctcgagggatacctggagagagtatatcccaggtttttcgggggcttgtacaacccatattagctgggtagcctctccgactttcagaactttggggaactcaggttcttgaagaattctgaagtcatctcttgagagcactaaagtgacaccggttattccaacttttccggtgttgtttatcgtgactataatatgaaaaattccgccgggataaaccgaggttttgtccacagaaaatgtcacctgagcgggaggcttgaataggcatcccgacgctaccacaagtaggacaactgccatggggaggacagcacgttttctccatctcatatcaaaccctttaaattctttgaaagttaataagctttgggtgatggcagtgataaccctgacgacggactttggactgagggggccctacgttggcgagatgaatgtggcaatgcttaggataaacccaaacgcaaccattgttgatattacccatggaataacgcgccattccattatcgaagggtcgtttgtcatggagcaggtagtaaaatattcccctaaaggaacggtccatgtgggggtgatagaccctggagttgggacttcgaggcgggctgtaataatccaaggcgagcagtggctcgtcgttcctgacaacggtctggccacgcttcctctcaagcacatcagaccgaggaaggcgtgggcgatcgaggttgaggaactcaggcgcttcacaggttgggaggttagctcgaccttccacggcagggacgtcttcggaccggcgggagcgctcatcgataagggagtatcgccagaagagttcgccgttgaggttccgctggaggatctagtcaaactcgacgtcaagccaaagaatgcgggaaatgaatggttgctcaaagttatctacgttgacgacttcggcaacgtcatactgaaccttgaggactacagaaggccgagggaagttgaactccccgactttggcctgagaatcccgtacctcgacacctacggtcaggtcaagcccggagaactccttgccctgcccggaagccacggttaccttgagatagccgtaaaccagggctccgctgccgagaggctcggacttaaggttggtgatgaggtgagggcgaggctcgtttaaaaatattgaacgaaaggttcaaaaatcttgaacgggagtgttcaccatgatccacaggatcgcatcaacggaaaagagggaaaggattcttgaatacatactggagaaagaggagtttggggttgaggaggtaagtggtgcactgggaatcagcaaggggctggtttcgctttacctcaaagaactccttgggcttgggctgctggagaaaaaggggaggaagttcttcttaaagtctggggcagagctcagggaaacgaagaggttcctcaacttctggatgctcagggataaaattcttccactaagagaagagtggatgctcgccctcggtgtttacggtagcttcgctcgcggtgaaaacgggcccgagagtgacctcgacatatgggttttagttgaaaaaaacgacccgctcaggattatggaattcaaagaggagcttgaaactgttactgagagggaaatcgatcttctcgtgcttacgagggaaaaactggcccgtttgaaggaagaaaacccgtacctatattggggtatcaaactttcctcccttgtcctgtggggtgaactcggtgaggtttgaggagtgcgtagagaagggctatctgaggcgaatggagccccagcgagaactagctcgccttagcattcgcaaggcacgttccttcttggagtcatcccgaaagaaccttgagatggggatatacgacggtgcactcgtaatggcttaccttgcaatgtttcatgctgcgagggctttgcttttcaaagatggatggcgggagaagagtcacgcttgcatttcagcttatctcagggaattctacgtaaaacctggccttctcgacgttaagtgggtgaggtatctggactacgtcagaaacctgagacatcaaacccagtacgacgtgggtttctctccagaccctgaggaaatcacggacatccttccgaagattgaggagtttataggagttgttgaaaagctggtatgagaaaacgttatcagtcctgaggaagacatgggagtggtgggaagatgggagaggtgaacgttagggtagtagtccctgatgggatggaagaaattttcaaaaaggaactttcggtgctcctggaggctctttggaaggccaagaaaaagccgagagtgaaagttaaggacatatttggaatgatgccctcagaaaaatcggcaaaagagctgaggatggagttctatgaagaggtatttggttgattcttcggtcattctggaggccctcagaggaaatccccaggcgaaggaactgcttgagtccttagaagataatccaaagttcataaatcccataatcttcagcgaggttctctttgtgttcattaaacaggtaaccgggaagagttacttgacactcagaaacagcgttagggaaataaatgcatacggagataaaatcgaaaagctctacctcttcttaagggacaactttgtagaactgccgattaccgaagaaatcagcgatatggcctttggttttctaaagaaatacggcctcctgccgaacgatgcaattatccttgccacagccaagttttatgagctttcactagtcactatggactcggattttaagaaagcatcaactgaggagggagttgagtgcgtttgtggtttgggcaatggaggtgattcaaatggttaagcgaggcctcttcgtcggccgcttccagcccgtccacaacggccacataaaggctcttgaattcgttttttcgcaggtcgatgaggtaatcattggcatcggtagcgctcaggccagccataccttgaagaacccgttcacaacgagcgagagaatggagatgctgataagggcgcttgaggaggcggagctaactgaaaagagatactacctaatcccgctccctgacataaacttcaacgccatatgggcgacctacgttgtgagcatggttccgcgctttgacgtggtcttcactggtaactccctcgttgcccagctattcagagagaagggctacgaggtcatcgtccagccgatgttcaggaaggacattctctctgctactgagataaggaggcgcatggtcgagggtgagccctgggaagagctcgttcccaggagcgttgcagagttcattagggagatcaagggcgttgagaggataaagatgcttgcaacgaacctggaaagctcggagaaggagcttcaggcgccgataaggattccagaattttaaagttgctcgggcgtctcttctttttcttcctgataaaccttcccgatgtagcccattacgtcgtgaattatgaaaaagctcatagcggcgtccaccgcgtacaacagcgctcctgatatcaggtagaaaagcgccatcaggaactcaaggccagcaaagacgagtgcaattttaacagcggttctgtttcctttacctgtcccgtatgccagtgccagagcaaacagtgagaacgccagataaacctcggagcccgttcgatagtaatacgccataaacattagcccgtagatggtcaggaggagcgttgagatcataaggggtttaagcctcattccgagtcctcccagtccctatccggatagcagatgtgcctgtaggggcagaacctgcaggcatagctcttccagccctcgggaagacggtcgttttcgtaggctttcttaaccttgtagaagtggcgaagtgtttccttgaacagggatttgtcgtagggcacctcaaaaaccctgaagttggggccctttatcacggggaaagacgagatgtccagcttgttgatgattttcatcggttcttcgtgtagctttatgtaatagaggtagccgtattcagcctccgcccatcgaagatagacgttgagctgggcaaggtggtagtcgtagggcacctttggcaggctggtctttcccttaatctcgattggaaagtctttaaatgcatctatccgcccgtgtatctcgaatccgagcttgctggagcgcaggacaaggtgcttttcgagttcaacgccaaagcgctcctgaagtatctgtccgagtatctggtgggtgttgatgccctggttgagcctgaccctcacgaactccggccacttttgaggatatcccttgagcctgaagtaaatcctcctcgggcaggttagggcctcgctggcgtagaactcgatgaggccgtcgccctcttcgttgccgttcatcgcttcacctccataagcggggcggatcatcggcccgcaaacctccccgcccctgcgtcagctaataccgacgtcatcacagttcagactgggcaagggtcgtcatccgcgaagaaaagttgagggagggaagaatttaaaggttctggtttgaatcagaggacaactcgtcttttccgctttatcgaatagctcagcccgtaggccggccagaggctcggggggctttcatagtggtgcaaattccttaaaaccttctcggcgttcttcttatttctggccttgaccctcagtctgccctcgtcaagctcaatatccgcgtcgggaaggtgtaccacgagcttcgagcccataacttcgggtctggccctcatcaaaagccggcggtagttttcgtaggcctccctgctgagggtctgctccaaaacagcctcttctttcttcttacccaaaaggccgaaaaaccgactattcgggggttcgtcctccatacccttcatcgacctccggttcaaacgttgtctatttttatctctcgccgtttcatcttttaagcctttctcatcgttttttgacgaaacgacggaacccttttaaagctcatccccgtgtttactccgatgcggacgcaggtaatcaagcctcgaatacgggaaatactctcaaaggagcttcctcctgagcttgtatctctcctccccaagcactgggttcagataggggacgttttaattctcccgctaagacccgagcttgagccttacaaaaggaggatagccgaagtttatgctcaagttatcggcgcaaaggcagtattgagaaaaggccacatccacggcgaaacaaggaagcccgactacgagctcttgtatgggaacgacactattacggttcacgttgaaaacggcgttaagtacaagctggacgttgctaggataatgttttcacccgccaacgtaaaggagcgcgttaggatggcagaggtagccaagcctggcgagcttgtagttgatatgttcgccggaatcggtcatctcagtcttccgatgaccgtccacaagggtgctagggtcattgcaatcgaaaaagacccctacaccttccgctttttggttgagaacatctggctcaacggcgttcaggatttgatgacgccgtacaacatggacaaccgcgactttcccgcagaaaacatcgccgacaggattctcatggggtatgttgtcactacccatgagttcatcccaaaagccctgagcatagcgaaagatgaggcaataatccactatcacaacaccgttccagagaggctaaggcctgaggaacccttcgcaaccttcaagagaatcgcaagggagcacggctacgaggctgagaagctgaaggagctggtgataaagcgctacgccccaggagtctggcacgttgttgtcgatatcggggtttacaagaggtagctactccctttctccccagagaggctcccagtcgtcgcagacgaagttcatgtgaacggttttcatgtgcttcctgcatatcccgtggttcggcaggcaggaatctatcgggccgaaccagcggcagttcttgcaggcttttaggttctgattcattgggatcactggggaagaaggggaaataaaaagagggctcaaattccagccccgatgtcctccgcgatgtccgggaggtcgagggcgatgagcttggccttggtcgggattccgtccctgctccagccacgggcctggtagtactcgtcgagcatcctgtcgagctcccacggcgggacgtgcaggcccttgctgactccctccgggatcggctcccacatgatcctgtacgggagcgtgtcgtccttcctgctgaagccttccctgacgttgaaggccctggctatgttcattatcctctcgccgatgaccatcagctctgcctcgccgatgttcatgccggtaacggcctcgatgagctcagggaagccctcgaggaagtacatgtgccttgagaacttgcacgttccggtggcgtcgtagatcgccatgaggttctcgtggaaggctatctcgaatcccttgttctcgcccttcgtcctgtcaacgccgtcgaacttccaccacctgccgacgagctcggttccgtaggctccggctgtgaggtggtcggcaccgcggacgctgaccgcaaaggcaagcgccattccctttatgccgcggacatcgtaagctggcggctccatgcccttgacgtgcatggcgaacttccagctctcctttccaagcctctcgctggccctcttgacaccgtcagcaaggagctttccgaggttgccctcgcggtaggccatctttctgagggcctcaactgccgcctcgccgttgccaaaggtgagctctatgccatcggtgtcctctttggtgaggagaccgcgctcgtaggcttccatggcccatgcgattgtgacacccgcggagattgtatcgagaccgtactggtcggcgaggtagttgagataagctactgtctcaaagtcgtctatttccagcacaccgccaaaggagtagagggtctcgtactctgggccgtcgaccatgaaggtgccccacttcttgctctcgaccttcacgtactggctgcacggcttgttacagagcgggcacggcctccttccagcgcggtacttcggcgcccagaagtaggggtctatgccgatgtgctcccttccctcctccttggctttctcgtaggccttcttgaagaagcccatctgccagttcctgaccgggaaggttcccctctcgcggttcatccagtcgaggaactcgccgcttccatactccatgtcggcctttgtagcagggtggtccttgaagatgagcgcccacttctttatcagctcgcggagcttctctgggtcggctatcgggaccttcttgctacccttgacgaggattcccttgagcttcttgcttccaaggaccgcaccggggccgcccctggccgcctgcctctcgtcggtctcaattattgagatgaggctgagcctctcaccggccgggccgatgaaagcggttgcgtagcctgggtactcctccttggccttgctcctcgcctcaccggtggtgaggccccagtaggcatcggcgggaactatcttaacctcgtcatcgttgataaccagaaggacgggctcttcgctctggccctcgattatgagcatgtcgtagccggccctcttgagctggacgccgagctcggcaccggccattgccctaccgtagccgcctgtgagtggactcttgaagttaaaagcggtctttgagccggttcctatacctgtgtcaacgaagagaccgggtgttattatcatcttgttctcgggcccgagcgggtcggctccttttggaacctcctcgtagagaaccctcgttccaaaaccgacgccgccgaggtacttcctcgggaactcctcgggaaggggctcgactttgacttccttggtggttaggttaactctcagaatctttccccagtatccgcccttggcttccataccagaatcacctcgaaggattttcgaatcaaagattataagctcatcgaaagaagttctgttttataaaaaccgaaacattaagctgttgtgttatcctccagtgtatctcgtactctctacggggctcaatattggatatcgaggagaaacaacatacttcatggaaatatcagcgactagggttccgcgaatctaacactttataaggaagacctctctagattaggcttttcaccaagtttttccaaaagctatactaaaagtgtgccattcttctcgaacttgctcttcgatgagtgtatgctcctatataaggcaagctcgcatgggtttaatattgaaattccccactaattgtgattttaactttctttttagtgccccttgggcactatacggtgagaaaatccttttgaatcaggccaattgaaagtaaaacccctcaaaagttagctcgttagaaacgcatactcctcttccgccatccgttaaggacgcttgaacgacagtgaaagcggcgctgaaactttgcaagcaaagtttcatcaaagtttgtggttcttgtttgacaggtctttcgagaggattttctttttgaatgctgtcttaggttgtgaattccacttttatccgcttgttctctgtgagtttgctttttaattgacgcccgtagggcgtcaaggtgttagaaactccttttcagcgggctgaaacttagaggaattcactgatgtttggcttgagtattttgaaaatccttatagtggagcaattctaagaagaaccacgaactttgatcaaacttcgcgaggaagcttttgtgaaaagcttaccaaaagctcgaatgtcttcttgaagttggcttgatgtagctagattctctgtgatagatgagtagggaagtgcgggttttcttcttttttaacgcccttcgggcgttatattgtgagtaaacccttgaggattgcccaatttatggtgagaatcactgaaaagcaggacactcaaaaaggacattcactctttgatgaaactttgctctgcaaagtttctatggtgggcccgcggggattcgaaccccggacctccgccgtgtgagggcagtctaaacgactgttgggacacctacaaaggccagtttgccgaatggctctcccacagaatagccagaaccacaatgaaagactacatcagcgcgctcgaacgcttttttggtcggcacacaatcagagacatcaaggggctgaaagtctcgctccagcaagagaactacaacgagaagatcgtcaaggggctgagaaacttcgtgaacttcctcctcgacgagggcctcatcaacgagggcactgcggcgctcttcaagaagccgctgacattcaagaggggaacaccaaggcaggttttcatcagcaacgaggagctacgtgaagcctacatcgagctgacaaagcactacggcaaagaggctgaggttctcttcaagcttctggccttcactggcctgaggctcaagcacatcgtgaagatgctgaatacctatgaccctcaaaagctcgtcatcgtgaacgagaaggtcgccaggtacccgatggctgagcatggcaaaggaacgaagagggcattttgggcctacatgccggcggactttgccaggagccttgagcggatgagcataacctacttccaggcgcaaccgaggacgacttacaagagggtatcggcatctacagtgaggaagtggttctcaaccttccttgcgcagagaaaagtctcgatggaagtcatcgacttcatccagggccgcgctcctcgctcagttctagagcggcactacctcaacctgacggttctcgccgacgaggcctacgcgaaggtggttgatgatcttagaaaggtgttggaggggcagactcatgattgatctcatgcctgccctcgacaaagctctccgccaagtcagttggtatacgatctgcatcactctaacttcccttttcattcttgtactcgccatgacacttcttcttttcacggccgtctatttgaagaaatgtgggaggtgatatattttggatcggattcggattgtctcgataaggggaattgcgaggaaatacggccttaatcatatgcgcgtgtggcgcctgttcaacctctatcactccatctatggcgatgatccccgctatgtcatcatagacgccgatggcaggcgaaaaccgacgcagaaattcgaggacttcgtgaaaaagcttctcttgtgatttcttttgttacaatgtattttagctttcttttttgtgagtaacacgttgagaagtctctttcgctcaaatcacttctctcaaattcatagcaaggccgagccggcagggcggccacgcccgcggcgatgaggccgccgagcaaccctccggagggatgtggatgtgaggtttcggaaagcacttggggtattggtagtggctctctttctcgcggccctggcgggcacggcaagcgccgcagaaacacatgttcctaaaatcgacttgccaaagtgggtcatcgttccagaggactcaagcttcagcgacgtgacgctgttctgcgggctggacgcgtacgatgcgagcacgaacacgacaccttgctactacagcgggacgctgacgaatgcgacgatagtgttcaacacgacgacaggatatccgaaactggtgacgggcaaaatcgggaatgcgtttgagttcaaaacaggagcaggagtttccggttcagcaactctttcgtcgcaacaaatcacgattgcattgtggttcaaagtcatagacgacagtgatcgcaactacatcagactttttgatataggagatttggcgattgtatggagaagttcagataacaaaatatacgcacaatggatttctgagagtggtgaaggtaaggcgtttatttcgcagagctcgcttgaacttggcaagtggtactttgcaacgtttgttttgagttttgatacaggagagtcatatatctacatagatgcagatgtagatgctagtacatcaatcacagggggttacacgctgacgtcatcgactttcaaaatacatcctgatacgaatggaggggatgtcatcgttgacgaagtgcgggtttacgacgggaaagcactttcacaggacgaagtcaacctcctctacctcgccggccgcaagaagctctccgagcccgcttcattcagacagatcttcagcccgctcatcgacctcactcgcgaccgtgcgaccttctacgcggggcttgaggtcagcacgaccgacccgagcggctacgtgcccgttcctgagagcgcggtcaacatgagcatcacgagcgccgagaagctcaagagcgactacaccaacgccgacttttactatcagggtcactactggtaccgcgccgacaagatccagttcaacttgccaattcagttcgagaccatccgcacaaatggcgactttgatgacgtcataatccttgacgaggatcaaaagacatacgtctatgagcgcgagttcaaagtcacaaacccaaccggtgcaaagctgaacatcgtgtactccctcgatccaactgcgctcggtttctccgtgctccagtacccacagtttgaacttgacggcgtccgcatggtttcctggaggcctgatgagaactcaagtcagctctacctcatccgcaccgacacgcttgagcccggtgagatcagtactcactggatcagaagtatctggacgctctcgaaagaagagctgaacttcccggcgaagctcgaagactttagaaacatcctcgactggcagactgcgcagaagatggccgagaacgccgtgaaaggaaaagccgacacgtgggtcaaggtcatcaaggtctcaagcaacgctgacgtgagcaacgtcactatttacgtgccgctcaaggatgtcgaagacactaacgacgtcattgaggccgtcgccttgacaggctcaagagagaccctgcaggtcgaagagcttgaggacggcaccattgcggtcaaggttccagccgatgcatttgtttctggagaagcggaaatcaaagtcttctacaacaaggaaacctcgtggtggaagagcattctggacaggattatgggcatggtcaagatgatcaagagctttttcggctttggaggtggctgacttggttgtttgcgccacccggaaaactcacacgaatggaggttgatagaaaatggttgggtggaaaaagcccctcgggctgtttgtagcccttgtagttgtgttttccgtctttgccgtagtgagggcagcgaccatcaccgagacggagtgggggaacgcaataaccgatcctggcattgagctgatccctggctatccggcgactatgaacgtcacaatactaaccagctctggcgaacccttcgcgctgagcagctacacgaacgccgacacgcttgaggttaccgcaaagttcgtcgatgaatatggaaatgctctcgacatgaacggagacagcgttgctgacgtctacaccttcacgaacacctcaacgcctggcctttggaccgctacaataaacgtctcgaacgtcactccgggtgcgtacactctcaagatcgaggcccttgcaaagaacagcacaagtggcgaaatagttgacaacgcaacccttgagctctccgtttggatcgccggtggcccgtattgggttgccgttgctgacatcaaggacggcgatactgtcgaaatcggaagtcttgagtttaccatccgcgggctttccgaccttggagcgattctagacctcggaaacctgagcaccaccacgatcacggacgatgaccgtgatggcatctttacctggaagaacgacgtcacgagcgatggagttgacgactggattgtcttcgcaaagagcgacgacgacagcgacagatacgtcatgatggtctactccagcgatgcaaacctcctcgacgacttcaaccttgaggacaagttcgaggttaggagtgacgatggaagggtcaagttcacgaacaaggttttcaaagagtacaacaactacaaggcatacgtggtttgggatgagagtcttcttgcaaagctcggcatcaaggctgttgattactacatcatacccctaaagggtagagagcactggaaagagggcttcggaaatgttgacagaaccgacgtcaaagtcataaagagaacaacatacctttggggcttgtttggtaacgaagaggaggtttacagcggcaacatattcaataagaacgtgaacatcgacgacataataacagttttcggaaagtgggtcggcaattgggcgagatttgcgtggggacaatgggagatcacaaaggggcttggtgacatcacaattccaaacagctacagcttaagagaaaggtcactaaatgagcttagcgtttcaagcgaggactttagaggattcaatcccatactacagccaagtgggcgcggcctcttcaagccttcactcgactggaagtccatcctcggccttgacgaggacgaggactctacaagctcttgaaagggggcctgattaaatgagggcccttccagtgatttccattattttcattatgcttctttcaaccctcagcgttgcagtagctgacagcagctccaacgagaccatcagcacgcctgctctcgaaatgccatcactcacaatctcagactatgtgaacaaggcccttatcgccttcaaagcctggcgcttcgactcaaaaggccttatcaagacaaacacaggcatctatgtcgacgagaggttttgggactggctttcgggttcaattcaggagagtgctaacctcaccgatgctgccctaaagtgggctcaggtcttccaccagaaagtccagaacgatgagccgattcagtggattttcatcacctggacgaagccaaatgaccggctcaaggaggcacttgaagccctcggtgctgaggtactttatgttgatgacgacatcaatgcaatctcactcaaggcaagaccatcactcatcaaaaacctcgtttacagccaggcttttgacttcgactataggttctacatccgcgaagtttggcccgacctttacgtcgagaccggcccgactatacttgagaacgagactacgttcacgcctgccaacgtcacgataactcctgaacaggtttccggcgcaatctggaacatcaagctcgttaaggctgacctcgcctggagtaaggaaggaatcaccggcaagggcgtcacggttgcggttcttgataccggtgtggactgtgaccacgtgatgctccagggggcttgtgtgggctttgagaactttgtaactgacgagccggcaaaagatctgaacggtcatggaacccatgtagctggcattatcgcaggaaggcctactaaggttacttgggaagggaaagaagtttatgtaagcggtgttgctcccgaggccaacattctcgcggtaaaggttctcggccaggacggcggcggcacgatgacgcagatcatccaaggcctcgactatgttgttgagtggaaaaagaagcaccctggcgagccgatagtcatctcaatgagcttgggttccccatttggaagcccaagagacccaatggttcagaaggtcgagcagatcatcagagaggagcacatcccggttgtcatcgcggccggaaacgagttcgcggtcattgacagtccaggcatagctactggagccatcactgtggccgcggttgacaggaacatgaaggtggcatctttctcaggaaaggggccgggcctgaacatctacgacatcaagcccgacatcgcggctccaggagtcaagatactaagcgccaaggccgggacgagaaacgagttcatagccatgagtggaacatccatggcaactcctcacgtgagtggcgtcgtggcgctgattttacagaagcacggagacctcacacctgagacgatcaaactcattctcgagaagacggcctatccgctcgatggcattgacgccctgccaacgtggtcaggagccggagtcgttgatgcctacgccgcggtcaaagccgagccaagcgaaagtggagggctcatcgacttcctcaggaggttgctcggatgaagaagtttatcatctttctcctggtcatcctcctctttacagcgttcctcgtaggcttcaacgagttcatcaagaacgtcagtcttgcgatagcgatcgcccttgtactccgcatcgttgacgaggttgtggaggactgaactatgtggggtttggaggacaaaccgctcccaattcgtttagggattgcgatcatcgcggacgtcattgacgctctcaacataataccaggagtgggcgacctcatcgaaactccattcaacgctttcatcgcctacgccctcaccgacaacccaaaagccgcagtggtgggtggagttgacggtatccttccagcgccaatagactggttcccgagcgccacggtgatggtgatagccgacgagctcggctggatctgagttttcgtttttccttcttgcgagagaggtgagaaaaatgggactgcttgcgatcatattcctcgtattcatcatcacgtttgcacttgcgacgatgtggtattccagcggtgaggcagcgttcttcatcacgttgggaatagtgggccttgtcttcttttgggatctctcgtccaatggaggccagttcctggcaacaccactcattatgatcggcgactggctcggcatcaggctctggacggcactcttcctcttcctgacgaccttaggtggctatgtcttcggaaattggggaaaagccatcgtcttcctcgtgctggcattgatcatcctctatgccctcggcctcctcgggccgatagcgagtggcgacctgagcgcgatcaaggatgccgtccaggtcggaggtggtaagtgatgtacaacccttccctcgccgccgcgacctcacaggcagtcatgctgagcgtcttcgttgtagttgcagcgttctttgcatacttcatcgcctcaagaagggctgacatctttggggccatcctcctcatgctcctctccatattcctcgcaaagaactactattatctcgtctacgccgccggcgcgatgcttgtcctcgctactgtcgcgtacatcaccagctatgatgaagggacagtatccggggcgctgttttgggccggaataggcctcttcacctcactcatgatattctacgttatgcccgagacaatcaagatgggccaggatcaggcgtttgtctacatcgtgctgattccaagcttcctcatcgtgctcatcagcgactggaagggaaagttcaacttcgagtgggagaatgcgctcgccatcctcattccagtggcctttgccctagcattcgtcagcatggttggggtgtcacacatcatttggggagcggcgatcatgcttttcggtgtcatcctcgagtatcttaacgcaggcttcgcctcaacggttgcttttgtctccggattcattatttggcttgatgacgtcattgggtactctctgtatccaaactatggcaatactgcggccctccacctcctcggtcctgtaggagctagcctcgtgctcatctacatttatctgctcgtgtggggtgattgaagtgaggaaaaaagtcgttgcagttgcagttttgtttctggttgtaatggccgggccggttggagcctggtcactgaaagacctcctcaagagtactgccgacaaggccctcggtctcttcaagagggaagtcatgccggtggacggctataaagggctcaagcctggcgaaggcttctggatcgaaggcgagcacttctggaacccggactactacgtccagcttaacgagagcaaagtctactggagctatttaatccctaccgacgtggatgtcaaggtgagggtttggaaggtctattttgggatatttgcttttccagtcgaaaacgaccagtatgccgacatctggtggaagaaagcaccagtcggcgacggttggatcggagcgttcttcgtgcggggcttcagctggaggccaggacgcggctggagagatgctgagaaagcctatattgcctacaacctgccgagcgcacaggacatgagcgtggaaaataccacagcgctccagaacaccacgatacagctcccgatcaaagtcgagaacgtgacttttcgccacctgattggtggcctttacttggtgaaaagggggtgatctgatgtttggactaactttcctgaacctgagccctgaggcagcttttgcactcggcatgattgttgggctgctcctgatgtgggcaattgaagaagaccttggaaaccaccgcaaggaggtaagcgcatgagcctgaagagtggcgtcctccttgcactcgcttacattgtacccttcgccctactcctaccgccggactcgacaaactcaccaggagcgatctttctgtggttcctctaccctataacctcaatgatgatcatggtcgccgttgccatcactgcctggaaagtcttcaatgttgactttgtgccttggggtctgctcctcctctttggctcgccgatcctgacgctcctcttcagcccgatcttcagcctgatgtggggcttctacatcgtgcccaccgctttggtattcctggtcggcctgatggagggtgattgagatggtcagcaggaaggtgtacctcaagaggaagcgcgagatccttcaccgagtcctcacgaatctccagaaagagctcgcgcgcgtgaacagagaactgaaacagcttgagaagggtgatagtcatggaagccgcgcctgaagtccgcgaggacatccgcgccgagctcgcggcaaaggtcgaaggaaaagacagtcagaaaagcaggatactcaagttcacactgctcggaatcggagccggaatagccgtcgggctgatcatgctcgccttcccgggcttttacgacacgctcgtcaagattcaccaagccctggccaagcctcgttatagcttctatgtcctcattggctcgatactcttcgtcgagttcatgagggccacgtgggtcgagagtgcgaaggcccgctcaaagaggctcataccgctcacatcaccagaaacggaaatttgggtcaaggaaaagccgcttcttggaataaagctaccgttcacatcaaaagaagtcaaaagccgcaggataaagccccacattgtcgagacagagctcgggtggagagtctatccgaacaagtcacttctctcacagcagtgggatggaacagtccacttcattccgggcgacgcaatattcggctatgggaacacgagaataatcgcagcaaagaagccgagcaggccaacctactacgaggttgacaaaaccactggagagcagattccagtttacgtttgggaaccggtgaacattggagacgaactatacctccgcgccctcaaggagatagaatacctcaaggcagagaacaccgcactgagggcctacgccgagaaaggctacgaattagccaggacgatcgcggccctgccaagggaattcttcgacagcctacgcgagaagggctacgaggacgcgctgagaatcatgaaggaagtcctcggaaagggcttcttcgcagagatgggcaagatgaggaaagaagagctgaccgccatcatagacgcactcaaaaaggagggagagctttgacctctcccatttttgccatccagaaaggggcatcgggccaagtagggattccgaacggtccggccccctggatggccctattcgggccagaacaccgcggaggtgagttggcgtataccccacgccaagttgacgcatcctgactgaggaaaagaaagggggtccatacggtggtagtgggaaactcatcaaaagggttagtggagagtatagatgtcattatagagcgctctaagaacgccaaacttacgccagagaagaagtacattgacatagctaagacagtcgccaagaaggccgaggcaacagaaaaggaagccaggggactgccgaacatctacgtcaccaggaagctcgagctcgccttcgaaaccatcgagcgcctgaaagaagccctcgagtatgcatttaaaggcatctattctggcgaggacgttgaagagaaaatcaactcgatgaggcgcgtttttggaaggaaagcccacctgaggacgaagatcctcatgacactactaatccatggagagatgaagtcccaagatattgcaaagatactcagaaaggacgaatcaacaatcagcaaggcgatgaagttccttctcctcgagggctacgtggtgaggggtgagaatggactaaagctccggccagggattgaagacgccttgtgggagcttttcgacgacatcttcggccagctcgaggagatacttcttgagcagaccctggagggagcggatgaatgagagcgaacctcgaggagatctggccccgggacgtgctggaggaagacttgcagagatatgaagaaaaaacttcatattcagagaacccgctcctgacctttggcctcaccaaaaggggcaaactcgcctatcctctgagcggcccaagccacaggctcataatggggcagactggagccggaaagacgaccctcgcccaaacactgatggaaatcgacttcctgaggggccgcaaggtcttcgaaatagaacccgcgcttgaggccaaatcagagcgagctttcatgaacctccccaacaacgacagcaggatgcgccgagtcctgctcgaaaagttcgggattgatattgaggacctcaatgagtggccattcagggccgttgtgtacagccctgcgacgccgagattcatcaacttcctccagaagtacgagaaccatccaggaatagagttcttcaagccgctaaccttcaccgaggccgacctgattgacatcatcgcgaggacgctcccaacaggctcgattgagggcctgatcgttgccgatgcatatgaccagtacgtcaacacagtcaagaagcggaagaagaggaacatcgaggagttcaagaactacgtcaaggagatcggagaagggacaaacgtcaacatagacaacacactcatgaagatcaaccgcttctaccatgtcctgaaagggctggaagtcgagaacggggttactctcaacgagatgatgaagaacccaaaggagatcagcgtcttcacaacacacttcatcgagaggcctgaagaccgatacatatggacctttgcaatactcgtcacggtgtactcaaactggatcggcaacctcaagcgcgactacctcatgagcttcttcgtcgccgatgcaaacctcctcgctccaagttcaccaagagatatcatcgagaaactttcctacttccagactctcatgaggcaggaacttcagatctacgtgaagatctcccgtggaaagaatatggcctggacgcttgacacacagagacatgacgatctaagcccgagcatcgtcagcgagtgcaaggagtggttcgtcaagaggatgtatgctcgggaattcgcccaaaaacttggggttgagccgaggcttctgaggacgctctcaatagagaaggcaatctacgtcgggccgctgacaaagtacaaagtgctcctacggcccccaatttcccgcaaagccgcggctggagagtacgcaccaatccacttcttagatgcttatgaggggtgggagaatgaggaagctaacttttagcctgatattcatattatatataatgggaactcttggatatgtagcggcgtatagccaagccatcaaactccatgtcggcgatgaggtatatattgatgatatgcacatatttatagacaagagcagagtggacaaccgcaccgctgcggtgatcgagtaccaaaactcgacgttcctcgtatttgaaggccagaacaaaacaatcggaaactacaccatcgaggtcatcccattcaaggactacgtttacctcatgatctccgcgcccttcaacttcacggcgaggtttccagaagaagagaacctgactgccagcaacgtgaccgtagcgaaccaaaccaacaccaccgcgccggccccggcgaacctgacgaactccacaacttctgagccggccaacatcacggccaattacacctgctcaagcgtcgaggagtgccaggcaataatagctaaactcgagaacgagcttgagaaggagaagcaagagagagctgagcttgagaaacagatagaatatctccgacaacaagccacattttgcaacatgacacaagtagagaacgagcagctgaagaagcagctcagaatactcgagcaggccctcgaagagaagaaccagcgcatacgtgaattagagagacagatcgaggaactgcaggcgcagcagtggagttgggaaaccttccgcgagaagagcgaggaacagtacctcctctggacgccctatctcttccctgtcgttctcggtgggctggtcgtctattacaggcgctacaagacaacgaagaagtacgccgaggtgatgatcgaccagaaggccagggagctcaaagaggagctcctgagcgagtacctgaagaaggatctcctgagggccaagatcgagaccatcgtggacgacccgaacctgctcgtgattctgcgcacgataatcccgcagatcacaggctccacagaaatcaccaagggcgacatcctgaacattgacatcgaccaggtcgccgagctcgccaggaagaagttcctcctcaaggagaaccgtgttgaatacctcaagaagaagctcgccgagctgaaggaagctataaaggaggaggttggggagaatgtttgaatggctcctatacatctccctcgcccttggtttttggctcatctatgagatagcaaaggacaaagtccgcgggcccggacgctactggatcaccctcaacgtcgagggagacgccgagcgcgttgagtacctcatcaagcaactcgcaaaggaccagaagatcaagatccgcagtttcaaaatcagcgccgaaaagccttccacatcaaagaggaaaaagttttttggacaaaccactaaaaaagaagaggtggattcaaaatgaagcggctagccgcctttctccttttcctcctcgctggtaccatggtgccggccgggatagtgggagctgaacagcaactcgtcacaacctttcaagtaacagctggcaagacctggacaaaggaaatccctggcgccatcgtgaactggactggcacatttgactactcaaaaagagacgggtgggaagcagctttctcggtttactttacagagacgggcaacactcatggggtcgcggcaaccgaaaacggcttcgttgacgcagacgggaaatacatttggttccttaagaacgtccagactgaagacaatcctgaaaccagggagcttggcgttcttgagagttggcatgagctcgtcgtgaagttcattgatcccctgagtggaaaagttgtcatagacaacgactacaatggcgaaacatacaccctctatgttggagatgaaatagacatctcgggagagcttgccgatgcctggcgtgagaaaactattcttgagctgaggagcatagaaaccagcctcttcggctccaaggccgtcctcatactccaacacatcacagccgttagcggaacggtggagatctatccataccaagagcagacttcggagccaaactcaccaaacgagaaccagaccaacgagactacacctcaaaaacccctcatcgacccggcgaaagttccggcggtgatgatcgtcgtcggtgaacacgcggcgggggccgacgtggcggcgggtgccaaggtcggcatagcagtccagaagtggattgacatcatcaaggagaaaggtgccgagtttgccattccaggactcggccaccttggaggcctcatcgccaaggcagtaactgcgccagtccagaacctcaacgccgatgctatgctcgacagtgaggtcaaagatcctgacagaatagcacccatcgtttacactgtcggcgggccggttgccaacgagtacaccaaactgatcctcgagaagaacgccgacagactaccagtcaaattcatcaaagagaacggcaaatggtacatcaaggacagaaaaggtaacaaatgggacaatggctacggcatcatcctcataatccccgcctccgagaatccagctgagcttcagataaggctcatgaacggaaaaatcaagatggccgacgtcgtcgtggcgggaaccgacagagtcggcacatacgccgcctgcgaactcctccaaggcgagttcttgaagccgctcctcggagaaaaaccaaaaccagaactcgagtatttcctccagcttcaggggagaatgctccttctcttcggccagaacccgctcgaggccttcgacgtgaacctcgacccaaccaacccattcaagttccaggttaccgccgtgatagtggacaaagatggaagaatagtcaaggtcatagtaggctgacttttcttttacattttcctttagagcttttcaaatctaaaaacaagacaatagaagtccccttttgaaacgttgtaattaacttatcatttgcatatttcagccacaagggttgtatggcgatgaggttcctacccaaaatgttcgcatttgcttataactcccaactaagagattttctcgaatttgcttattaacttctttgcttttttgatatagggaaaatcccccgggggaatccccatgagaaaactggaggtcggtctaaaaaagacggtgggtctatttttgctttttgtgttagtagtgatgccagcaacagctagccacgtccagagcgcaacaataacaatccaggacacaccagaaggtgaagggctggttttagtgcccaacacaaccacagaggtaacgttttctatagttagcagttcgggagatcccttcacatctgcaacctttccaactgccgacgtgataagcgttacagccgagttcgtggatgactacgggaatgcccttgacattgataacgacggaaccgctgacatatggaactgcacagaagacccaaacgtaccaggcctttggaaggcaaacataactctcggagctaatgctgaacccggtgtttattctctgaaaatcaaagccatcgcaaagaacagcactaccaatgagattattgaccaaggggagttgtccatcgagaccctgatactcggaggccaatacgccatccagttcttcaacgtaaaagacgacgatcactttgagctagatcccctcgatatcaggattggagccttaagcgacctcggaagcatcgtcagcattggaaacttaaccaatacactcgcactgagagacaacaatactgatggagtttggggtcaaaggatcgacctgaacaacgacggaaacctcgacgggtggctaaccttcatcaaaaacgaagacagctatgatatgataatattcacgaacaaccagagcctgattgactctctaatgccagaagaatccttcagaatccgtggagatgagataactttcacaaacagactcctccgcgatactcgggattatcaccacttcaactattatactcaaatcctatgggataacagctttttggccaacttaggcctgaaagcaactgattactacattatcccctacaaaggagcggaaaactggaagattacacagttctccaatggccgaatactttcagcagttatgagggtgaagatcgtcaagagaaccacgtttctaggaatcttcacaagtgaagaggttcctcttgatggcaacatttggacagtgagcacaaagaacgtagacaggctaagcctgtcgccaaaggtggtgagatggagctggtacccatcaagaggatatggtatcatctggactgctgcagttgacataactgcgccaaaggggtacagcataaaacagaggcaggactacaacgtcgagttcagaggggacaacccgctcgacggcctgaacccaattagtagcttcttcagtaaggattcagttgactggtacggacttctcggaggggatgaagaatgacgccggaggctgcagagttagtggacaaatcactaagtctaagcccgtttagcaactttacagtatttacccaagacgcttcggcccttttgcttcttattagcctagcagtactgataggcacagtaatatatctctggaagaacggactgctctacgagtacatcatatactacctactccccggacagtattcttgttagggttaaccgcggcagttctgcctttcgtgatactttgtgctctcctcggagctgtggggttcataatagggattccagtagggcttgcactagacctgatcccaccactctggtacaaggcaaggctcacaagcttgccaatggctctactctggatcattgcagtagcccttacgagcctgatctctctcggcatatttgttgacgcttggttcttcacaaacgttgcagggggagatctttggtgagtgacgtctcgatggggggccgaggctcatctcttccttcgttttccattttttgataggacttgttttgaaataggggggaatagtaaaagtcgtggcgggttgaaaaccccttcctttttgatttataaactcgttgagaatatgaccgcaagtgcgcccgggaaggtgcaaaatttcgcaaccttttttagatgaacacctctagcaggataccagagtatatacataatatatgagtaggagttgaggccaatgccagaccaggacaccagcaaagccagagtcgccgagccgctagcgaaatttcatgccaggttggacagggacgggagggtcactattccacgtcacgttaggacagtatttcacatcaacaaagatgattatatcaaagcaaccatccggcgcgtttatgttgatctcgggttaaaaactatcttcatcctcggggaagatacaggggtcattatgagggtggggcgtggagggatggtaacgatccctcagaaagtccgtgaggagctccaacttgatcctggtgatttagttgaagtcattattgaaaatgtattcaaactgaaaactggatatgaacgagagttcaggtacgtgagagaaaccaaaaagtgatcacttcttcacaatgatgtataagtaagcgctgttctgtacccaaaaaccttatatattgttggtgcttacaaattaacggtaaaaattaccgtttcggtaaaatataccgcaaggtggtcggaatggggcgtgaagattgggaatacctgccggtgaaaaaagccacgagaacaactgtcgagaaacttagagccctactgattctccagaggggtgagaaactcacctatgacgacacaatccgctacctgctccagtttctgccttctgagatcaaggcgcaaatagagggatgaagcatgagtgaggacatcaattttgacttcgcgtggaagttcctcattggactaatccaaaacggcaagacagagatgaaagtatcgaccctacccaactcgcttcagaaagtagccaagtccatcgggtatgaggatgatgacacagtcccacttctcacactcaaggagtaccttgaaaagacttggggacatatatccccaaatcctcaagtccccaagagtccccaagaaggttggggacaattagaaccagagtccccaagtccccaagaagattcaccagttgatgaaagtcttggggactctgacgagagtataatttcagaaataactccatatcttgaagcaatacaaagagttgtcactgatgctgatagaacagagaaacgtctggcaatctatctcctcttgaagaacggggagatgtatgatcctgatctccgcaaggaacttgctccattgggtcagtatttctccaagaacaaggaaccgtacaaggtcaaaacgatcaagaatgtaatctccttcgtccgtaactctccgcacgtctggtcgagcaaggacccgacgacgggtatgtttgtttaccgcctgaaggacgagactgttaaagccatccttcaagagcttcagatggttctccaggagcgtgaggttctccagaaacaggaggaacttaagcaggcggatgaggagaagctggtcagggctttctttgacttcttcatgaactacgtggaggacggcaagcacgtgttcctcgaccagctcaggaatctcctggtcctcggagaggacaggggtctgagggtggactggcatgtcctcgacgcggtgaacccgagcctcgctgagcggctcatcaacgagcccgatgttgtcatctcggccgcagagaaggccgtcctggaggtcctgaatgagcctgagttcatgctctatgaggagcgcccgaggatccacgtccgctttgtgaacctgccgaagacgatcagtcctcgtgccgtgaggagtgagcacatcggcaggcttgtccaggccaggggcgtcgtctcagcaatcgctgagggggagaagagcaatggcgtgaagggcttcatcgagaaggctgtttttgtgtgtcctaagtgtgggtatgaggtttctctcctccaaaagccgtatgagaattttgttgtcccaaaggagtgcccggcgtgtggggcgaggctgagtgctgacaacttgagcgttgagaagagtactgttatagacatgagagagatttttgtccaagacccctctgatgccctccacgcggcagggactgcctcttatgtgagagtgattctcctcgacgacaacgcgaggatggacgtgaaccctggcgacgaggtcctcatcactggtgtggtcaggggcatcatgaggaagaagaacgggaagcctgctcttgggtgggtgcttgaggccaactctctcacgaagttgacgaaggacatcgaggaccttgagataacccctgaggacgttcagaagtttcaggatatggtgaaggatccggagtttgactcgaaactcatccgctccctcgcgccggctatcactggcagggaggttgagaaaaaggccgtcctgctggcgctctttagcggggaggactatgacatcaccggaactcatgtgaggaagcgctctcacgttctcctctttggagatgcaagtactggaaagtcggagatcatcaggcacgcggctcagatcgctcctggtggggtccactccacaggaacccatagctctggagttggcctaaccgctgctattgattcgatggatggagtgagggttctcagggctggcgtcctcgtactggccgaccgcggcgttgcggccctggatgagctggacaagatgagggaggaggactatgataagatgctcgatgctcttgagcagggctggttcccgtacaataaggccggcttcaatacgaggcttatggcgagggctgttgtgatagcggcggccaacccgccggggggagagtttgacaggcacaattataagccgtttgatgagcttaagcgcctgtttgaccagccgttttacagccgtttcgatttaatcatcccgacgtttaggaatactgaggattctgttttggaggagattgctgatgcagttttggataagcatgaggggaagattgaaccgccttatgattctgagcttctcaccaaattcattgcttatgctcgccgtgagatcccgcgtgtagtccttcctcaggccttgagaggagtcatgaagaagtatatggttgaccttgcaaaggcgataggttctgccgcgccgagggctatggaggccattatcaggctcaccgaggcccacgcgaggatgcaccttagaaaggaggccactcttgctgattttctcgcggctaaggagctgtttgatgagatgattacgcgcctcgccggttcatctgacgaggaagaaaaggaggaggtgatgaaggggctggcgggtgtcatctggaccgaggagaagaagaggaaggtggacaagctctggagcattctgaagtactatgaggccctggacgagcgcggtgagggtgtccacatcaacgacataatcgaggaggcggagcagcaggggattgagcggagcgaggttttggttcttctggaggatatggagcgggcgaatatggttgagcagtctaagcccggcttttaccgcttgagaaggaggtgatcggagatggtgagggtgttggtgtatccgggcgacaccttggcggccatggtcgccgaggcccggtggaggaaggagcaggtcgaggaagtgccgaccctgctggagtacatcgagcgcgagctccaggtagctcgcgacacggcgttctcactctccgctcgcggtgagaaggagaatgcggcgtactggacagggtacgccgatgccttggaagacctgctgaagaagatcgagcgcagggaggtgagggcatgacgaagattctcgtcttcactcgttacccgcacgaaaaggtgtgggtgtactctggcgactgcttcgacgcttcagaggtcgacaaagtctgcgagattctcaggaatgtcgtcaaggagggcaagctccacgtcaagattgagacttggcctgacaaggaggttcgggatctctgcaggaggggtcgctcatgacctctgaccgcctcatggacatcatcttggcaaccctcgccggcggcgtggcgggcgagctggccctggtgttcattgcactcctgatgaaggtggtgggagcatgaggtggaaggtgtatttcaagtacgatgcaggggactacatcgcaaagggctggtttgcccctcgtgcagatacggcagaagaagctgttgagagggtcaagaggaagctgagagaagagttcgggattgagaagccgcagataacaaaagtacgcccggtgggggaccgctcatgaactcccgcgaggtttgggtcaagctcggcgaggggggcctgcacgcccacaagacgaacgtctacgcggtcgtgagaaagctgaagcgcggcgggtactcgttcaggattgtcgagcgtggcttcaacggctacacggtgtcaacgaagacggagcgctatgagagcttggaggccctcttcgcggaggtctcgcctcgcgacctctaccgcgccctccagaaccaccctgagccagacgccaaggaggtttgggccgaggagctcgaactgctgaagaagctcctcgaaaagccggctgagaagaaaaccatcacgccaacacgccaggcgaccctcgcggaggtgctgtcatgagcacttccttccagactgcccttgaactatactctgaaagggagcagcaggagaggcggcggatccttgcggcggcgcaggggctgaagaagcgcgctgaggcgttcaagcggacgtacaggaaggacatcatgcaggagatcatggaggtcctcctcgggggtggcgagtgatggtcgcggctcgggctcagatgatccgccaggcggcgaaatacggccgtcacgtctacagacccttctttgactacatgcagcgggaaatccggagcgcagagaacaggtacatattcagcactctcgttgaagacgccttccctggcaagttctccctctacgacctggatgagcttgtcttcaggaaaaactcgaatgagccgctcgcggccttcgagctgaagttcatcagctggagggtcatcaaggacgcgtgggcgcagggtgagttggagatcaacggctggcagttccagcggctcaggcggctttcagaactcctcgcggtcccgctgtactatttcattcagatcggcaacgaggagcagtttgtgatgttcaacgtgcagcaggtcgagccttctttcgagtaccggcgcggcggctcggcgcgggattactacgctgtcatcagcctcgatgatgtgatcgtcagcaggagctttgaggagtttgtggatgacctcggccttctccttggtgtgaacttggcaaagccggctcagattccagcctatgccgtcggagggaggtgacggggcgatgagcgtggatttgtcgtttgtcaatggattcatagttggtgcgggcgcaacgttctttgtcctcttagtactagcccatatatatggtggtaagatcgacataaagcgaacaggggtcgcgaacctgtactttggtctcgccgcaaggaaggcagtcagaattgaagtggatcaggacaaggcgaagatcctcgtcattaatgaggatgtagcatgctctattgattttgacccctcggagttcaaggccttcaaaaaggcccttctcaagctagggcctgaggttgaggagcgtgatgtcagtgagtcttaactttcatacgaaagttaagccatttatcgcacttatttttaacattcaaggcgaaataaagacgaaagttaagaaatgaggtgagaaacgtggtgaaacccttcgcatgggacaaaggcctcgactatgagaaaacctatcgacagatcctcaaccactatcgccaagccacccgtgacacatccaaagcctacgacatcatactcctgactcaactccgcaacggctccaggctcaccgaggccatcaacttcctcaaaaagctcattgaagaaaagcccttcaagcgccagaagtacatcaaagtcgaaaagcggaaagacggctatgaaaggctcatggttcttccagaggaaattgataagaaagagctgatgagggtctcctacgtcatcaaagaggccaacaagtggaaggtctcaacctattgtaaaaggacctacgggttcaacacccacgccttgaggtatgcactaatatcatatctatctcagaaaggcgttgctccacagcttatagcaaagattaccggccacaagacgctcgactacattctatactacacccaacagcagaaggcagaagagcttctcaaggacctgaggtgatgccgcatgcatatatatcataatactctatatgacctcggtgataaagagtgggacaaatgggcaaagtggccactcctgaacgcggctctcacacagcccaaaagccagaaaagaagcgaaagacaaggctccacatcacgcttgatgaagatgtcggcgaagttcttgacaggctgtacatcagaaagtctcagttcatcaacgacctgctcagaatcattctttttggggagggggacgttatgagctttttagaatcgttgtggtgggcccgcggggattcgaaccccggacctccgccgtgtgagggcggcgtcataaccagtctagaccacgggcccgcccgaagtagtgaaagggtgggaaaatataaagctttcgctaaacttcttcgagtatcttctcgggtgctccagcgaactccaccaggtattctgcctcaactatgtgaagcctgcctgggacgataaggacgtggggctgtcttccgaagtcctcgtttatgagctccctgacgtagccggccctcagagtcggctcaagcgaaccagccctcgctaagacgacaacgagagtctcaggggtgaacactccttcacctttcatttcctcgactttgagaagtatctccatcgcttcattggccgtcatgtagcggttctggtctgccttgatgtcgaggaacagaagcgtgtggagacccctttctttgttatcccttatcacgtcgtagtggctcgtcgggaaccagttcttctcgggataggcaacggtagcgctcttcccgaacttgtatatctgaagaccggtgattgccaccgcggagtaaatgcttggagcgtggataacgtagctcttaactccagctttctttgcccttatcctgaggtctgagtgagtagttgccaccatcgggtctccggcggttaaaaacgcaacgtctttgtccttagcctcgggaagaactattctctcgaagttcagctcaacatcctccctgctgagtcgaactatcggcttgccgatgagctcctcaattttctcaagggtggtacctgctaaaagggaagtgtagaactcagcgaagactttatcacaccttctcgccgtttccagtcccttgagtgtgatgtccttttcatcgtaaagcccaagcccaatgaagtacagcaccatttctatcaccacatcaaaggtgttcctaaaacttttaagttttgggaaaactacttaaaggtttttggtgaacctaaaaccaggtggttgacgtggaagtaacgaagagggaggaagagtaccttgaaactatgtatattctccacaagaacaaaggagtcatccgcgtcaaggacatagcgaaggccctgaacgtcaggcccccgagcgttgttgatgcccttaaaaaactcgctgaaaagggtctcattgaatacgaaaagtacgacagaatactcctgaccgaaaagggaagggaaattgccgaaaacacgtattccaagcacgtattccttacgaagttcttcacggacatactcggcataccaccggagatcgcagagcaggacgcgtgccagttcgagcactacgtaagcgaaataaccgttaaacggatgagggaatttgcggaattcatccaggagcagtgtccctacgtcctgaagcagttcctgaaggagaaactcgaagaagccgagcctgaagaaggggcttagtggttcaactgattttggttttctcatccactattcttttaacccctttattccaatcccgatacgcgatgatgagtgaatccaatgctgatgagatgatgagccccaaacctgagcaagaggtgattgaactggagaagctgtcccaaaagatagacggcatcagcaggcaacttcaggccattaaagaggccgaggaaaagaaaaacgaaccggacaccctcgggtgggacgacatcactcaggaaatcatcggggctgtgacctttgcactcccattccttttcacaggcgagctctgggacgttgccaaggcgatttcccttgaaagagccgttgtgatatttctgctcaccctgggcatcgcgtacctgttcctcgtgaagtcccggctcgggaatatgaagagggaggagctgttccacctgccaaagaggctcataagcgtgtccgttatctcgtacactatttcggcgcttctcatctacctttacgacataaacggtgtcgctcacttcacacccgtccagtacctgaacgcgacggtcatagtgagcgcgttcgcggttatcggtgcaatagctgttgacatggtgaagtgaatgagggttgttactggaaacaaatgggagcagtttggagatgcggttctatttcccgagtatggaaagaacagggaagacctcttgaagttcgttgattccctttcgggcgaagagacgctggtaacatcgagccttgaggttatcgaccttctcgctgaacgcttcaggaaaagcgaggagaacatcctcgtttactcggacactatgaaaagcctgactctcaaggaggtctatgaactcaggaagtaccttgactttgatgtccgcggtggtttttctggagaagatgctccggtctcggttctctttgttgaagggaagacggactccaagttcttcaaggcagtcatgaagaagctcttcgacttcagagaatccagaaccgcgccaaggaacctgaagttcattgagaaggtctttgagcgcgacaactttgacctcctccataaggacggaaagtacgttgccgtaatcccgagcgagggaaactccggtgtcataaggaacctgggcaacttcctcaaagccatggacgtctttggcttcggcgttgagagaataggggttgccattgacgtcgatgaggacagggaagcggccatggcgtcaataactggcaaactggcatcctttagtccaaggaaagccggggatttttacttggtctggaacacgttcatcgtgccgctcattataggtctcccctttgaggacgagcttattgactggaagaagccgacggttgaggatttgatgctccacctcataagcgcggagggccttcttgagaagctccggcctgcccttggggctttcgaggagagccttgggaggaaactcaagccaaaggaggtcatgtatctggctctctccgcctacgggcactggggcaacctcgaggggttctacgagctcttcgtgatgcgctcccgccacaggcacatcaaggacgtgctcaggaaggcaggtctcatggagggcctgcgcttcctcgcctttgccgagcgctgagtttttaactccctttcccatctccaggtggtgatgtccatgaagctggtctcatttgacgtctggaacacacttctcgatatgaacgggatgctcgacgctttctcagcagagctctcaaacatcatgggcacctgcatcgtcgacgttgtggaggccataatgctgacgagggcgaggataaagggaatgagggccaggggcgaaggcgatccgaaaagggcgcttgaggagagccaggaaatgctcgcggaaatccttggcgtggacatcgaggttataaggagggccgcggcgagggccaccctaaatgtcggtgacctcgtcctacccggggcggaggatgccctcaaggacgccaagaggcgcggtctgaaggttactgtaactggcaacgtcatgttctggccgggttcctatacgagactgctcctcgagagggttggccttatgaggtacatagaccggacgttcttcgcggatgaggttggggccttcaagccgcttccggagatgtttagaaagcctctggaggtcttcggtgttgagccggaggaggcccttcacgtcggcgacacctatgcggaggactttgaaggagccctgagggttggcatgtggggggcgtggataaaccccgaggctgaaggcgtcaggagaatctccgagaggggctttgagataccctcaatcggtgagctgcccgaagtccttgatatgctaactggggatatgggaaaagcttataaatcgactgggcaacgctcaccagaggtttaaaaacccacctttcttggaggtgttcgcagtggagatgaagttcgaggtacccgtatgcacctcatgcggaaaggagataaccccaagggagcacgccactcacttcgtttgcccgaactgcggtgaggcgatcatatggcgctgcgaaagctgcagggtgctcagcgtgccctacaagtgccccaagtgcggatgggaggggccgtgagttaggaggtgaatgatatgagcgactacaaccttgttggcgttataaaggtcatgccgaccgacccggatgtcaacctcgacgagctcgaggagaagcttaaggcagtcatccccgagaagtacggccttgcaaaggtcgagagggagccgatagccttcggtctcgttgctctcaagttctacgtcctcggaagggacgaggaaggctactccttcgacgaggttgcagatatcttcagacaggtcgagaacgtcgagagcgctgaggtcgagaccgtttcgaggatctgagggctccgccctcttttactgattatctgcacggaaagcccctgcactttctctcgccagttaattcgtagctcttcccgtcgaggctgtccattatcagcttttttccgtcttcctcgtacacccagaagaccttgtaggcgagctcttcccttattacctcaatccttggcagccaccacgagaccacccttgagtttccccaagttattgcgctctcgaaggccttcatcctcgcttcttcttccgtaacgaggggctccataacgtttttctcgtcaacttcccattcctcgaggtctataaagtcgtctcccctctccgcaccgaggcggtagaggtctatgtaagcatagtagtcaaagaccctgtccttcatgcccagcctcttgtagaagagcctgaggtggtatatcctgtagggatatagaacaaagctttcagcgacctctggtttaaagattggcctcatgaccttaaccttgatcccgcccatattctaacacctttctgcaattcttgatattctcttacaccaaacgtttcaaacgataggtttataattttttagccatatatgtacaatgctggcttccaaccagcatatacattcaggggtgataaatatgggacttggcgccgaaggctgggcattgcttctggttccaacgattttgggttttttggtaatggttctgtacggctactgggacaagataacggggaaggagtactacgtagatgccgacattctggcctacgacgaggatctcattgaagagctaaagaaggagggtaaggcatgaacgcgggtgtgctctttggatttctgatataccttgccctcctagcttacataggctggtgggccaacaggtacaccaagaccgaagaccagtacttcgtcggcggcaggaaggttcacgttttagcagctacactctcggacaaggccagtgacttctccggctggttgatgctgggttatcctggaagcgcattcaaggctggccttggagcattctgggctgggataggctgtctcttcggtacgctggctgattacgtcctcattggtccgaggctcaggatctacgcaggtaaatttagggcaataaccgtcccggactatctggaggccaggcttaaggacgacaccaagctcatcaggatcctcagcgctttgatcattatcatcttcatgaccgcctacgtagctgcgcagttcgcggccggcggaaagacctttgcggagggctttgacgtaagcgtgaacactggaatcataataaccgttatcatcctgactgcatacgttatcacaggtggcttctttgccgtggtatggactgacgttgtccaggccctcttcatgctgctgaccctcgttatcgttccgttcctggccctggccaagataggaggcctcgacaaggcgacggagataatagcctccgcagaccccaacaagctccaccccttcggcggcgcaaccggctgggcggcaataatctttgccataggctacgcctcctggatagtcggctacctcggccagcctcacatagtcacccgctacatgagcgttgaggacccgagaaagctcaggaggccgggtatcttcatcagcggcatctggactacaatagtcctctggggagcgttcttcgcgggattcctcggcttcgccctctaccaggcgggcatgcttaacgtcagcgatcccgagcgtgtagttcccgccatggcagttgagcttatgccgagctggatagctggcttcgtcatagcgggcataatttccgccgttatgagcaccgccgattctcagctcctcgtcgcttcctcggcaatagcgagggacttctaccacaaggttctcggcaaggaactcggcaagaagcagatggtcaacatctccagggttgtagttgccgtcgttgcactggtcggcctctggttcgctattacaggaccaaaggttatctaccagatggttgcaacggcatggggtggccttgccgtcggctttggcccgatactcacactgagcctctggtggaagcgcgtcaccaaggagggcggaatcgttggaatggcctacggtctggtcagcgaggtcatattcgaggccaagatatacggctgggccttcaaccctgacgctccgggcttctttggcactctcggaagctggttcaacggcgttccagtgttcttcatcaacttcttcataacgctgttcgttatcataatcgtcagcctcctcacaaagccgccaggagacatcgttaagcttcacgaagagctcttcaggaaagttcccgttgagggcggcaagaggacagttatggaaacaagggccaagagccaggtcgagaatgtcgccgacttcctgatcgagaagggtctcgcctgatctctcttctttttaaccttcagtttagaaccttagggtttataagcatcggtgttcatctttattcgcatgtacaaaagcggggtggaagcatgagaccgcttgacctaacagagaaagacccttctaagaagatcacgatctacctcgacggggagccctacgaggcctacgagggcgagaagttcccggtggcgatgttagcgaacggcgtttactggctcacgacgagcaacgaagggagacaccgcggagccttcaccttcggccccgtccccgttacggtaaacggagtcaagaacatcaacggaaggaagctcaagctcaaggacggcatgaagattgagaggcagagatacgatgagttccaggagcaggttgagatagacgaagggaagcccgttctccgctacgttgtggacgtcgcggtcatcggtgctggtcctgcaggcctcggtgtcgtggaggaaatcggcggaaagcttaccgttgccctcatcgaggagaagggctggctcggcggagatatgtggctcaagggcgttgagcaggagggctttggaaacccgagggaagcgatagaaaggctcaccaacttccctgagaacgttagggtcttcctcaagacggccgcgctcggtgtctatgacaagggcgagtacttcctcgttccagccgttagaaacgaccagctcatagagttcatggcgaagaaagtggttttagctactggggctgttgataatataatgctcttcgagaacaacgactggcccggcgtctttaggagggccgatgcacttgaagtcatgaacgtctggggcgtcgctcccggaaggaaggtcgccgtcacaggggcattcccggaggagattaccgccgaattagagcgctggggcattgaatacataattgtcccgaacgtcaagcgcgttgagggtgaggacagaatagagcgcgtcatagacgagaacggcaacgtctatgaagttgatgcactgataatggccgatgggaggattccggatataaacccgataacccaggcgggaggaaagctccgcttcaagcgcggctactacatgccgattctcgacgacgagcacaggataagggacggaatctatgtcgcgggaagcgcggtcagcataaagccgcactacgcgaactacctcgaaggaaagctcgttggggcctacatcctgagggagttcggctacgagagcgagccgtgcatttacgaggagaggcttaaggagtacgagccggtggcaaggccggttccgaagctcccgctcgataacttcaacggcgaggacgtccagatatgcggctgtggcgtcacactgaagaaggtggacgacgtcgtcaggagcggcataacagacctgcagatcatcaagaggctcacccacctggccatgggcttctgccagggcaggttctgcctattcaacggcgcccttctcgtttcccagcggagcggaatgggcatggacaggcttgacatacccgttgcgaggccgcctataaagaacgtcaaaatgaaggtcgtcgcggggagggattgaaatgccgacgagagagcttcccgaaaagagtgagataacgataatcggcggcggaatcgttggcgtcaccatcgcccacgagcttgccaagaggggcgaggaagtcaccgtcatagagaagcgcttcataggttcaggctctacattccgctgtggaaccgggataaggcagcagttcaacgatgaggcaaacgtccaggtcatgaagcgctccgtcgagctctggaagaagtacagcgaggaatacggcttcccgttccagcagacgggctacctcttcctgctctacgatgacgaagaagtcgagaccttcaagaggaacatagcgatacagaacaaattcggcgttccgacgaggctcataacacccgaagaggccaaggagatagtccccctcctcgacataagcgaggtcgttgccgcttcctggaaccccaccgacggaaaggccagcccgttccactcaactgcgaagttcgccctccatgctgaagagttcggcgcgaagctcgtcgagtacaccgaggtcaaggacttcataatcgagaacggtgagataaagggcctgaagaccagcaggggcacgataaagaccggaatagtggtcaacgccaccaacgcctgggccaagctcatcaacgcgatggcaggtataaggacgaagataccgatagagccctacaagcaccaggctgtcataacccagcccataaagaagggctccgttaagccgatggtcatctcgttcaggtacggccacgcttacctcacccagaccagccacggcggaatcatcggcggcgtcggctacgaagaaggcccgacctacgacctcaacccgacctacgagttcctccgcgaggtgagctactacttcaccaagataatcccggccctgagggagctcctcatcctgaggacatgggcgggctactacgccaagacacccgacagcaaccccgcgataggcaaaatcgaggagctgagcgactactacatagctgcaggcttcagcgggcacggattcatgatggcccctgctgtggcggagatggtggcagacctgatcacgaagggcaagaccgacctgcctgcctggtggtacgacccgtaccgcttcgagaggggcgagcttagaggtaaggccctgcagatggggtgaagttttattttctctcttcttcacccttgaagaaagtacacgaacgctgaagcttctttttattcttctttgaggacttcgatgaagggtattccttcagaaaagcacgctactgtccagaaaagtccctgtactcctgtagatactcacgaagctccccccatgatgccctctcaggtctcaccttccccttgctggaagcgagcatccttaaggcctgagcgcgtgcaaatatctcggccatttctccaacgagcttttcgtcaatcccctcgggaaccctcaccctcaaagtcacgtccatccacatccccacaagacgttgaacgttgggtttgataacgttttcgtcatattcatagccaagtaaagagaatccggcgccattttcctttctcaaccaaaggtggaaaacctttttatgaaaaaatcctcataaagggcttttcttaacccacattggtgaaagttcatgcgcatcactgaacatcctgttctgcggtttgagcgaggcagaaaggtcaccatctactttgaaggccggccgatagaggcctacgagggggagaccattgcaatggcactccacgccgctggaattagagtcctcagccacagcggtgagaaacacagaccgaggggcctcttctgtgccataggcaagtgctcttcctgcctcgttaaggtaaacggcatcccgaacgtccgctcgtgcataaccctcgtcgaggacggcatgaggattgagatgcagaaaggaaaagagatactcccaaggactgcgaagccgccggagtggaaggatgcaaccagatacgaggcggacgtcgttgtcatcggcggcggtcccgccggcctgatggcggcgatacacgcggctgacgccggcgcgagtgtcatcctcattgacgaacagccaaagctgggcggccagctcgtcaagcagacccacaagttcttcgggaagagggagcagttcgcaggagtaaggggagtggagatagccaggatcctcacggaggaagtgagaaagagggagaaaatacgggtcttcacagaaacctccgccgttggaatcttccaggatggcgacgagaagctcgtgatcggtgtcaggaagaaccgcgagctcgtggagttttcgggaaaggccctcgtcgtcgcgaccggcgcgatggagaagatgattcccttcgagaacaacgatctgccaggaatctacggagctggagcaatccagaccctcatgaacacctacggagtgaagcctggcgacagagtcctcatcgtcggagctggcaacgtggggctgattctggcataccagctcatccaggccggcgtcgaggtgaaggcgatagtcgaggccatgcccaaggtcggcggctacttcgtccacgctgccaaggtgaggaggctcggcgttccaattctcacgaggcacacgatcctgagggcagaaggtacggacagggtcgagagggcggtagttgctcagctcgacgagaactggaggccgattcccgggactgaaaaggtctttgaggtggacacgatagccctcgccgtaggattgaggccgagcatagagctcctccaccaggcggggtgccagataaagttcgtccgagagctgggaggccacgtagcggtgagggacgagagaatggagaccaccgtccagggaatcttcgtcgctggcgattctgctggaatagaggaggcaactacggcgatgctcgaagggaagatagcaggaattgccgcggcgctcaaggctggagtcgctactccagagtggctgggagagatagagaaggcccagcgcgacctcgaggagttccgttcaggccccttcggaaagcacatcgttgagggaataaagaaggctcttctgcccgctgggggtggttccaatgtctgagatcccagaatacctgaagaagggctacataacgcccgaagagctcttcaagataatcccaaagccgagcgatgagaggctcagggcgaggcctgttgccgttcccgagtgcccgcaggagataccatgcgccccgtgcagggaggtctgccctacgggagcgataagcatgccgacgccgaacgaccttccaatcgttgactacgagaagtgcgtcggctgctccctctgcgtccagatatgccccggtttggcgtttttcatggttcactatgttggggacaaagcgagaataacgatgccctacgagcttcttccggttccagagcgcggcgatgaggtggttctcctcaaccgcgtgggagaacccgttggaaaggggaaggtcacgctcgtaataccgcgcgagaagagcatgggggacaccgccgtagtcacggtggaggttccaatcgagctcgcctgggaagtgaggaccatccacgtgctcggaggtgaagaagatgactgaagagccgagggagaaaataatcatctgccgctgcaacgacgtcacgaaggaggagatagaggccctcattgatcgggggataaccgacatcgaggaaatcaagaggctcctgaggataggcatggggccctgccagggaaggacttgccttccgctcgtgatgggaattctcgcgaggaagaccggaaagaaacaggagggtattccacttcccgcaacgcgcgttcccgttaggccggtgatgatgggagttttagcgggcgagatgggtgatgacgatgaagagtgaggcaaagacggtcatcatcggcggcggcataataggtctcagcatagcctacaacctcgccaagctcggcgagagcgacatcgtggttctcgaaaaaggctacctcggaaacggctcgacattccgctgtggaaccggaataaggcagcagttcggcgatgaagcaaacattaggatgatgaagcgctccgtcgagttgtggaaagggctgaaagaagagcttggatacgacgtcgagtttacccagagcggctacctcttcctgatctacagcgaagaggagcttgaggcctttaataacaacgtccggctccagaaccgctttggagttccttcgaggataataacacccgaggaggctaaggaaatagtccccccgctcaacaccgacggggtcatagcggccgcgtggaaccacacggacggaaaggcgaacccgtttaaggcggtatttgcctatgcaaacgcggccaagaggctgggcgttgagatatacgagtacaccgaggcgaaggacatcaaggtcgaagacgggaagataaaggccgtcgtgaccaacaggggggagataaggacgggcagggtcatcaacgcggccaacgcctgggcgccgctcataaacaaaatggcaggagtgccgataaaaatcccaatagaaccatataagcaccagagcgtgaagactgaacccataaagcccggccagatagagccgatggtcatctccttcaagcacggtggcgtttacatgacgcaggaggccaatcagggcggcgtcataggcggctacggcctcaagtacgggccgacttacgacataacaccgacctatgacttccttcgcggtgtaagctaccgcttcgcccagataatccctgcgctcaagtacgtgaacatcataagggtgtggggtggcttttatgcagaaacccccgatcacaacgcggccatcgggaggataaacgagatagacgagttctacatcgcggcaggtttcagcgggcacggcttcatgcttgccccggttgttggagaggccctggccgagctcatcgtggacgggaagaccgacaagccgctcgacttctacgacccttaccgcttcgagaggggtgaactgaggggtcaggcacttcagatggggtgatttcaattcttttcttaacatttcgacggaaatttttataaatcctctcagcgtagcccgagacatgcctttaaggaagagagagcgagtgataacgcaggggaagcgagagagaaccctcaagctcaaaaagctcagggttaagcggaggaacatcgttatcctagccgtctccatgttcattgccaacgtggccttcggaatggccttcccgtatctgagcgtctacatgcagtacctaggtgcgacgatgttcatggtcggccttctgagcgtggccttcaatctaacctctaccgtctttcagtatcccttcggctggctctccgacgccaccaggaacagaaagggcttcatcgcgttcggtgctgcttccattggactgttttatatgataatggcatttgcaacatctcctgtccatgtcctcctgctccggacgtttcagggggcgttcggctcggccatgactccggcccattctgccctcatctctgagctttcaacgagggctggatcaatcttcggcctgttcaactccatagagaacgccggctacatggtgggcaacttcataggctccgcggtggttgaatacttcggcataaaggttctcttcatcatcgctggctttctcctcttcctttcggccgggatagttctcctcatcagggagaggcccgctggaaggaggagcctcgttggcatgattcttgtgcaggagggcagggaaagctggagggcaactgtaaaaagctcggccttcaagaagctcatgagaggccaccttgggctgttctactttacagtcttcctagtgatggtcgccagcggacagttctacagtgtctcctcggtctacttcaaggaggccttcggagagtggagtgttggcgttctttttggaatagagagcctcgctgctgccctgaccggatacttcctcggcaggctgatagacaggtacggggcgaagaggttctacctcgtatcaattgccggctacgctatggcattcgtcctctacgcagttgttagaaacgtttggctggccttcggtgtggcgttcctctcgggaatcaagtggatactcacgataaactcgacttcaacatacgtggcaaggaaggtcagtgtttcggagagggcacagggcatggctctcctaaacgggatgatgagcctcggatgggtggttggaccgcttataggcggctacctctcggagataagcttcccgctcaacttcttcagcacggttgtgcctctctcaatagcgttcgtcctggctctaagacttccagaatgagatgtgggctaaaaagaaaacgtcaggccctctctatcttcatcttctccccgctctcgaactcaagctcgagctttcctttctgcatcctcaccttgacgccgtcaacgacggtatctatctttccgtctttggcctcgactcctagcatttctgctacctcttccacgctcttgagcgagccgttcatcgttgtttcaagggtctcctcaccctcgatggtcaccttaagcttcccctttccttcacggataaaactctcttccttcatgtctttcaccttctctggagttgggggatgtatgcacggcataaaccaccaccaataaaactacttctcttcccgctttatctcctttttggtgtccttcaccattcgaacccatatcccgtgctggccgacttttttgaagccgtacttctcgtagaatttcatcgcgccatagttcttctctccgacccatagctctatcctgcccgtatccttcaggtattcgaggcacttatccatcagcttgtggccgataccgtggccctgataggctttatcaacggcgaactcgtggatcgctccaacggtcttcccctcgtacttgctgtaccagtccttgtcgcagacgataaagccgactatcctatctccaatcttggcgacgaaaaagccgtccttggccttgccccagcaccagcggaggtagcgcttcgcgtagctctccccctcgccaccgtactccctcatgccctcgtaggcgctcatgtatatctcaatgagcctctcaagagtttcctggtcgagcttctggagcttctctatcttcacttcttcgttcttcgctgtcatcaaagttgattgaatcgtcgggtttaaaaagcctgtccagtactctctatgtcagagagaaggtggttgagatgggaaaggccaagccgaagtactgtgaaatatgcggtgcccccatcaggggaccgggccacaggataaggatagagagggcggaggttcttgtctgcgataagtgctacgaaaagtacggcggtaagaagccgggaaccttcagcataatgcccaccggaaggcagccgaggaggactgcaaaaccggcatcccgtccaaaaccccagccgagaccataccagccgaagccgctcgttactgaggagatcgttgaggactttgcggagagggtttacagggcaatccagcgctcgggtaagagctacgaggagctttcacacgagatcgggctttccgtgaacgacctcagggcaatagcacacggctaccgcgagcctacgataaaagaggcaagaaagcttgagaggtacttcaagataaagctcatcgaaagtgccggcgaagagtccttcgaggagaaaaagacaattccaagggactacgaaccaacgctcggcgacatagccaacataaggatcaagaagaggaagaagaagtgaaagtttaaatttttcttcttcaaaaaactttattggtgaggggcaatgggtgagatagtcattgtggttccgaagggtcttgagaagatcatccagagaaaaatatccctactgttgaggaaggaagagaaaaagggcctaaaaaaagacatccttaaaaagtatctcggcaagttctctggttcgataaacgaggaggagtggtactttcaatgatcgaagtcttcattgattcctccgttcttattgaaggactaaaagggaatccagaggctgtcaagattctgaattacctcgctgatggtggtgcagttgcaataataaatgacatagtggtaagcgagtttctgtttcattacatccgtctgaaatctggagtatcaccgcttacagtcaaaagctctggaaagatatcagagtttataaaggaggatgaaccgctcgacttcataactcagtttcatattctcccaacggatgaagaaactttacttcaggcctacaatttcatgaggaggtacaatctgcttccaaatgacgctataatcttggcggcgtgcaaagttaacaacattgagcggctcgctactttggacggagatttaataaaagtggctagggaagaggggttagaactcctataagtccaaatcttcatattcccgctttttcctcttcctctcgatctcctcggccttcgttctcttcggagggtggaagcccctgagcttctcgaaagttccccagagcctcatcagctccgtccatgcctcgctgtcgggagggactacgaggacgtgggctgggggatgaatgtccatcagcctgcctatggctttcctcggaggaaggtctatctgggcaatgacgtgggctttaaacttcctcctcggcttctcgccgctaaccttctcaaagacccactctgagagggccggcggtattatcctgggatccccccttatcttcatcccgccgtagcggacgaggtcagctaaagccacactagccttctggaagttgtcggccctcacgagcactatcgtgtttctcatgttctcaccgggcctaagtttctggcacatctttataaaggattggtacgaaaataactggaggtgaaaggttgtggacccattgagcggatttttagggtctctgctgtggtggctcttcttcctctacctgctgatgtggccccagctccagttcagggcccttcaggcggccagggcaaggctcatggcccagctcgcgaggaagaggaactccactgtaatagcaatgatccacaggcaggagagcataggactctttgggataccagtctacaagttcataagcatcgaggacagcgaggaagtgctcagagcaatcaggagcgcaccaaaggacaagccgatagacctgatcatccacacgcctggtggactagttctagcggcaacccagatagcgagggcgctcaaggagcacccggctgagacgcgcgtcatagtcccacactacgccatgagcggcggcacactcatagcactcgccgctgacaagattatcatggatccaaacgcagtcctcggcccagttgacccacagcttggtcagtacccagctccgagcatactaagggctgtcgagaagaaaggcccggagaaggttgacgaccagaccttaatcctggccgatgttgctgaaaaggccataaaacaggttcaggacttcgtgtttagccttctcaaggacaagtacggcgaggaaaaggccagggagctggcccagatactcacggagggcagatggacgcacgactacccgataaccgttgaccacgccagggagcttggactcaatgtcgagaccgacgttcccgaggaagtctacgccctcatggagctctacaaacagcctgtcaagcagaggggaaccgtcgagttcatgccctaccccgtgaagcaggagagcaagaagtgacctttcattttttcttaccaaaacttttaaaaacctgttgttaataaaagcgtgcggaaaaattctggagggatgtggaatgtacctgaagaagaggcacatcgagatactcagggaaatgaagaacaccgagagccaggcagaaatagaggcgaagctcccggaggactttcagataagggcgatagagctctacatactcggctttgccgagcttgaggggggcaagataaagctgaccgatgcaggcaggaagcttcttgagataaccgataaactcagccttgaggagctcccggatgtaattgctgacaccgagataatcaagatgatggagctcctcgaggagacgggcaaaatccccgagagctggatggagaagctcagggagagaaagctcgccgatgagaacggccttacccccttcgggaaggcccttctggaggtctatcgcgagacccatccagttgtttacctcacgcccgagattgcctcattcctcagaggaatgcccaagattggaaccctcgatgagcttgtaacgtacaagaactcaaagctctacggcgacaacatagtcaacgcactccaggccatgaggctcctccttatctcgccgccgaccgagaagggcagggccttcgccacgactccagctgccaagctggcgcttaaagccctcaatatgatcccagtgtttgcgagggccatcgtgctcaggaaagaggactttgagatgctcaaggctggcaagaggaacgcagaacttgagagcatgggcctcgccgacgagaagggcaccaccgagttcggaaaggccataatggacacctacgaggcgatgggcagagtcgaggagaaagtccttccgatgtacctgcttgaagacgagctctcagtcctcaaggccattcaggagatcgagaagaagtacgagaccaacccagatatactcccgaccgaaaaggagatagagaggcgcgttgatgtcaaagaccttggtgcgatcctgcacctccttgagagcaaggagcttatcgagaggaggctcgtcaaggagaaggacacctactggctaaccgagtggggcaaagaggcgatcaacttcggaacggtcagtccggatgccatgaaggcagttacctacgccgagagcggtgacgtgcctatagccgagtgggtgctcaaggcccaggaggagaacgttgtaaaggccggcgtcaccgacaagggcaggttctacctcaggctcagcagggagataaagaggaagcccttcataacccgctatgatgccgcaatacttgcaaagaccccgaggaagaagtacatccacagggacgagctggtggcgctcgttcaggactacgttggcggagacgaaaaggagataatcagggccattggcgaggcagaggccaagggcttcgtggtggagcttcagaacggtatggtcaagctcaccgagcttggagacaaggtcaagacagccattgagaacgccaagctccaggagatagtcaaggtcaagttcagcgtcacgccgaccctttacaacgtgctcaaggtaatatacgacaacatcgagaccttcaacaggatatggaaggagaagggcgaggctagggactacaagatggaagaggttgacgccatcaggaagcacctcagcctcagcgacgacgagataaagaaggccctgacaatgctcagggaactcggcttccttggaaccaagagcctcaccgaggccggaaaagttctcgttgaggcctacctctgaggcctttttccttactttcattattgcattctgacctaaacctttaaaaagcaacgaccctcatttataaagggtttttaaacccaccattcggaggtgtaaaccttggtggacatgagcaatgtaaagctcaggattgaaaatatagtcgcttctgtggatctctttacagacctcaaccttgagaaggtcatagagatctgcccgagctccaagtacaatccggaggagttcccgggtataatctgccgctttgacgacccgaaagtggcccttctgatattcagctcgggaaagctcgttgtaactggcgcaaagagtgttgacgacatcaagagagccgtgtataagctcatagagatgctgaagaaaatcggtgccaaattcaccagggagccccagatagacatccagaacatggtattcagcggtgacatcggtatggagttcaacctcgatgccgttgctctgatcctgccgaactgtgaatacgagcccgagcagttcccgggcgtcatataccgcgtcaaggagcctagggctgttatactgctcttctcctctggaaagatcgtctgttctggcgccaagagcgagcaggacgcctgggaggccgtcaagaagctcctccgcgagctggagaagtacggcctcatcgaggaagaggaagaatggtgattcattccctgccctttttataacctccaatattgttttaaggacatacgccttatgtttccaaggtggtatttgatgaacactcaagttcttgaatggcttagggcaggtaacgatgatgccgaggacatagttgacctcccctggaacgtcaggcaggtgggagagaaccactacgttgccgagcacccgaagataccgtttctcctgaacgtcatcttcatggacggatttgtccggctggcagttccgagcggcatcgagaccatagctatgaggcttgaggaaaaggtgaaggtctaccacacgctcctcatcctgaacgagcgcatgaaccttctcaaattcacgctcagcggcatgaacgatgaggtgaccctcagggttgacctggacgagaagagcctcggaaaggatgagttcaacgacgccttaacagctctcctcgtgggcatgaacgttctaatggactcccttggcctaacccaggagttccaggagatagtattcgaaaggctcgccctcatggtgtttgagaggatgcagaacggtgccagcgagagggagataattgagttccttacgaaaaaggtcggtatgagcaaggaagatgccgaagcacttctggctgaacttaaaaaagctgtcagagaggacgagagggggtacatttgaagttcgggattctctatactccgattttcctcgaacacaggcccgatggatatcacccggagaaccctgctaggctaaaaagagccgttgaagggctgaaaaaagccggtctgtggaaaaacgttatcgaacctgaagcagttcaggaaaaggagctcctcaaggttcacgatgaagagtacgtggagctggtaaaagagctgggaaggtcttttaactaccttgatccagacacttacgtttctccaggcacgtttaatgccgcgctccacgcctttggggctgttaagaaggctgttgaacttgcctttgaggataaagggctttaccttgccctcgtcagaccaccaggccaccatgccggcaggaaggggagggcctttaacgcaccgactctcggcttctgcatcttcaacaacgcggcctacgcttcaaagctcctcgaagggctcaccggaaaggccttggttattgacttcgacgcccaccacggcaacggaacgcaggagatactctggaacgatccaaatgcagtccacatagacctccacgagagggacatctatcccgtgagcggctacgaatacgaggttgggggtaagggcgcggagggaactaaggtcaacattccaatgccccactattcgggcgacgatgactacatctacgcctggaatgaggtcgttctgccgatagttgcccagttcaagccgaaggtcatagttatttcggctggctttgacggcttccatggagacggtcttacgacgctccgcctaagtgaggccttctatgcctacgcagggacgaccctatcaaaataccccctagtggttgttctcgagggtggctacagtgttggactcgaaaagggtctgcctgtttttatggcaggatacctgagcggagagcgtttcgaagtctcagtccgtccgtcatttgagactctgagcattatggaacgggtgaaggaaatactgggggagtggtgggagttctgataaagaaaagagaaaagcggcgagtctcaaagccccagcatttccttagcggctttaacgccaagctcgaaggccctcatgtttacatctatcgtcttcggcgggacgctgatcctgatgacctcctttatctgctcctccgagagcgggaagccaggagtctggctgagtgctcctatgaggactacgtttgtggtgacgatgttgccagcctccatagccaacttctcggcgtcgaaggccatgaacttgccgccgaagtcctcctccacgatcttcttcatctcgtcaagcgttggataggtcgcgagccccatcgagacctggacgggcgggataggcctcgcgttggtgaagacgaggccacccttcttgaggtagttgatgtagcggagtgcttcaacaggctcgaaggagagtatgacgtcggcctttccctcaggaaccattgctccgtaaacgtcctcgccgaagcggacgtaagctatgacgcttccaaagcgctgactcattccatggacctcgccgacacgaaccttgtaacctgcccttaaagccgcccatccgagaaggttggcggcggtgagtattccctgcccgccaactccggtgataacgatgttgtactccttcatctcactcaccctccttcatgggctcgaacgcatcgaacggacatacctgggcacatccaccgcagccccagcacatcgttgggtcgacctttgccttcttggtctctggatcccagtagatcgcaggacagccgtaggcgttgatacaaatcttacagccggtacacttgtcctcgacaacgtggtagatgggccacttcattccccttctgcgcatctggccgatcttgtagagggcacagacctgccttgagacgacgacgctcacaccctcaacttcgagggccttctttatggtctcgtaggtagcctttatgtcgtagggatcaacgaccgcaacgaagtccgcacccatggccttggcaacgtcctcaatgggtatcctcttacccatgccgtgcggcgtctgtcccgttcctggatttggctggtcgccggtcattgccgtaacaaggttgtcgagaaccacgatgagaacgttggagcggttgtagatggcgttggcaagggccggcaggcctgtgtggtagaaggttgaatcaccgatggtagcgacgataatctgcttctccttgccctccttgtgctcttcctcggcgagtgagccgttcatcgctatgctgagtccgtgaccgatgccgatggaagcacccatggcgaccgttgtatcaaccgttctgagcggcgggaggacaccgagggtgtaacagcctatgtcgctcgggtatatcgccttggggccagctgccttccttatggcgaagaagctgtttctgtgcgggcacgctggacagaggctcggcggcctcggcgggactatctgagagaccttctcgtatttctcgtcgatctcggcgaagtttatcggcgtttcaaggccgaggaacttggctatcgcttcaaccgccctcctcgtggtcatctcataaactctcggcacgaggtcctttccgtggatcgggattctcaggcccttgtcgtaggcccaggttttgacctgctcctcgacaaccggctcgagctcctcaactatgagaaccttctcaaggccgtcgaagaacttcccaagcaggccgtaggggacggggaacggcgttccgagcttgaggatcttgacatcctcgactccgagccaggcaagggcctccttgacgtaggcgtagcttaaaccgggagcgatgataccgaccttcgcatcttccttgccctcgatccagttgaacgggcagttgttgagttcctcgcgtatcttctcgatcttctcgaggatcagcgggtggaacttcctcgcgtgggcggggacgtcaacgaacctcgtcgggtccttcttgaactttccgaacttcctcttaccggtctttatctcctcgggcagttcgccgagaacaacgtcgcccctcgcgtgggagctcctggtggttgtcctcaggatgacgaagtgtttgaacttctcgctcagctcgaaggcgtacttcgtcatctcctttgcctcgtggggcgaactcggctcaagaactgggacgtttgcgaactttgcgtaaacgcgcgtgtcctgctcgttttgtgaagaccacatgctcgggtcgtctgcaaccattatgacgaagcctccctcaacgcccatgccgaccgagctgaggaagctgtcggccgcgacgttaaggccaacgtgcttcattgccgtcatggccctgaggccactccaggctgcggctaaagccgtctcaaaggcgaccttctcgttggtcgagtactccatgtagactcctgccttctttgcgacggctgccatcgtatcggtaagctctgaactcggcgttccgggataggcggcgaaaaccgctatgttcgcctcaagcgctcccctcgctatcgcgtggttgcccaggaggagaaccctctccccgggcttgtcccacaacactatgtcggtaactttcgccatctaaactgcacctccagatacctctttcaagaaatcctcaagttcagcttcgtccaaaatgtaaaacgccttaacgcccatttttcgggccctgctaaccatatctctgtctgaggagattaaaattgcatcaaatttcttggcagtggagataaagtatgcatcagcagcccgaggatggatttttcttgcgatatctttgcgtcttcgaatatccaatcctctgaacctggagaaccctgctcgataggtactcttcaatgagagcgactgcctcatccttcccagtaagccgtttgacaagacttatggtctcaactacccccagtcgtggcatagctaagggaatttcagcgctctcagcactggatatcgctcgtcttgccagctcatttctgtgctcttttcccttcactggtattacggcgtccaccagagcggaagtgtcaaccacgagcatcccgcatctccttcaggagtttgtgggggtctttctcgacttctccaatgagttctctcatcctttcgtagaggtcgttgatagtaggcggagccaccttaggaagctttgcccccttaccctcaggctttgcatgggtttccataatcactcctccctcagcaagccaacgttcttcgcctgctggacgagggcgtaggctccggcggcaacgtcctccggcctctcgtagctcgggattccgttggcctcaagaagttccttcgccttctcgctgacgtaacctgccatgaagagtccaaggacgggctttccgttgttgacttcttttacggctttgatgacgccctcggcgtgctcagtcggcgtcattcccgcaaaggtcgggacgacgcagatggctataagcatgtccacgttcgggtcccggaggaggagcttagcagtcctgtagtagtcctctccgcgggcagaggctatcatgtccaccgggttcttcacggccgccatcggcggaaggaaggagcggagctcctcgatagttttctcctcaaggttggccagcttgaggccctttctgtctatggcatcggcggtgagaactcccgggccgccggcgttggtcattatagctacgcgtttgcccttcgggagcggctgggtaaatgccctcgccatgctgagcatgtcgtcgattgtgtcggcaaccagaaccccgctctgcttgaaagctgcttcgtaaatcttccagcttccggcgagcgaacccgtgtgagatgatgccgccctcgcaccgctctcactcctgcctgccttgagcgctattaccggcttcttcttcgtgaccctctttgcaacgtcaatgaacttcctgccgtccttgaggccctcgatgtagagggctatcgccttgtcctctttcgtgtcggcgaggtactccatgagctcggagaagtcaacgtcggccatgttgcctatgctgacgaacttggaaaagccgattccttccttgacggtcttgtagactattccagccccaagagcaccgctctggctgatgaaggctatgcttcccttcttggcgtccatgatgaaggtggcgttcatgtcgtcctgggtgttcataacgccgacgcagttcggcccgatgatcctcatgccgtacttgtgggcaatctccacgagctcccgctcttccctcttgccttcctcgccggtctcaccgaagccagcagttatgatgacggcgcccttgacgcccttctcaccggcgtctattatcgcccccttaacgaacctcttgggcactacgatgatagctaagtcaacttctcccgggatgtccttgatgttcttgtaggccttaactccctgaacaacctcgtccttgacgttcactggatagaccttcccggctttgtacttcttgaggttcttgaagacctcgtagcccagcttgagcgggtcgtttgatgccccgatgaccgctatccccctcggcttgaagaagtagtcgaacgtcatcaatcactcaccgtttaaatctcggttagagcgtatataagctttcccaaaacgggcatcggagaaaataagggctttgatggactcaaagagacgttgatgagcggtgaggttcctagacaatgaggcagattaagcaacgaccttacgaaagccttaaatactaatctggattagtactaatcatgattaggaaatttgttgacagggaaagggagctggggatcctcgaaaaggaatggaggaacactccgtcctttgtcgtcatctacggaaggagaagggtaggaaaaaccaggctcctcgtggagttttccaggggaaagagggccatcttccacacattcatggaggggacgaaagagagccaaattaaaagcctcacagaagaacttgcagatttcttcgacgatgaggtcttcctgagcttctccgactggtaccccctcttcaagtacctttcgggaaaaattgacaataaaacgcttctggtcttcgacgagttcacctacgcaatcaaaagcgataaaggcatcttgagcgcccttcagagggtctgggaccacgagctgagcagcaaaccagtgatgctcgtcctctcgggttccctgatgggaatgatggaggatgaggttctgagccactcatccccgctctacggcaggagaacagctggcttcaggctccgcccacttgggctcttcccgtcactcgggttctttgaggactttgaggagggtctgaagttctacatgctcctcgggggagttccagcttatctcatcatcgcttcccgttacaagacagttggggacttcgttgagggggagttcctcactccagagggatacttctacgatgagccatacatagtcctctccgaactcagggagctgaagacctacttttcaatcctctcggcgatggcctccgggagaagaaagccctctgaaatagcgagcggagccggcttggatgggaggaaaatttatccctaccttgagaccctgatgaggctcggtttcgtggaaagggagcttcccgttgcgagaaaggaaaaacgaggcctctatagaatctccgatccaatgcttatgagctggttctcgctcgtttattcaaacaggaccgggatagagcttggaaccataaccctcaacgatgttggggaaaccctccagaggattttctccttccgctttgaggacgtttcaaaggagtttctcatcgagctgaacaaagaaggaaagctcccctttaggttcactaaaatcggccgctggtggcataaaaacaaggaaattgatctcgttgccttgaacgagcacgagaagaaagcccttttcgtcgaggttaagtggaaggagttaagcgagagggaagcgaggggaattttaaaggacttggagaggaaggcgggactcgttgaactgagagggtgggagaagcgttacgggcttgtggcgaaaaagatcaagggaaaagaggagctaagaggaaagagcttcctggcctgggatctagaggattttgaagacatttaggatgattaagttacggacaatgctgcaagacccttttaccttcacctcagccaaagggagcacccgaaacctttaagtaagcttcggttattttaactctggaggtgatggcgatggtgaaggtgaagttcctgggccacgcggcttttctgatcgagggaagcaagaagatactcatagacccgttcctcagcggcaacccgaaggccgccgtcaagcctgaggaggttgaggcagacctcatactcgttacccacgcccacggcgaccacattggagatgctatagagatagcgaggagaagcggagcaaaaatagttgccatgtatgacatagccaactacatctcccagaaggcgagcgatgtagagaccattggcatgaactacgggccaaccactattgatggggtcttcatcgtccaggttccagcctggcactcaagcagtgatggagtgcacaacataggcaatccctgcggctacatagttaagctcgacggagtgaccatctaccacgcgggggatacattcgtcttcggagacatggcactcttcaacgagctctacggcccgattgacgttgccctcctcccgataggcgggcacttcacgatgggaccgagggaagccgccaaagccgtcgagctcctcaagccgaggaaagtcgttccgatgcactacaacacctggccgccgatcgcccaggaccccgaggagttcaagaggctcgtcggtgacaaggcggaggttgttatcctccagcctggagaggagcttgagctttgaaaaaccttttaaatttctcttcttagcttacttctaggtggtgaaatgggcagaaaaatcccagcggtggcagtaatagcgctgttcctatttccattgttgctccccactgcgagcgggcagaatcaagactacgaatatgacctcataatagtccgtaacgacgacctcattgactacatagtggcgcttccctattcaaagcatctggatgttcccattctccccgtaaacccgcaggagcttgaccccgctaccctggcccagcttcaaagctatgagcagttcggctggtaccacgtcctagttataggtgactatcaggcgataagtcagagagtccaggagcagcttatgagtcttggctttcaggtcaccaggataggtggtgagaccagggttgataccgccgctaagctggccgaggagttctacccctctggaatcgacgccgtcgtcctggccagtgcgagtgactacggttctgctctcgccgccgccagatgggcaatggcctacgacaggccgtttctcctcaccaacccttcgaatatatcccaatccgttaaggacaccctcgccagattgaaaccagaaacggtgattctcattggagcgggtctctccaaaaatattgagaaagaactacaagacatgggatacaacacctattggctccaggagaacataactatatccgtaccgacttccactgttcctgagggaataaactggggctacgtagtgggggctgttgtacttacactagccgttgcaattcctgcttcgctatactatgccaagaagaagtgggccgccaacagggtcccaattgaggttttaaccgagaaggagcgtgcggtcgttaaggcgatcctcgaaaatgggggaaccataaagcaggaggagcttccagagcttacgggctattcgcgcccaaccataagcaggataatccaggagctcgagaagaaacagctcgtcgagcgcgagaaaacagggaagactttcattgtgaagctgacgaaggaaatcatcatgcgtgactgagggtcggacaagccctccgctcatcacttttctcagggtcctggctgtctcctcatccccaaaaaagagggaaaatcgaatcacttgcggaagagatggccgtgagccttgttcacgtgcctcgtgtatgccttggcactgcggaagaccatcccacacctcgggcagcggaagagtatctctccgtccctgtcctcgatcttgatggccttcagcaccgccatctcctccacccccgcccatcctttgggtttggacttttaaattttgctggttaaacccaaatcctgttccccttgactttcaggtatccaagcgtctgtaaggttttgaggaagtcctctatggcgtcttcatcgtagtagatgttcactctatccccttcggcttccaccgttatgggctctatctccataagcgcctctataagttcgttctttctcctgtgcttctccgctagttcaagaatcttttcggccagtacagagcgggctatcgcatcaaaagtcgcttcaaccaggctctcttcagttgcatactcctctgcaatttcaagcgcattctcgagaagctccctgtcaacttcaaggacttcaacgtagtagtgcttgctcagagtgtactccgttatgagggttgcattcagatcatcgagctcgtcaagctcctcttcaagcccgtcaattggaaacctgagctcaagctctaggttatccaatggtggtttccctcttaaaactagcactccgtcgcgctcctcaacggctccctcctctatcagggccgttatcagggacagcttcgagagatctggctcttcaaaaagctcgctcaagggcttttcctggccgacttcccagtcgcgcataagctcctcataggcaagctggattgcttcaagttcttccccgaggataggggccttgggactgagttcaacgagttttgagtattttcccctaactatcaggtagtgctctatctctggcttcgtttcctcgactggcctgttcattattcctgccctgctgagctttctagagagttcgttcatatcctcacggcttaacacttcaagcctcacggtctccacctatcttagactgttcttgaggattataacctttcctcagcagggtctcaagaagagctttcgctggcttgttcgtcacgatgctgagagtctctttcacctcgttttccagtccgggttcgtatctagcgtatagaaggagtgcataggctactacctttggatctccctcgttcagaatctccatggaggaagcaagtattgggtcttcaagcagtctgtttgccagttcctcaattttcgccttgtcatctgcctgtactgcctccttgagcggtttgtaaaacctttcaaggagagttctcgccatgcgctccctctcaacgaggtctgagccggggctttccccgggtttccttttgaagagaaggtagtaaacgacgggtatcgcaaacaggagcatgagcacaacgtagagctttatcggaatttttattccgctttctatccttctggacacaataacgaggactgctgttccaaggatcattcccaccagtgttatgagaacgtagtaagcggagtaatccttaatctggggccccttagctttcacacctaactcctcgatgtgtttcagcctgtcctcagctatttctattattgcattgagccgtttttcacgcttttctatttcttcaaagacgtccatagacctccccccgatacttggtgctcgaagattaatagtcttctggtcttccagcggcgacaaccctgtagaatgcaattgctccgacgagggcatagaggtaagttgtgagggtcttgtagaggaatgcagtaacgatctgggccgctccgttgcctatggcaatggtaacacccagttcatttgctccaattccaccaggagtccctaggactcctcccaaaaacgtggaataaaggacacctttgaatgcttccccataggagatttgaactccgaccgatttgcccacgagaaaaagtgtggttgcgtttgagaataccatagagacccccaccagaatagctagaagtacagaacttccccctttggcttccctccatcctttgtacattttgtcgagcctttcaacggatttcattacccagaagagaggataaacagcgtagtatgcgaccctgtcaaagatcatagtgacgcccagtataaccgccaggatgccggctattgggtttctcgccataactgcgaccattataaggcccgaaatatactccgtggccattgccaggagcccaatgccgaaggtgtaccaatagtcagtcccaagaaggcgaaccttaaccaagaacccgaccgcagagttgagggaaaacccgagatacgtccctgaaagcgtcgcgagtagcgttctcctgaaactgatgcccctcttcttcaggtagacgtaccagagcgtagtgtagaggagatagcccgctaaacctgtgatgcaggcgagaagaaaatatggagagagcaacagccccggactgagctcaaccgacgaagcctccgagtgaacgcggtatatcaggtaggaggttatgcctatcgtcagtactattgttagagcttttctcttgttgcccaatttactgcccctctaggagctttctgacgtagcgcggcatctggaagagggtttcgtgcctctcgggatcgtagtagtagaggtcgagcttctttgccctctcaaggtctatcctggtgaagtcaacgtctcccttgaccccaacgaggaagctccagggcgaggcgtagcctattaccgggaagctgaagtagtacaccctgtcaaagactttcttcatggccttatacgcgtcgaggagctcgttcgtgaacaagtaaacgctgccggcctgggtaacgtaaagacccttctcgttcagcttctcgtaggcgtccctgtaaaactcttcgctgaagagaagcttcgcggggccgactggatcggttgagtccacgattataacgtcgaagcgttcatcagtttccctgaggtacttgacgccgtcgccgattatcagctcggcccgtggctcttccttctttatgagcctgtccaaaaggtctttggcgacgtcaaggtagaggtaagacgcttccacaacaccctcgtctatctccaccattatggccttctcaacggtgtcatgcctaagaacctcgcggagcgttccaccgtctccaccgccgatgacgagaaccttcctcgggttcgggtgtgcaagcattacagggtgtaccaggacttcgtgatagctctcctcaccaacctccacaagttggacggttccatccaggacaaggagcttcccaaagccctccgtctcgtatatctcaagacgctggtattccgtctgggtctcaaacagtctcctcttcaccttaaacccgactccgtagccgcgagggtaccattcgatgaaagccctctcctgctcgttgtatcccatgagtctcaccaccggtggatacgatgttgggttttaaagcttagcgtggcgagaggtttattaagaaaatcgcgtattgtcctatgtatggaaggaacaggtattgcaagaatcgtggccgagaaaatcgcagaggtgtgggatgagcttttaaacactgagatagttgggattccccatttggttggtagtatttcctcagatggagaggtcgagatgtttttagtgttctttgatgagtacacgtttgagagaacaatagaggacggtagcgttagctttacttttccaatcgaggccactgacccgaaggagctgtttatgtcccttctgaagttcatcagggaagggacgacacccagcattctagaacccggtgaaaagataaaggaaccccttaaagagaacctaacgaagagaggctttgaggttctctggattgcgggaaacgattacgttgacgcttgggtttccaaaagtggagtgaagtaccacctgagcttcgaaagaacgggaaaagacgaatacactttggtgagaaaagaaaaagttcagtaggggaacatgacgacgaccgctattgcggcggctggcttgtccttgacggttatctcggcgcttgcaaccttgaactcaccgagctcccagcccctctgcctgaagccttcttcgaccatcttcctgaccatttcctcggcttcttccttggtgcagtagcccgaatactcgtagatcagaccgccttcgttgttcttgcttatcccgacgcccagtgcggcgcttatcgtcatccccggctcgtcgctctcgatgtgggcgtaaactgtcggcaggagcattcctatcggaacgtcgtgtaccttctccatccactcgatatgtgcgggaataacgctgcttagcttgaccaggttaacgtttcctatgcccagcttgaggagtgcgttgtcaaaggcgttcagcttagtccctccctcagcggttgcggcacctataaaagctctctttggggttgtccagctcatctcaacctcctccttttctctttaggtatactctcctcctgttattagatgagcagactgtttaatcaaacgcgacttctttaccagcttaaaaacgtttcgctatatctaaaagaggcgatttgggggtgtttttgtagcatagaaggcccatggggggaaaacgcgctaaaacatcattctcgatgccattgagtagagaacgaagaaggttatgataagcgtgattatgtagaacatcaggcccgccgtgaagaaacaagcccaaacaggaacccatcctcaaatgtcaattttttctttcccatccgttcaaattcaaatcgccccaatggatactgcgtttgaccgcccatgataattttttgacggcgctctcaataatctacaggaatttcgactgaactccctatttccggccacaccaaaaagcactgataacagcttggacatgataaggtttaaatgctcaaagttgcaaccatggacggtgatgttcatgatcgaagtcggggaatacaaggtcaaggaaggcctctactacacgaaagaccacgagtgggctcaagttcttgatgacggcacggttctcgttggcataagcgattacgcccagaaggagctgggagacctcgcctacgtcgagcttccggaagtcggcaaggaagtcagcaagggcgacgttctctgtgagattgagagcgtcaaggcagtcagcgaggtctacgccccagtcagcggcgaggtcatcgaggtcaacgaggccctcgaggacagccccgagctcctcaacgaggatccctacgagaactggatcgccaagctcaagccgaccaaccttgaggaagagctcaaggagcttatggacgcccaagcctacgccgaatacctgaggagcctttgatgggctttttcttcttcattatttccttatttctaaagaacattaagcgtttgaactttctagcccttttggattggatgttatctgttgggtgcgtcgaaattaaggaatgatttttaagcttcgctcctttttatcatcggtgaaagtatggaaaagagactcgtgagatcaaaaaagaataggattttccttggagttcttgggggaatagccgagtacctggaagtggatccgactattgtcaggcttatcttcgtcgttctcttcgcggttaatccaggcgttatgacgctggcctacctgcttgctgctctggtgatgcccgaagagagctctgaggaagagagctctgacctcggcaagaaactcgaagacgtcataaaggaagctggggagagcctgggtgccgtggttcacgaggacagcacatccagaatcgtcgcccttgtcctgatacttcttggagccatccttctggtggattccgcctttagagtgctccctgtggtgggcttcaagacgctccttgcagttgtcctgctggtaatcggcgtagtgctccttaaggagggtgagtgatatgaggacgcttggatacatcttcattttccttggattattgctcctcctgaaggagtttcagccggcagtactcgagccgctgagggtttacgcgccctacataaagaacgccttctggggcgtgaccctgctggccctcggcctgtacatgcttaccagaaagaccctcaggaaagccgtcctagtgctctacataatctatctaatcctgtacctggtggtgtgaatggagcggtggaatattgtgagagcgtttctgcttggccccctgctggaggcggcacttccaaagcccggcaacgtgaaccgctaccgcgacttcagcgacctcaccctctacaacttcatattcgccaacacggctgttgtgagtgtttaccatgaggccgtgaggactgcggagctggtcaggaggggcgagctcttcccgtctgaggctggtattgggagtctgataaaacgggcggtgatagcgtcgaaggaagtccaggacgccaaccctaactttggagttctcgtactggggatacctctggccatgggttcttccctctcgaagaaccccctggaggctggagaaaaggcccgcgagctcatccgggcctcgacggttagagacacaatggagctttaccgggcaatcaggacggccaacccgaaaggaatacccggcggtgtcaagtacgacgtatattccgacgactcatttgaggagctcttcagggacgggataaacctgtggaagctcgctgagataagctgtgagagggagcttgtcttctgtgagtggctcaccggctacgagctcacgtactcgaccgctgagaggttattccagctcataaaagagtaccctctggaagatgctgccgtcagggctttcctcgaacttctggcaagcagggaggacacactcatagtcaggaaagccggaaaggaagaagcagagctcgttttggaaaaagcccgtgaagttctcgagggaaggctcagcgttgatgagttcgacgcctttctcagggaaaaaggtgacttgaggaatcctggaagcctcgccgacatcatggcggcatcgctcagcgttttagccctcgcgggcctgaaaatcaaagttgtggacggaaaagcatggggaatcatgggacaaccttaaagcgcctcgtggctggggcgtatccaagggctttggtgtcaacgacgaccgcatctccgccgagctcctcaaggattctcaccctgaggccggagagctcaaaaacttcctcctctccgccaaactcctcgtttacttgttcttttataaactcataagcttccttcccgacgagaacgacatcgggttcaaagccctccagcttcagctcgttcgccttctcttcaacagagctcagaatccttatcaggtctcccctcataactgtcaccatctctgggttgtcccgaaggttaaaaacgtttgcaggaacaaaaccagggaaaagaaaaagacatcaggaaatcttcttcagcttcacgacttccttggcgaactcctcaagaacctccttcctcatgccctcgaagaactttatcgagccggcgtagctgtgaccgccgccctcgattccggctgacggaagcttctcctggagctttggaattatctcgttgaggtcaaagccgtaggcagccataccgtcgctggccctgacaaccgcgaagtctgggccgtaggctaatgtcagtatcggcgagtcctcaccgtacttctccttgaagtggtcgtggattaatccagagagcttgcctggagacggatagctgaacttcggcgcgaacagctccacatctatagtgttgaaccttaccccgttcggcaggacaacgctcttgacgtgcggcagggaggccctcagtgccttctcctgcttctccttgacctcgggatagatggcattgatgagctcgcggtgcctctggaggttgccggtcaggaggagtatttcatcgataatgccgtgtccgtccatgaacttccagaagtaggcctcgtggtcgatgacctcggctatcttcttcaggtcttcctccgtgaggcccttcgccttcttcgctatctcgagatactggtagaactccggggccttgctcttgtcgcccgttccagctatcgcaggaaggtgctttatcttgtcctctacttctggattgatgaagcgcgccacttcggtggcgagcattccggccgttagctcgtagtagccgcgcttgacgtggtgcgggttgacgtgaacatcgacgtagtcatcaaccttggctttgtcttcgctcacccactcgcgcgggtcgtggtggtctatgaccactatcgggacgccgtaggcgcgaatgcgcttgtaagctggaatgtcttcgcttgttccaccgttgtcaactataacaaccagcgggagcgggtcgccgaacttctcgtggtcttcgaccatgaagataatgtccttaagaacatcctccagctcgtagaagggtgccctgctcggtctcctcttgaagagcttccacctcgcctgcgggtctggtgatatcttctcgatgagggggactatagcgtactcaagggccaggccggatgtatagccatcggcatcggcgtgatgcctcaggagtatcggccttccctccaggattgccctccttatcatgaaggcggccttcattatcttcggcttgagcttctcaagaacctcgctctccaccaggaaaccaacgtcttccggctgtgccctcctgtcgagctcggcctctatctgttgcttcaccctcgctgcatccgggccccagagcctcgccatgtcgctggcttcgatctgtatctcgcccgagtggaaggcaaccttaccgatgacctcaactatgtccccaacgttgatgttcgggtaagccctgactccgggcgcctcaaaggccgctacccaggttatcccagttccgtcggttatcgtgaagaccgtcggcccgccggttacctgaacttgggtgattcttccctgtatcctgacggtcttacccgccatgtccttgctcagctcggctatcggagtgaccggaagctccttcctaacaacgaccgtcttgtagtgcttgagggcagactctatgaggtcgacctccctcttgtcgggtctcacgtcgagaacctgcacgactatctcgtcgccgggcttgtactcccttccaccgaggaggtctttcctcttgatgagacccgtaacgtgtgggttgagcttgacgaagacgccgaagcgctccaccctgtcaatcgtgcccttgtacaggctaccaacttcaacgtcttcataatcacatgtcttatcgaggatgtaaacgaccttgtatttcctcagacagtcaggacaaacccacgttgtctccatgcccggctcccaggggccttttatctttccacagatgtcgcaggctagaactttcccagttcccccgcaggtcgggcaggtgtcgtaaactggaacagtacccttcccatggcactcagggcagggtatctcgtcaacttcatcctcaactccaaggtgatctaggtttctgtaacccttgagtttgtctccaatcttaaagtcagctggaacgtatccccagccctcgcaaacggggcactccttctcgccaacttttactttgcccgttccgtggcattcgggacagtctttcacaaccatcttctctcaccggcctaagtttgaaggttgccttaaaaagttagttagtccgctttgggtcttcgggggatatctccaatcgttgcaacctacacaaatacatacacaaataccttaaaaataatcgaagagtaattcagattggttgatgattcccttaaaggggggattgttgttgaggtttaggcagaagatttacgtcgcgatcattggaactctcacggtgataatgctcataatggcggttctccaagttagggggatcagccggatgggggaaaccgtcgaggagacaatgagtccggccctattggagcaggcgaaacatacggcgttattggaaagtgaaagctactcaagggagattgatggtgttatgtatgcgctccgtatgttggccgattcctatgctaagtccatagagaaggaatactcgtttggctcctacatccccggatatacggatagccccccgttctggaactacgttaaaaagattcttcagagctttaaaaattccgatgagaggataatcaacgtttactacgcggatttcagggggaggctggaaataatcccgccagcggagcttccagaggatttcaacgcgacgaaaactagctggtatcagagggcggtaagtgaggggtccttctggacggatccgtatacggatatgataactaacaaaactgtggtcagttacatcgtccccattaagtatgagggagaagtaaagggcgttcttggggttgacgtcgatgtctccatcataaaggaggaaatactgagagcaaaactcggaaaaacaggttactcattcgttgtcaactcaaacggcaccgtcataatacatccgaacagcgacctcgttgggaagctcaacatttttgaagatccatcgtattcggccctttccaaggctctggagaggaaagatactggcgtcattgagacgaccctcaatgggaaggacgtgctggtggcattttcgaagagcagtgtgtcaggatggataatattatcagtcgtgcccaaggaggaaatgatggcctccctgctcagcgccctggagagggccaggggtgaggcatcaaagagtctcgttttaagcctcctcgcttctttggctgctggtatagtgctggctctcctcagcgtaaaatatctgcgcgactctctcagacccatagaagagctcaccaaggctgctgaattgattggggaagggaaattggaggaagcaaaacggcacgtgtcgtcgattgactacccgtacagggacgacgagataggaaaactcctcaccgcctttgaggcaatatcgaaggatgtcataggcacgctgaacggggtcatcgcccgtctgcaagacatggcggagggcaggctgaactacaccctcgatgaaaacgcgcgcggtgacctccagaacataatcctcgcccttagggagacctcagcaaagatgaggacgctcatcggaaacatcagggagatagggtttgagcttgataggcaggctgatacactggcggaaatcgcggagaacgtcaggcattccatggatcaggtcggcgaggcggtggagcaggtgagcatcgaggcccagagggagcaggagaacatcaacgagataaccgagggcatgcgcgtggtttcttccataacagaggagacagtagatacaatgaacgagtttgagagtgccgtgggggaagttgtcaggatagctgaagagggcaggagcaagggagagctggccattaaagatgtcgagagcataaagcgctcaatgcacttcatagatgaggccgttaaggcggtcagtgagatgagcaggaagatcggtgagataacccaggccatcagcggcattgccgagcagaccaacctgcttgccctgaacgcggccattgaggcggccagagcaggtgaggcaggtaagggattcgcagtagttgctcaggagatacgcagtctggctgaagacagcaagcaggctgccgaaaccataaacagaatcattgcggagatggaggagaaggttcagagggccgttgaggagacgcagaggggagttaataccgtttcgaggtcaacacagggtctccaggagagcctgggctacctgggtcacatcgccgagatgataagtgccgtcggttccagggtctcggaggttaaggagcaggccgagaggacgagggaagaggtggagaaagccctgaaggcgctggagaacctcgctgcaagtgccgaggaaacgaccgccagtgcggaagaggtaagctccgccatgcaagagcagagggctgagatagagagcctagcagaagaggccagaaagctgcgcgaaatcgcgaggtcactccgccagaacgttgagcagttccagctctaagcttttctgacttttcttcttgttttctatcatctcctcccgaaaataaaagaaggggctaaaaggggattaaaacacgccgccgaggtaagcgaagtacgcgacgaagactatggtcaagacgtacattagcgggtggacttccttccagcggccgctgaagaccttgaggatggtgtagctgatgaacccgactcctattccgtcggctattgagtaggtgtagggtatcgtcacgaggacgaggaacgctggaagtgcctctgtcgggtcgctgaagtcaacttccttgagggcggtgagcatgtagtagccgactatgacgagggccggggctgttgcaaaggcagggattgctccagccaggggagctatgaagagacctatcgcgaggaagaggaagccggtaacgagggccgtcattccagtccttccgccttcttctattcccgcggcgctctcgatgtatgtggtcaccgttgaggttccgaggaccgcaccgaaggtcgttcctatggcgtcggtcaggagaaccttctcggcatcgggaacctttccgtcctcggtcaggaaaccagccttcgcgctcagtccagttacggttccaagcgtgtcgaagaagtcaaccatgaagaacgcgaagacaacacccagggctcctgcgtttaggagtccgtggaggtccatcttcatgaaggtgtagcttatgtcgggcatcgaaaagagactctcaggccagggagcggccccagttatccagccgaggaagcttgtcgtgagtattgagatgaggagcgcacccttgatgcggagtgcaatgaggattccggttaagagaagtccaaaaacgaagagaaggcccgctttggtcgtgagggcctgagcgttgaggcccgtaaaggcgagctttccgatgaggtttacctccccgtttatgacgaactcgcttccagcaggggccgttacctttgccgtgagcagaccaacgtcgttcaggccgataagcgtgaggaaaagcccgattccagcgcctatagcgtacttctggcccgtaggtatcgcgtggattatcgcgctcctgaccttggtgacgctgaggactatgaagatgagaccttcgacgaagacggccgcgagagccaccttccagccgtatttaggagcaactgtgtaggcgaagtacgcgttgagacccattcccggtgcaagggcaaagggcttcttggcgtagatacccataaagatagtcgtgaatccagcggctagagctgtcacagcgacgagtgagttgaaggcctcctttcccatcgcatcgctgaggatggatgggttcacgaagagtatgtacgccatagtgaggaaagtggttaccccagctaaaatctcggtcttcatatcggttccatacttttcgaactcgaagtactcctcaaaccatcccatgagcgtcacccccgtttgactattacctgctaataaaaccgatttttaaatctttttttgacgtagaaatgtaaaactgggggcagatgaaggtctggtgcgtttgggcaaaacaggaaaaagcaatggcatcagaatggccacttcattcgaggacagaatacgaaagaacctcgacgctcacttccttggggatgtcttccgggctgaagggcagttcgttaaggaagcgctccgcagttatggtctcgccacctatccccagtctcaggcgtatcctgcccggcaggaggtcgtagtcaatgaccctggcgccctttccgggcttcacgaggacgttttcgggcctgaagaagaccctaacttttccatctcttcccgttttgaactccagagtgccaaggcgggcgattccgttctcagcttcaagctccagtatgttgctcaaacccaagaacttggcgacaaactcagttttcgggtggtagtagagttcaagcggttttcctatcccttctatccttcccgagttcatcacggctattctgtcgctcacggccattgcctcttcctggtcgtgggtgacgtagatcgtcgttatcccaagctccttctggattctccttatctctcccctcaggcgctcgcgtatcttggcgtcgaggttgctgaggggctcgtcgaggaggagaacttgtggctctatgaccaaggccctggcgagggctaccctctgctgctggccgcctgagagctgttctgggtagcggttttcaaaccccttgaggccgaccagttcaagcgcccactcgaccttcttctttatctcgtccctgggaagcttcctcatctcaaggccaaaggcgacgttttcaaagaccgtcatgtgcggaaagagcgcgtagtcctggaagactatcccaatgttcctctttcctggttccaagttcgtaacatctgtctcgtcgaaaaacacccttccagagtcgggtttttcaagtcctgctatgatccgcagggtggtcgtcttcccgcacccgctcggcccgaggagcgtcatcatctccccgctctccacttcaagctccggaatctcgagtgtaaagccctcgaacgacttccttattcccacaagcctaaccctcaccatacttcctcaccggttctctcgatgattatgaagccgagagccgagaccgccatgaggagaacggacagcgccgaagcgctcccgaactgcctcgcgccgaggaacttgtatatcgctatcgtcatcgtggtgtattccggtgtggcaagcatgtaggtcgcaccaagctccgcaatgctcatcgcgaaggcgaatattgctccaaccaccaatcctccagcggccagcggtagctcaactctcaggaaggctttccactcccctgcaccgaggctgagcgcagcttccctaaggtttggctttatcttcttcagggcagttgaaacggagcgaaggacgaacggataggctataactgtatgggctatcacgattatccagatggtgtagtagaggggtgtcgtactgaagaacttcacgtaggcgaaaccgatggttatcggcgagctggccagcgggagcatcgcgagggcatcgagcaggacttttcccttaaacttccagcggttgaggaagtacgctatcggcaggccgaccagagttgagaggaacacagttgcaaagccgaagaggagtgagttccttatcgctccgagggttgaagttccgaacatcgggttgtactcggtggagaatatccttctgtaccactcaaggctccaagttccgttgaagcgcagggagtcgtagacgacggccccaagcggcgccaggataaagaccacgacaaagatggagtagagaactatcccgagccccttagggcttaagattgacctgatggtcagctccttcggtttcctcattattctctgctcctctctctttgaatacgcctcaagcgccttcaggtagaggtacatgaagaccaccgaaagggagagctggattattgcaagagccgccccggttctgaagtcgaggagggtaactatcgtcgaaaatatgtccacctcgatggtaacatactggtagccgccgaggatgagtggcacggagaagctgaggaagcagaaaacgaaggtcagcatagccgaggcgaagatggccggtgagatcagcgggagcgtgacctttctgaatagggtaaacccctttgcccctagaacctcagccatctcctcgtagtgggggttgaccctctgccagagcgccgagaccatcctgacgacaatcgggaagttgtagaaggagtgggccagaaggattgccttccaagagtagattatgcccgggtcgcgccctatcagtcccgcaatgatgccgcccttcccgaagaggattacgaagccgagcgctaccataatgcccggcatcacgaaaggaacagtcaagacggcctttatcagtctctttccggggaaatcgtagttggcgaagatgtacgccccgggaaggccgattagaacggttaaaaccgttgacgctaaagcctgggaaatcgtgaagaggataacgtttcggtggtactcgttgctcaggactgcccggaggtactccagggttggcccgttttcccagactccaagactgaggatgctgagtattggggcgtagaagaagaatacgagaaaggccagtggcggcaggatgaccgcgagcgcttttggtctcatgcctataactcggttcttcgggtttataagcgttgattgggcaaggttgttaaggtctggtgggctactcataccggtgactcccatgaaggcccctgaccttggaataaggataggtctccacgaacccggaaagaggaactcaatagccgacctcggagttaaagtcgggcacacaactctcatcgagggcgatgacgtaaggactggcgttaccgtagttctaccgccggtaaagaaccccttcagggagaggctcttcgcttcgacattcgtcatgaacggtttctccaagccgataggcttcgttcaggttgacgagctcggctacatcgagacgccggtagctctgaccaacaccctgagcgtttataccgtcgccagtgccgtcgtcaggcacatgattgacctaaacccagacctgaagagcgtctcgcccgtcgttatggagtgcaacgactcctacctgaacaacatcaggaagatggcggttaaggaagatcactactttgaggccgttaaaaatgcctcgctcgactttgaggaaggcgctgtgggggctgggacaggaatgagcgccttcgagtttaaaggcggtataggctcttcctcaagggtcgtcgagattggcggggaggaatacaaggtcgcttcgttggttttggcaaacttcggaaggagagaagacttaacgatagctggagttcccgtcggcgagcttttgaaggactatcccggtagggggacttcagggaagggcagcatctcgatggttgttgccaccgacgctccactcacggcaaggcagcttaagaggcttgcaaagagggcagtggttggacttgcgagaactggcggctacgcctaccacgggagcggagacatagtgctggccttctccacagcccagaccgttccaattggaaaagagccggaactggttagtttcctgcctgacaacgctctcagctacctcttcagggcgaccgccgaggcaacggaagaagcgataataaacgccctcctgcaggccaagaccgttgagggaaacgggcacgtgaggtatgcgcttccggttgagagagttttggaaacgctcaaaaagaaccgagcatcatagcccctcgatcttggggatgacttcctctgggctgccctttagaacggcccttcccgcggctatgaccacaacttcgttcgcgaacttcattaggggcctccacacatgggacaccgccacgatgttcaatccatcgttcgcgagccttccgagcgtctctgagacctcatttattccccgaaagtcgaggtttgcgaggggctcgtctaaaaggaccaactctggttttccaatgaaggcctgggccagggaaagccgcttcatcattcctgcggagtattcgccaatccgcctgtcaagaaaacccgtaaccgagaacatctcggcactctccagaacgttatcgtcatcggctcccttgagtctcgcgatgtaatcaagccactcccgcccggttctgtgcttcgggagtgcgggtggatcaaaggagactccaagccgtgatttgaccctttcattgctccagggggcctcgccgagaacttcaactctccccgagctgggcctgtagagccccgcgcatagtttcaggaaagtgctcttgccaccaccgtttggacccaggatgagcgtgaatcccctttcaatcttcacgcttattgagtcgagggctacgagctttccaaaacgcttgctcagattttttgcggtgatcatcttctcccctccctgaagagcagtaacgcgagaattattgccgaagttccgccggtgaagtattttatctccaggattctcctcgatggatactttgaagtcatccggtatgccagggtaaccggtgcatagtagctgtttatctgggcaaaataataaccggcgtgcttgattttcaagtatccgttgagctggcccttgggagtctcgttaaggagaaatccatttctctccgggtcgtagaacgaaacgctgtaattcgcacccattccggcgttggtcgtcacgcgaagaacgccggcggatggcagtacaaaacctttttcgttactcacaacgcccgaagtggacgttctaagggccttttcttgcagtgggaacgagaggagtgtgaagatcaaaagggccaggaggaacgcttttatgagcctcacgagacatccctccactcgcttagaacgagcgtgagtgaaagaacgaccagcgggagcaacaggcagggataaaacgtcgtgttaaagaaaatgcccagcttttcccatggatcccagaacacggcgtgggcttttatgagtccatcgttcagaattctgggaggcagaaagtcccagccaaggatctccgggacgtacatcacggttattccgcccaggatcgccgcaaacgtgccggggctcagcacggctatcatggaggacagggacgacacgtaaagcgccgcttcaagccagtagagaatgtgtataagcaggtaacgctgaccgagcattccctccttgatcatggtgggactgtccccgtaggagtaaaggtaggcaacaagggccgcactgaaggctgagaggaagaggactacaaagaccgcaatgaactttgccagaacaaccttgtagttcctgaggggaagggaatagacgctctttgcaacccccgtgtccctgtcgtatcggatggccagggatgtgaggagaaccccagtaatggcaaagatcgctgtggacttatcggagagtcccggaaaaagcatggcagtcccagcggccgcgtgctccctggccgttcccagccccatggtcatcacgttcgtatcaatgtcgaaaagattggtgtagaacgtcaccgccagcaggaggaagctgaaaacaaatatgagtgccacgtaggggtcctccaactcccatttcagctgctctttgaagcgccccattggctcacctcctccttagagcgatcccagttagcagtatcaccacgacgagcgcgagaagtttgtgagtagtgccataggagtttcttcctgaggacggcgctggcgctggtattttggttagtttcttagtcggggtatcggagttcatggactcattagaggttcccgcattctttctgaccttctcaagggttatggtgacgttgaccacctttccgggctccaggtatgcggtcttgctcgcgttcatgtacccctccagagatacatccacagtgtagcgtccaggttcaagggccagcatgcatgggctccggcacgttttgttcccaattgataccagggccccggatggcaccgtggtgaccgagagaaccggcaggggcttcagaccgatttttagaaccctcgactcgtttggagcgagcaggacgctcaagttctcggcgacgtggccgggggctgttacgtggatgaagtgtctccccggtgaggtctcaacggagcggttattcacgggtttcccgtcgatgaagacggaagcgtttgatggggtcacgttgaagaacaaccgcgcgggtagaggcttgagtttgaggttgagctcccttgtttctggaactgaaaagttcacggtgacgccgctgttgttcgtgaaggccgtgagggtgtaattcccctccggaaggtagatggtcccaggtgagacccctgctgccttggcgtttccgacgacttcaaagctggccgcgggggtggtgttcacacgaaccccgtagagctcgacactctcttccctcaccctgatgagctcaagggcggtcctgaggctgtatgagataccgtacttttcccagggtcttggctttaccacggccgtcacgagagtgtgattgagtcccacgcttaagttgtaagtgtcagtttttgggatatggtttatggtgatggtgtctccgtcggtagtcgttccggtgacgttgtacacatcttgagtaaccacgggcaggattatagtgaagggagttaccatcgaagtcgagctaacgttgtaaaggtagccatttacgagctccacgtcagaggacacttcaactgatgagaggggagtcagaaaacttgtgtccttgagggcaattcctgatgttccaaaggggcctgcaatcgtatagaagatgtactccagctttccatttatatcttggatgccactccttaagtaacatggtgttatagtgttattgatcgtgagctttgcgattgtgtctccagcgtcttctagggtcatcggcagaggtctgtcgatgtaataaaagggactccacgctcctccacatccccttggaatcccaaggcttgggcgagagctgtattttgggtagtgtttccaccagtcgtacgtcactttaacaccgaggatcgtgaggtttccctccaccaactcatcaggctcaactgtactgaattccaccctcacgagttttgaagcgttaacgaagactttggcctcaagcttaacttgaccctctgcgctcacagtgtagttccccaccggaagaacgagagttattggggtgttaaaaactccaacgccgcgaacttcaaccgtgaggttgtccccttctatcgtgagggcaccgtaagcggagctggccagtgctccctgtgttgtgggattgaagatggcagtcaacagcaaccccattaggaggagcctcttcatcttttccacctccggatgagcgagactacaagggcccctacaccgaagagcatgtagtacttgagggcggtatcgggacgcgttcctgttctgtcctcagggaaccgaatgttggttttataaagtacaaactcgtagggccagtactctctagagaagtcaattttgtcgtttatctctgctgagtaatagttgaatggggcgacgaacattatccccgctgcgtagagttctggatatggagaatctatgtcaattgctatccccgtgttcaagtcgtagagtgattcaaaacctataaaagagcttaagtagccttttttctgatagattatcggcaaccagtttgatctaatcctcactagcggggggcggaaggttctaacgaaagtgtgcacgagtttgtcctgggcaaaggttacgttattcaccttaagatctcccaccaccgtaaaaccatatctcttcagtattgatgctttgtagagtaggctcttcctttcggggaggttgtaggggaggatgaagaatgtgggtctgcccagtttggagccgttgatgtaatagtatccgtcggtgaggttgaggaaaagttttcccctgaacgtcagtgaatcaacccagcatcctggactcggcgtcgcgttttccagcgttaatgtgacaagaaccactgcagaagaattcgtcacatccgtaagattaaaggtgataaagattggaccgaaaactagaaaactccggaggattgagtaattttttgagttctctataccttccctgaattcctggcattctctctttccattttcaaaagaggattcaaaagacttcctgttctccgtggacagctctgagggaatgaacgatacagaattgaagtagtccttgtatcttccttcccccggcaacaccgcgtacgttacgtacgttccgtttttgaaccaggagggtggggtgaaagcgcctgcataggagacaaaaaacaatgaaagaatgaagaagcccgcgagaggtctcttcacggccggaccctccatttatccgggtggccagtagtggggtattcttgcgtagaccctggctttctttcctgtgtctggatcgatatattcaaccaaagcgtaggcccatttccaatccgggtctatttcagtcaccttagcccttcctgtcagttgtactccctgtgccactgcgacaagatttggtgattttgggttttgatccggaattatgcgaacgaatctcgagtggcagatgaggaccttggcgtgagcaccggcccaaacgagaacttctgaactccagctcttctcatcgacgtcgtgatcccagacctctttgcatgacgatgtcgacgcagccgagggcacaggcagtccccacgccgatactaaaccaaggagtagtcccccaaccaggaggacccccagcactttcctaagtttcataggtatcacctgcgtataggcaattttaactatttatttttgatatataaaattttctagcaaacaaaataacttgccttcaatttgaataattaagaacatatgtggacattattgtgctataaataatagtatgagtagttaaaaaactgttcctctggccttccccttgccgtgaatgatgagactatcaaagaaagggtattgggtctggagtgggtggtgttctagaaaatcgtatcctcttaagtacacacccgcttggatattatcgtttcaggaacactcagatttgaaagaacgcctggtttcgagttcaatgtgcttatctatgggcatcgatttggtaccacaaattgatatggggcatttattgaaaatagaaattcttaaatatgcaattttttcttcatacctatgaggtgatgaaatggctagaatagtcctgacgaccgatgagactctgacgagcacgtaccacgacgtgcccctgctagactttctcggctgtgcgccctacgacaagctcccgaagtgggttttcaggttttttgacacccagctacctgatgagaacggcgtcctgactcaagcgccctacggcctcaggaaggtcgaggcagcccttctcagggatggctttaggagggatgaggtcgtcgtcgctcaccctcgcaagattgagaatttcatagggaatgacaccaccatcgttgccctctacgagatggacccactcggcctggggccggtcagcatgatgttcacgaacggcggcaagtggacgaactacaccaaggtcaagttccttgagctggtggagaggataaaccgcataagggaaggcaaaaagctggacttcaaacttgtcgtcggcgggccgggggcctggcaggttgacttcagaaaagaggagcgggagaggctgaagatagaccacgtggtaatcggtgaagtagatcacgttgcgggggagctcttcagggagatcgagagcgggagcgccgacgagactatctttatcaagggctggccgcgggtggagcatatcccgacgatagtggcgccctcttacaaaggcctcgtcgaggtgatgaggggctgcggaaggggctgccgcttctgcgagccgaacctgagggtagcccgctacatgccgctggagaggatagaggaggaaataaggctcaacgtcagcgctggaatcgaccacgcctggctccacagcgaggacgtgttcctataccgcgtcgaggataagaagaacttctacccgaacgccgaggccgttgttgaactgtttgaaatagccagaagatacacgaagaacgtgaacccgacccacggggccgttgctggcgctctggccgttcctggaatgatagaggaaatttcccgcatcgttgatgcaggcccagctcactggataggcattcaggtcggctttgagacggcttcgccgaggctcatcgggaagtacatgaacaacaagatgaagccgttctcacctgaagagtggccctgggttctcctcaacgggacgtacgtcctcaacaagaactactggttccccgcatacacaacgattctgggattgcccggcgacactgatgatgacgagataatgactgcccagctgataatcacgatggagagggagcttgaggaaaagctcggcaacagggcgcacttcaccgtgactccgctggcgttcgttccgatgggcctgctcaagaaccaggagttctaccagatcgacgagatgataacctacggccagttcctccacctctactacgcttggaagcacatgatgagggaggtaactaggggcctgcccgaggttatgaaaaacaacccgttcctgataccgttctacccgctggcgaggcttggaactaggatcgtcataaggcagatagagaagtggggcaggagcagaggttatgaggtaaaacctcttgagccgctcgatattcggattgaggtagaagaacaccgctggtattctcagccgagccttgtggaagcttactgattctggaagctcattttctttcatattttactatttgtcaaactttcggaaatttccgaaaattttataagatccgagtgccaatgcacacatggagatgataccatggaggcgttcctcctgctcgtgaccgatgcccggaacgacgactgtgtcttggagcgtgttcttggccttccgcaggtctttgaagttcaccgtctctacgggtactacgatatcctagctagggtcagcgtggaggaccccgaggaactttcagagattcagagagaacttttaaacacaggaagggttctccttatagagacattaatctgtgcggagggagcgagttgagcgttgaaaatgctaagaggataatgatggagcattttgcgagtacggcgagaaagttcggcctcagcgagctctacggttacatctacggcgtgctcttttttgaggatgagcccatgagccttggagagatagccgagagaactggctactcgctctcccacgccagcagtgccctcaagttccttgagaacctgggactcgtcgtgaggataaagaagccaggcgataggaaggcatattacaaagccgtgaagaacatccaggagtggcgcagggcggcgtactacaagagaatcctcgaggacgttaaagaaacccgcgagagtcttctgagggcacttgaggagctggaaggagaggaaagtggggaagccgaaagggttagagagaggatagaactcctcctcaagaagaatctcgtggcggagaagatagcggaaatactctcgaagggcgatgagaaagttcttcgggtcatcatagattgcattgaaaagaggtcgaaaagaacttcagacgacggctctggtgctgcgctttaggcctttatctcctcatacttcttcttcataaggagggcgtcttcctctatgttcgggctctcgcttatgacgacgcctttaaccctgaactccttcaggactctgagcaggtcttcccagttcatgtcgctctcctggagaggcaggtgtctcttttcacctttgtcagtgtactcgatgccgctcatgtggatgtgcatgttgtccaaagcctctctgccgagtctgtcttcgatgaaggacagcatctcgcgccactcttcaacgctgttgcactttcccctgttccttgcgtgggcgtgggcgaagtctatcgtcggaagaaccatctcaagctcctcgctgagcttcactatctccttcaggtcgccgaactgggtgggctttccagttagctctggccttatccagactttcacgcctttgtccatcagctccttctggatgtccttgagtgcttcgaggattctctgatagacgctctctggcggctgtttgaggtagtagccagcatggaatacgacgctccagccacccgcctcgtagagcctctcggcgctctggattatcctcttcttgctcgcctcgaccttcgccttttccttagcgttgaggttgatgtagtatggggcgtgagcggttagaagaacgtcgttcttttttgccacgtacttgattttctttgccagctctggggaaatgttgacacccctcacgaactcaagctccatagcatctaatccgagatttctgacgtgctcgatgccagtaatcgttgaaggcttcggcgttgacaggggtatcccagccgttccaaagcgaagcctgtccaccttgaacatactcaccaccggtatgaattaggccttcctaatttaaatgttgccccattcaatctcttccccaagggccttttcaagcaatttaacttcctgctgaatctcctcttcaaggcgggccttcagtttttcgagctttttcttctcgctctcaagctcggcagtcctacgctccaggaagcttatctcgtcttcaagatgccccgcgcgtgaaagttctttttccatggcacttctaagttcatgaatttttctgtccagttctttaatctcactgacagtgctttcgaggttctcactcagccattcaaccgatttgcgggcctttccttcaaaccttggcttgagcgtttggaggagcgagaccacttcccccggcttttcgagtgccacaccactgtccctggcaagctgatcggcaagaccacccatgcggagcctctttaaggttttctggattttcgaaacatttgacctaacttccatctcgagctttttcttcttggtgataaggttttcaagttgcccttcaatgctcttgacttctggtttctggcgctcttgttcgatttcctttcttttcagcgatatttcttctagaagagactctatctcggaattgatgaaactgagcttttccttcacggttttaagctcttctatcttttcttcaacttcaagcttggggagtgatatcctctgggtctcttggaggtattccctgtacccttcgtccatctccttgagaatcgagtttattgccagaacttccttttcaaaaagtattatgacgtgctttccgtaatcaatatggacttttcccagttcgggaaggcgctttccgaggtcttcaatgtcctggatgccctcaagggcgcgtttaaaagccgaaacgtaggcgcgcctgtcggcttcgacgatcttaaggagagtctcgtcaacgtttttagggggcttaaccttctcaagtttttcaacggcccttttcagttccttctttttcttggagagccatttttggtagttctttcttattttcagggcttctttctgcgactcttcaagccttagctgatactttctgagtgcgtcttccattctcaacgttcatccatcccttaacttttccgcggaggtacgcccccgctaaaactgccagcccaacgtccagaatgcctagtaagagcttctggaaaacctcaatgtcggaaacagtgaatatcgatagggcatatctcgtagtgagatcgagggtcacccagagggcaggtgtcatgaggagcgccgagatatagtaccatatgtgatagtcgcgcctcaagtaggcgtgaaggacttttccggctatcattacggcaattccaatggttattgtcccggatattgcgttcaggtatatcagcgttgccagaagcgacgttccggggtagctccctataagctgcagggaatagctttccaggttcaggtaggcgtttattgcgccgctgacgattattagaattccggccacaaaggacaggacaactacgaactgctcaacaaccgcgcgcctaaaagctgctaaagctcccccaatatccaggttgaaccctttcgtaaagaacagaccgccgattatcagaaggacagtaccggaaattaccgttgacactatcttctcactctgcggataccatacacccactatcttggacagaccgtagagcagaacgataaggccgggaataccgaagacgaccttcgcaacttccgggtcgctcagtatctccttcatgtacttcactataatgtaccatgtcgtttcaatgcccgggctttgcttgaccacaacgcggtgggaggttatgatagggacttttgaagctattatgggaaaaatctgctcgtcctccgccccatcggttaccgggatcacaccatcggccggaaaaactttcaaaacttcatcgagctgtctggcgagctccatgtcactcttcagcccgacctttggatggcccgtgatcagggcaacttcgacatcgtcaaactcgcccttctccttcagcttgtcgtagagctttatagcagcgtagagaacgtttgcatcgctgtcctcgggatcggccagactaagctttacagccgcatctaggcaagcggctctcccgataaccggccccttaactccggcttttttcccaaaatcgtcgtccctatctatggccaggattagcaccctgatatcaaccacccctgaccttctccatgactgattttaccttgtcctccatgtgacgctctttgtctctcctgtcgtcaatccgcacggttgttgaaacccgctcagctccaagcttaaacatgagttcgtgcgcctccgcgactattttgaggacgtcttcgacggttggagcttcgataatggtggccatcggcgtcagttggtatttaacaccctttctatctaaaagctttactacttcggcgacgtacctgctgaggcttttctcgcccagggggacgatgacgaactccgctatgaccattttcggcacccgtcttaaattccttcggcgatgttttaaactttgtgccctggctaaagcacatgttataaactttggagttcaattaaggatggaggtgatgggagatgtaccgcataaaggacgagtggggggagttcctcgtcaggctcgcgaggagggcagttgaggagtacgtcaggcataagagggtcatagagccgcctgaagacactcccactgagctctgggagaagatgggcgtcttcgtaaccctcaacaggcacaacgttcctccccagatggcactgagaggatgcatcggctttccgctcccgatatacccgctcgttgaggcaacgataaaggcggcgatatacgcggctgttgatgatccgcgctttccgccagtccagcccgaggagcttgacgagcttaccgttgaagtcagcgtcttaaccccgccagagctcgtagagggcccgcctgaggggaggcctaagaagataaaggtcgggagggacggccttctcatagagaagggcatttactcgggcctgctcctgcctcaggttccagtcgaatggggctgggacgaggaggagttccttgcccagacctgctggaaggccggccttccacccgactgctggctcgacccagatacgaaggtctaccgcttcaccgctgagattttcgaagaggagtatccgagagggccagtgagaaggaaaccgctggtgtgaagttgggagatacaatggggcagctggagaatacagaaggtctcgggcgaaaacatcaatcttcctggagtttttcaatttcctcttccagtctcttcagctttcccttgaaccttctgacctgggcgtttgctaggtttacgattttctcaatgtaagcttcatcgacccacagttccccgttctcgcccagcgggacgtccatcctctcggttgaacgtatctcaacgaccagctttttgtggctcacgctctttatgttggagtacttgaagccgagccctatggcaaggtttaacagtctcacagcgtcctcaagggttctcgccccaacgtggagtattggactcctgaccagaaaccagagctggccggagcggtgttttcccaccgcctcaaggacttcttcgagcctgacctccctgtgccacttgccgagccagacggaattcaccttgtcaccgaagtgcggcatctccatgaccgaaatccttcccgagcaggatgaggtcgtgaagtagttttggagggcgtttatcttctccaggagcgggattatgtcatgatccaccttgtcctcttcaagggccttcctcaggccttccatcgccttttccttctgctcgtcgaagttttcagtgtagaggaacacgcctgatcacctcgctgtgtattgtctcacttttctaggagaatcagccttaggtttgagacttgggctatttctaaaaaatcggagtcgtgtgttattagctcctccccgcgatttacacagatggcagcgattaacaggtcggcaaagccccgtggtgtccccctctccaaaagtttttcctgaagcttatgggcaagaataaaatcatcgagaacagggaagaggacgtctcccctaaacttcgagtatctcacgatgcgggggaactccacgaaagtaacccctgttatgttttcggaaatctcctcgccttttctgactttctcgatgacaacgtttgtatctaagacaaccacttcaaccgccccttgtcttttttcctgatttcttctatcccctctggaacttcaacgttctcactggtctcctttacgtcgagtagccgccttatttcttcaatgttcatcttttccggagagctctccaacaatgctcgcatgaaagcctctttaaacttcttctcatcaacccagtctggaactgagattgtgattacctttcccatcttccaccactgttggaagtttgtcagtctgatatttaatgtttcttaccgtcaatctcaatgaacgtgcccctctccctcacgaactctatgaacctcctgtaagttggatggtttgaaagcgttgaggagtccccaacagctattaactttctcttggccctcgtgagtgagacgttgagcctcctaaggtctgtaaggaagccaagctctccccttctgttggagcggacgaaagacagcacgatgatctctttttctcttccctggtagccgtcaaccgtttttacctcaatatcttcgcccaccattgagcttatcaggtccctctggtcgtcatagggcgtgattacacctatccagtcaggcttcacgcccatctcaaggagcttctcaacggtctcagtgacgagcttcgcctcaagcgggttctctctgctgtcgctcccgcgcctctgcctctcgaagcgatcttccctctttgaggtgtcaataaagaccagcacgttttcaggcttaagggcttcgtcccagaagtttccgaactcgggctcgctgaccccaaggtcggccagcgtgatatttttaacgctctcatgggcctttatcttcccgtcgtagaactccctgctcgggaactccatcagtctctcgttcatcctgtactggaccgtaagcatctcactcttttctggatagcgctcgatgaggccttcaaagagggtctttgacagctcctttgccttctcgctcagtatcgtcggcggaagctgtttgtggtctccagcaagcacgaacctttttgctctgtttatcgggataagaacgctcggaatcgttgcctgcgtcgcctcgtctattacagcgacatcgtattcgccgtagtcaaccacttccaagccggctgaggcgttcgtagtcagaaccacgtcggcttcctggattatctccctggctattctttcttcaagctttctcgcatcgtcgaacgtcttttgcacctgctggtttatcctaatccactcagccatctccctgatgagtcttgcaggaactcccctcgtcccgattcccttttcagcgagcctcagaatctccctgtcgctcagacccctacggtattttggtgcgggctttgtgaaggtgtcccttttctccttgaggttctcacctatgaccctaagctccctaagctcagcatagaggtcgtgctgggtgatgaggtaagccagtgtcgtctcgtggagggcctttgagaccctgctcgggtggccaatccttaccaccttcaaccctgaatctgcgagcctctcaactatgttgtcaacggcaacgttgctctcggcggttgcgagaaccttatggcccctcgccacctcctgccttatcagctctaccagggttctcgtttttccagttccaaaaggcccgtgaacgaggaagaagtctccgctgccaagggcctttgctattgcccccctctggctcgcgttcaggctcttgtcgaagggctggaactcaacgggttcgctctcctcaggctccctaaggccgaggtacagctcaagggcctttctcccgctctccctcaggttgtcgaggttctccatccagcgcttgaaagttatgtcgttcgcgtagaggtcaatcctgacgcccttaagcgcccactccgggacagtttctatggcaacggtgagaaagcgctttcccttctccacgacggttccaacgaggtcgctcttgagcgggtcacgtttgctgattacaacgaggtcgccgacgcttatctcggtctttatctccctatcccttccatacctcaccagaaaatagccgagctcctccccgattacctttccgttgaggccgagaacggccctcccaactttctctcgctccctgccgctgaggcgcctcatctctaagcgcatagcctctatctcggccctccgctccatctcaacgagttccttgaggtgagcgatgaactttgacagcagtacttctttttcgttcattttccttcccagagcgggaaggccgggttgacttaaaagagttgcccgctgttgtccttcctgaaaagaggtacaagacatgagaaaggaaaagaagaaatcacttcataggcggcctgaacttgtagccgtagaggattatgccgtcctcgccgaactcccttatcttccttgtcaccatctcgacttccatgccctcgtggatttcttcgggatcaacgtcggtcagctgggccaggacgactagcccttcctcgagctcgacgagagccaaaggatacggcttgtagtactcgaagccgctcggcgggttcctcactatagtccagctgatgaccttaccctttccgctgaactggtattcctcaacgttccttgagccacagacagggcagacgggcctcttcgggaagaacacgtgatcgttctcgcacttgcccccgatgagggcgtacttctcacggaagtgtctccagtgcctagcaacctgcatcggcctccccatttcagaccctcctcaggacgttaactgtgatgtttgaacctgtcccacctatgttctgggtcaggccaacctcggcgtcgggaacctgtatcccttcgggagcctctccgcggagctggagaaccgcttcaactgtctggtaaacaccggtcgctccgaccgggtgtcccctggctttgagtcctcccatcgtttgtatcgggtagtcaccgtcgatggctatctgtccctctttcgcgagcattgctcccttgcccttctccgcaacgccgagggcctcgaggctgagcgcagccatcaccgtgaaggcatcgtgaacctcgaagaagtcgatgtccttagccgttacccccgccatcttgtaggccttctcggccgcgaccttggcggctttgagcgtcaggaagtcctctctgtttgcaaagtttatggtgtcgattgccctccagaatccagcgagctcgaccatcttgtccttcgggacaccgagctccttcgccttctcctttgaggttattatcacagcggctgcaccgtcgcacattggcgcagcatcgaagagcttgagcgggtctgcaacgtagggactcttgaggacggtatcaaccgttatcggcctcttgaacatagcgtaggggttcttggcaccgtttgcgtgggcgttgacggcgaagtgggccaagtcctcctcggtgtagccgtaggtcttcatgtagagcctcatgatgagagcgttaagtgccacgaagctagccccgtggaagagctcgtactcggcgtcggccgcgtaggccagatatctggtagcgtcgctcggccaggcgtcggtcatcttctcgacgccgacgacggcaacgatgtcctcaaggccggccattacggcctttgctccttcctgaacggccgcaccgccgcttccacaggcggcctcaacctttaccgctgggatgtttccaaggcctgcccagtcggctataagggcacccaagttctcctgctcgatgaatgagcctgaggccatgtttccaacgtagagcgaatcaaccttgtctattccagcgtcgtccatcgcattgagaagggcctcaacggccatgtccctgagtgagactctccagtgctcgccgacgggaaccataccaactccaattatgacgggcttctccatttcaaccacctcacagtatgtacttgcccctgtgcttcgcgtagagggcgtagtctatgtacttctttctgttcacgtagtccatggtctttggagccaggtccctcttctcctctatcgcgtcctggacgacgaggctgaatgcgtcacttccagctcctgaaccaaagcttacccacagaatcctgtcgccgggcttggctatgtcgagaaccgccgatacacccacgagggtagcgccgctgtatgtgttgcctattattccgctgaggagtcctggaaggaccttctccttcgggaagccgaggattttggcggcggtgagcgggaacttgacgttcggctggtggaagacggcgtagtcgaagtcgttcggcgtgtagccgagctcctccatgagggtctttgcggcgtttattatctggtggaagtaggcgggctcacctgtgaagcggttaccgtgcctcgggtagtgctcgtgctgcctcctccagaagtcgggggtgtcggtgacgtatgagtagctcgcctcgaagtaagccagggtctcggagctctttggagcgagaatgtaggcggctcctcctgccgcggccgtgaactcaaggtggtcgccgggcctgccctgcgaggtgtctgcaccgatagccatcgcgtagtcggccattcccgaaccgacgaagccaatagctgcctgtatagcctcggttccggccttgcaggcaaactcaaagtcagcggcatctaaatctggcgttgcaccaattgcctcggctataaccgttccgctcggcttgacggcgtagggcttgctctcggttccgagccagatggccctgataagcttagggtcgatctgggccctcttgagggcgtttctcgcggcttcaatgccgattgttatcgtatcctcatcaagaccggggacggacttctcctggatcgggaagctgctaactccccagacccttcctatctcctctgccttgattctatacatcggcacgtaggcgccgtagccgataatgccgacctccctcttgggcttcaggagtttgctcatatgacatcaccttcaaactttgaaaagtccctggggactgtgagaaagggccttataaaagtctttcggtaaaagtgaaagagtttttagacgattgtcgagaaagggtatataagggatgagacctattcagcttgaggtgtttttatgaagtatgagataatccacaggccgagcttttctctccttgagatcgaacttgagaggggagaggcggtacaggcggaagccggggccatggtgcacatgagcccgactataaagctggagaccaaggctaagggcggcgtttttggtgcgcttaagcgctcaatgctcgggggagagagcttcttcgtgaacacgttcagggcggaagacggacctgggagcatcggtcttgctccagcatatatgggagacattgaggcctttgagcttgatggaactctctacgcccagagcggtgccttcctggcgagctatggtgacatcgacatagataccaaatgggcggcgctaaaaccttcttcggcagggaaggtctgttcctccttaagatgagcggaaggggaatcgttttcctttcgagcttcggggcaatctacaagaaggaactccacaacgagcgctttataatagacaccggtcacatggtggccttcagcgagggtcttgacttcaacgtgaagcgcgtcggcggtcttaagagcaccctcttcagcggagagggtcttgtggcggagttctacggaactggaacgctctacatccagacgaggagcatggacagcttcctgagctggctcgttccacatctgccgaagagagactgaagtcttctcttcttttttgtcttgctttaacacagaaaaaacgtagaagaggaaaaatcaaggcttcctcacaacaaagagtgcgtggtccttctcgtagggctcgagcgaaagcctctcgacgacctcgaagtaggtcgaaagctctttctcgacctccttgaagacctgctccggctccttggtgacgtctatgctcctgctcttgacggatatcattccgtagccgccgctcttgaggtagaccttggcgttgtctattagtatcttcgcctgcgtcggctgggcaacgtcctcgaagataacgtccaccttcggaacgagcgcgcggtagccttcgggcttggtggcatcgccaaggattggcacgatgttcctcctctcctcgacgagcggtacgagctccctgagaaccctcggcgagaactcgacgccaaagaccttgccctcccagccaacgatgtcgctgacgtgggaagcggtggttccgctcgcgacaccgaggtagagtaccgttgagcccggctttatcgggaagttcttgaggccgttgaggatggccgctccaagctttgacctcgtcgggttccaaatcctgtactcttcgccttcgaacttgaccaccctctcgccgtagaccctctggcccggaacgaggttcttggtcgctatcttctcgctaccgtcgtcatcaataactatgtaaacgcccgggaacctgtgcttcttaaccttcatcttgatcacctcttaccgcccttacccttcttctttttctttttgtccttctttccgccgaagcccttgcccttctcgtgctttccttttcctttgcccttgaacttcttcttttccttctttttcttctcgggcttggccttcctcttcggcgggttcgggtacttctccttgatctcctgaatcctctgctcaagctccttcttcagctcctcacctatgtattcgccggagaagtagtccacccttgccgctatcgcgagctttcctgccagagcgcgggctatcttacccctctgccaccagggtgagcggtttatagccggatactggaagatgacaccgtgcttgggcggctttgcacccgtcctgaggtgcctgaagagggctttttcggctccgagaacctgtatggtcgatgccggcatcatggcgagctctttcaatccacctgcgaggctcatgagtctggcagcaagcttcgccccgacgagcgccttgaggttcggagcaacttcgtccatggcagtctcaaggtagtcctctatctgctccctcagcttgtagaggtcgtgtatctcgctggccaacttctggattatggcgctgtcgaacttgccgagcggggcgcccattgacttctcggccgcttcaaggattttctctatcttgccctcggagaagccgagcttctcaagcttctccctggtcgcgttctccctcgggccgatctccttaacgaacgcaacgtactgagggtgcttcgggaggagttcatcgagctccgggaagtggagaccgtaccactccctaagacgagaaacgaggaggtttatgaccttgtcaatgtcgtcgagggcctcgatggcctggatgatcatcttatcgcgagcgccgctctgctcctgtatgcggagcctggtcagggcaacaccaacgctgaagtactcgtcgaaccagttctcgcccaggaactcctcggggcttgagcggagcttttcgccagctatgttcgggaactcggctgtggcgttgtagccgagctccttgaggtttctgctcagctcggagtcctcgaccacgaactcggtgtagccttcgcttccaagctcgtcgagaaactctatgagctcgtcgctcggctcgcccttgaggagcttgtcaaggcttacctccggcttcccgctgaagggtttgctccctatgagcttcccgctctcgtcaaaggcgtagatgcccctgacgttctcggctatgtaagctttcatcattaaccacccctttgtttttgtcgctggagtataaaaggcatactccttttaagccataccgttgagctcgaaaagaaaaggaagaaaagcctcagtcctcccagggctcggtgtacttgagagcccagccgaattcttctctgagaatgtctatcgccgcgtacggtggtattatcccgcgctcggtgattatgacgtccacgtactccggtggagtaacgtcaaaggccggattccagacctcgatgttcttcggccaggtcttcagctcatcctcggggatgacctccgttggatcgcgcatctcaatctcgacgagctggccgagcatcgtctccgggtggaacttgtaggtttcggcagcgatcatagtccaaaccctgtgttccttcgcggtcaaggctatcaaagcagtcccaatcttgtttatcaccgcgccgtttacggttatcgagtcagcccccataacgaccttgtcggtcatcttcatgtagtgtcttgccgctgaatcaacgacgtagatgaccggaatgccgtaagaagcgagctccttggcggttatcttgccctgccacttgggcctagtctcggtcacgatgacctttatgtccttgccctgctcccaggcggtcttcatgacgcttatggcagccttgctgtggcagtgagtcattatgacgtcgccgtcctcgattctctttgcgccgaactctccgatcctctcaagggccttctccgaattgtggatgaactccttggcggcgtttattatgacgaacctgagctgttcaaggtctgccccgcttgagtacgctatcttccccctgtgcatgacgtaacggagcgcgtttggcagggaaacggcggtgggccttgtctcgaatagtatctttgccgcctgcttcatctctttccagaactcgtcaacgttggtggccttgcttttctcggcctgaagctggagggcgtaggcggccgacctggctatcttcccggctcccctgatttccatgttctttatcttctccgcaatctcgaggacttcctttacaactgccatgcaaccacctccgggtaaactcaggtataatcgccggggtttatagatgttttcgtactttttgtacattaacgcttggaaaacatcctcgatgcactttagtctcagttttgagattcttttacgtttgtaaaggacagagcggaatgagaaaagtttataacaaatcctgcctagttaattccgatgtatatgtttgatgacgtgaactgatgtgttcattaggtttaggtggtgatggtaatgcaggaaaagcttgagaacaaactcgcggcccaacccctggacttcgagtcatttttctcacaaaaggctatggagatgaaggcttctgaggttagggagctcctcaaactcgttgaaacgagcgacgttataagtctcgcggggggtctccccgcccccgagacgtttcccgttgatattataaaggagatcactatggaagtcctctcaaagcacgcggacaaggccctccagtacggaacgaccaagggcttcactccgctccgccttgccctggctaggtggatggaaaagcgctacggaatcccaatgagcaaggtcgaggtaatgatagtcgcaggaagccagcaggcgcttgacttgataggaagggtcttcattgatccgggagacatcgtggtggttgaggcgccgacctaccttgccgccctcaacgccttcaagttctatgatcctgagttcatctcaatccctctggacgacgatggaatgaaagtcgacgtcctggaagagaaacttaaaaagctgaaggccgaaggaaagaggataaagtttgtctacactgtctcaaccttccagaaccccgctggagtgacgatgagcctcgagaggagaaagcacctaatagagctggctaacgagtacgacttcctcatcgttgaggacaacccgtacagtgagctccgttattcgggcgaaccgatacccccgataaagcacttcgacgatgaaggtcgtgttatctacctaggcacgttctcgaagatattcgcccccggcttccgccttggatgggtctcggctcacccgcacttcatcaggaagatggagattgcaaagcaggccgttgacctctgtgcgaacccgttcggtcaggtcatagcttggaagtacgtggaagacggccacctcgacaggcacattccaagggtcatcgagttctacaagccgaggagggatgcgatgctcgaggccctcgaagagtacatgccagagggggtcaggtggacgaagccagacggaggcatgttcatatgggtgacccttcctgagggcatcgacaccaagctaatgatggagaaggcggtcgccaagggagttgcctacgtcccgggtgaggctttctttgcccacagagaagttaagaacacaatgaggctcaacttcacctacgtcccggaggagaagattagggaaggagtcaggaggctcgccgaggtaatagaggaggagataaagaagctcaagtgaactctctttcatgtctgctacctatacttttttatttgcttgtccctagttttctccggtgagacttatgcgtccaatcatagccataatcggtacttccagagatggatacaccctggcgaatacacatcacttcaggaaggttcttgaggcgggcggtcttccagtgctattcagccctgagggagatcccgaggacgttatagaggtcgcggacggcatactcctcgttgagggcccggacattcatcccaggttctacggcgaggatccctcactcagcctcagggatgtggacgttgccaaggacgagttcgaaataaccctggtcaaactggcgattgatggggaaattccaattctcggcgtgggcaggggaatgcagataataaacgtcgccctcggggggacgctgtaccaggacgtatatgaaattccgaaagccataaaacacgactgggagatcggcagggtcaggcctgaccagaagctccacacggtaagggtaaaaacggactcaaagctctacaacatcctcaaagacgtcctggtcatcgagggcacgaacgatgcctggacctgggtaaacagcttccaccaccaggccgttaagaaggttggagagggtctcaggcaggtggccttttccgtcgatggtctcatagagggcattgagtccaccgacgagagcttcgttattggcgttcagtggcagcccgagtatctggatgagatgaaagtcctgtatgaggcgctggtgaaggcggctctcggtcatcaggagaggaagcacgagattgaactgattcagctggaagaagaagcaaagaagaggcttgcccaggagactacggaacaagatgagacccatcacacgtcggaaacgagcgataaccttcccgacacgacccaaacgtgattcccttctcggttatcttcttttctgcttccctcaggatgggcattctgacgtcctttgggaggtagtagtagccccctatcctctctcccctctcgtaaagcggccacagcttttccataagctccgggaactttgcaaacatcctcttttttgagtcgggcctgagcttgagggtggagaccgttatgtggctcacaaaggaaagtgcatcaagcgtctcgtcgaagtcttcccatgtgtagtaggggattatcgggtctatccgggcgtagacaggaatgcctgcatctttcgcttttttcagtgccttcatccttctctttggagatggggcgttgggttcaaggagctttgccttcttttcgtccacagtcgttacagttactccaacagcgcacctcagctcgctcaggatgtctatatccctctcaaagatgtcggacttcgtcaaaaggaggcaacggacgttgtaccccctaaaaagctcgaggacctttctggtaatcccaagctcccgttctatggttggatacggatcggatgagtatgaaagtgccactattgcgtttttgtcgagctttctgagttccttttcaagcttggggagaagaccctctttagtcctcacgcggaaggcgttgggaatgtagctggttatgtagcagtaaacgcatgcatggtcgcaaccggtgtaagggttgagggtgtacttgaaggggcaggtacagagggggcttttccaggggtcgaatggccttatgtacatggtctccacttggaaagacatttaaaaaagtaaaccttagcgctctcggtggtctcatggtcaaaggggcagtaaagtgggttcctggtgaggagtttcagttcatcggaaggatggaagacgacaagtgctccgtcatcctgggtgatggcggtataagtccaatgaagctcctcctcctgagcgtggccgggtgcacggcctacgacgtcgtcatgatccttcaaaagatgagggagcagataaaggggctggaagtcgagatttctggagaaaggcgcgaggagcacccgcgcatctacaccaaagtccatatccactacaagatatacggaaacgttaaagaggagaaggctagaagggccatagaactcagccaggacaaatactgctcggcatcagcacacgtaaagctcagcggtgccgagcttacatactcccttgagatagtccctgatgatgagtaaacccgttgctgagaaaaagatgatgatggatggaccagctgacctttcttttttaaagctccccacacagctccgcgaagttgcggtagatgtccgctccgtgttcggtgtgggcaacctccgggtggaactgaacgccgtagatagggaggctttcgtgcttcattgcctcgacgggacaggtctcgctcctggctaagagcttgaaacctggagggagctccttgacctcgtccatgtggctctcccagaccctcagcttcctcggaagccccctgaatatatcattctcgtcgagtatctctatctcgacgaggctgtattcggccttctctccccttccgacctttcctccgaagtgctttgctatgagctggtggccgagacagatgccgagtatcggaacgttgaactcgtcgtagtgctcaaggatggcggagcagtttcctgttttatttatgtccgggcctcccgagaagattatccccttcggcttcatcgccttgatctcctcaagcggcgtcgtgttcgggattatcttcgcctcaacgccgaggtagcgaagggttctccaaatcctgtggacgtattggcccccgttgtccattatgactatcatccattcacccccgcgagcttgaaaaactcatcggcctcttcagtgaggtagaaagctttcacaccggcagacctggccatttcggccatttttcggtcgttggtcaggagaagggcgttgatatgttgtgcagtcgcaacgaagtagaggtcaggaatgcgatgaccggttgaaaaggcgagttcaaggatcctatcggacaaaaggccttctcccacaaagtctgcaacgagttccatatatatttcgtgagcttccctcaccatctcttgggaaaggaatctagatagaactgatacgaactcgaactccccgagccgcggagcatagatttcaagaatgcccatttccgagagcttggcgatccttttggcgacttcagacctgtcgggataaaaactggaaaaaagattaaccacaacagaggtatcgaggacaactttcatagccgctcctccctgagcttctggaggtactcttcggggctttctttgaagttctcaggagatattatttttctaaatttttccgttttctcaactatgtccttcctgtagagctttattactagatgctccccttccttcagcttcagcggcttaagcggcttcagcacaccgttctcgtaaaccgcttcaacgacctcgacgttctctcccattctcccaccgctctagcttagtcgtcaaagtaaataagggtttcactcgaactctatcgtcgccggaggcttgttcgtgatgtcgtagagcacccttccaacctctggaatctcgctcgttatcctgaaggctatcctctggagtacctcccaggggacgttcatcgcgttggcagtcattccatcgaggctctcaacaacgcgaaccgctaccgtctccttgtaggcccttatgtcgccctgaacgccgacggttttaaccccgagcagaactgcgaaagcctgccatggcttaagcccggccttctcaatttcctcttcaactatagcgtttgcttctctcacgattgcgaccctctcaggtgtaacctctccgagaaccctaacggccagccccggccccgggaagggcatgcggttgtatatcttctcaggaagaccgagctccttcgccagctccctgacctcgtccttgtagaggtccctcaagggttcgatcagcttgaggttgagcctctcaggcagtcccccaacgttgtggtggctctttatcttgccatggctctctatccagtcaggggctatcgtcccctggatcaggaagtcggcgtttatctccttcgcaacttcctcaaagacctcgatgaatactcttccgattatcttcctcttctcctccgggtcggtcacgcccttaagctccctgaagaatcgctcgctcgcgtcaacgtagtggaggttcagtccaaactcgtcccggaaggtcttgactacgaactcgggttcgcccttgcgcatgaagcccgtgttcacgaagacagcgtgcagtctgtcgcctatagccctgtgcgccagaactgcggcggttgagctgtcaacaccaccagagagggctatgatggcctttccatcaccgacagtctctcttatctccttaaccttctcctcgatgaagttctcccacatgagcaccacctttcaacattatcttgctaattttagcttaaaaatttgttgtttttgagttaaaaatgttgaaagtgggagccctcacttcccgagtgggtagttcggcgcctcgttggttatcagtatgtcgtgcgggtggctctcgatgtagccagcgtgggttatgataacgaactcgcccttctccttcagctcggggatgtttctggcccccacgtagcccattccagccctgaggccgcctatgagctggtagagaacttctccaaccggtcccttgtagggaaccactccctcaaccccctccgggacgaacttcttcgtcttcatgtgccccttctggtagtagcgctccgctccgcctttcatcatggccccgagcgagcccattccgcggtactgcttgtaccttcttccgttcatgactacctccttgcccggagcctccttcgttccggccagcagggaaccgagcataacggcgtcagccccagcggctatcgccttcactatgtctccagaatagcgtatcccaccgtcggctatcacgtggaggccgtactcttgggctttgtcagccacgagtgctatggcggtaatctgaggaacgcccactccagcaactaccctcgtggtgcagatgcttcctggcccgattccgaccttgacggcgtctgcgaaggtgagatcatcaaccgccttcgggtttgcgatgttgcccactatgaggtcggcatccacggcgttccttatctctttcatcgcctttatcgccttgaggttgtgggcgtgggccgtgtcgacgactataacgtcggctccagcattatcgagggcctttgccctctcgaggtcgaaggggccaacggccgcagcaacgagcaggtcaccgttttcgtcccttaccgcgttccggtacttcctcctcttcgcgaggtcgctcatcgttattatgccaacgagccttccctcaccgtcaaccacaggaagccggtctatcctgtggtcgaacattatctgtactgcctcctccgccgttaccgtctcgggcactgttatgacttcgcccgtcatgacctcgctgaccttcgatccctgcttcgccgctatgtccttcttggtgatcacaccaacgacccttccttcatcgtcaacgacgggcaaaccgtcaacgccgttgcgctccatgaggaacagcgcgtagtcgaggctctcatctggctttatgcttatgacatcctcaacgatgaaacgctcggccctcttgaccctcttcacctgttcgacctgctcctctatgctcatgttcctgtggattactcccaggccgccttcccttgccatcgcaacggccatctcccactcggtaaccgtgtccatggccgcgctgagaatcgggatgttcagcctcacgttgggcgttatctgtgtagaaacgtccacgtccttcggctcgacttcggtcgcctgcggtatcaggagaacgtcgtcgaaggtgtagcccttaagagcattaacaagtttttgttcaaatttgcccatatcttccgaacctcctcaccctttttgacttgagaatgatgagggcttttaaggcttgcggaaaaagggttaaatatcaggacaaagtactttacccggtggtaccgtggactcctacctaatggcggcggcgtttgacgctggagtaaagctagctgcgggaggaatgctcctgtttttctcccaccagcggcatagaaaggccgcctactactggggttttgcctggataatatatgcctacgctataatcggggatctaggcattcatcctgagatagcggcggttctgcttggcttcttttcatctctgatcctgcagggggtcctaagggtaaacgaagaggtctcaatgtctcaggattacatccgggctctttcgtggggaccggccgctattggagtgtacacagcgattctcctccttttcctcgaaaaaacgcctgaaacagccgttatggggatcgtctacggagcctccggtgtcttcttgagtatcggcggacttatactttatcggatgagggaattctacgatcaggacactgcgtacctcggcctgtccctgagcacgtacggggtatatcaaatgctttatcccgtgttatggaacgagggctttaagttctgggggctgttcattggcctggttctgaccgtcgttacggccctcttcatggttcagctctcgcttggggaggtctttgagattgaagaacctaaaacgcaggtggaaattcagccaggagtcctggtagtggatccggcacagtttgaagacttcaaaaagcagtttagggaataccccgttctggcttttgtgaggaacgtcgaagtgccaagtagctggaaagtatataggataacaaaccttggcggttatgggaacgtttctccaaccaatctcccaaggatcctcgaaactgcggttgattacatccgttcattcgagaactctgatttaaagcctgtcatcgttctcgaagggctcgaatacctcaagctctacaacgattttagggccatagcaaagttcctgacatccctgcgggactacgtcgctgttagcaatggaacactcgtgctcgtcctagaaaaagacgcctgggaagaaagggagatgaaaacgctggagaggctcctcacgtgaggagttctcccagtctgtcctcttccaagccctgcttcagctccatcgctatcctcctgcccgtgctgacggggaagtcgtatcggagccaggtgtacggcgagccgtgcacgaaggggttagttccagccactattctcgcggatatctcgaagaccacgaactccatgtcaggagtaaagacaccctccaggcagaacgggccccagaggccacccatgagctcctccgcagctttcaccactcgttctccagcctcgatgacgtccattagcaggctttcccttagaacgatcggaatgttcccgacgacggtgtagtcggtgctgattccaagatcaatctgctccctcgctggaattcgccctatcgcgtccgcgttggactcatagcgcctgtcaacgctcatcagctcaagctcgccgttgagcttcgagtagaagtagtgagggtaaactggaacgcccaccacgtactcctgtatctggactctcgaaaggtcttctttactacgaacacctagcctctcggcctttttccagaagtcctcgggggagctggccaggaagtacccccttccccctccagcgccaaatggttttacgatgacgggcccgtctatgtcgtctgggtcttcgtaaatcctcgggagcctcagcttagctttctccagccacttcctttcgagggagcggtcgctctcccaccttaacacggctttgttgccgtagtaaggaaccttcatcttctcaacaagttctacgccgaggtgggcaacgaacgaaccagttggaacaactacggcctcgaactcgagcagctcctcttccggatatgcaccctctatgaaatgatccgcaactggaaagtacttggtgtagagcggcttaaccctggaagggccgaaggcaaccgtctcgaacccctcgtcttttgcccctttcaaaatctggagggcagagtgggaagcataggtcgctaccctcattcctcctcacccaggagcttcggaaaggactcgtgaacttccctcagcttggtgatcggcttcctcaggagctcatctccattccagaggaagacggcaccgcttcctcctgctctgccgattactgcgaagtgcctgaagagcgccttaagctcctcaagtctttcctcggggaagactacgatgtagcggccgtggctctcgctgaaggcaacctcaagcgggttagaagtctcggcgggcaccttcgagaggtcagcggtgaagcccgtgttgcccaaaactgccatctccgccagggccaccgctattccgcccttgctaacgtcgtggacggccttcaagagtccccttctgatcgcctcaaggattccctcggcgttcgccttttcctcctcaaggttcacgcgcggagcgattccgcctttcagaccgagcctcacgtatagctcacttcctccgagctccctcttagtgctcccaacgacgcctataaggagcccctcttcgaggccaaagccaggtattttctcaagctccacctttccgaggccagcaacgactggagtcggctttatgggcctgtcaacgacctcgttgtagaagctgacgtttccgctcacgtacgctaaaccgaaggctcttgcagcatccgccagtcccctgactgtctccgcaaagctccagtagacctcgggtctctctggggaggcgaagttgaggttgtccaccagggctaagggctcggcacccacactgacgaggtttctcacgacttcagcaacagcccccatcgctccgtggtaggggttgaggtggctgtggttaggattaccgtcggccacgaaggccagcccgtagcgctcgtttatcttgagcactgcagcatctcttcctggctttaccactgtcctgccctgaacctcgtggtcgtactgctcccatacccagcgcttgttcagaacgttcggactgctccagacgagctcgaaggcgtcagaaaagcttatcttgggtgtctcaacgtccctttcgaggctgtagggcctcgtctcccactcgatcgttggaacttccgtaaggagatctattgggaggtcagcaaccttctcgcccttccagtaaacgatgtagcgcggttcttttataatctctccaacgaccgtccattcgaggccgtacttctcgaaaattttcccgatttcttcaacgtcctcttccctgactgcaaagagcatcctttcctggctctcggatatcattacctccgtcggtgtcatgtttggctcccttagggggacgcggtcggcgtagataacggcaccgaagcccttcttcccggccatctccgaggaagcgcaggtaagtccgccgccgccgaggtctttgagcgctctaactttccctgtgtagacggcctcaagcgtggcttcaattagaagcttctcggtgaaggggtcgggaatttggaccgccgagcggtcttcctcctccgcgttctcgctcagttcctcgcttgcgaaggtcacgccgtggattccgtccctgccggtcctgttaccgacgaggacgagctttaacccggcttcctcaacgtagctgtggacgaagtgctccggcctcattatcccaacgcaggcaacattcacgagcgtgtagttatccaggctctcgtcgaactctgtctcgccgccaaccgtcggaactcctatcctgttgccgtagtccgctatgcccttcacgacgccctggaggaggtagcggttgcgctccttctcaagcggcccgaagcgtatcgggtcgaggagggctatcggacgggcgcccatacagagtatatccctgacaattccgccgacacccgtggcggcaccgccgtagggctcaacggctgaagggtggttgtggctctcgattccaaccgctatccaggtttcatcgtcgaacttcactattccagcatcctctcccgggcccagaaccacgtgctcgttctccgttggaaggagcttaaggaacggcctgctagacttgtacgaggcgtgctcgctccacattacttcgagcatggccttttccacttcgttcggctccctcccgagcctctcccggatgagcttctcctcgtgggggaacatcgtgacacctcctttattatcagaaaaatgtaaaaattttgagtttttaaggtttattttgacgaaaaaatgtcaatacacgtttgcttctaaactcttaaatcacgtttaaaataggctacaagccagaatgcagagaccgctatggccaattccatgatgcctgccgtgaggagcacgaaactgacccccattttgtctgcgagcactcctccccctgccattgaaacaagggagaatgccgaagtcagaaagtactcaaaggacaagaccctccctaaaagatcagagggaaccgtcttttggaacagcgtctgtagggaaatgttgagaacgctgttagcggcgccgttaaagactcctatcgctgccgccagggacagataacccacctggctccacattattggggcgagtgccgtcataaagaggccagcgatgaacgtcgtctcatcagagaacctgtccccaaggaggctcatcagaaaacttcctatgaagaatcccgcaccgagggccgtgagcaggacgccgtagccgacctcggccgaagctgacaagcccgccgagtagggaaccaaaagcacgtttattattcccccgcctatcataagcccccggagattaaaagaagagttagcacaggcctggacgttttaacgaatgccaggcctaatttaacctcctccagaaagctgtcctccatgtcggaggacggctcttcaaccacatcaagcttctttaggagtatcaccgagatcccaaagattatggccgctaagaggggcgtgcgttccctaccaatcgcaaggatcatgagggaagcgagcgtggggcccagagtatctatcaggtcatcggctaatgtcaacagcgaattggctgttttaagctggtcagttttgactattgaggggattattgcggagcgggcagttccaaaaaacagcgaacaggcatcgagcaggaaggtgacaaagtacagatacaggagaagatagatgctgatggaggagttaaaaaccgcggcgagagacagcacgaaaaccgctttgagaagggttgaggttaccataaccttttttctgccgtgtctgtccacgatcactccaactactggcgagagtagtaaaagcgccagtgtttttgcaatgaacacccccgaagtgtccgctgtggaagactggttgtaaatgtagaagactacgccgatgaagaagaggtattcggcgattcttgagattagctggttgataagcagataggggaagttcttccgcgtaaggaggtcttttttggagtttaggcttggaacttccataatcagcaccacacgctccaaccctgccttagactccgaacagcaaccttggaatgtccctaaccctctcgtccgtgtagtttatgaatgccttgaggagccggtagatttcgaagagcctctcctcctcattggttcttggcttttctcccctatccgcgcgcgaaaagatgtctataacatcgaagcgcttagctaaaagcctcggcgtttcctcctccataagccagtttatgaagtagtagacgttgaaggccttttctctgtccattagataatgctctctaacgagtgaaaaagcccccacaatgacgttctccagttcctccgacgagagtttttccagggccttcaggtactcctcttttagctccctcacggtttcatcctcgcggtagcttgatttccagagttcaacaccctttagcaccctctttgggttcctgacgtaaacagcacctttatttccgtcgacgattacctcatcgccgtcccttatcgcttcaacgtcaaccccgaccacgcagggaattccgagctccctcgctattatcgccgggtgggagagaatgctatccaccttcgtcactattcctgcggccttcgcgaagaggttgtagtgctcggcgtggagaacgtaggtaacgagaacctcgccttccccaaaaatcatctcggcctcttctgggggctggtcgtccagcacaaaccgcgccctacctctcgccactccagggctcgccgggatgccctttagagcgtaccagttctcggtttttatatctcctgcttctctgttttgcccgagcaccgttatgtccctcgactggagtatccagagcgtcccgtcgtaggcccactctatatcctgcggccttccgaagagggactcaacttcaagacccacggtgagaagctccctcataagctcgtcattaacctcttccgggtttcttggaagcaaaacccgctcagcgctttttctaccacccacaagctcctcgccgcttcctcttacgaactcgactaaagctttttccggttctgtggacgagcgtgtaaagagcacaccagcgaactcgggtgttatctccctctggactatcgccgccatcctcgactgtccacttaggcccatccgctccatgtaagtcctaactctcttcgaactggcgctcttaaagaccctctctattccttcgattaagtcgttgaaggagtttatccccgtaacgctctcgaaaacccctgcaaagcttgccttggagctatcctcgactgtcgcggaactgcgcacgactactggaaactctccttcgaggaggtagggagaggtgaagtagtccttcacttcttccacgacttcttgggggagctttccttcctctttccagaggtcgtaagccctcgtggtcaccacgaagccagtggggacgttgaagtaccttgcgaggatcgaaagacggtgggccttgttcccaatttcattcacgctgcccccagcggaaagcgagcggacgaacatttataatcccctttagtgaagggaacactacactaaaaaggtttttggcaaagagtgcaaagaaggagaatttgagaagttacttcctcgcccactccaccatgctcctgaacagcttcagcccgtcctcactgcccaaaaagcggtcgctcgccctctctgggtgaggcatcgttccgaggacgttgccattctcgtttgctatcgccgctatgttgaggagcgagccgttcgggttcgcttcctccgtgatgttgccttcctcgtcgctgtactggaaggcgattctgacctttgaggggtcgtcagcgtagtagttgccctcggcgtgggctatcggcatcctgatgacctctccgggttcgtagaactgggtaaatggggtttcggtatcggcgaccctgaggtgcacccacctgcagatgaacctcggaactttgttcggcctcaacgccccgggtaaaaggccggcctcagtcagaacctgaaagccgttacatatcccgaggacgggcttcccatctcgggcgaactccttcacttcctcaattatctcctgacgagctgctatagcccctgcccttaggtagtcggcgtagctgaagcccccgggaaggacgacgccgtcaaagtccttaagcgaggtcttgtaccacactcgctcagcttccgccccagccttccgtatagctctctcagtctcgaagtcgcagttcgttcccggaaagacaacgacggcaaacttgaccatgtcagctcaccggctctatgctgtactcccactcgtggatgaggggattggcgagtagcttcctgcacatctcctcgacctcttcctccggcctttcgctctcaagctcgaactcgaagtacttgggaacgcgcaggttctccacgctgaacccgaggttcttcagggcgtttcctatgacccttccctctgggtcgttgagaccttccttgagccttacgatgaccttaaccttccacttcatcctcatcacctcacgtaacgaccttctcaagctcgtccagctcaattgccctcttgatttcgagcgcaacccttcttcccgtgctcatctccttccgccagagggcgttgccgtagggatgtcccatcgccatgtggatgttagttcctcccccagttcttggtgccacatcgtagatgtagaagttcagatccttgtccacagcggtctggagcgtgaacggcccgattattccgggtggatagtatctctttgttgcctcgacgtacttctcggccatgtcgaataccttctccagaagggactcacggagagttgaggatgcatgacctgtgacggtatattcgggctcgaactgccactctggaagtgtgagctgctggctcgctggaagcctaacgtggccgtcaaggctcgtctcgaagcgccagtctattccgaggagctctatctcctcatcgagcggcgagtagaagaagtcgaagttgaagaccgggccgattatgtagcgctctattctagccttggcgagatcttcctctgtgatgacgccaagcttcattaagcgctctgacttctccctgaactccctgtaggaagcggccgtgaagaagcccctctcaagcctcttctttgcgtgggggagcttgactatgacgaggcctacctcgtcgatttcttccggcttaacgggttctgggtaaggcagccctgccttctcaaggagccagtagtaactcttctcctcgctcctctcctcgcttctcagaaggtttctgctcccgaagagaggcacaaggaactcgttctcaaccctgtcaatgccagtgtagacaacaaaggagcggttcggaacgaagataacgttcctcttcctcagctcttcctgaacctcgattatctgaccgaacttctcaagaacgattacatcatcaatgaagcccttagtcaggccgtctctcgtcttcttctccttaaagtactccgcataagtcctgtgccgccccctctgggcaaccacgattgtcttaaaaccttcggccttggcgccatcggctatgtcaagggccgagtggctcccgatgacgcccacctttatcttatccttctcatacccttcaagaacctcaagaatttgcttccgttcgatcatttcactcacccctcatagccctaacaagctctattctccttgctatgctctccctcgtccccacgtccttcctgtagaaaatttccccccttacgtgccttattccagctgaggctattctctcggcctcctccagcgagtcagcaattccaacaacggccaaagcccttgagccgagcatcctgaagttctcgtcgagggaagcgtagtagactctagccccttcctccctaattttggcctcatccacgtgaagctttattccccttaccgggttggttgggtagccttttggagcgatgtacttcacaaccgttgccttccgctcaaattctgctcccttcaggttgccgtccactatttcctcgccgatctcaacgagagaacgcttcagaatcggcaggacgttcattgcctctggatcgccgaagcgggcgttgaactctattatcttcggctcgtccttggcgagcatgaactggccgtagaggatgcccttgtagggggttccgttcttcctcatggcttccacagtggctttgagtgtctcaagagctttctcgtagtcttctttagttataaacggtagtcggtggtcttcgcaggagtaagaacccataccccctgttatcggtcctacgtcgccctcgtatgcgtgggggtagtcctgtgcgaggggcattgggacgactctcttcccgtcggtgaagacctggaaggtaaactccacgccgtcggtgcgctcctcgatgaggacttttccgtccctctttatcagctcctcggcgtaggctttagcctcctcgttgtccttcagctggtagccgacgaccttgacaccctttccacccgtgaggccaaggggcttgacgacaactggccttccaaagtcgtcgatccaggatttcatctctgaaacgtcgtcgaagaccttgaagagcttccttccgggaatcttgtactcttccatcagccacctcgcgaaggccttgttggtctcgagcatggccgcttcccttgtgggtcctaccgttggaaccccgttctcttccagaacgttgacgatgcccttctcaaggggcgcctccggaccgatgaaggccatatctactccccacttgagggcaaagtcgaggactctcgggacgtcggtttccttcgcgagggcgtagtcctttgcgagcctcgcgattccggggtttttgtggcctgccacaacgtaaagctcagcatctctggcaaggacttcagcgatcgcgttttctctcccacctgcacccacgagcagaacgcgcatgagtttcaccatttttgtgtaaaaaattgaggtttttaagctttatttttacatttaattggcaaaaaactgtttaatagaagttgctcctaactactggagaggggacacctatggggctttcaaggttggttgattctgttcctgaaaacggagtactcacagttattgcgagggggcccgattccaacggggacgttattggggtaaggcttctcaaagagcttataaggcgtgaagagcctgtctttgtggttctctacgagccactcctcgttttcaggtctaacctggaaagagtagggatttctctggaagatgtgcttggggagaagtttgtagtttttgatgtcttcgggagctttaaggggatagatcggaatctcccccacgtttatcagctgagcgggtaccttgacgacggtgtttttgtcaccaagtacagtgattttgtaagaactctatccgagaaaatatcggccagccgtatctggctctttacgtatttgagttctgggacctgcaagctcttcaagaaccccaggaagacctaccagttggtatggagtacaaaaactgaagtgacgagtaaaatcccagacattagggccatactggtctatgacagtacagactgccccgagatagaggactttatctacacgttctccgatattgtggtcgaggttacgagagagatgtttaagagaaaggcatacgtaacgaagggacttgaacccgaggttttcgatccttttgagggtgatgaacatgattaaactcgggataaagcctctagacgaggcccttggtggggttaaggagcactcatacatactgcttcacgaggaagaccctcgctccctcggccgtgagctagtctttgagttcatgaagaataagcttgagaacgataacctggtagggttcttcaacatcagccatgctcttccaatcctcattgagatcatgaaaaagaggggcattaatgttgatgagtaccttgattcgctcaacctagcaatagtggatacctttggaagtctttacggcccgaggatagagaggcgcggtgtctggtacctttcaggttccctctcctatgagcttctgtccaggaaatacgctgaggtcgtcagggcacacaaggagctctggaagaaggagaacatgtttgagggcagggagctatggggagtggctatggacctttcggagtattcaaatattttcggggaagccaacgccctgagctacttcgaggtctctgctgagattaggagacgccacagggcctacagagaatacccaacgggcactaacatatgggtcttttctggaaagcccgatcgtgtgttctcgtccctttacaggagggtcgattacgttgtgagaacgaggagcgagctcaccgaagagggggtaaagcgctatatgtgcatactcaaggccccgggggtgtctgatgttatatcattcgagtactcattcacccggaatggcattgagatgaagaggactgattaggattttgaatttttatctcgagccttttaatcggcaaaaacaaagaagaattaagagtgggggaggatccccattctcaattttaccttcctctcccattccactctcttattcgaacttgattcctggttacatcccctttacttaaccctgctgattttagtacacccacgtaacttaccagcgtgtagtgctattctccggactatttaaatttttcggatattgtccaaatcattggactaatcagcatatatgctcattttgttaatggccagaaccgtatctaaggaatgcccacatcacttaatttttgccataggtgttcataactttgtaataacattcaacagttcgaagcggaagaaaattgaagaatcaaaacaggcgtcagagtaagtgctttctcttctcgtagtcctgggagtgccagttagctgatctcgtcctcagctctatcgagtgggccaccatttcggccttcctctttgcctctcccacgtctttgtcccacgctattgcaacgccgagcctccttccagggtaggcctcgggcttgccgaagagcctcactgtggcgttcgggacgctgagagcctttgccagccccctaaagcgcggtgaataaccggaaacgttggcctttatgacgtgagtggccgctggagtaagcatagggaagagcctgtaaccgtctacccactcgcctggaatcgggagtccgagaactgccctaaggtgaagtccaaactccgaaaatccagtggggtgagatgccagagtcaccatgccggtgtcgtggggcctcggggagacctcgtttgcccataccttatcgcctttcacgaacatctcgacgccaaagatgcccagtccgccgagaacgtccgttatgcgcttcgctatcctgtaaacttccctctcggccctttcgcttatctcggctggctgccagctcgagtggtagtcgccgtcaatctgatagtggccaacgggcttggggaaagtagttactacctcaccgttttcgtcgtagtgcctcacagctaactccgtaatctccacatcgaagtctatgtgctcctccacgatgagtttctcggcacttcccctggctttcttcttggcctcctcccaggctttcgggacgtcctcagggcctttgacgaagtaggagcccttccccgaggagctcattatggccttggtgtggcaggggtagcctatcttttcacaggcctcgtagagctcgtcgagagttgaggcataagtgtatctggaagttggaaccttcgcttcccttgccagggtctccctcgtcctctcgcggtgcattgctatccacgttgctttggcgttcggaactacgaagtagccgtctttctcaagctcgaagagggcatctagatttatagcctcgatctctggaattatcgcatccggtttctccctctcgacgactgaaaagagaaagtctgctttcctcatgtctcccacgtaggagcggtgggcaatctgcatagctggggcgttggcgtagcggtcaacggcgatgacctcaactcccagcctttgggcctcgatcgctatctccttcccgagctctccgctcccgaggaggactatcttctgagcggaatcagtcgtggcagttccaagttcatcgcggggccttatcatgagcaccaccccttgttttaacgtttaaatgttaaaaacttaagatatttaagcctttttagtcatgaaaatggcaaactttttaagccgtttctccaactctccccggtggtgctcatgctgacctacgctcaggcgggagtcgatgatgaaaagacttcgagggccttgaaaagcataatctctcttgccaaggggactttcgagttcagaaggggtaagctcggagagccggccgaagacctcggccactacgcggccttaatggactttggtgacttctatcttgccattactacggacggagttgggacgaaggttttggtggctgaggccgtcgggaagttcgacacgataggaatagacatgatagcgatgaacgtaaacgacctgctctgcgttggggccgagccggtcgctttggttgactatcttgccgttaaagagccggatgaaagagtgttcgaggggatagcgcagggcctatacgagggggcaaggcaggctggaatagctatcgtcggaggcgagaccgctgtgatgcctgatctaatcaacggctttgatctggctggaacggccatcggagtcgttgagaagaggaaggtgattaccgggaagaaaatcaggccgggggatgctgtgattggaataaagagctcgggaatacactccaacggtcttactcttgctagaaagctcctcatccccaagtacggtctcgactacgagtacgaggggaaaaagctctgggagtggctcctcgaacctacgaggatttacgtcaaggccgtccttgagcttatcgagaacgttaaggtgcacggcttggcacacataacaggagggggccttctcaacctcaagcgccttacttccttcggcttctccattgagatgccgcctattgagggaatcttcaggctaatctatgagaacggcgtccctcttgaggagatgttccgcgttttcaacatgggcgtcgggatggttgccgttgtcccgcgggaggagaaggaagaggccctccagctcctaaacagacacttcgagagcttcgagctcggaaaggttgtgggagagcctggaataagggtcgagaattatgggataaaactttaacgtctcattcctcttttttcttcggtgatatcatggagctgacggttaggaagaaggcattccttgaggagcttccggacgttgttaaaacggccgttgaggagtacggcactgccctgaaaggcatagaaataaaagaggacgataagggctgctacaccgtcatgattacctacgaacgggagcttcgcctgtgatcctctcatagagcctctcgtaggcggagatgagatcgcccttgccgaagcggaagacgtccttgtcgaggctctccttggtttcggcatcccagaagcggcaggtgtcggggcttatctcgtcgccgaggactatttcgcccctcgtgttctttccgaactccagcttgaagtcaaccaggattatccccctctccgcgaagtactttctcaggacatcgttcacctgaagggcaattttttccatctctttaagttcgctctcacccacacccaggactctggcgtggtactggtttatcatggggtccccaaggtcatcgttcttgtaataaaactctattatcggctctgggagttcagtgccctcctcaagcgggaggcgcttctttagacttccagcaacgacgttccgcaccacaacctcaaggggatacatcttcagcctctcgactatgagcctgttgtctccggcaaccccaatgaagtgtgtctttatgccgctcgcctcaagaaccctgaaaagatgggcgcttatctgggcgttgagccagccctttcctctgaattgggccttcttctcgccattaaaagcggtcgcatcgtccttgaactccataatgaccttaccgtcatcgagagggattattttcttggcctttccttcgtagacgtccacgctaatcaccatttttatgtaaaaactttgttctttttaagaatttttttgccattagaatgtcaatcactgggcaaagtttttaaacttgaatctgcaaaagactatcgcatgaaacgtttaaattagcatgtttaaatcaaaaacccctttcaagaaggtgcccggtgagagcaatgcgcgaaaagtgcggggtctttgcagcactctcagagaacgcgccgaagaaagcatactacgccctgatagccctccagcaccgcggccaggagagcgccggaataagtgtatggaagcacaggataagaaccgtcgctggcagggggcttatccaggacgttttcaatgggaaaaccctctcatcccttcgctccaacctcgcgatcggtcacgtccgctactccacatccggctctctcagcgagactcagcctcttgaaacggagtgctgtggaaagaggatagcagttgcccacaacggcaccctcacgaactttctccctctgagaaagagttatgagaataggggggttaggtttcaccactccgttgattctgaacttcttgggatttcgtttctctggcacctgaatgagaccggcgacgagtttgaggccatgagagaagtctttaacgaggttaagggcgcttattcggttgctctgctcttcgacggcaaaatcctcgtagcgagagattccgtagggttcaggcccctgagctatgggattggagacggccactactttgcgagcgaggattcggctttgaggcttttcgttgacgagactgagggcggggaaataagggacgttcggccgggtgaggtctttctactctcggaagggagtgtggagagtagagttctggcgagggagaagcaccaccactgcgtcttcgagtacatctacttcgcccggccagacagcacaatagacggcgtgaacgtctatcatgcgagggtgaagatgggaagggaacttgctagggagagtcccgccgatgcagatgttgtgatagcggttcccgactctgggagggcagcagcgttgggcttttcgatggaaagcgggataccctactcggaggggctgataaagaaccgctacatcgggaggactttcataacccccggccagttctacagggagcttaaggtaaagctcaagctctcgcccgtgagggaggtcatcaacggaaagagagtcgttctcgttgatgattccatagtcagggggacgaccatgaggagactagtctcccttctgaggaaagcgggagcgaaggaagtgcacgtgagaatagcgtcgccgcctataaggcacccctgctacatgggtatagacatcccgacgaggcacgaacttatagctgccttcgggagcgttgagaaggtgaggggagcgataggtgctgacagcctggcatatttaagcgttgagggccttatcagggctgttggcaagaaagacctatgcctggcgtgcctcacaggggagtaccctgagtgggccttcaggttttaatgaaccgcttcctcaaagcttcaacaaccttatcgctgaagcggactcctttggtcctgagctcaagcaacaggggttcgaggtcttcttttaggaggcccctttctttggcgatgaaaagcagcgccagggttcccgcaacctttattccgagggacttcgctatgatcctcgggatcctctcatcgagaaccagcaaatccgcgttcagctccctggcgagcactatggcctcggcctctccaatctcgatctccttcatgaggatttcaacgctcaacctgtcgtttacgtcctgaacctttatccattctgcttcgctcacttcccgggagccaggacggcctctgcccttctctactacctctgcccatacggctcgggggatgacaatctcaccaaacagctctcgtagaagttccagtttttcaatctttgcaagggctattagcggtccggagtcggatacaactatcatagtaacctctccagggtttctatgtcctcctggagatcttcctcagtgtagttcaaaggaacgcccttggaggccagaatttccatcatctctgctttggtgaccccagcaatctctgccgcctttccaaggctaactacgccctcccgatagagttcaacggcgaggtatatcctgacaagctttggtagctgtttctcatcgactctgaggattcgcgagaggtctgagggaatgacaacggtgacttctcccatcttcccaccatatccagttgtttttgagccctaaaaatatgtcggcgacggggcgattagactttcctaaccctagccgccgcgaacttaaattctggcgttccggccttgtttagcgcatggctcgtcagcttgttggccttgaagtggaaggggacggcgataactccttggggcacgtccccaatctccgccgtcattctgatcttcccgcgcctcgtctccacctctacccagtccccgttctgtatcccgagtctctcagcatcttcacggcttatcagtgcttttggctcgcccatgagtctgacaagtgacgggctcctcagcgtcatctccccggtgttgtagtgacctataagcctgaccgtcgtgaggacaaaggggtacttatcgtctgggccctcccagggaggtatccactcaactgccatgaagcgggcttttccatccggcgttgcaaactcccaggtgtgaagcctcttcttcggcaggaagattccgtccgagttcttcagctcctctacgctcttctcctcaagctccgggaataacctgaagtactcggcggttatttcctcaactgaggtgtagttaaagccaggcagaccgagtgcctttccgagcatcgtcagtatctcccagtcgggctttgagtcgtatgctggctcgcagactttctcgctccattgaattctcctctcgctgttcatgtagcttccagctttctcacagaaggccgaagctggaaggagatagtgggcatagcgggccgtcctcgtggggaagatgtcctggacgacgagtaagtcaagattccttaaggcccttctaaccctcatgaagtcggcctcgctgacagccgggttctcgccgacgatgtagagtgccctaacgtcgcccttctctatcgcatcccacagctcggtgaggtagaggcccctctccgtcgggaggtcatcaacgccccagagccctgcaactctcttcctgaacttcccgtcagtgagcgggacgtagccgggtaaaaactcgctcagagcgcccatataagcggccccctgcacgttgttctggccgcgcatcgggtagaggcctcccctctcgccgatgtaaccgagaagcagtgcgaggtttatgagcgcgagcacgttctctacacctgaaacgtgctgggttaaccccatcccccacatctctgccccgcttccggccagggagaaatccctcgccacttccttgatcttttctgcaggaactccagttgccctctcggcgtactctggagtgtactttttgaccgccattcttacctcagagaagccagttgtcctgctccggatgaactcctcgttgtagagctcctcctcgattatgacatgagcgagagcgttggctaggactatgtcagtcccgggccttattatgagcctatggtcagcgaaggccatcgtcctcgtttccctcacgtcaacgactataatcttggcaccgctcttctttgctctcagaatatagtccatgacgactgggtgggtctcggctgggttgtatccccagatcaggacggatttgaacttcggtatgtcctcgtaggggttggtctgcgcccccgtaccaacggccagcttgagggcatgaacggaggcctcgtggcacagccttgcacagttgtctatgttgttcgtgccgaagaggcgcgctatcttctggagcaggtagttctcctcgttggagaccttggaagacgccagaaaggcaaccgcatcggggccgtaaagttcccttacctccaaaagcttattcgatatctcctccatcgcctgcccccagcttattggaactatttttgagccgacgcgcttgagcggtcttttgagtctgtctctggatttgacgatctcagtagaatataagcccttgggacagagctttcctttgtttggctcgcccttgtatggctttactttaagtgtggcgggatcaatgagaagtttgcagccaaagccgcagtaaggacagacgaccttcttcacgctaccacctgtttggcaagaaaaagtcaaaactaaaaagttttttggtaaaaattgaaaaagaattgctaattaatttcacgactaaaaaattgagaaagcttcgctgtgctatcctccttgtatgtagaacccaacctcaaagtagttgtccccaaccaggacatagcttggaaacccccgccaaaatgcctgcattattaaggattcgtttgtcccagctaatactgtgatgtaagtcctgtcgttccaggggtttcttatggtctctataactccccagggggagggtgttggatactccagtggcaactgcttcacggactggtttgtaatttcaaacgagaaaaactctttcactgatgcgctgtctctctggagaatccacgatccattgaaaacgaacttcaccggaagtccgtcgttgagctctttcactaggtcgtttgtctgcggcgttccaatgaggatcaagttggccttggtatcctcgggagtcagctcatcgtaggcttttatctctattgatggtgcttggccaaactcctcattgtaagagtcctcgagggcatccttaatggttttagcggcttctctttcttgttcactcgatccggggactataaccacccgaccgtaatggaaggcagtgttccactcatggtcccatgttactggagagagctcccagtagagggtgcttatgttggttggagtcgcccacgttctcatgtgttcggccaatgtgggtgcgtactgaggcaaagtgctgttggtcttccacacaacatcgtactcttcgaggagtttggatagtggagggaaatacattgacatcagcaacgttgagtaagtcatgtagtctttgggtatgccacactttagagccgcgtactttgctatgctttcggttaataactcattaagatacctagagaaggaaccgtaatggggtgtatcgtaggtggtcaacgctggcagttcttttttgatttcgtctaagtagtagtccatgccctcaaaaagctggaagttttcatccaggaactcccccacgaagggatgtgcaaactcatggaacatcctgcgaacctgaccgtaaagtctgcggggagtcgtattatgcgagatccatccgatgtaataactggtttcattctcccaactggcgtgggggtgtatccatactgagtacgaagcttcaatcctgaacttggtgtaccactttccgaaaaaacgccagtatatagggattgcacagtttatgtatgctgagatattggaagtcgcctttgaatattctttcagatgtgcccgataaaatgcactgaagttgctctctctggcaaactctgataagagcctcaaatctactgccaacacactatcgttggttatgttcccaaggtattctaacttcgccaatttgttgccaaatttcattattgaatagtccctagtgtaatacgggagtgacgggccaaatacatcacgaacatatccaacgactacactgtcattgtacgggccaaaataagttaaaacatcctgtatgtactccttgggggccattatgaaaggatcgcttccattgaaagcgagaatgtacacgaccgagaacagctccagatttggattaatctcgacagttatatctgcggtgtggtttgctgttgcgtagctcgccgtatttgttgtggagttggaatccctcccaagttccgtggtgctggtagtaccagtttcggtagaaggctgggtagtgttcgaagaaatacatcctgctgccacaacgattccaacgaggaaaaacaccaacagcgtctctattttgggcttcacttttattcatcagtatcttatttgagctgttgtctttaatagattttcttatttggttaaatagttgtttaaaaagagtgcacgtaatttttggaaactcttcttgtaaactgttcgggggatgagatctttgtttaaaagctatgcagtaaatgatggccttcaaaaattaagtgaacgatctaaaaagcgaaatcaaactgccttcctcaagaagtactcgtgcaccctcgtgtcgtcggtcagctctgggtggaactcaaggccgatgatgttgtcctgctcaactccaacgaccctgtccccaagccaggctatcggcttcaccctctcgctgaggagctccactattctcggggcgcgaatgaagacacccgggaatggttcgccgctgaaggcgagctttattggggcctcgaagctgtccacctgcctgccgtaggcgttcctgttaaccttcacgtcgagaagttcgaggaacttctgctccggggtagcgccgataacctcctttgagagcattatcagacctgcacaggtgcccatgatgggaagaccttcctcgccgagcttctttacaggttcgaagaggccgttcttcaccatgagtcttgagattgtggtgctctctcctccagggattatgatggccgagatgttctcaagctgctccggcttctttagccagataacatctccagagacgccgaggttttcaagggctctcctagcagcccagatatgctcctccacgtctccctgaaggccaatgacacctaccttgaccatactaccaccccaaaagagtgaaagaaaaaggctcagacgcccctctcctcaagtcttacctcaagctcctcgatgtcctggccgcgcattggttcgcctatctccttgctgatctcgacgagaacgtcaggctcgtcccagtggttgacggcttcaacgatagccttcgccatcttcggcgggttggagctcttgaagattccagagccgacgaagacaccgtccattcccatctgcatcatcaacgcggcatcggcgggggttgcgacacctcctgccgcgaagttgacaaccggaagccttccaagcttctttatctcaaggagtatcttgtagagcccgtcaacgatctcgcggtaggtgtagtggccgtagatcggctcgttgtcgaggactctctgcggaagtccagctatctccttgacgttgagcgagagcctgaggtagggttccgcgaacttttcagcaacggcgtagacctgatcgtcggtcatggcctggatctgcctgatgccctcagccacgaggcggacgtgcctgacggcttcaactatgtttccggttccggcctcgcccttggttctgatcatagcggcgccttcccatattctcctgacggcctcaccgaggtttctcgcaccgcagacgaagggtactgtgaactcgcgcttgtctatgtggaagaacgggtctgagggagtaagaacctcgctctcgtctatcatgtccacgccaagggcctcgagtatcttcgcctcggcgacgtggccaatcctgaccttcgccatcaccggaatggttaccgcgtccataatctcctgtatcttctcgataggagccatcctggcgacaccgccggccttcctgatgtcagcgggaacgcggtggagggccatgacggaaacggctcctgcctcttcggcaattctcgcctgctcggcgttggtgacgtccattatgacgccgcccttcaccatcttggcgaatcccctcttcagcctctcggtacccttagcctgaataacgtccagctttcccatatcccacacctcggttatgagaattctaaactctataatataagtcttcccttaacgaacggtgagtgatgtcgaaagatgtttaaaaagtattggcgaagagcgaaaaagttcatcaaagcctgccaattatctcaaggcttacatcaaagttcttgaccgagtgcgtgagatacccaaggctgatgacgtcaacgtcgagcttcgcgtattcagttatgttctcgggggttatcccaccggaaacttctattttgaccttctccctcaggccttcgcgcttgagggcttcgataacctccgctatttcagcaggcttcatgttgtcgagcattaccacatcggcccctgctctcgctgctttcagggcatcttcaaggctctcgacctcaacctcgacaaccttgtagacggagaactccttggcgcgttttatagcctcttcaaggggaactaaggcaaggtggttgtcctttatgagtatcgcgtcgctgagagagaagcgatgagtctctccgcctccaatgaggagtgcacgcttgtctatgggtttgaggagggtctttctcgtcccggcgactctgactttggggttcacgctcttgactttctccacgagcttcctgacctcagttgcaattccgctcatcctccccattacgttcagggcggtcctctccaccaggagaatcgccctcgcgttgccctcaagctcgagtataacgtctctcttcccaactaactctccgtcccgttttttaacctctactttgaccccaaagtgttcgaaaagcgctttggcctcttccacgccggctatgacaccattctgctttgctatgatgactgcccttgccttcatatcttcaggaatcacggcctcacttgtgacgtctccaaagggcgcgtcttcctcgatgaacctgagcagatactcgagcggaaccatcactctcaccagttctcactctagttctctctttattttgttttctgattttgccttaatcactgccattttcccttcggaggggatacttttttatttacttgtgacaaagttaaacggtgggccaccatgataaagaaagccgtcatccccataggtggagacgccacgaggctccgccctctcacgatagagacttctaagggcttggtcaggcttttgaacaagcccattctggagcactccattctcagtctcgcgaaggacggaattgaggaggtctaccttggggttaggggctatgtgaactacacgacgctctttgactactttcgagagggctactggctgcagaagaaatatggccttgaaaaagaaattagaatccgctacatgccgcgctatgagagcaccaccaacggcgacgctgtctggtacacaatggagtactacgggataaaagaacctgtggtagttatccagggcgacaacatctaccagctcaacatccaggacatgtacaagtggcacaggaagaaaaacgccttcatgacgattgccctccagccggttgaagacgtcacaggctttggtgtggcaaagatagacgatgactaccggattgaatacttcgtcgagaagccaaggccggagcaggcacccagcaacctcgccaacacagggatttacatcctctctgagaacttctgggagttcctcaacgagggatgggcaaaggagatgaaggaaactcggaggctggactttggaggtgacataatccctgccctcatagagcacggctacgaggtttacggctatccgatggagggctactggtttgacgtaggtacgcctgagaggtatctcaacgccgccatgtacctgctccgtcacctttcacccgaggatatggaggccgttgaaataacccacgacgtttacatgcagggcaaatcggagatgtccgaagacctccggaggaagttccgggagatgataaagactgggaagctcatcgtggagggtaaggtgctcctgggcaggcacatcagcatcggaaaggggactgcacttgaggacgctgttatagacaactacacgatcgttgggaggaactgcgagatcctccactccgttgtcatggacagggtgaagctcggagacaacgttaggatagtgaactccataataggtcgccacgtcgagattgggaacaacgtgagaatcgtaaactccgtaatcggcgacaacgccgtcatagaggacaacgtgaggatgtacaacgtcaaaatctggccacacgagttcgtggagaggggggcaacgcttgagcactacaccgttaggacgggtgtgccgagaagatgattaagattggagtaaagccagtcttattagtggcgtattcctttttcgtctttcttgttgaggcatccctcggaatccacaggaaggtcgctgacctctacctgactacccaaagggttggcgggatcccctgcgttaagttttactgcgttacctccacctggattctcgccctagccattttgatagcccctctcctcctcggctatctcctccttgagcgctacgaagccctgagagagcacgcgaagagccacttgcttttcggtctcctcctcgtcccggtcggcctctgcaagactctttatgctggaggctttgtaacgatgctctacttcctctccctcgcaaccgacctgtcgtatctccttcagcaagactactacgaaaaacgccttcacgagctcgctctggttgtcttcacgtggtttttaaccacatcggcactgatgctcaagccctgggtgtgctgagggacttgcatccccagctttgactctcaatcgaaaggtattaatttctggtactcaaactaacttcggtgggacgatgcactacgaagaagttgaggttctccttcaaagatcagaggactacatggagcttgctgattctgcttttgatgaagagaagtacgacgccgcgatttttctgacagaacaagcgattcagttttacctcaaagcccttctgattaaatacgctgacgtgagactcagaactcactcggtaagggagcttctggcggcccttgggaaagcccttgaagcggaagagaaggtagctgacttcataaggtcgcaccggagccttctcagagagcttgaggatgcatacataggggcgaggtatgagccgcggcgctactaccgcgaggacgcggaggagcttatggagttcgtgagggaagttagggacttcgtggagggtctagcggatgagttcgaaaggaagagccattgaggcaatgatcgagcgcgggaggaagaggtacctaatgataaagaactacaagcgctaccttccagcgataaagagggcttgcgaggaagtctttggtaagtgcgagctctacgtctttggcagcgtcctgaccgggaagttcaccgctgggagtgacgttgatctgatgataaaggttcaaaaagtcccaaaaagcctccgcgagagggctgaacttgaggcgaggatcgaagagctcgcaggcctgcccgattatcacccctttgaattccacatcgttgatgaagagggattcgagcggtacgtaaaactgctgaaagccgagctgaaaaaagtggaatgaagcaaaacttaaggtcttcctctcttctttgcgatccacaggaggaacaatccagccactatgaatccagcaaggcttgcaccgtagggcagcgtggggtgaatgctcgcaaggaaaccggctgtgatcggagttatgagtccaagaactttccggtagctcgaaagggccgcatggaactctgttgtcctctcctttggaatgagcttgaagagccacgagcggtagaacgggaaccagagcgcgttgccgaagtctccgatggcgtaaacgaccagggcgagccagaaaggtggggcaagggccatcacgaaggcgtagagggcgtttaggaacattcccaaagctatcgcgtggaagcccttattctttggaaccctctcgctggcgtatgtgcctgctattctaagaagactgctcgcaaccgctatcagcgttatctcgaagaccgtcttgtgaagaacgaagacgacgtagtttatgaggacgaactcaggagctagcccccacgccagcgttaatagcgtttcaaatgcaaggaggcgcttaaactcacccgctttgaacgtgaacccctccggggttatcctctcctccttgcccacagggggcaggaagagccagaggtaagcgacagttacaaccgagaagaggccgaagaagaggaaggtcaggcggtagtgctccggcctattgtacacatatccgaggaggtagcccattatcggaaagctcaccaaagtagctatctcgggcaatcttagatgccaggcgaatatctcctcgtatttgtcctcagggtagattatctgctcgtaggcctggtagagagggtataacagagtggaaagcttgtcgatcaccttgccgccgaagagcatcagcggcgctatcgctcccttggcgaggccgtacatgacgtaggctattccatcgaggatgtctatcactatgaggccctttttgatatcccagcggttgaagagcctgccgaagaggtaggtgagcgggatcgaggcgatgttcactatcgtgaagaacaccccgacctcaaggatggagtagcccgtcatcataaggtagagcgggaagagagtccacgttattagtcccggggctatgagggtgtggtagatcatataggccttggcttccctgggaatttcgctccagcgcataaagaaccctccgaaggcctaaagtgtcgtgctttgagtgaaaaaactttaaataattttcggcgggagtaacgatggtgccatggatggaagaaaggtgggactttgactcgtgggcggagagctatgacgaggacgttatgagcgacggctggatacacagcgattatgagagagtccttcggcttgtcgcggagagggctaagggagtggtcgttgatgtgggctgtggcacgggcaacatcctccgcttcctccgctgtgagcgctacatcggcgtcgagccctcggaggggatgcggaaggcttttcgcgagaagtggggctttgagcccattgacggccactttctcgaaatccctcttccggaggggagcgcggatacagtggtgagcacctacgccttccaccacgttcctgacgaggagaagggggaagcgataagggaaatgctccgcgtgctgagaccgggagggatcctaatcatagccgacgtcatgtttgagtcggaagacgagaaaaggcgcataggcgaggaggacggcatactggaagaggttctggaagagtacttcgcgaccctcgaccacttgggggcgatttttgaaaggctgggggtatattgggaggccgagagggtgaacaggtacgtctgggtggtggcggtggaaaagcactccaacctgctcacccctgaccacaacccctaaatggttgagcacccaactaacgaacatgcccgacgaagacctagccagggaagtccaggagctcagggaggcccttgaaacgctgaggaagagcttcgagatagtctcccagatggcccagtcctacctccggctcctcaacctctacgcggaatacggcgggcttagcatagacgttgttattccagagataaagcatgacccgatagcgagggagattgtgaagattctcttcgacctgaggagggcaaacgtgagccaaatagcgcgggagctcaaggggaggcgtggaaaggcctcgcggaacacagtcagggcaaagcttgaggagctggaggagctgggcgtcgttagagaggtgtcctccgaggacaacagaggcaggatatataccctctcccgcgatgtggtcaggaagtggttagagctgatcggaatgccgattaggtttgagcacgctaatgattattgaggtgattggtatggtgaacgcggagaagattgagaggttgattgacgagatcgttgaggagatgaggaacgccaagacaccggaggagctcgaagccctccaaaggaaggtggagatgctcgaagacctcatagaggccgtcgagggcgacaaggacatcgagaaagcagcaattctgatggacaagatcggtcccataatggaggacataatagagcctataaaggagctcctcaaggagctatataaccctgagaagatggcggcaatggggaagagcgtcgccgatttctacaagaacctcgtcgaggcgggaatggacaaggaggctgctcttgagctgacgaaggagtacatggccagcataaacgtcgtcaagaccctgactgagaccttcgcaaacatgatggcaagcaagggcggcaacgtgagcgttaacatccccctcggccacaagaaggtcagggaaatagagatcgaggaagaggaggagaaggaggagtgagcttagtcagctctctccttaagcttctctttttacatattccaaggtctctattccaaattgcggggttagttaggattgtccgcaggggaaggagggcctttagaaaggctttgaagaaggaaggcctaccagaagaggttgtggatgctctcacggaggaatttttcgttgaggttgactggaaagggatgatttttagaaaagaaagagactaagtaaggtcttttctgaacaccagcacgttcggctcgtcggtctcgtcccatagggacagaccgagccgcttgaggccgggtaaaacttccctcatgctcgcagggagcatgaggtcaaaggcttcgtccctatccttcgcgacccacgccatagctggaagcattgcctttatacaaccaagcccgaaggagagcggcgtgaacgtggcccttcctttctcaaccaggaacttgaagccggctatctcgtaaacctcggccttccttctcacccactcaagggcctcctcgccccactcggggtaagggtctatgagggcaacactcacgaagcctttcttctcgtaaaaccgcctcgtctcatcgtagggccggtagggaggtcgccagaagtcttggcgacgaggacttcaaagccccactctcttgccaggctctcgacgaacttcaggagggtggagccaatatcttcctccggtgttccctctttacggccatccagaggatttcgagggccttctcgttggtgggctttaccgttatggagcctagaacgtttccgttttcagcagtcaggtaagtctcctccttcctaaggtcgcgttcgatgaaccactccggaaggcctttcgctatctcgatgcatgcttgcatctatgtttccgtttcgaaggggtttgattctcatacctgcatctcacttatggttctcagaaagagttataactgcaggttagtattattaaaacatgccatttagccctttccactcagctatggaaattacgctcaatacttctctgaatcagggttagtttgggggaggtgtttctgttgatagttcttgagaacctgtttcaccgctatgattcgaccgttgctcttaatcgagttaacctagaggttttggaaaaggacaacatattctgcttgatgggtcccaatggtgctggaaagacgactttggtcaggatactctccacacagctgaagccgacaagtggaaaagcttatgttttaggttttgacgtcatcaaagaagctaatgaaattagaaaaaggatagcaattctaccccaagaggcaagacccctaaacgaagccacgccatgggaaatggtctattggtacttggtttcaaggggagaaagcttttccgaggcaaagaggaggacggagagtgttttaaaagaacttaatctgtgggaatataaagataaaccatgtctcagcctgtctggaggactaaagaggagagttctcttagctttgacagttgcaacaagtgctgagctcatcttcctcgatgaacccactttaggattggatccactctcaaagcgtgaaacttggaggctgatttcagagcttagggaagaaacattcttctttgtgacaacgaacgtcggtttagaagcagaaagtctggccaaaacagttgcaataatcaacagaggacgaataatagccaaggggaatcctgaggaactaaaaggggagacttacaagcacaagctaattttcacagacgatgtgcagattaaaggggccataaagtttggggacaagaaaattctatacttcaacgaatttgatgaaatacatgaaattttgcgaaaattaaactcctattcaattcagccaacggatttggaagatgtttttatagcttttttggagggagagcggaatgaaagctagagctataatttcaatagcctatctaaacattacgggacttttaagaagccccctctggattgttccacaaattttaacgccgatagcaatggttttgatcctgttcatctttggtggaaaggatttagcattatacgctttggtcggtgctctggttgctttgacagtatcaacgagtataagcctgtcccgattagtggtcttactcaagtttataggctttcaggatatttttgttgcctcccccgtgagccctgtagaatacatgcttggcttggctctttcacggcttttgggtgctttgccatcgctgttaatcttcatgggagtcttagcttatttgggggttttaacattctcgaatttggcttttgtagttggaattataatattttcatggcttttatcctctctgctggctttcacgatatcgacaaacatcaaaaatgttgtccacgttgatgcgctatcaagcttgctctcaatgactttggttttaattcctcccgtttattatccactgagcagattaccggccatattccaaaagctggctttattgattccaacgacatacatcgctgaacttatgaggattgtctttggactatcaaactccagtgcttcactctatgcaaccggggcagcaatatacacacttgctttctttgcactggtagcaaaaaacatgaaatggagggagtgaattaggccattatctttgtgtaacttttattcaaagcgcctcctgaacaccagtacattgggctctttggggttatcccagacctcaaagccaagctcttttaggggttcaagcaattccttcctttcttcgggcaccataatttcaatgtatttttgattcgcgttcaaagcttcttgtgccatgcaggggagtagttgttctacatatgactttgaaaggcgaaacggtacaaaagcactctcagagtctttgggcatcatgaacttggctccattgcattctttgataatagctttctctttgagccattctaaagcttccgggactttatgaacgaacttccatcctacaggaatatatttctcgtattcaagctcttctaaagaggctattgtgctgtcggatggctttgaaggtttaatttcttctacagctttccccataatgtagtagcgcttcacaatcttgaatccattcttcttggccattgctatgctctccctgttgaggaagtaggtcgcgaactcaagggcgtctatcttgccttcctctgccagctcctttccttttgagactatgaagttgtggagcattcttccaaagcccctgccgcggtagtcagggtgtacccttaacccttccatccagccgactctcttgggcaggagggtgagcttcgccgtcccgattacctttccttcgagctcaaggacgtagaagttcccgtctctgacccactcgtcgaaaacgcgcgcaaggtaatcctccccgccccaagtaaggcgcgctatctcctcgatgaagggtttatcctcgggtttagcctcgcggatgatgggttccattgtggttcacctgataggacttatcccgcttcaggttttagagctttgggcttctcttccactcttctcgaattaactcgtaaaacagctcgtccacgtatttcccatcgcttcagccaaggcctgccactcttccctcattatgtcatagaacaatacatcaacgtacccctccggcgtccacgcatgtttccttaattttcccgtcagcttgaatccgttcttctcaagaacctttattgaggcggcgttgttctcataggttctcgcaaagaccttgcgcaggttcatgtattgaaagcaaaatctcaaggccagctttacggcctcactcgcgtagcctttcccccagtgttcttttccgatgaaataacctatctctgccgttccgttcctgaggtctatcccgctcaagataactgtcccaacaagttcgccatcatcattaagtactgcaaaggccctcttggttagctttttagccgtcagattctcgtaccacctcatccactcttcaagcgttgaaacatcggatggatcggcgagacttttggcgacctctctgtcgttattccattcccatattttctgaacgtcctccttgataatcacacctaaggcgactttctcccccttaaggatgatgggcctcatagccatccccacggttacaacgcaaaagagtttttaaaaagttttcatgcaaagttattttggagatgtgggatggaacggtggagaaggggcgttagtttgacactgatttcagcttactaggtggttcaagatgaacattctaaagctctactatgaagaggccctcagaacgtttcgggaatcgggagggggcgaggaagatttctactggctcgtcggcagcttactagccagatatccctcctatagagaagagctggagatcagaaagaggctcatggagatgataaccgatgaagttaaggggaaggttctcgacgtcggctgcgggactggagttctaacgttcaagatggccttaaaaaacggggttgagatggtcgttggcgttgataggaaagaggaggtaatcgagttctgcaaccgcttgggggatagagttacgaaaaatgccaagttcgttcagggaaactttttggaaatgggccttgatgaaaagttcgactccgtcgtgttctcgtacgttctgcacgactttgagccggagccgtttcttgagagggccctcgaagtgctcgaagaaggagggcgcgtcatcgttggggacttcgacattaacgacctgaggaagagaataagggaattcgcaagatggaagggggtgaaaatagtcaagggcgttaccgttggccgggcggagagccacggcgatctacgggaggcgtttttgatggttgttgagaggttgtgagttgagactttgcagccatcacgggagttaatggtatcgatcgcccaatagttggccacttcagaaggctttctagatgtatgagtttgtgtctggctttcgatgttgaacggggaaaagatgtgagctagtctccgctttcctccaggtggtgcagctttagatgctctcccaggaatcccagaacttctccagccttgaagccggcaccgagcaccagcagagctattgcgaacatcagtctggccccagacagacccagcttgtccacagcaaagccgtagacggcatagaaaaccgccatcaccaatccggcgagcatcctgtcgagggaaaggatggttgccctcttctcgctcggtatcctgtgctggaactccacgttcaggttgaagccgaaagccgccgttatgatggtgagggctattccaagggcgactatccagagagggttggtgtaaaccacggagagaaccgttaacagtgggaggagaactggggcgagggagtaggctttcctgctccaggagtcgcggaggcggacgccgatgagccttggaaccgtcctgactgtgacctcgacgacaccgagaagtcctaaagtgcccatgagtgttgtcccgaggcttttggccagtacccctccaaggtagggctcgaagaacttcctgaactgattggtttgcatgccaacgattatagatagcaaaaccagccagaagagcctcggctggaagagctcccttagtgaagagagagtgtgacctaggtaatttctctccgttttcttgaactcgtactccgggatcgagaggatgaggactaccgccaaaagctcaactatgaggcccaggacgatgggcagggtgaagccgtagaactgcgccagaaaagcccccacaacgagggttgtcgcagagagaggaatcgttatgcttttagcttcgcgcataacctttctgtattccctctccctccctatgtgcttcaggtcgtcgaagagccacgcctcaaagcttccactgacgaaggaggcgcccagggcggatatgagcgcatataggagaagcatggggaagttgtgaaggaagaggagaacaacacttccaaatgcatggatggtaaagccgaggaggacgctcagcttcctgcttattttgtcgccgacgaccccagttggaacctcgaagagaaagccaccaagaaccatcaccgaggtctcaaggcctatctgggcgtagctgaaccccttggagaggaagtagatgacgagcaagttaccgaggaagccagtgctcatcagggccatcaggagcttaaacttcttgattaaatccatacttaatccctccaaacgttttaaagcatgcaactttgttttcaccattcgcctatcgattcaaccatcataacagtcttcccgtcctcctctttcacacccgcagcgaggtctttgcccagaacctccacccagccgcgctcccagagggactttttccagaggacttccccgtttgggctgagctccataacggaggccgttccttcgacctctcctccgacgagaaggccatctccaagcggaaggggtgaggtggcggcgccgtttggaagggttacttcccactccttgctccagacccagaggtcattttccttgtagccggcgaggataagtttgtcgttccagagggcagcggtgagcgctattccttcttccgttattgttgccctatccagaaagttcccgtcggaatcaaagtcaaaggcgacgactttccagcgctcctctttaacgctcccgatgagcctcggcctttctctggagagaagggatgccgtgacaacctcctcccagttgccaaagtccttcagccactccagctcgccctccatcgagaactttccagagaaaaagcccatgttcctgggccgtcccgtgtcgccggctatgaaaattgaatcccccgcgggaaggatggagtaggtagcctcgttgccccttatctcaatcttcctctcccagaggacgtttaaatcctcatcgagcctcgcaacgtaggccttccacccaacaccgccgtcggacgttgctttcccctcggcggcaccccctatcatgtagcctccctctatcctcgctatcgaatgcccctcccagtcgttttttccactcaagaagtgagtttcgaggatttcttcgcccataactctggccagcaggattttatagttccttccgtcgtggacgctcccgatgagcaggtcatccaccagagcgactggaactgtctcaaagccgaaggaatacctcttcatttgaagtcctcccgtttagctaaccgtttttaaagataaaagttttaaggtttttgtgggcggtagtaattgtgtggtcataatgggaaagaacagcttcaacagtggaatcctcaccctcctcgtggtaatcatgataatcctcgcctttgttcctgcctacttcatcggatacctctactttggcctggtggtcgtttatcttgccatcctctacgttgtcgagaggagagggcacaggaagctctctatggtgatttcctacctctttggccttgttgtggtgtacctcgtcatgaaaaaagccgaaaagtgggatgtcaggcttttcactttggtagcggttctgggcgcgctttcactcatcaggagggtgaagaatgagggtagcactaatcccgatgcaggttgaggacggaaacttcggggccaactggagggagttcaaaaggcgctttaatgaggccttagagcacagacccgacttcatcgtttttcccgagtactgtctgactggcttcagggaatgggacttcagcggtgcagagctctacgacgagataaccgcaagggtgagcgagctggcgaggaaaaacaacgtctacgtcgtctttggcctgcttgagccatacaagaactgcgtttacaattccgccttactcatcgggcggaacggcgaagtcctcctcaagcaccgcaagttccaggaaccttacaagttctgcacgggcaacacggttaggactgccagaacggagttcgggaaggttgccattatcatctgcggcgacctctacaacaggcgcatagccaagtgggtgaggaggaaaaggccagattttctcttcgtgcccatggagtattcgcccgaatacggagaaccaaacgaagaggacatcgcggccatgtcggagcgcgtcggactcctaggggttaagactttcatcgtgaacagctttccgcccggcggtgcatgggtctttgatggagacgggacgctaatcggtgagagcaggggagaggagctcctcctctgggaggggcaaccctaaaatacccccactccaacttttttcggtggttcccatggagctctacgacgttgatgagttctggaagttcgacctccgcgtcgggctggttaagagggccgagaagctgaagcgtacgaggaagctcataaagctcgatgtggactttgggggcgaggagaggacggtaataacgggcatagccgaccagtactccccggaggagctcgagggtaagaagttcgttttcgtcctcaacctcaagccgaaaaagttgagcggtgttgagagtcaggggatgctcatagttgcggaaaccgaggacggtaaggtctacctcctgccggttccggaagaggtaccggtcgggacgagggtgtggtgaatgctcttcggaattccagaatccaaaaacccgaacctcctgctccttggaatccgctgggacggctcttcctcctacagaaagggcgcgagggacggcccaaaggccataagggaggcaacatcaagcgagctatacaacagctacacagagaatctcgtcaaccttgcggagagatggcggtacagagaccttggcgacgtggaggggaaatccttcgcggaggttcttgagagggtgaggaagctcgtgggggagaactacagtggtgagaggtttctcttcctcggcggcgaccactccataacctacgccaccttcagggccctcagggaggcgagcgggaaagagtttgggctgatatacttcgacgcccaccccgacctctatccccattatgagggcgacccctactcccacgcctgccccgtgaggcgcctcgtggaggagggctgggttaggggcgaaaacgttgttcaggtggggataagggccccaactcctgaacagcttgacttcgctgagagagaaggcatactgatttactccgcctcggaagtgtggaagggggccgaggtggaggttcccttcgagagggcctacctctccttcgacctcgacgtcctcgacccggcgtttgcccccggcgttggaaacccggagcctggaggcctcagcacgagggagctcattgagctcataaaaagcattgacgccgaggttgtggccttcgacgtggtagagctcaacccgcgctatgacgtgagcaacgtaacggccttcgcagctgctaagataatcagagaagtcctcgggaggtgagaggatgtggccctccgcgaagttcattgatgggagagtggcattttcgcggatgccggcggagagggagctcgacgaagtggctagagactttgacgcagtggttgtcctcgttgaagattacgagctcccctattccctcgacgagtgggaaaagagaggcgtagaagtccttcacggccccattccagacttcacggctccaagcgttgagcagctcctcgaaatcctccggtggatcgaagagcgagttagagaaggcaagaaagttctaatccactgcatgggcggcctgggaaggagcggaacggtgggggttgcgtggctcatgtactcgaggggtctttctctccgcgaggccctcatggaagtcaggagaaagagacctggagcggttgaaacacaggagcagatggaggttttgaaggagcttgaggagagaatctaacgcctggatttttgcttttgtggacagcctttcctggcgacaggtttatatactttcaccatcacccggccccggtgagtaccatggtagagagaagcattaaatcccgggttttatctatgggcgcatcactgcttttcaaggtgacttactgccatcatctcttctgaagatgtccctggcctaaaggttagtgcagactttttcggggggtgttcttcttgaggtacacactccgggactatttgaggctagccgagattgggaaccggctcagaggggtcttcgacctctggaactaccgcgaaatagtgtttcccgcagtagaggagtactctgagtcaataaggaagggaacgaagttcgcccacaacaacgagttttacgtgatatgcccagacgccacgtccaggataataagggatttcaacaacggggaagcgaggatctactacataagcgaggttctcgatggagaaatccacggggtctgggaggctggagtggagctgatcggcggcagagagccggatatgtacgttgaggtcccgagcgttctgataactgccctcgaatcactcggaatcgaggacttctacatagacgttgggagcgttaaggtctgggaggaggcaacgaggggcattgaacccttcagggaagaagtcaggagggcccttttaaccagaaacttcgggatcatagaatccctgccgatatccgcgggcaggaaaagggctttgtggagactcttcaacttcagggggaagaggtcgggcgtcgaaaagctcgacgcgatagcggagctcctcggcgatgagagggttttcctggacttcgggaccgtgaggccgctcccctactacacagacgtcatctttgaggtctattctccgaggctcgggaagccccttggcggcggcggggagtacctggtggggaataaaaaggccataggctttgccctcgacttaggagccctcttgaagctctacagggggcgggaaaggaagaggcaggtgctcacgggagagcctggggaagtctacaggagggccagggagctcgtgaaaatgggcattcccgtggaggtgaggccatgaggttcgttctcccgaaaggaaggctcctaaagcccagcatagagttcctgaggaaagctggagttgagctggagctcccgaacgggagggagcttgtttcggccgatggtagggttctcctcgcgagggccttcgacgttcccgtttacgtcgaacacggggttgaggtggggatagctggcagcgacgtggttttggagagggggagcgacgttttcattcccctggaactgcccttcggaaagtgcaggataagcgtggccgttcccggggagaggaaaaggtatcctgaggacatggactgcttcaggatagccacgaaatacccacggatagcaagctcttatttcgactcgattggcgttgacgttgaggttatgaagctccacgggagcgttgagctctccgtcaggacggggatagccgatgccatagttgacatcgtcgagaccggccagacgctgagggagaacggcctcgtcgaggttgccaaggttatggacgtttccgcgctccttctcgtcaacaggatagcgcagaaggttctgttcgatgagataaacgagcttgtgatgaagcttaggggggttttggatgaaggggcttgaagaatacgttagggaaatcctggaggacatcaggagaaggggccttgaggccctgagggagtactcggaaaggttcgacaactactcgggcccgttcagggtttcggagggggagttcgaggaggcagaggaactcgtgccagaggaggacaagagggtaatcgaggagacgatggagcgcctctgggagtaccacgcgaggcagttcagggatgtagagctctacatcaagaggggctctctctacggccttatatatcgcccgatagggaggatagggatatacgttcccgggggaaagccgctcccgtcgacgctcatgatggtcgggattccagccagaatagccggggtcagggagatagcagtcacgacgccgcccaaagacgggaaggtgaacccctacgttctctacgtggcaaaactgctcgggatcgaggaggtctacaagctcggcggggtgggggcaatagcggcgatggcctacggggttggcatgaggagggttgacaagatattcgggcccgggaacaggttcgtcaacgaggccaagaggcaggtgttcggcattgttggaatagacagcctcgcagggccttctgagatagccgtgatagccgatgagagtgcagataaggattacgtgctcgccgatctcctcagtcagctcgagcacgggaaggacagtaaggcatggctcctgaccacctccagggagctcgcagattactgctcaagggaggggatagaggttctcctatgcaggaacctggaggaatgcgccgagaaggccaacgagatagcccccgagcaccttgagataataaccgaaaaccctgaggagctcgttgacctcatcgagaacgctggagccatctacctcggcccctacactcccgtcccagcagccgactacttcctcggcgttaaccacgtcctcccaacaggaggagcggccaggttcagcggggttctgacggtgatggacttcatgaagcccataaccctcgcgagggtgagcagggaggagtttttggcctacagaaggctcgggatgaggctggctgagatagagggaatggaagcccacaggaggagcctggaggtgaggagatgaagagcagcccttgcctcgcaagcgctggcggaaatggttgggactatctgattgaagaatctatccggagggccctgccatgaggaggactacgaaggagaccgatatagaggttgagcttgacgtcgagggaaccgtagagacgggcgatccagtcctgaatcacctcctgatggccctcttccactacatgggaaggaatgcccgggttaaagcgaactacgacctcaggcaccacctctgggaggacgtggggataaccctggggctggagctgagggagaagctcccagggaagttcgcccgcttcgggagcgctgtaatgccgatggacgacgcgctcattctggttgcccttgacatctctgggaggccctacctgaaccttgagctcttcccgctggaggaagaggagggattcagcgtaacactcgtcagggagttcctctgggggctggcgcgctcgctcagggcaacgatacacgtcaaacagcttgggggagtaaacgcgcaccacataatagaggccgccttcaaagggctaggaatagccctcgcccaggctatagcggagagcgaaaggctggagagcaccaagggggtcctggaatgatagccgtagttgacctcgggatagggaacctcgccaacgtgaggaaggccctcggaggggtgatcacgagcgacccctacgcgatagagggggccgagaagatagtcctcccgggggtcgggaacttcggggcggtgatggaaaagctggaaccgctcaggggagttataatcgatgcgataaacgacggaaagcccctgctgggtatctgcctcggcctccagcttctcttcgaggggagcgaggagagccccggaaagcctggtctgggggtcttcaggggaaatgtcgtgcgcttccagggcgttagggtgccccacatcggctggaaccaggtgtggcagaggaaggagtgcccgctcttcgagggcataaaggacggtgcctacttctacttcgtccactcctactatgctctccccgaggaggacgtaacggtgggagtgacggactacgagtcgaagggggccaaggtggtcttcacctcggccgtctgcagggacaacgtttacgccgtccagttccaccccgagaagagcgggaggaacgggctgaggcttttggagaacttcaggaggctgtgagatggaggtttatcctgctatagacctgatgaaaggaagggccgtgaggctctacagggggaggagggagagcgttaaggtctatggagatccagtgaagatcgcccagggcttttcggagctcgtggacaagatccacgtcgttgacctcgacggggcgttcgaggggcggcctaggaacctcgaagtggtggagaggataatcgaggagaccggcctgagggttcaggtcgggggaggcttcagaacctacgaagccgtggggagggcttacgaggtcggcgtggagaacgtcatactcggcacgaaggccctcgatacggctttcctcgaaaggctcaccgatgagttcggcgggataaccgtaagtctggacgtcaaagacggaaggatagcggtgaagggctgggtcgaggagggctcgataaaagtgagagatgccttcgagatcctcaggaactacgtgaaccgctttgtgtacacttccatcgaaagggacggtactctgactggagttgacgagatagggcgcttctggggggacgaggagttcatatacgctggtggagtttccagcgctgaggacatcgttaggcttgccgagaggggcttttctggggttattgtggggaaggccctttatgagggagttgttaagctggaagacctcctggaggtggccaaatgcttgcgaagaggataatagcggccctggacataagggcgggaagggtggtcaaggggataaagttcaggaacatccgggatgcgggcgatcccgttgagctggcaaggaggtacgagagcgaggggatagacgagatagtcttccttgacataacggcatcgcacgagaagagggggatcctcttagacctcgttgagagggtcgccgaggagatatacgtccccttcaccgttggcggcggaatcaagagcgccgaggaagcgggggagataatcaagcgaggagctgataaggtctttgtgaacactgcagcggtcgagaggcccgagctggtgggggagatagccgagctcgtagggagcgcgaacctcgtggttgccatagacgccaagtggaacggctccttctgggaggtctacacccacggagggaggaaaccgcggggaatcgacgcggttgagtgggccaggaaggtggaggagctgggggccggagagatactcctgacgagcatggacaccgacgggacgaaggagggcttcgacatcccgctgacgcgggcggtggcgaatgccgttgatatacccgtcatagcctccgggggagccggaaggccggagcacttctacgaggccttcaaggctggagcggaggcggcattagccgcttcgatattccactacggagaatacacggtcggtcagcttaaggggttcctggccgagagggggattccagttagactggactactgaggtgggagcatgagcatcgaggagctggtagagaaggttgactgggaaaagaacggaggggtcgttcccgttgttgtccaggacacggagggggaggtactaaccctcgcctacatggacagagaagcgctgaggagaacgctcgagacgggctacgcccactactactcccgctcccagggaagggtgaggatgaagggggaggtgagcggaaacctccaggtcgtcagggagataagggtagactgcgacagcgacgcccttctcctgaaggtcgagcccaaaggcccggcctgccacacggggaactactcctgcttttaccgaaagctcggggagcccgagagggttctcccgatggattactcgctcacaatcctcagggagctcgaggagctgataaggaagaggaaggaaagccccgtcgagggttcttacacgtcgaggctcttcagggagggcagggagaggatatacaagaagttcggggaggaggcagttgaggttctcgtggcggaaaacagggaggccttgatctacgaaactgcagacatgctgtaccacctcctcgttctcctggcctacaacgatgtttccctcggggaggtcatggccgagctcaggaggcggcggaaatgataaggaatgaggtaaaggccttcaagccctaccgcgtcatagaggggaactacaggatatggctggacaagaacgagagcccctacgaccttcccgaggagctaaaggaggagatatttgaagagctgaagagcgttcccttcaaccgctacccccacataacctccatgccggcgagggaagcgataggagagttctacgggctcccggctgaaaacgtggccgttgggaagggaggcgacgagcttatcggctatctcgtccgcctcttcgagggggactacatcgtaaccactccccccaccttcgggatgtactccttctacgccaggctgaacgggattcctgtgattgaggtgcctctgagagaggacttcacgatagatggagataccatagcagagaaggcgaaaaaagcgtcggctgtcttcatagcatcgcccaacaacccgaccgggaacctccagccggttgaggaggtcctcaaagtcctggagacagggaaggccgttgtggttgacgaggcctacgtcgagttcgcggggaaagacctcctcggcctcctggatgagtatcccaacctcgtcctcctgagaaccttctcaaaggccttcagcttagctggagcgagggtaggctacgccctcgctagcgaggagataattgaggcactctaccggataaagtcgcccttcagcgtggacatcttcgcccaggctgtcgttaaagtcgtgctgaggcacccagggctcttcagggagaggattagggaaatagtgagggagcgcgagagggtgaggagatcgctcggagagctggcctatccgagcgacgccaacttcctcctggttaaggcggacgcgcactccttcctcctggagaggggaatagttgtgaggaagctctcggggaggctgaagggacacataagggtcacgatagggaggagggagaacgacgccttcctgaaggcgatggaggagtggaaggatgtggctggtctttgacgttgacgggacgctcatagacgtgggtgaaagctacgacatggcagtgaagcttaccgtcgagtacctcctggaggagcttggaaagccctcggaggttgaaatcgagctggtaagggagctgaggaggaagggagtctttggagacgactttaagctcagcgaggccctggtgagggcggttttctccggcctgaatgactgggaacaaattccagagggagttggggttgagtacttcaggagaaacttcccgcttggaattgacccgggtcacgttgagagggtcttcaacaccttctacctgggagagctctacgaggacaggctctttgacttcgagggcctctggaggcttgaaaagccgctcgtagatgtcgagctcctccgggaggcgggggagaggttcaagctgggcgttgtgacggggaggaacagactggagatggagcttgcagagaggatcatcggcttcaggtttccgaaggttgtgacgagggaaagcggtttgaagcccgaccccgagctcctccgatgcctcgtagggggtgaggagggggtttacatcggcgacacggcaggggacgagctgttcatcgagaactacaggaaaaaatacggggacttcggctttctgatggtcggaagggacgtggaaaatgcgaacgaagcgataaaaatgtttttggaggaggttaaacgagggccttaacgccctctcggtctttttagctactcccttggacacctcagcatgtccaaagccttatatcccaactcccccttttgacaccggtgagttcaaatgggtgatggtttttggattaagcagggctattagaaaagccgaaaagaacgccataatagccgagctgaaggtctattctccgaagtacggggatcttctgaagggcaggaacccctttgagatccttagggcctacgaaagggcaggagcggttggaatctcttacataaccgacccgaagtacttcaggggaagctttgagttcctcaggaaactctgcagggaaacggaactgccagttttgcggaaggacttcatagccagcaaggaggaagtcgaaaggactgctgaagcaggagcttcggcggttctcctgataacgcggcttctgaaagaggaactgcccgagttcgtggacttcgcgaaggagcacggcttggacaccctcgtggaggtgcacagcgaggaggagctggcgatagcactccagacggactcaacgatgatagggataaacaaccgcgacatagggaagcttgagctcgacgatggcaacgtgagcctaacggaaaagctggcgccgctcataccgaaaagatacgtgaaggtcagcgagagcggcatagcgggcacggaagacctgaagagggctttaagacatgcggatgccgctctgataggcaccgcgctcatgaagaccccggatcctgaggagtttctcaggaagctcgtggaggtggaagtatgagccttcttgcgaagatcgtcgatggaaagaacctgagctttgaggaggcctacgagctcttcaacgagctgaaggggagcgatggagtgcttataggggcctacctggctgcactccagaccaagggctacaccggcgaagagctcgcgggtctggcgagggcaatgagggacagcgcagtcaagctcgacctcgggaaggtggccgatacagccgggacggggggagacggcagctcgaccataaacgtcagcacggcctcggctttgatactctcggccttcacgagggtcgctaaacacggaaacgtttccataacatcgaagagcggctcagccaacgtacttgaggcgcttggcttaaacatacgggtttccccggagagggccagggagatggtcgaaagcacgaacttcacgttcatcttcgctcccgcctatcacccggcactcagaccaataatgcccgtgagaaaggccctcgggataaagacagtcttcaacgtcatcgggccgcttgcgaatccagcggatccagcataccaggtagtcggagtcaactctccagagcttctggaacccgtggcagaggccctggagttccttggggttgagagggccctggttgtccacggttcgggcatggatgaggtgtccccacacagagagaccctcgtcctggaggttggcaatggagttgagaggtacacgctctcacctgaggacttcggaatcgagcctgtgaagcccctgccgtgctcctccccggaagagagcgccgcgaggataaaggcggttctagggggttcgggaaggcgggaggacagggacttcatcctcgtcaacgcttcggcggctctctacgcgtcaggggttgcggaggactttagggagggccttgagatggccagggaagccctgggccagggaatgcttgaaaaactggaggagatagcatgcctctcaaaaagctgaagcccgttgaccctttgaagctctacagcgcccttagagactttgggatgccattcatgctccgctctgccgagaaggactccaggaaggccagattcacctacatatcggccgagccggagttcgtcgtggaggtcggcgaggggactgagatcgacggggagcgagtttccgacgagaggaaccccctcagagctcttaaagggctcatgggggagagggtcgagggcaggaggttcatgggtggcttcgttggctacgtctcctacgattcggtacactccatcatcggggggaagatcgaagagccctcggtcttcggctactacccctggaccttcatctacgaccactctaccggcgctctttccttcttttacctcagagaggctcctttcgaccccgaggccttagttgaaagggccaggagggaagagtcacggcttgaagacggcggttcggaggtcatatccaccgacgcgggcatggaagagttcgttgaaatcgtcagggctgggaaggagtacatctactcgggggacgtcttccaggtggttctgtcgcgcgagtacagggttagaacggatctcgatgccctcgaaatctacaagcggctcgtggagctcaacccctccccgtacaccttcatcctggagttcgagaagaccgtcgtaggggcctcacccgaaaccatgggttccgtcgaggggagaaccttcaagataaaccccatagcaggaacagcgccgaggggaaggacgggggaggaagaccgggagctggaaaaggccctactctccgacgagaaagagcgagctgagcacgtcatgctcgttgaccttgctagaaacgacgtcaggagggtttcaaagcccgggagcgttaggctaacccgcttcttcgacgtcctgaagtacagccacgtccagcacatagagagcgaggtggtcggtgaactcgatgaggggaaaaacgcgttcgacgccatggaggcggcttttccggcgggaacactaaccggagccccgaagataagggcgatggagatcatagacgagctggagaggagcaggagaaaggtctacgggggagcagtgggttacttctccctcaccggggacgccgacatggcgatagcgataaggatggccgagatcgagggcaggaaagcgagcgttagggccggggcaggaatagtggcggattcagttccagagaaggagttcttcgagaccgagaacaaaatgagagcagttctgaaggcgctgggggtgagggaatgatagtcctcgtcaacaacagggactccttcgtctggaatttagccgagtacgcctccctcttcgacagagtgaaggtcgttccgaacactataaccgttggggagctcagaaggctcgaccccgatggagtgataatctcccccggcccggggcacccgctcgagaggagggaagtgggaaactcgccggagatagtcctcgaggcgggggtacctatcctcggggtctgcctcggccaccagataatagcgacggcattcggcgggaaggtggggagggtaaagcccaggcacgggaaggccagccccgtgaagcacgacgggaagggcgttttgaggggaatcaagaacccgctgaccgctggaaggtaccactccctcgccgttctggaggttccaagggagtttgatgtgagcgccgtttccctcgacgataacgtggtcatggggataaggcacaggaagctcccgatagagggccttcagttccaccctgaaagcgttctgaccgaatgggagaggaaagaaggcttgaggatcatcaaaaacttcgtggagatgagcagaaatggttgagttcgttaagatatgcggcgtaaaaacaatggatgagctcaggcttgtcgagaggtacgccgatgcaacgggagtggtggtgaactcaaggtcgaagaggaaggtgccgctgaagacggccgcggagctgattgagatggcagagatcccaatctacctcgtttccaccatgaagaccttcccagagtgggccaacgcggtagagaagaccggggccgagtacatacaggtgcactcggacatgcaccccaaggccgtcaacaggctgaaggatgagtacggggtgagcgttatgaaggccttcatggtcccaagggagagcgacgaccccgcggaagatgcggaaaggctcctcgagctcatagggcagtacgaggttgacaagatactcctcgacacaggggtggggagcgggaggaggcacgactacagggtgagcgcgataatagccaaggagtacccgatagtcctggccggaggtttgaccccggagaacgttggggaagcgataaggtgggttaaaccagctggagtcgacgtttcgagcggcgttgagaggaacggcgtcaaggacagggttttgatagaggccttcatggcggtggtgaggaatggatgatatgttcttcggaaggtttgggggccagttcgtccccgagacgcttatagaacctttgaagaagcttgaaagggcttacaaaaagttcaaggacgaccctgagttcaacgaaaccctcgagtactacctgcggaactgggcgggaaggccgacgcccctctactacgcggagaggcttagcaaaaagctgggaggggcgaagatatacctcaagagggaggacctcctccacggcggggcccacaagacgaacaacggcatagggcaggccctcctcgccaagttcatgggcaaggagaggctcatagccgagaccggggcgggccagcacggcgtcgccacggccatggcgggggcgctcctcgggatgaaggtagacgtttacatgggcgccgaagacgtcgagaggcagaagatgaacgtcttccgcatggggctgctcggcgcgagggttattcccgtcgaaagcggctcaagaaccctgaaggatgccataaacgaggccctccgcgactgggttgccaccttcgagtactcccactacctaataggctcggttgtcgggccctacccatacccggtcatcgtgagggacttccagtcggtaataggcagggaggccagggagcagatactcgaagccgaggggacgctaccggatgcggtagtggcatgtgtcgggggcgggagcaacgcaatgggcatcttctaccccttcgtgaacgatagggtcaggctcataggcgtcgaagccgggggaaagggcctcgaaacgggcctccacgcggcctcgctgaacgccggcgagctcggcgttttccacggcatgctcagctacttcctccagaacgaggagggccagataactcctacccacagcgtttcggcggggctcgactacccgggagttggtcccgagcacgcctacctcaaggatagcggaagggccgagtacgtcacggtgaccgacgaggaggctctgagagccttccacgagctttccaggacggagggaatacttccagcgctcgaatcggcccacgcggtagcctacgcgatgaaaatagccccagagatggataaagacgagataatcatagtcaacctctctgggaggggcgacaaggacctggatatagtcaggagggtcgggaatgtttgagaagggctcgctgattccctatctcacggccggcgacccgagtgtcgaaaagacccttgagtttttactagcggtcgaagagttcgccggtctaatagagctcggaatccccttcagcgacccgatggcggacgggaagacgatccaggagtcccactaccgcgccctgaggaacggcttcaaactcgatgataccttcaggatcctccgcgagttcaggaggcactcctctaccccagtaattctgatgacctactacaacccggttttcaggacgggcgttaagaagttcctcggagaggctaaggccagcggggccgacgggatcctcgtggttgaccttcctgtgagccatgcaggggaattcctcgatgcggccaaggaagaggggctaaagacagtatttcttgcagccccaaacactcccgatgaaaggcttagggagatagataaagcctctaccggcttcgtctaccttatctccctgtacgggaccactggagcccgcgacagacttcccgagacggctttcgagttcgtgaggcgcgccagaaagatatgcaacaacaagctggcagtcggcttcggtgtttcgaggagggagcaggtggaggagcttttgaaggctggagccgacggggttgtcgttggaagcgcgcttatagagctaatatcccgcagtgagaaccccgtggaggagctgaggagaaaggtggcggagctctcgggctactccagagctctgtagaacctttcgtaggcctcttctatttcttcccattccagtttttccctgagtctctccgggtccggcgggtttttcctcatgaagtctaggaactcctctatctgctccctggacatgctgaggacttcccttatgaaatcgggagaatcgtggagcaccgcctttccgtaggtctccaggaaggcccaggaggttccgccaaactcctccagtccgagctccctggagagcgagaggtagcttaatccgatgaagtaggggacgcctatgacgaagcccatgagcctgtcgtgggtcttccagtcgaggaaggacacgttccccccgatggagcgtataaagtcggcgacttcctccgcatccttctcccttcctggaatggggaccgttatgaacctcttcccctcgatggtcttcgccccgggcccgaacatcgggtgaacgctcgcaactcttgtttcctcgccaaagcccgcgtaggcttcaacaacgcgggacttgaaagtggctatgtcgaagacgatctttttcccgccgtgctccctcgatatttccgcgagcctctccagccttttcgggacagtgtcgagggatgaggctaccattatcacgtccgacttcaggtagagttcctccagcgatccaacgtcgctccgcccgtgttcggagtagaagatcacctcgaaccttccgccgagacacctctcgaagagccttcccatccttccgtagcccgcgattccaatgcgcattccaactcctccctaatgacccttaatcccctctcaagccccttccctgagagggatatccttatgaagttggggtagtcgccaaaggccattcctggaaaaacggcaactccccttgagagcagcctctcggcgaaggccatcccgtcctggggcgttctgaggaagatgtagaaagctccctccggctcaacgaagtcgaaacccctgagcatctttgaggccatcctgaccctctcaaggtatgccctcctgacttctttgatgagttcatccctgagttcgagtgcctttactccagccctctgaacgaagggagggacacatgttaccgtgctctctatgaacctctgtatcctcctgatctcgttccgctctcctattgcgtagccgagcctgaagccggtcatggagtagagctttgaaaagcccttaactgtaacgacgttttcgtagagctctctcgctggcgtaaagcgggtgaagctgagctcagcgtaaacctcgtccgagagcaccttaacaccgttctcctcggcgacatcgagcagtcccctgatctccttaccagacagaaccctccccgtcgggttgttggggtagttgattatgatgaggtcagcttttatctcctcaaccctcggaatccacctctcatccagggtcgtttttataacctctacctccctccagaactggcgggctatcagcgaataggcgttccagcggggagaaacgacggccacttttttagcagacgctatctccgccgctatgaggatcttcgcacctggggcgacgatgacttcatcggccgaaaccccctcgaactcggctatcctctccctcagctcccttattccgccggtactcgtgtaaccggtttctcccctcctgagcgactctacagcctcctcgattatctccctcctgaccggtatgtccggctgaccggcgtcgagcctcgactcaggcctaacctcatttatcctgttgaaaaactcgtaaacgttgaacatccctgctcacctcaaggatggcttcgaaaaccctcctaaattcgcctgccctggatagaacttctctctccctgtccgggtcgtaaactggcatttcgagctttagcttggcttcccctatggcctttgctacttccatcctcctctggagaagctggagaatttcccggtcaatctcgtctatccttctcctcagaatggcaagttctacaagatcaggactcgatattggcgggacatcaccgtcaccgttttgagcttgaagttcgaagatttaaccttttggacaggttcacctaaccatcccctcccaggccctcctcctcaggaggtggtcggctattacgaaggcaacagagctttccacaactgggagggcctttgggactatgcaggaatcgaagcgtcccctaagcttgagcgtgacttcctccatcctccccaggtcaaccgttctctgggggaggtagatggatggtgtcggcttgaaggcagccctcaccacgagcggcattccagtcgtcatgccccccagaacaccgccgtggttgttggtctcggtcacaacctttccgtccttcaggacgaaggggtcattggcctggctccccctgagctccgctaacccgaagcccaggccgaactcaacgcctttgacggccgggatcctgaagagggccgaggctatatccgcctcgatgtcctcctcccaaggcccgcctaggcccggaggaacgttgaaggcgacggcctcaacaattcctccaacactatcgccggcctttctggccctttccatctcctcaaccatggcctcgaaggccccctcgtcggggcagtaggggttttcagagctcaacagctcctcgggagaaacatgagcctccacgcgccctatccgcttgaggtaagctctcaccttgattccttccctttccaggagcttcttggcgaagtagcccgctataacgaccccaaccgtcagcctccccgagaagtggcccccgcccctgtagtcgttgtatccgaagtactttatccccgctggatagtccgcatgccccggtctcggcgtgttccttatctcctcgtagtacgaggaatccacgtccctgttctccacgatgacggcgacaggtgtcccagttgtcctccccctgaagactcctgaaaggatcttcggctcgtcagtttctttcctcttggttgcaaacctctctatgcccttcctcctctcaagctcccgcttgagctcctcaacgctgacctctattccaggggggagcccctctacaaggactccaacagcttttccgtggctctcgccaaacagggaaaagctcagcagtttccccctcattccaggagcctcctcaggtcgtcgaaaaaccccgggtgcgacttggagacgctctccgtgtcctcgatgatagatggcccagtagcgccgagagccgctatgctcatcgccatggctatcctgtggtcgttgaaggtctctaccttagctcccctcggccgtccgccctctatctcaagcccgtcctcaagctccctcaccttaacccccatcctcgacaggttgaccgccatcgccctcaccctgtcgctctccttgaaccttagctgtctcgcccttatcacgctcctgccctctgcgtaggccgcaacaacggccagtatggggaacgaatctggaaaatcggagcagtcgagtgcaacagctttaagctcgcccccctcgaccttcacgtaatccctccccctcttcaccctcgccccgaactcctcaagcgcatccaggaaggccatatccgcctgcacatcttccctcaggaggttgttcaccctaactttaccgtacagggccccagctgccaggaagaaggaggcagttgagtaatctcccggaaccttataccttgtccccttaactccaggatatacctcgaaggagaagccctccctctcaaattccactccaaaggcctccatcgtcctgagcgtcatctcgatgtagggctttgaaacggggttcctggcctcgaccttcagcccgacctccgcccccaggaggagcaggccgctgacgaactgggaggacttggatgcgtcgaccgagaccctcccggactttacggggcccttcacggtaagcgggaggctaaaaccatcaacctccgccccaaggcccttcagggctttcacgagcccgtccatcggtctctccctcagccttctcgccccatctatgagggttttccccccaatacccccagcgagagcagtcgaaaacctcgccgttgtcccggattccctggcgtagacaaagccgggggagggctcttctgggggcacaacggtttttccatcaacaccagcaccgaaggatctgatggcttctatagttgcaagggtgtcgtcgcagaccagggggttctctatggtgctctccccctcagccagcagggcaaggaagtaggccctgtgagtgtagctcttcgagggaggggcgttgagttctcccctgacttcatcaacgggcctgattatcaacgcgatcacctcagctctgttgtcaggactttcccaaactgctcccactcctcggcaagctcctctggctcattcgtgacggcaaaaaccgccggtcccttcccgctcagcccaaccacggcccccctctctagggcaatcctgaagggctcgatggggtggccgagatacgtcgagtaaaccagaccgtttatgagggccgctttcctccactcaccctcaagggccagcctcacggcctcctccacgtaaggtctgattggggagaagtcccttccgcctagactctctgttaggagggtttttccagggagtaagagcacaacgggaaggggctcgactttggaactgtggagaaccctcatcccgaggttgtcggtgacccagagcgaaccgaagtaggaggcgcaggcgtcgtcaaaggcccctgttagggtaacgccagccctcttagcggcctcgaccccggctttaaccacttccatttcgctcatatcaagcccgagggcatcggccagggcctttgagagggcgttagccgctgcggagctgctcttgaggcccatcgcaattggtatctccgactctatcctgaacttgataccgaactcctcgcctgttttctccctgaaaacatcagcgaccgctttaacgagtctgaaatccctaacctgctcccctctaaccctgatctctccctctattccatcaccctttagcttgacctccgccctcgtccagaggtctatcccgatagctgaacctactcccgttgcgaaggcgttgacaacggtaacggcgctactcgctgatgccctcaagcgcagcccccctcataagcccttcatctggcttaaatcccgtccaaagcctgaagctctcgatgccctgatagacgagcatccagagaccgtcaactgttttacagcccctcagctcggcctcggtgaggaggcgcgtcttcaggggcttgtaaactatgtccatgacgacgaggtctctcctcagcagctcggcgggaacaggagtttcccaggagttcattccgacggaggtggcgtttatcaaaacctcggcccattccaggtactccccaaggttctctctgttcagagcgtcccccgttattccaaagcgctccagggccttcgccttttcgggggttctgttgaggacgaccacctcgttgtccctggaaagttcgtaggctattgccttccccgcaccgcccgctccgatgatgagtatcctccttccccccagctcgatgccctttcgagggccctcctcgcgcccaagccgtcggttgtgtggccttccagcctccctttcctgttaacgaccgtgttaacgctcccgatttctcccgaatcctcggagagtgagtcgaggaaatgaatcaccgcctccttgtggggcattgtgacgttcaatccggatattccgagggctttggcgcccccaatagcctccccaagctcctccggggggacttcgaaggccaggtataccgcgttgattccgagggctctgaaagctgcgttgtgcattaccgggctgagcgagtgtctcgccggaaagccgatcaccccgtagagcctcgtttccgcgtcagccaaagagcatcaccctcagtctgtccagttcctccgcccggagctgtcctggggccacctccccctcaaggggggcgtacgtgaacggcgccagctgggccgaaaagaccctggagattctcccgaggggccccatgcagaaggcgatgaggttctcagcatgctcgtaaagcctcagaaccctcaggttgtcgaggggggagtttgctgtggtgactatctttattatctcaggctccagctcctccatgtcctcgaggagcgtcaggagcttcccaaaatccggggttccattgaagtcgtggtaggagagaataacaccaacccccttctctttcgcaagctccataacttcctgggctatatccgaggcgaattccacgtcaacgtaggccggtttgagctccataacccttctgtagaggctcagtcttgtcccgtcatcgaggggcctgattcccccttcttccctcctcctcggcgtgaagatgagctttttagaatattcccccagcacttccagtccctcaaagctctcaaaggagtcgagcctgacctcgtagaggttaaacttcgaggtttttatcttctcaagcgcttcccccgggtttctggcagtcaccactcccgctatcatccctcgttgcctccagggcccttttcaaaacagcctcatcgacttcctcaacgacgacatcgcctatttcaaccgggatgacgaaggttatcctcccgtaccaggccttcttgtcgagcctcatctcctccagtatctcctccgccctaaaggggtgccccgtggggagcccgagcttcttcaggagctcttcggtctttccagaatcgaagccgtagagctcttccccgaccttcgaggccaccatgagtcccatcgaaaccgcaagcccgtgctttattctgtaattcgacagcttctcgatcgcgtgtccggctgtatgcccgaggttgagtatcctcctcagcccgctctcccccaggtccttctcaactacctccaccttgaagagggcgcattccctgatgagggtctcgcttatcccttcaaagttcctggcgagggcgtagaccttcctgtcgagcagagcatactttgcaacttccccaaggccgttccttatctcctcctctgggagcgtggagagggtttcatgggctatcaggacgaagtttggaaggtaaaacgtccctatcatgttcttcccgttgaagttcacccctgtcttgccccctatggccgcgtccacctgggccaaaagcgtcgttgggacgaggccgaggagggttcccctcatgtaggtcgaggccacgaagcccgctatgtctgtcacgactcccccaccgaggcctataaggagggacttcctcgtgaagccctcctcctggagcctcttccagatggctacggcagtctcaaggctcttgtacttctcgccgtctgggatgactatccttatcggctcctctatcccttcggcggccttttcaagccagagcctctccaccgtcgtgttcgtcagaaaggcgactctgtgggggttgagctcctccgcgagggagggaaggatggagagggggccgaagctcaggccctccatccgagcccccccagctccatgaggaagacctcggtgtaccagtcgttctcctcgaccctctccgagagcacgtacctcggaacgccctctgcggcctctctcgatgttgtccctttccatccgagcccttcaagctcccccaaaagcctctcgaagtcctcgaaggtcagctgctgggcagagtccgagagggccttatccggctcggggtgaacctcgaccattatcccgtcggccccgactgcataagccgcttttgccaggggtatcacgagctccctcctgcccgctggatgcgaggggtcaactattatcggcaggtgtgagagctccttgacgactgggacggccgagatgtccagggtgaaccttgtggaggtttcgaaggttcttatgcccctctcgcagaggataacgttctcgttgcccccgcttagtatgtactcggccgagtagaggagctcctggacggtgtttgccatgcccctcttcagaaccacggggttgtcgacctttcccactgccttaagcagctcgaagttctgggagttcctggcgccgatctggagcatgtcggagtacttcgcaaccagctccacctgcgaaacgtccataacttccgtaacggttacgaggccgtattcatcggctgctctcctcatccacttcagggcctcttccccgtgcccctggaaggagtatggactcgtcctcggcttgaaagcccctccgcggagcactttaacgcccatctcggccaggaactctgcaaccttcattatttgctcctggctctccaccgcgcagggacctgctattaccgtgaatccgtcgccgattttaacccctccgaccttaacgacagttttcggcttggagcccttctcgaatttgaacctcatgtcagcatcacctcaaccttcttcacgacgctttccgcagtcagaccatagcgctccaggagtgagaagtagtccctgctcgacctgccgaactccgtcgtcccgatcctgatgagcctcttcggcatcttttccgagagaacctccgctaccgctcccccgaggccgccgtgaatgctgtgctcctcaagggtaacgaccaggtctaccttagcggccaatctcagcagcgtttcctcgtcgaggggctttatcgtgtgcatgtcaacgactccagcgcttattcccctctcctcaagcttcctcgccgtttcgagggccaccgacaccataacgccagcggccacaaggagaacgtcgcttccctttctgaggacacttgcctttcccagcttcagctttggactatcatagacccttggagcgtggtccctgccgaggcgcatgtagacgggcccctcgagctcgatgacctgtttgaggaggacgggaactgagggggcgtccgccggaacaactaccgtcatgttcgggaggacgcgcatgagggctatgtcctcaaggcactggtgtgatgagccgtccatgtggtctgaaaagccagagtgcgttggaatgagcttgacgttgaggttgtccctggctatcgtgttccttatctgctcccaggcccgcatcaggaaagccgcaaaggccgaaacaactgggattttgccccctatggccagacccccagccatcgagaccatgtcctgctcgcttatacccacctggatgaacctctcgggaaaggccctctcgaagtaggccgttttcgtcgagctcttgacgtccgcatctaggacaacgatgttcgggttctcctcccctagctcaaccaaagccctcccaaaggcttccctgaagctttctatcacacttcccacctcgctatgatgaccttcggccttcccccgagttttttggccgtttcgagggccttcttgagctcctccttcctgttgggaacccccataacctcccagccgaaggccctccacttgtccgccagcggttccttgctcagtatctcctctgttcctcccgtgagctggaagtagttcctgtcgactatcgctatcactctatcgagcctgtggtgcgatgctgtcatagcagcttcccagacctggccctcgtccagctcgccgtcgccgagaatgacgtaaacgtatccctcttccccgtccatacgcttggccatcgctataccgttggccaccgagagtccctggccgagggaaccgctggagacctctatgaagggcagccccctgattacgtggctcgggaggccgtctatgtccgcgaagctgtagagctcctcgtcgctgagaagacccatttcgtggagcatcacgtagaaagctggagccgagtggcctttgctgagtattacgacgtctttctctcccttctcctcgagcactgctgagagaatttcgaggcaggtctccgaggactcgaggtggaagttgttgacgggctggagcatgctctggagctttgtcctcggatcgagggcctcactcatggccgtccacctccagaaggctgagaatcattctcccgtgctcggtaagcctaacgggcctggggttttccttagtgccgtagtctatgagcccgagttccttcagaattctggcgttcagcttcagcgtcgagagggcttttctttcctttctgctgagctcctcaaggagagaattcagggagcggtgtctgccgcttatgctcctcagtatcagtctctggttctcgttcaaagccctcagaacgagcttcctgattacctcttccccgccgggggttactaatattggcggggcatcacccattggcgggacatcacctggtttgaagacttcataaattggcgggacatcaccgatcaccggagacggatgaatcagcaaccctatttaaactattcgccaggtttgcctgtccaattcccaaaaaaggacgtccatctcatcaatctgttaaaaatcagtgtgaaaactggcgtatttttgtcgatttgacaaacaggcgtccaaaaatgttatcatacggttcaaaaatcgacacgcggtggttaaatgcggatagcggtgattggagctgggatgatcggtggggctgtcgcgagggccctcgccgagaagggccacgaagttatcgccacgaggaggaacgttgagaaggcaaaatggcttggggaatacggggttaaggtcatcaggaacaacctggaggcagcggattgggccgaggttgtttttctggcggtgaagcccaacaaggtagcgaaggtgctaggagagataagagaggcacttaacggcaagatactcgtatctttggccgctgaagttccaataaaggccctaaaggggcttgccccggggtaaaggtagttagggcgatgcccaacatagccatactcgtgggggaggcctttacaggctacgccacgatcgatcttgagcccgatgagagggagaaggtcgaatcccttctcagggccttcggcgagtgtcttctcgtcgatgaggagcacatggacgcgataaccgggctcagcggctccgggccggcctacgtttcggtgttcgttgagtcgatgatctacggcggtttgagagtcggtcttctgagggaggtggcaaaaatagccgccctccagaccctcctcggcactgcaaagctcctgctgaactacgagggccatccagctgagataagggacatggtgacgaccccgggagggactacgatagacggcatcttcgagcttgaggagggaaagataagaacggcgataatgaaggccatagatgctgcaactaagaagtccaggatcctctcaacgagaactttaccctgagagggcctttcccgcttccctctccccgctttcttcagcggccctttccttggctcctttgagttcctcgatgacgtccaccagaacgtctattgccaggaggtattcgctgaggctgatgcgctcgtggggtgtgtggtccagcctggaatcgcccggaccgtaggcgacggcatcaacgccgaacctcgggcccaggatgttcatgtcggctgttccggtcttcttcttcagtctcggcctcatgccgttcctccttatgcccctgacgaaggccctgacgagtggactcctcctgtcgacctggtaggcgggaacgaagtcgaggatctcccaacccttgggcggattgtagcctgggggagtgcggaggtttatcaccatctcgccgtagaagtcgaagtccctctcgtaggcgtggagctccactatcctgccgctcaaggcgtcgaagccctctccaaaggaggactttatctcgagccatctgtttatcagcctctcagcggcgtcaacccctaaactcccgtgaactttctcgacgctctcaacgaattttgcagtcaaactgcccttgtatcctatcgtgacgccgtcgacgccgctcggctcgccgatgatgatgtagtcaggtctgggaacgtcgaggttcttggcgcccttgggaaaagccctcctcgtctaccaaaccggcgaagattatgtttgcgttgctctccagcgtggcgaagaagaaagtcgcaagcgggcccttggcatcgacgctccccctgccccagaggaccccgtcctctatcctgaccgggattatccccgggacggtatcgacgtggccggcgagtagtatcctcggacccttcccttcccttatcgctatcgcgtttcccacctcatcgacgtaagcatcaaccccaaagctctcaaaggactcgacgatgaactttactgcctcactctcccttccggtgggggagtaaatctccacgagcttcctcaggaattcaaccttctcctcagaggatatcattcagaacaccctctatctctttccttgcttcctccagcgtgtccccctcgattatcagcggcgggaggagtcttatcaccctgtttcctgccgtgttgacgaggattcccctctcctggagggccttaacgtagttccccgcgggccttctgaggactatcccgatcatgagcccccttcccctggtcttgaccaccctttcgcccgagaactccatgaacttttcaccggccttctcaacgagcctgtctctccttagtatcctcagcgttgtcgccacggccctgcaggcgagcgggttgcctccaaaggtggagccgtgctttcccctcggtatctccaggtcggttagagtaaggctcacggggaagccgttgcctattccctttcccatcgtcactatgtccggcctcaccccgtagtgctctattgcaaggaacttccccgttctgaggccgctctggacttcatccgctatcaaaagggcccccacatcctccgtgaggtccctgagggttttaacgaactcctcatctgccggaacgatgccgccctctccctggatgggctcgaagataacagcggcagtttcctttgttatggcctccttagcagcttcgacgttgttgaagggtatatgcttgaatccggggacgaggggtccaaagccctcgcggtacttcttcttccaggtggcgctgagggaaccgagtgttcttccgtggaaggcgttggtcatggccactatctccgaacgcccagttgcgaggcgggcgaactttatggcggcttcaacggcttcggttcccgagttgcccatgtagacgtactcgtagtctacccagtgggagagctcctcgagcatctcctccctctcgtcgtgctcgaacattggaccagcaacgactatcttctccagctggcggctcatatcgagtacccactccgggtgggcatggccaaggacgttcacgcctattccggctatgagatccaggtagcgtcttcccttctcgtcccagacgtagacaccttcgccccttacgagcctgagcctcttcctgtagagcggcatctccctcaagttatcaccgtccttccgttgaggccctggatgaccaccctttcaacgccgctctcaactgcctttgcggccatcatgagcttcttcctcatcccccctttagcgtatccgaggagctctgggagctcgttcaggttcaccctttctacgacgctcccatccgccataaaggccgaatctgagacgaagacgagctccctcgccttggtggccagggccatgtggtaggccactttatccccgtcgacgttcagtgggacgttctcaacgggatcgtaggccaccgaggctataactggcagcccgagcttcctgagctccatcaaagccccaacgtttatcctctccacggttcccgagtagtcgtctcttattgcaaccgtttttccgttgattactgcctttacgagcttcttcctcctcccaatcaccagctcgtgctcaattcccataacgcccaccgcgtttattcccctgacctgaaggaactccacgagctccctgttcgccctcatcatagctgccagataaacgtcgaggacttccttagttgtcctcctgaaggtcactccggaggggctggtgagccttttgatcttcaccccgagcttccttgagagctcgtcgacgtgcctcgagccaccgtgcacaacgaccgtgtcagggctcctcagcgagcttgagaggccgtcgcttgcccagacctcctcaaacctcaccagtgcggccccacctatcttaacgatcctcatggtaccacctcacacggggtagaccgggtagtagttcagaccggtcctctcgtcgagtccgaacatgaggttcatgttctgaaccgcctgcccggaaccacctttgatgaggttgtctatggccgagaggactatcgccctggagttctcctcgtcgtgggcaaagcctatgtccgcgaagttgctccctatcacgtacttcggatccggaaagcgctggaggccgcctttgtcggtaacgagcctcacgaagggttcatccttgtacaccaaaagcttcctcaagagctccctcgtgctcccctcgaagcggaagtagatggtggcaagaagtcccctgatgatgtcaacggagtggacggtgaaggccgccttaaccccggtctcctggatcacctcgccctcgtgcctgtggtggtagggcttgtataccctgacgacgtggctcctctccggatgtatgctcgccacgttctccctccttccccccgcagacgagctaaccttgagatcgactatcgcctcatccgtgagctccctgaaggggtagagcgcgaggatcgtggcggtcgcgttgcagcctgggtttgcgaccagctcggccttccttatctccttcctgtggagctcggggagaccgtagacgaactcttctatgagctccggcctcttgtgctcgccgtagtactccctgtatagatcttccctcagcctgaagtccgcgctcatgtctatgatcttcgcgctcccgaggtagtcgtctattatctccatcgaggtcccgtgggggaccgctaagaagataacgtcggcatcgaactccttggtgttggtgaagcgtaagtcgagtcccctgaggttgggatgaaccttgtgtaccttctggccggcgaagcgcctcgatgttatagccgtgatctcgacctcggggtgcatggccaaaagcctgactagttccccaccaatgtagccgctggcaccgacaaccgcggcctttatcatgtcttagccacctccacagcgtattccaccagctttccggccatgtcagcgccggtgaccctggcggcgttcttgaactccatgttggggttgacctcgttcacaaggagacctttttcgctctcgaagatgtctatagccaaagctccctcgccgaaggcctcccaggccttaaccgagagctcctcgacctcgggatcgctgcagggctccgctttgccgcccctcgctgtgttcgttatccagtggttggaatagcgataaatcgccccgacgaactcccctcctatgacgtagctccttatgtcccttccgggcttctccacgaactcctggaagtagtggattccgtagagagggttcttcatccacttcctgtgctccaggacggcctccagcgagtccctgtcgttcaccttcgcgaggagccttccccagcttccaaaaaccggctttgaaacgagcggatagccgagggaatccggaactctcagggctcctccctcgctcaaagcggccttccactcgggaacgggaaccttcccggccagcctcagagtggcgaacagtttatcacctgcctcgaagatgagcctggaggagttaactgtcggaatcccctcgctctcgaagagcctggctgtgtagagggccttgaagtggcttacgttccttattatgacgacgtcgaggtcgtagttcccggggaagagcaggtcgtcctcgtggagcataaccacttccccaaactcgccggccctctcctttatggccatttcctcccttctgagaaccgtgtaggtgatccctatcctcatcaccaccaccaaaaaaattgaaggggttactccccccagtcctcctcgacctcggggagctcctctaatgttaggggctcgaggctcacaacctcaagctccgctccgcaaaccgggcattcgactatctggtgcagttcgacctctccgatctctatttcacttccgcatacagggcattccaccattcttccccacctccattcttcgccgcatatcgggaacttaaaggcttcgtaacaaatgaaatccgctttaaagctcaagttacggatgcaacactcaccccgccattcggcttatgtcgctctccagtctgctcagcctgatctcatcccgccagacctcatccatagacagaaggtcctctatctcgccgattattcccctgacgacgtcctcagtcctcgcccttccgcccatgtccggcgttagctctccgttcacaacgtagcccctcacagccgccctgatgagcgagccgtcaagtccgaggtagtcgaggagcatcgcaccgctcagtatggcccctatggggttggctatcccctttccagctatgtcgggggcagaaccgtggaccggctcgaagagcgctattccgtccccatagttcccgctgggaacgatacctatactgcccgcgtgaactgtggcgaggtcgctcagtatgtcgccaaagaggttctcgctgagaattactccgtgctcccaggggttcctgacgagctttatagtgaaggagtcgattatggcatccctgacttcaacgccctcctcccccgccacttccctgactatcctcctgaagaacttgtcgcctgtgaggacgttggccttgtggacgaaggttatgaagctccccctggccttggcctgctccacggcaaagcgggctattctttcggcaccttccctcgtgatgagcctgacgtctacagctctcccgttcacaaccgcgcctattccgaagtagaggccctcgctgttctccctgactatgacgatttcccttcccgttctaaggtcggggattattctcaggttggcgtagaggccgagctccttcctgagggtgagtattaaactcctgtatccaggaaggtcgaagggagtcgtggtagctccaaatagaaccgcgtcgctcctccttatctcctcaaggtcctcctccctgattgggctcccgcactcctggaaaacatccacgccgccctcgtagtactcgaaccttaccctgcccgttacggctttcaagaccctcaccgcaccatctatgacctctggccctattccatcgccggggatcacggctactctatacacaggtcacccctcctcgctatgaagctcagtattcctccctcctcgacgatcctgagcaggaagccgtcgagcggtttgaagtggaaaactccgttctcggttctcacctcaccggtccgccagttcacctcgactacctctccgtccctgagcccgctcgtgtcgccgacgagcagggggaggccgaggttcacggcgttgcggtagaatatccttccgaatgactccgctataacccccgcaactcccgccgctttgagcgagagggcagcggattccctggaggagcctatcccgaagttcctcccgcctacaacaacgtcccccggctttacctcccttgaaaactcggggcgggcctctatgaaggctatccttgccagctcctccggatccttcgtgaggttgtacctcccgggggttatcgtgtcggtcgaaacgttgtccccgaagcgccacactcttcccctcgttatcatgcccctccctccggggttgttatctctccatagagggcgctgagggcagcggttaccggactggcaagatagatctcggagttgggcgagcccatccttcccctgaagttcctgtttgtagtgctcagaataacgtcgccatcacctgcaacacccatgtgccttccgaggcacgggccgcagcccggtgggagtatgaccgccccagcatctatcagaacctttgcaatgcctgtctcgatcatcctgcggtagacgttggccgatgctggccctattatcgtcctgaccgcgacttcctccccggcgagtatctctgctgccctctcaatctgctcgaagcggccgttggtgcacgagccgatgaaaacctggtctatcttcgtcccctcgacctcttcaacgggaacgccgttcgagggatggtgtggtttcgccaccatcggcgggagggatgagaggtcaatcccgagctccaggacgtagccgtccccgctgtactcctccccgatgattccggtcttggcgttggcctcgacgctgaagttggtgagagttagtctctcgtcaaagctgaaggggacgttgaagaactcgatagctttgtagttcatctcgaagtccctcaaagcggtgatgatgtgtatcatcgcatcggccgccatgacgttttttccgggccttccctcgaagaccaccgaaacgctctcgggaacgcggaaccaggtttttccgagccccatgacgacggctgtatccgtggcccctatcccaacggcgaaaaccccaagggcccccaatgtgggcgtgtggctgtcggcgcccacaactatcctggcgttatctgccaggcccatctcgacggcaagctggtgcgatatcccctgaccttgaatcaccggaatcccctgctcccccgcgaactccaggatttccttctggaggttggctatcttgaccgttggggctggaaatacgtggtcgaagaaaacgtacgttctcggcacaacccttgtgaagttcctcctgaaggcctctattatgaggggcatcgtgccgtcgtgcgcgtaaacgaggtcaacttccctgacgacgacctcaccggttttggctccgagaagttcctcaacgagcgtcatgtcatcatcctcctcgcttcttcggccagcatctcgggtgtgaagggcctccttgaggcctttaccctcctgaggagctcttcgattatctcctcgtcgtggattccgaatctggatagatggaagcgtatcgtctccctgcctgcgaagcggtcgacgtagatggtcctctccctgccgaatgtttcagccggaaggaactcgtagaaagacggatccctgacgaccgccgaaacgtgcaggccggccttgtgtgtgaaggcgttctggccgactatggggtagttgacctggacctgaaggccggttatctcgctcacgagtctgctcagcgagtagagcttctccagcctgtactttttgaccccgtagtggtagtagagcgccgccagaagatgggacaggtcgactatccctgccctctccccaattccgttaacggtggcatccaccagcgtagccccggcctcgattcccattatcgcgtttgccagggccaatcccaggtcgttgtggcagtgcacatttacgggaatcccgaactcgacgacgcgcttgacgaggtcgtagaactcgaggggatgagcggctccggttgtgtccgctatgctcaccctgtcgaccttgagctccctggcgaggttcagagctgctgtgaggttcttccactccgtcctcgtggtgtcctccggtgtgaagcggatcttcagcccgtggtccttggcgtatagaatagcatcctcgaccctggtgagggctccgctgagatccgtcctgaacctcctttccaggcacctctgagagaggcacatgaagatacctatccattctgcttcggccttcagaacgaggtcgatatcgctcctcagggcccttgagtgcgccagaatgttcgcgttgaggccatgggaagcgagaaggcgtatcccctcaaggatctccccgcttactgccggatggccggcctctataaaatcgactccgacctcatcgagggcgattcctattctaagcctgtcctccgggctgaagtttaccccgggtgtctgctccccttccctgagcgttgaatccagcaccattattccaccgcttaatatgcatcacccactcagccgtgtgagggagggtatataaatctttcggcaattttgaagttttgtcgaacaaatttttcaaaaatcgaaaaaatagaaaaatttttctctaaaaacttgttttagtcgattaaatttcggcaaaattcagaaatgttggcattgtgcaaattgctaactttacaaatatcaaggagaaaagagaaagactcagaacccgttgaagctcactacatcttccagctttttcctctcgtactttggctttggatcggcgggataacctaccgggagtatagtctggagcttgtagtcctttgggacatttagaagctcctccaccggcttggggttcggtggtgtataagtcaccgttcccaggccgagctcctcaagcgctaaaaggaggtatccaatggctgtccacgtcgactggagccagtagggagctttagtgtgtccgaagacgagtatcagatacggtgcctcgctcaggaaaggtttttcgggagtaaaccctttctcttttagccactctcccagctcaccggagactttctcgtggaacttcttctctacctcctcacagacctcgcggattttagccttcagccagtggtcgtctatgattacgaacttccagggctgggcgttcattcccgaaggggcttccttggcagcttctatggccttgaggatgtcttcctttggcggtttatcgggtaggaactttcttacggtttttctatttttagccagctcgaggacgcgcatttgatcaccataccatcttaagtgttctgcaaaaaagctttgcggggtagtgtgagggctcttaaaacctttaaattttatgccaacaaagattatcctgatgaggataatgtttgtcaaccgcagggaagagctggcttttctggagagactccctcgctccggcaaaaaagaagtgctgataatttacgggcgcatgcgcgttggaaagacctaactgataaagcggtttattgccgggaagaaggcagtctattttttagcggacaggggagggctcgaaactaacgcgatgcgattctacagagaggctgccgagatgctcggtctccccgatgttgaggtggggggcttcagaagggcctttgagttgataaagctgaaggcgccccgaaggctggtggtcgtcatagacgagttttcatacctgctactggcagacaaaaacactcctgccgtttttcaagcgataatagatgagaaactcgatgacaggttctttctgatactgggcggctccctcctgggtctgatggagggtctgatggggtacaccaatccgctctacgggagaagaacggcccagctaaagctgaaacccctcggcttcttccacgtggcagaatacttcagggataagcccgttgagacagttgttaagatttactccgtcacaggcggcgttccaatgtacttcagactcttccgaggcgatgactttgggagggagcttttagagactgcgttttcgtcgacttccatcttgtatgaagagcctgaattcattctccgggaggagcttagggaagtacaccgctactacataatccttgaagcaatggcgagcgggaagcacaggttgagcgagatcgcccattgggctgggatagaagcaaaggacatgcccaagtacctgaggactctcatttctcttgaccttgtgaggcgggaagttccagtaactgagagcgagaggagcagaaaagcgcgctactacctcaaagaccgcttctttgagttctggttccgctttgtaaaaccaaacaggggaagggtagagattggaacttttgaaatggactgggaggctttcaacacctacgttgggaaggcctttgaagagatatcaaggcagtttttgctcgagctgaacaaaaccaacgggctcccgttcagattcaccaaaatcggccgctggtggcacaagaaagaggaggttgacctcgttgccctcaacgaaagggagaagaaggcgcttttcatcgaggtgaagtggaaggaactggggaaagggaagcgaagggaattctgaaagaccttgtgagaaagtcaacactggtgggtctggacggctgggagacggactacgggcttatcgccaggaaggtagctggaaaggaggaactaaggaaagagggatatccaacctgggatcttggagatttcaaaaacctccgctctcagacgtagaacaccatcccgtcgtacgctaccagaaccttgttcccccacctttttctcacatattcaacgagctcaaggaaaggcaggttcttatgggagatgtggctcagaacggttctctccgccagctgaaggcctatttctgctgcttcatccacgttgttgtggtaggggtcattaaagcccggcggataggtggcgtccacaactactcccctcaagggggctttcttcctcaaaacctgccaggtctcttccggaaggcctttagtatcatagagcagggcaaaactctttccgtcctcttctattaggtaaccgagggtttctacctggtggttgagcttcaaggcggtgatttttagagtgtcgatttttatcctgtccatgggcttcagagtctttggtttcaggttctttggctcgttgagaatcagcgcgtcggcctgcccctcaggcgcgtagagttcggtctccatcgccatccagcggagcttgtagaggccgtagatgtgatcgtggtgccagtgggtcaggaaaatagcctcaagggggacgttgaggaagtctcttatgtccgtcccaacgtcgaagagaactgtttttcgattttcagtgactacggcgagcgttgagggccttctctgggcgaagccgaactttcgagcttcgttgcaggaggagcaggtgcagagatgggcaggaattccctcgctaccgccggtgccgatgaagtagactagcatctcccatcacccatattttatggctataaaactttgcccctccttataaacattgcttacatctttgtgcactaaagtaccacttcaggtgaatcactacttttattaacactgagcatcagttttgttcgaggtgttgttaatgagtgaggctattgagacatgttgtacaaacagccatggcaaaatagagaaggagctcgagaggaggcgctcctccataaggcccataaacgagagggtcgctaaactcagagaagaaagcgtgaacactgaggtgagaatctcttctgagagggcgaggctgataaccgagttctacaagagcgacctggcgaagggaaaatcgatcccagttcagagggcgcttgccttcaagtacctcctcgagcactgtagcctacctgttgaagacgggcagctcatcgtcgggattaggggcactggcgttaaagaggttccaacttatcctgaaatcaccgttcacagcatagaggaccttgaaattttgaactcaagggagaacatgccatacagggttgatgaggagactaaagaactctacgagagggagataatccccttctggaaaggaagggcgatgagggatataattttcgagaacctgccccaggagtggattgatgcttacgaagccggcgtctggacggagttcatggagcagagggctccgggacacactgcgggtggcgagagaattttcaagatgggcgttctcgacatcaaagaggagatcaggaggaagatggaggaactcgacccgagcgaccctgagtattacgagaagatggaagagcttaaggcaatggacatcgttgcagatgcgattttaatctacgcccggagatacgctgaaaagctggagaaaatggcggaggaggagaccgaccccaagagaaaagaagagctgaagcagatggccgagatatgcaggtgggtgcccgctcatccccccagaaccttctgggaggccttacagcactactggttcatacacgtgggagtcacctatgagaccaacccgtgggactcattcaaccccggcaggatagaccagcacctctaccccttctacaagaaggacatagaggagggaaggcttacgagggagaaagcgaaagagctcctccagtgcttctggctcaagttcaacaaccagcctgccgttccgaaggttggggtgactgcggaggagagcttcacatacaacgacttctcaaagctcaacgttggcggactgaaggaggacggctccgatggagttaatgagctctcctatctgattcttgaagtcctcggcgagatgaggactttgcagccaaacactgccgtgctggtgagcgagaagaaccctgactgcctcctcattgaagccctgaaggtggttgggccgggattcggcgagccgccgttcttcaacttcgacggcgtcatagtgaagatgctcaggcagggtaagagccttgaggatgcgagaacttcgggagtgagcggctgcgtggagagcggagccttcgggaaggaagcctacatactcaccggctacttcaacctgccaaaaatcctcgagataaccctcaacaacggcgttgatccaagaactggcaagaagattggccttgaaaccggcgacccgagggacttcaagagctttgaggagctctgggaggccttcatgaagcaggtcaagcacttcctcgacataaagatgaagggcaacgacataatagaggccctctatgccaagtaccttccggtcccgttcctatctctgtggatagaggactgcgttgagaaggctaaggactacaactgtgggggagcgaggtacaacacccagtacatccaggttgttggtctgggaactatcgcggacagcctcgctgcaataaagtaccacgtatttgacaagaagactttcacaatggacgcgcttctcaaggcgctgaagaacaactggaagggctatgagattatgagggaaatactccgcaaccccgataaaactcccaagtttggaaacgacgatgactacgtcgacgagatagccaagagagtcgtggatgaggttgttgacctcatcgagagctatccaccttctccggttaggaaagcatcaaagagggcttacttcctcccgacgactgttcacgtttactttgggaaggtcacgggagcaacgcccgatggcagggaggcggggttcccggtttcagagggagtctcaccggtccaggggatggacaggaagggtatagctgcagtgttcaggagcgttgccaagtgcgactgggacaagacagggggagcgttgctcaaccagaagctgacgcccgacatctttgacagtgaggagaacatcaagaagctggcgcagctgataaggacgttctttaggcttggtggccaccatgtgcagttcaacgttgtgagtgctgagctcctcagggaggcccagaggaagcctcaggacttccaggatttgatggtgagggtggcgggctacagtgattacttcgtcaaccttccggaggggctgcaggaggagatagttcagagaaccgagcaggagctcctttgatcctttaactttttgagtgtaacagctcattaggggtgttcaaattggtaaaggggattatattcgacataaagcgttatgcaatccacgatggccctggaatcaggacgacggttttcatgaagggctgcccattgaggtgctggtggtgccataaccccgaggggatatcaccgaggccccagctgatgtaccttgagtacaaatgcatccactgccacacttgcgttaacgtctgtcccctcagagccatcaccttcgacgagaacgaggttcagcacatagaccgggaaaaatgcgacgtatgcggtgtgtgtgcggagttctgtccaacgagtgctttgaagctcgtaggaaggacaatcactgtcgatgaactcatgaaggaagttgagagggatgtcaacctctacgacagttctggtgggggggttacattctcgggaggagagccgcttttccagccaaagttcctggtggaggccttgaaggcatctaaggagcgtcacatcaacaccgcactggatacttcgggatatgcacctttggacgttttaaagaaagttgagccacttgtggatgtgtttctctacgacctcaagctctttgatgaggaagagcacataaagtatactggcgtaagcaacaaaatcatcaagaggaacctcgaatttctcgttaaaatcgggcgagccaaagatgtgcttctgcgcttcccagtgattcctggaatcactgacacggagaggaacgtcagcggctgggcccgtttcgtctcctcccttggcggattcgagcggattcaccttctcccattccatgatgtaagtgagaaatacagacgactggggatggaatacaggatgcccacccgtgagaagccttcggaggagaccatgaaacgcatcgccgaagagtttgaggaaataggcctggaggtggtgaggggtggatgataaaatggaagttctcaaggagatagcggagagggagtaccggttttttgaaaggctgcagcccacgaaccccgagtgcaagagggagaagacgttcaagttcatgcgcatatcccgcttttacccgtattccctggagaccctgctttcctatctggacgatctaatagaggcggaaaaagaggggaggaatccgctatacgagaaatacgcgtgcatggagggcaggatgggaatccccgaggataagagggggttgatagagaggatagtccagatagaaaagtcctggattgaagagctgcatgggaaatatccccatgctatagaaaacaagccggagtttcagaggtatctcgcctgtgagctctccacgttttcagttcaaaccctggagcgataccttgaggatgtggagagggcgaaggaagctggaagaaacctcgctctggagagctatctttacaccttctcaaggctgggctactcctcactggaggaggttgaggagaaattcaaaaagcgcgctcttcagaagtgatttttaaagggggtcccgatcgaaaactccttatttttcctttctaacatttcaggggaaggtgaatgaagttcatcgccgacatgatgctcggtcgcctggcgagatggctccgcctctacggctatgacaccctctacgggatagttgaggatgaggtaatcattaggaaagcgcttgaagatgacaggataatactcacccgcgactctggccttgccgagagggcgaggactgctggggcgagggtctttctactctcctcgaactctcttgagggtcaggttgaggagctgaaaaagcttggagtcgagtttagagagctctttccagccaatgctcgatgccccaagtgtaacggcctgatagtgaggattccaaaggaagaggtaaagggcaaagttccggagagcgtttatgagcggtacgaggagttctacgtctgcaaaaactgcgggcagatttactggcccgggaggcagtggagggagatgcttagaattgacaggaagctgaggggattgaaatgaggtgggaagactggaagccgttctatcttcggattgttcgcgagatgggctactcaatcgaggaggacagaaaagccgcccaaatactccgtgctctgctccttgaaggtgatgaatacatccttcgggatgagcttgaagccatcgttgaaaaaaaggcctacgtcttcggggctggcccgagccttgaaaaagctttgaaagagttcgatttctcggatggaactctgatagcggccgacggggctacctccgcactccttgaaaacgacctcgtgcccgatattatagttaccgacctcgacggcagaattccggacctaagaatagctaacgacaggggttccttcatggtcgtccatgcccatggagacaacgttgataagatgacgtcatacgttccgctcttttccagagtgctcggcacgacccagaccgagccgctcgacatagtttacaactttggcggcttcaccgacggggacagggccgcgtttttagctgaagaacttggggctagggaggttgtgcttgttggctttgactttgggaacgttgtcggaagatggagcaagccgcacctcaaagagcactccccagtctgggagagcaagaggaaaaagttcgagttcgcgaaggaactcctcgagtggctggaaaaaaatggaagagccaggctggtttatctgtagttaaaatactgccgcctcctagttattctcatcctgtttttgatgggcttattgcttgctatgaccagcaggaagatggccagaacaacaatgatagagacgtagttatgctcctttattgatactgcaagataatagactccaaacaatcctacaatccaagaaacgatgtatccactgtatttccagatcggggacacgttgctccgcataattccaaacgcttctatcactgtcccgaagaacaggagtactgcaacggttttgtcaagaatccgaacagcgtctatgttgtagctcaagaggagtacgttcagggtaccaaagaatatcgtcatgatagaaactgctatcatcccatcgattctgtgcaacccggttatttttgcgtaaaccgttcccgctacttctcccaggggcaccatgctggttatcgccaccaaaagcaccgtcaaattgaacccgatcttcaggaggggcatctggaggtactagctcaggattaagggagttagttcaaatattatgcccgtgcttgtgatgagggcggttggaagaatggccgaaaccagaagaaacagggcaagccccataaaggatgctaaggtgtcaataacagcaccagcaaccgctattaagcctggagatgcttttttgggtaggaaagacccgaaaatgaggtaaaaacccaggccaactcccagcgagtaggcggcctgagccatcatgtccgtgatcatctcaattgtaaaccctttccatgtgaacagactcttaagtgggccaaggatttcgcccccacttccgaggtatgagtacatctcgaatatgacaaaacccgcaagggcaagaaatacgaggagtgaaatcgccatgatgtcgaatacccttttcttcccggctatcaggatgacaaagactatgaggataaatgccaacgagcttagaagcttccacaggatgttttctggagcgctgttggtgatgagaccggatagtgctaatcctcccactgtggagtagtagctcataaacagtacgttgagcacgaggaagaaaagggtaaacgccgggaagttgagtctctcgtagtgctccaggatacctccgacttcgacgtgggccactttcaatactgatgctatcaagatcgtcaagagtgccacggaaatcaaatatgtgatgagtccgcttccaccgtatttcatgagaagagctggaaatctccatatattcccgaggcccaccatgtaggcgccaacgactatggctaagtaagctgtggttagtcttacccccatcgttaatcccgacattttgttgttataaattaacctctctaaaagggtatttttaaaacaatcggttgctcgttgttcgagaatactcccctcagtctcccgattattaaaacattgtggtttaattacatggatactgttccactttggtaaatgtgaaatcaaaaagaagtgagattagctcatctccagcatcctctctattgcctttctcgccttctctgcgatctccgccgggacttctaccctgtatttcatgtctctcagtgattcgtaaatgtggttgagggttatcgccttcatcccaatgcatgtggcgtcttcccttgcgggatagaacttcttgctcggatagagcttctggagacggcaaaccatctccctctccgtgaagacaacccactcgtcgtgctcgcaggccctctttatcatcccgccggtggagacgattatatccgcctgttcctgcacttctggctcacactcagggtgaaccatgagcttggcgtttgggtaaagttttctcgcacgttcaacgtcctccagcgtaaacttcctgtgaacgtagcagtggccgttgggagggacggggatgactttctttccagtgactttagcgacgtagtgggcgaggttcttgtccgggccgaagataacaacgtcggagtcaagcttcccaacgattttagcagcgtttgcggaggtaacggtaacgtcggcgtaggccttcgcctccgctgaactgttcacgtagaggacgacgggagcatctggatactttttcttggcctcaatgatgtgttttatggtgagcatgttggccatcgcgcaggtcgcccttggggtgggcaggagaaccgtcttttcggggttgagtatcttcgcggtttcagccatgaagtcaacgcccgcgaagactatcacgtcagcgtcaatgtttaccgccttcctcgcgagctcaaggctgtctccgaggaagtccgctatgtcctgtatctccggcagctggtagttgtgggccataattatcgcgttccgttcctccttcagccggtttatctcctcgatgagcttttccttctccattttctcacccctacagtgggggcatggaaaaggacattaaaagggtttttggacacctttggttatagcctgcacttgccgtcgaagaagctcggcctctcgaactcctttctcatagccggaaagtcctcacggtagtgggcaccacggctctcttctctggccagagcgcactcaaggacacccctaaccaggagcttgagcctcgggtcggcttcaacatctctcagttttttcaagccctccttgagtgtcctctcgttcctaactatgcccgcgtgcccccagaggatttccctcagtgattcaatgtctccagtctcgtatccgtgataaggaggttctttcacttctctgcccttcggtttgtccctcactatcgtcctggctacttcaaggcctgaaacaatgcactcaagcagggagttgctcgcgagcctgttggccccgtgaaaaccgttacttgccgcttcaccgattgcatagagattcttgattccagttctgtaccatgtgtcaactgctatcccgcctatcgtgtagtgggctatcggcgcaatgggtatcaaatcccttgaagggtcgattccttcctttctgagaaaggcataaatctggggaaacttctttttgaagtccgctattccagtagcatcgaggaatactctctctccttcctgcattttcaggtagatcgccctcgccacgatgtccctcgtggaaagctcgtttacgaagcgcttcccatcttcggttacgagcctcgcacccgctcccctaaccgcctcgctgataagcttaactccatcttctccaatgaacccagttggatggaactggatgaactcaaggtctctcgcaaaagcacctttcattacggcgtctccgatgagcgttccgaggttcgtcggcgaacctgctgtgtacttaaaaagccctgtgaacccgccagaggcaataatcgtcgcgtcgaactttaggaactctccgttcacgaagaccccgtaggcttttccgtgcttaactgccagctcttcggcttcgcctttgatgaagttaactcccccctcctttgcgtggaggtagagtatcttggtgaggtgctttccggtctcgttttttatcgtgaaaaccctcggaaaagagtgtccgccttccgtctcgttggtctcgaacttcacgcccagggagaggaggaagtcgtaagcctcgctggcttttgatatcacgttccagactgtctccttatcgttgatgtattttcctcctctcattgtgtctatcacgtgagcagttattgaatccccttcgaggagggggaaggcaatccctgcctgagccaggtaggaattggtcgtgtttatacccgtgtggatgagcgttacctcgtaacccagtttcgccaaggaaagcgcggccgtaagccccgcgataccgccgccgatgattccaaccgaggtcattgatcccacctgaatcgagtttgagtgttagcttaaaaacatcttggaagggcagaaatcaaaccatctggcttgaggtcattgggtttacttttttctttcgaaagcctcatcatttggggtggggatgcagtaatcgagaaatcaacctgaaagcaggaaagcaaaactattttaaagctcaaaaaacatactatacttcaagatgaaacgggcagtaaccgttaaactacaaccctcaaaagcccaagagaaagctctttccgagttagcccaaatcagctccaaagtttggaacaaggtgaactacctccgcaggcaggaattctttgaggggaaaccaatagacttcaacaaaaccgagaaaacagtttatgaagagttcaaatccgagataggctcggcaacagttcagcaaatagcgagaaagaacgccgaaagctggcgttccttcttctcactcatcaggaacaaacggaacggagaactacccaaatggctcaaaccagaaccaccaaactacatcaagggagagggcttaatagtcctcaggaacgaccaatacaggattgaagggaacaacctaatcctcaagggccttgggaagttcaagaggctggaagttcaattcaaggggaggattcacttgaagggcaagcagggaaggttagaaataacttacgaccccataaggcggaaatggtatgctcacatcagcataagcgttgagaagaaacttcagggtggagaatgggtagaagttccaagagaacctttggggaacttttccgctggaatagacctcggagtgaacaatttaatggctgtctatgtggaaaacggggaaagtttcttagtaaatggcagacctttgaagtcaatagccttctactggcaaaaacagattgccgagtatcagtcgaaactcaacaagtctggagccaagaagagcagaaagctcacaagaatgcaccagaaggctaaacttcaggctaagcactacattaacacggcagtaaggcaaaccgttgagaggctctaccgccttggagtttccagaattgtaattggttatccaaagggaatagcgaggaactctgataagggcaaaaggcagaattatctcctcttccacgtctggaggttcaacacggtaataaaacgcctgaaagaggttgcagaagagtatggtattagtgttatcgtcgttgatgaggcttttacttctaagacttgtcccgtttgcgggaagccccacgaaggggctcgcttcgttcgtggattgtttaagtgtcccgcaacggggcttatcttcaacgctgacttggttggtgctttcaatattttgaagaaggtggtgaaaaccataaccccaagcttgccagttttgtcggcaagtaggggtaactggccgaaggcccggccagaggggctgaaagcccactttgaattgggatttaatgaagcccctcaaacctctccgccattggcgaggggttagctcgttggaaccctcgccgttcacggcggggagaaggtcagaaacgtaaagctttcaaacagatgcatacatccgtgcacggtgatcacatgaagaggaagctcctgatagccctctcctacgccgccccaatcctggtggtgataggtatcctgctaatcgcatgatagagtgtcaggatttaggcttacagcgggcatatgttcaaaaagtctgcccattttttacccaattttgccatatcttcaggttttcttccgaaaaagtcaaatacctcaaggcttattttggtgcggtgatgtccatggctggtgcaggcgaagtagcaaggaaagtccccggaaagcttggaaggggggagggagaaaccgtccgttagggcaggttccgaggaactcctgttcgaggttcttaaggaaggtctcttctgggccgcactcggccgtccgtcggaagtcatgccgtttctgaggggcaagcttttgggcaacggcttcagtccaaaggcgaaggaagagctccagtggctcctcgaccagcttgagaagtactacagccacgttgccgcgtcgggcagagttgaagagaggcacctccgggcaataaagtccttctaccgcgacatcgtcgttgtcctgtcggtagagagggctgaattttgattcttttcatttagttttggcttaatctctagcccattttacggcaaatacaatcagcatggccgcgaaaaccagtcctaagaccacaataatgcccgttccaatggtgttctttttgggaaattcaacgagttggacgccgctaccgttaaaatacaccagttctctcccgtccgagaaaaggcaaccgttgccacaatcacccatttttgggctgaaatgaagctcaaagctcctcccctggtatgtcaggatgctctcgtttatgttgacttcacagccgtttaggagtggggtgttatcaacaggactcctacccctgaagaccaggagaggccagttctgctcgcagatgggagtcacgttgagtgatttgcttacctcaataccaccgctaggcgagacgattaaatagcccagcgtttcctctccactgtttcttcccgtggtggggttccacgagtaccagtacctatactttcgaacgatccatcttccatcgtagctccctaggagggacagggagatgttcttcccttttggtactgaatctagggggatcagggtgtagcccccagtggtgttgatgattcccaggtagaatctccagacggtttcgttataaaaggcaatatctgcgtagttgtcaaccaaaacgccaaaatgggttccgttgaaacagcttccaccccattctgcggacaggtttccgaaggttatgttctcaatcttaattcccgaaggagtgaaaacaacggcgcggagattcgttatttcggtgtagaaattggtgtagccaacgagataaccgttggggatcatctggatgttcccgacgtagcattttgagcctgtgcaaactgtggagcggcccctgtcgtcatccaggaggggataaacggttgtgttcacgagggcgtaccagttgtaccctgtcatctggcaggcttcccagggctggaatatcatgtagaacttcccgttccagtacatcgagagctcatcccagcagtctgtcaccccattgaaaccacccgcgaaatgaagcgcgccgtcatagacgtagaactggatgtcgggagctgagtaaacatcggatacgtttcggtagagaagaacttcttttccgcttgaatggacgaaggtgaggtttgggagggtttcgttcaggagcttgaagccttttcctggctcgtagagccagagctgggtagtgttgcttgaggagccctctgttaaaacgagaaaaccgtcacgatagtgcgctattccagcaatttgggggtggtatgctatggtttgaggcgtgattagagagattatgagtagcaatgacactaacctcttcattctatcacccagttagtcaggattcccaccagacttccttcttctctcgagcattgtttttattgtgtacaccgcgagaagacaacttagagccactattcccacagttagcaattttttcgttgtgttttcctctggaaggttgatgggtttgatatttttgccgtcaaaatacactagctctctcccgtccgagaacagacagccgttgccacaatcacccattttcgggctaaatggcagtttaatcaccattttcccgtagtggagagccgttccattgatgacgactctctttccattcaattccattggtatctcgacgggttgcccccagtcgaagactttttgaggcttgaccattttgcatacgggtttgaagattgtactattagggaactcaacaatacctcctgaagaaacggttatgtaacctagagtcctgtggtgagctctaagctcggaaacattccaccacgaataaactctctcgagtatccattttccatcagtgtatcccaataactcaagggtaacgttttctttgctatcaaaagccgcaaggggaaccagttcagactcttcgctcatgttgattatctgaaggtagtacttaattgtggaaacgttgtcggagatcagcctgaatctgttgctgaccagggacgcgatgtgagtgccgttaaaacacaatccctccaccgagagattactgggggttaaatccattaatgagggatgagaattttggagcgtgataaagaaaagctcccttcgatagctctcgggatcccagctcattataacatatccgtggggaatttgccaaacccctgaaaaatacatgccttccttttcattaggcaagagcctgtggatactgccattgattatggcataccagctgtaactgctcccctcctgcgtggtccatctaatctcaaggagcaggtagaattctccgttccagtatattctgctgcccactccataatcgtcaaactctaggtaatctccgaggtattccagctctctgttatacacgtatagacggaaacgttgcaaataatgatgatctggggaattctggtagagaagaacttcttttccgcttgaatggacgaaggttaggtttgggaaggtttcgttcaggagcttgaagccttttcctggctcgtagagccagagctgggtagtgttgcttgaggaaccagctgtcaaaacgagaaaaccgtcacgatagtgcgctattcccctgacctgaagggggcttgccaggaggtacggagagaagaggagtgaaagaacgagaagccccacgagcctcttcattgagtcaccatcctggggattaattcacactcatagttgttgttaaattatataagactttcgtttttattgaaaacttgataatagtaaaacaatgctttgattagcgcaccctatctcagggctacctttttaaccctgttctcacactcaccccgggatgatgagggaagtttcgtccgagtgatgaggaaactcgcatgggctgacctaaaccgccagggttatacaatccggcggcaccctctcaactattctcacgttcttcccggccttgtatattttaaagcctcttttcctcaggcattcggcgtctatcaccaggaggactacttctcttccgtgccgccttcccgtttccagggcctcgatcttgtcggtgcttacgtgaacgtactggcgtttcattggcttcaggccttcttttagaatcgagggcaggttcctccggggagtaccgtggtacagaaagcggctctcggtgtcctcttcgtggtcgagactgactggaaagctgtggccgtagcgggcccttattctatctccccggatttcgtagcggcccttcggatcattctcgacgatttccctaacgaattcctccgtgacctcgggataaaccgtctttagtgcattgacgagctcgttgagagaaacgaacccttcaacgtccggccggaggccgaactcctctggcgagtgtcgcaggatgtacgccataagcttgcttactcgcttccgctctggcttcatgtggaaaaattatgaagaaaagctaaaaacctcacgggagctctatcagcgcccacaccggtctgtggtcggaaacctcaacctcgcagagacatccgtagtcttttaccttcgctggccagcccctcctcagaaggatgtagtctatgttctcgatgtcgatgtcgccccagttgaaggtgtagggcggcctctcctcaaaagcatccttgtactcctgggttattatctggatggccttctcatcgggctctgcgttcgtgtcccccaaaattacgtgcgctgctggttcgctttcggcgaagctcaggagctcctccgcctgcatagcgcgttcttcttcgctcagccccatgtggacgttcacaagcgttattccaagctcttcaatcattaccttctgcgcgggcctcgcctggccgacgctcttgaggttgagctctccctcggtattcatgcgccagtgggagaagattgctattccgtacgtaccctcaactgcgggcttgtactcgtaggcgtagccgagatatgcagagagcataagtggaacgtcctggtaaccgttagctatcattcctccaacgacttcttgagaggcgatgatgtcaggttcatgctccctcaggagtttcacaagttcatacccattgaaagttccccgatacgggccgaagccctgatggatgttgtagctccagatgaggacatccttcttgctctccgcatagctcggtcccgtgttgaagagcgctagaacgatcactgaaacgagagcgagaccagcgagcacactcactacctctttcctgtttggagtactgataggggcattcttgccataagttacgactgcataaactatagaggcaacaactattagggcctccagcttgtcctccatgaaggccaatccaatgtccctgccgatgtaggcgcccaaggcgagggtcaccaccaagaagagataaatagcacccagctcccctttgcggatggtcttggcactctcaacgagagcaacggcagatgtgagggccaggggaagacctatcaaactcagtggtttaacgaagagggtcgccgtgcccaggatcagaagaaccggggcaatcttaggcttcctggcgaggtaaggccccccgaggagtgcaagggctattatgaaagagtagccgacgaaggtaggaagataataagagttaattccggagtacctcaagactgcgtttggatacatgagaccgagttccaggagggcggcaaaagcgtagaggccgaagccaggctttggcagtttcccttcatctttccagagggcgtatgctccgaagagaacgacgaggctcaggataatcctggtgtgtgggaagtcgagcggctccccgccaacggcgagaaccctcagccccaaatccgccacaagccccatcgtcacgtactttatgtcgagttcactgaggagtgccagtgcaactgggatggcaagggccgctatcaggtgggtgtattcagtcgcatccgtgaggagagaaaccagcgcgtaggccgccactattgcagctcctatcctcctgttgagtttgcccacaacagcggatgcaattatgaacagcaccacgccgagcacggaggggaacatgacgttgtaaaagaacgtcttctcgacgcttgaatatgcccccgcgacgaaaaccctcatggaagaagctaggagaacacccgtacttatcccgattaagagttctctattagcaataggtcctttcaatctgtctttcattggattcacctctcacagggttgttagttggtatttagctggttgtggaggattatttaaattttcgtgaattctgatgtgcagaaattcagtgtacatctatgttgattcaggagtgggaagaaaagtgaaaggggatagaggttcagcggagctttctctgggccatctctgccgcgaccgttatcgggtctatggtcggacttatcggcggggcgtaggccgtttccaggtaggcaacgtcctcaaccgttgcgcctttttgagcgagggcagaaagcgtcattatcctgccccagaccctctcgccgccgactatctggccgccgataagctttctgtctgactttctgaagatgagctttacggttatgggcttgcctccgggatagtactctggcttggtcgagcctttgaactttccgaccgctacctcgatgtcctccttctttgccctctcctcggtgattccgaaggtgccgatttcaaggccaaacagctcggttatagcggtgttgaagactggtctgaaggagacgtccttacccgctatgtgctccgcggccaccttggccatcctaacggcggaagttccgagctgactgagagttctttttccagttacggcgtctataacttcagcacagtcgcctattgcgtagacctccgggtcgctcgtctggaggtgctcattaaccactatgcccctgttcacttcaagccctgcctgtttggcgaggtcggtgttggctctcaccccggttgcaaccaagacgaggtctgcgggaacttcttcgtcgcctattttgacagccctgacggggcttccgatgatctcactcacgccgacgccgaagcggaaggaaacgccgtacttctccatctcagcctggacgagctttgccgtgtccttgtcgagcattgtgggcataagcctgtccatcagctctacaatcagaacttccattccaagttttgcaaaggcctcggcgccctcaaggccgatgagaccagctccgataacgacggccttcttcggctttctctcggctatgtaggcttttatcctcctaacgtcgtcgaggctcttgagtgtgaagaccccctcgttctcaactcccttaatcggcggaatgaatgcctttgaaccaacggccaaaacaagcttgtcgtacgggacttcgcccttatccgtgactacaaccttcctttctctgtctatcgcctttgcttccgtgttcagcatgaggtttatcttctgcttctcgtagaactcgttgggaaagactataatgtcctcaggcttctcgatagtgccgcttaccacgtgcggcagggcgcagggggagtactgcatcgttggttcctttcctatgacggttatctcggccttcctgtcaagcttgcgcatgaagagggcgaagttgcttccggctgttccagaaccgaccacgacgattttcatgggtgtcaccaagagaagaaggggaagggggtataaaaagttggctttagttaaatccggaaatactcgaagagtaagcggacaaacaaagacataagtaaaggcaaagaaattacggctccacaacggttccgctgtgcttgccctttatcacgtcaaagagatggtaagcgtccttcttgccgacgatgtaagtctttatcttccccctctggatgaactttgctgctagggcatcaacgacgccgcttcctcctgccttgctctcctcctgcatcgctatctcaacgagctggtcaacggtgattctgtcgagctttttcgcgttggggttcttcttcgggtctgaatcatagactccgtcaacgttggttacaacgacgagaagatccgcctgcaggtattcagcgagaagagcagctaccgcgtcggtcgtgtggccggggtgggttccacccattatcggaatcttcttgagctggatgacctcccaggccttacggaagtcctggacgacgaagggatatgccttttctccaagggcagcgatgagaagcatcgcgtttgccctcgtgatgtggattcctatgtagtccttgaaggtctcgttgagcgtgaattccttcgcggcctgtatgtacttcctggcgacctttccaccgccgacaacaaccgctacctcgtggtcctcgcttatcttgacgagctcgtatgctatcgccttgataaagtcgatgtccggatcttcgggaacgagaacagagccgcctatatcgaagactatcctcatgatgaccctccttctgctaatcggagggcctttataaccttttcttaactggaaaatggcaaacttcagggctttcgtacctaccaaacctttatatatccagctctgttaactattcccggcggcgggctaggccggggggttcggcgtcccctgtaaccggaaaccgtcgatatgccggggccgaagcccggggggcggttcccaaaaccgcgcccggaagccggggcacaacggtgatccctcgtcccggggggccggcggtgggcgaggtccggctggagggccgggctaacgccctttgcccgccgaaccccgccaggcccggaagggagcagcggtaggcgggacgtgcggcgctcccggggtagcgggggtgagcgagccccggtggaagggcgcggcggagggttcccacccccgggcgcgcccgccgccactagactttgaagctttttgggagaggctacactaatgaaacttttctagcaagcttttgggaaaagcttgaccaaagaaactttgcaagcaaagtttcatcaaagttcgtggttcttgattagaaggttgttctggggagatttttcattcaggagctcgctgtatgagtgcgaattcgattttagtaagagttctcggtgtgagtttgcttttaatcgacacccgtagggcgtcgggatgttggaaacttcttttagagggctgaaattggggaattcactaatgctagcttgtgtatcttgaaaatccttgtagtggggcaattctaagaagaaccacgagcctcgatcaaactcaacggggctatcgtcccgtgcgttgaagcgaagcttcaacgtcgcgcagcaagcttttagaaaacgcttgaccaaaagtgcgccctttcttttgactttgctgttagagagggtatgcttgctcagaaagcaagttcacgcgggtttaacctcaaaatatcacactaattgtgatttcaaactttctttttagcgctcgacgagcgctatacggtgaggaaatcctgtaagtctggctactcgataagtaaacccactcaaaagctagctcgttaagaacgcatacttttcttccgccagcgctttcgcaagaaagggctgttgtggtgcgggggcggggatttgaaccccggaacccctgcgggacgggaccctcaatcccgcgcctttgaccaggctcggcaacccccgcgttgccaaatatagggcagtgcagtgctttataaactttacggtgcttctcggcactccagaagaccgaaaaatttataaaggcaatccatctctatggtttcgggtcgtgggccggtagcttagcctggttagagcggcggactcttaatccgcaggtcgggggttcgaatcccccccggcccgccaaagcgcgtttctcctcagcgcgttctgagcaggagcgcgttggaattactagacattaaggagtaatgaaaaatgagttttagagaacttggactatccagtgcttcagttgaagcagttgaaagaaagggtttttcaatcccaacagacattcagagggaggtcatcccccttctgctgtccgctgagagcgatattgtgggtcaatcaaaaacgggaagcggaaaaacagcagcttttggacttccgattctggattcgatagatgaatccataagggaagttcaagcgttgattctaacccccacaagggagcttgccatacaggtcactgatgagctcaggtcgctcaggggcaaaaggaggatttacgtttactccgtttacggcggacagccgatcggacctcaaataagggcccttgaggggggcgtccacatagtagttggaactcctggacgggttctcgaccacataaacagaggtactctgaacctcgatggggtcaggttcttcgtcctcgatgaggccgacaggatgctggacatgggcttccaggaggacatcgaagcaatcttcagggcaacccccaaggagaagagggtcctgatgttctcagccacgatgccgatggatgtcctcctgctggcaaagaagtacatgagaaaccccgaggtagtcatcgtcagcagggacgagcttgtcccaggagaggttgagcaggagtacatcgaagctgttccccacagaaggttcgaccttctcaccaagatactctcagatgagtctaatgagttttacggcatagtgttctgtcagactaaagccgagacgagggaactctctatgaggcttagggcggctggattcagggcagaggccctcaacggcgatatgagccagccggctagagagaagacgttcaatcgctttaaggccaggaaaactaagatactcgttgcgaccgatgtagcagcgaggggacttgacgttccagagataacccacgttatcaactattcaatcccaatgaaccccgaacagtacatccacaggattggaaggacagggagaatgggtaagaaaggaaaggccataactttcatcgccccaggagaactgaggcgctttaggtacatcacaaagcaggccggcgttgaggtcaagaagtccgaactcagcgagggtattcccaaagaataccgggagaggttgaggcaggaggagcttgaaggtgagtaccgcggcaggtgggggtcaatgaagccccgccagagaaggaggagatattgaggatttttcttttccccctcttgttgatttctgattgctcttatatctgagtatgaattctgaaaaattctctaaagtcgcttctgtggtgcttaatcaaaacaagcagttaagaaggaagcaactaagaaggttagaaggttaagagctggcgccggggcagggatttgaaccctggcgggcaaacgcccacggactctccaggcccgcgccttcccaggctaggctaccccggcgcataaatgagaggaatcaagagatgagttcgatctcgatggtaacatcctcgggaacgcggatgcgcatgatctggcgcatggccctttcgtcggcctcgatgtcaacgagcctcttgtgaacgcggagctcgaacctgtcaaaggtggcggaaccctctccatctgggctcttcctggtggtgatcctgatcctctttgtcggaagcggtatcggaccgctcatcctgacgccggttctctctgctatctgcttgatctggtcggtgacctcgttgagggcctttatgttggtgctcgccagcttaatcctcgccttctgcatttccgtccctcctaaaaggttcaggaagatttcaaaggaaggaaagattgagaaggccttcagtcggccttctggatggagatgaccataccggcagcgacggtctggcccatgtcacggatggcgaacctgcccatctgcgggatctccttgaccggctcgatgaccattgccttggtcggcctgaggatgacgatggctgagtcaccggtcttgatgaactgcgggttctcctcgacgatgttaccggtcctcgggtcgagcttagcgaggagctgctcgaacctaactgcgacctgggtggtgtgggcgtggaggactggggtgtagccgacggtgatagcggtcgggtggttgaggacgatgatctgggccttgaaggtgtccttcggcctgacgacggtcggcgggttggtggtgtgtccggcaacgtcaccgcgctttatgtcgttcttaccgacaccacggacgttgaaaccgatgttgtcacctgggtaggcttcctggagcggctcgtggtgcatctcgatgctcttgacttcaccctggatcggcttgtggaagatggtgctggccggctcgaagatgacaacgtcaccgacgcggaggacaccggtctcaacacggccgactggaacggtaccaacacccttgattgagtagacgtcctggatcgggatgcggagcggcttgtcaaccggcttcggcggctcgggtatctggtcgagggcctcgaggagggtcgggccgttgtaccagggcatcttgtcgctcttcttaacgacgttgtcgccctcccaagcgctgatcgggatgatcgggaagtccttgtagccgagcatctgaaggagcttcttaacctgctcggcgacctgcttgaacttcttctcgtcgtagttgaccatgtccatcttgttgatggcaactatgatgtggttgataccgagggtcctggcaaggaaggcgtgctccttggtctgtggcatgacaccgtcggtagcggcgacgacgaggacagccgcgtcggcctggctggcaccggtgatcatgttcttaacgaagtccctgtgacccggagcgtcgatgatggtgatgtacctgtgcggggtctcgaacttggtgtgggcgacgtcgatggtgataccgcgctccctctcctccttgagcctgtccatgacccaagcgaacttgaaggacttacccttctcacccatctcctcgaacttcttgatgatgttctccgggatgttcgctgtgtcgaagagcagcctaccgatggtagtgctctttccgtggtcgacgtggcctataaacacaatgttaacgtgtggcttctccttagccattttcaaacacctccatattttggtctagtctcgttgactaggatggctttttaaatctttcgaacctcggccccctcgggcgggaaacccgccgttttcggggggacctcatgagttctgggtttaactcaagaacggggtttaaaaagttaactaatgacggatttagactttcacgtgataaaacagagttcttgagaaaaggtcaaagagagaacaagaagaaagcccgcatcactgctgcgggcagacgtcctgctccttcggcgggttggggtcgagacccttcctctggcgtatctgtctgattatctgctgggcaagctcgtttggaacgcgcttgaagccagcgtgctccgttgtccagagggccttaccgctggtggctccacggatggctccagcgaatccgaacatctccgcaactggagcctcgccgatgatgatcatgacctcgccctcctgcctcatgtcaatgagctgaccgcgcctctggttgagctccctgctgacggcacccatgtactcgtagggcacgttgatgatgaccttctggtacggctcgtagaggacaggtccagccttcatcatggcgcagtggatagcgcttctgatggccgggtagatctgggccggaccgcggtggacgttgtcctcgtggatcttggcgtcgtggagcctgacgatgaccttcatgacgggctccttggcgagcggtccctcatccatggcctggtggaaaccgtcgacgaggaggtccatgacctcgttgaggtactggatacccttggtgttgtcaaggaacatgttgccgttgtaaatgtcgacgatacccttggcaatttcgtagtccatgccgagctcggcgagcttcttggcgacggccttcgggtccttcggcctgccctcgggaatctcgccctccctgatcgcctggtagatttcatccggcatcggctcgactgtgatgtagaacctgttgtgcttgttcggggacttgccctcgacgatcgggctctgcttggtgacgctctcgcggtagacgacgatcggcggtgaaacttctacatcgagcttccattcggtcttgagcctgtggagcttgacctcaaggtggagctcacccataccgctgaggaggtgctggccggtctcctcgtcgatcttgacgtggagcgtcgggtcctccttggcgagctgcctgagggcctcaacgagcttcggaaggtccttaacgttcttggcctcgatagcaacggtaacaaccggctcgctggtgtagtggagggcctcaaacggctcgatctgctggactgaaacggtctcaccggccatagcatcgcggaggccagtaacggcgacgatgtttccagcgggaacggctccatgttgatcctctcgggacccatgtagataccgacctgctggatcctggccttcctcttgctgttgatgaggtagacctcctgaccggtcttaacggtaccgctccagacacggccggtagcgacctcaccggcgtgcttgtcgaggatgatcttggtaacgaccatggtcatcgggcccttcgggtcgcagttcatcatggcctggccgacgtcgctgttgatgtcgcccctccagaggtgcgggatcctgtacttctgggcctcgagcgggttcgggaggtgcttaacgaccatatccaggacgacgacgtggagcggggccttcttcctgagggtcttgaggtcaccggcgttggtgaggtcgatgatgtccttgaaagaaacacctgtcttcttcatgtagggaacgctgagggcccagttgtagtaagcgctaccgaaggcgacactaccgtcctcgaccttaacgagccacttgtccttgaactctggcggagcgtacctcctgataagcctgttcacgtcggtgatgaccttgacgaagcgctcctgcatctgctggggagtaagcttgagctccttgatgagtctgtcaaccttgttgatgaagagaaccggcttgacgtactccctgagggcctgcctgagaacggtctcggtctggggcatgacaccctcaacggcgtcgacaactataatcgcaccgtctatggcacgcatggccctggtaacgtcaccaccaaagtcgacgtgacccggagtgtcaatgaggttgatgaggtagtcgttgccctcgtagttgtgaaccatcgaaacgtttgccgcgttgatggtgatacccctcgcctgctcctgctcgtcgaagtcaaggacgagctgctttccggcgagctcctcgctgatcattccagcaccggcgagcaggttgtcgctcagagtggtcttaccgtggtcaatgtgagcggcgatacccatgttcctgatcctctcaggctgggtcatcaattccttaatcttcgcaatcatctcttcccttcttcccataatacaccacctactctcttgaatgagcttgtcggcttaacttaaaaggcccagttataaagcttttcccagttgagaattgagagtgacgtggtgattttggatcacttaagggttttggatgtaagaagagatgactcccagtacttcctctaaagtgatttctgatgatggaagcacgttcttctcactaccgacgtgtttatggtgtgggaacgtgggaagatccttgtggtgcggtgcattgtcccaccttattatcagctcactgtccctctgccattgaaaggagtagttgtactcctcgttggatacgaactctcgaatatggagaacacttccatcaattagctccgcgcgtatcttcagaaaatagaaatctgaaccttctttgtagtcgagtatctcataggatctaaccatctcgcttttctcaagcaattctaactctctgagcattctcaatctcccgcagcttcttttgaagctctctgaactttctaacgtaagccttccactctatgtaatcgtcccacgcttcaaaactctcgttctcttctcttatccttctctcgaactcttcaaaactcacaccgtactttctctcgaactctgatattctctctcgtatcggggccaactcagaaatcagcttgagcttctcatacatgagtatctcatctttggtaaccactacctcactcatacttctcacccgaacgagtattgaggcactggtctaaaaaagctttttcgggaacgcttccacgtcctctcttacgtcctccctcgcgtagacgcaccatctccagtacacgtccttcatctccacgagggatctgacgaggggagagacctcactgagcctcttcgtctcgcttccaatcttcacgaaggcgttcctttcctcgtacttgggttttggcgggtagtctaagagggcagaataaccaaactcttcttgaagctctcttttcagggttgaaattgtcttttcatcaagctccctatttgagcagtaagccctcttgtagagcttcctgtcgtctatggcccttataagctccctaacttccggcttttcgctacttctgagcctcgaaactaggtctatctcatccatgatacggatctcctctaaggatatcccttcaatctcgacggcctttctcagcatggcctccgctatcttcgccgtatggtggaagtaaacggtcgggtacatcatggccctcgaaagcaggaggttctgggccgccattattcctttttcctcaaccacgagcattttcccatcgaacttcaggttcctcacgagccgttcgaggtcaacgacgccgtaggctgccccggtgtagtaagcgtccctgaccagataatccatcctgtctgcgtctatgtcaccgctgacgattggatgctttaagagcttcttaaactcctgggtcgaatagttctccttgattacgtctccgacgcttccatgttctataacccagagcgtgttttcctcgtgcctcgggtagaggccctcaagggtgtgcgagaacgggtagtgtcctatgtcgtggaggagcgccgcgtataatgccccttcctctatttccggattgtgagcgcgaatcttctttgcgaggtggaaggttccaagtgaatgctcaaaacgggtgtgcctcgctgaggggtacgccaaaaaagcgaagccgagctgggttatcctcctaagcctctgaaactctggggtgtccacgagcttcctcgcgaactcatcgagctcgatgtagccgtgaaccgggtcgtggacaagcttcatctcgtggcctcctggaaaaataagggaaagaggtcaactcagctctttttcaactttctccagtccttcagcgtaaacgtcgttgagcaccttcaggaactcgctcgcggtaacgacgtcccttacgtctatcctctcgtactttgtgtgggagatgtcgaggttgccgggaccgaagactattgttctggttccgttgtacatgaagttgatcgcatcggtccagctcctcatgccgccgaactcatcgaggccgaccttcttcatcgcggctttggccagctggactatctcctcatctggatcaagctcgtagccgtcccatatctccgtgtactcatacttcagcgtgtactcgtcgaggattggatccatgaggtcgagaacgtcctcgacttcctgatccggtaaaagccttgcctcaaggcggcctttacacagggccgggatgagataaaccgggttctcgcagaggagctcctgaatgccgatatggggatcgaagtacttgcccttctgcttgaagggttcaaggttcttcagctcgttgagcatcttgtaggtctcttcaatagcgttgacaccgctctctggacaggcaccgtgggcttccttgccgtcaacctcaaagtaggcctcgatgttgcctgcgtgggctatatggacttcaaggtcggtgggctcgagaacaaccgccatcttcggcctatacctctccatgaagagagccgaacccctaccgccgagctcttcgtcactgacgaagacgacgccgacgttcaggtctttgccctctttcttcaggctctccatcatgaggagtattgcagccgctccacccttgatgtcgctcgcgccggttccgtagatgatgttgcccctcacgaagggctcagcccttatcgggatcgtgtcgacgtgaacctcgtagaaaagctcagcatctggattcacgacgaggtcaattatctcgccgtcgctctcgatgtgaacgtcgtagtcaagcctgtggagaaactccatgatgtggagcattatcctgtcctcctgcccggagggagagggtatcttcaagagctgaaggaggatctccttcgcgcgttcagtcttcatttgggtcacctaatcagattggggggctgggtttataaacgtctctttgtaacatcttagggcgatgaagagattcatccctcctgacggggactcgctccccccgagatgaagacgcggtcccccctcgagcccctttctggaggtgaaataatgggtgcaagtcccggcaggggctttcccagcaagctcatcccgattgaggttccgccccacgttgttatgctccgtggaatagggcgggactccaacatctacctagtcagagacgaagaggaagcccttataattgacactgggactggaataaactggcacctttacactgaaatctgggagagagagggctaccttaccgatgtggagcacgtaacgattttcaacacgcacgagcactttgaccacgttgggggaaacaaggttctgcaacgctggctggaagagcgtggaattgaggtgtcttttgccgcacacaagataacagcaaacgtgctcgaacgcggtgacgaaggtgtgatcctgtcgtacttttacggcaggcggtttgagccacatcaagtagacttcaagcttgaagatggagacaaactgaatgtcagctcgcttgagcttttggttgtccacactcccggccacaccgctggaagctcctgcctttacctcgacgacggaaagcacagggtcatgttcacgggcgacacggtcttcaaggggacagtcggcaggacggatctcccgactggagatggctgggcgctcagggagagcctggagagattggctgagtttgacgttgacttcggcttcccagggcacggcgactacataagggactggaaagagaacttaagggaagtcttgaggtggctcccatgagaaagggctccgttaaggaagtgctggcgaagataaagtacgacccgcgggagaaggaggaggactactacgttgtcatcgagcacaggggggcttatggtggggaaaagaaaataccggtcgagcttatcgagctcggacacggctacttcttcgttggagaagcccagataccctaccacagaatcctgcgcgtcgttagaaaggatggaaaagtcatctgggagacgaagaagctatagtataacttcaaactcagacgtgagcaggccccactccttcttctcaaaggcatccggattggcgcttactatgatgtacccattgtagaccatggcagcgtcctttacgtagagcagaaaatccattgcatccttgaagccaagttcaacaaccaggtaaccaacattctggacaaacacaactccctgctttccgttttcttttgcagatttgaggaacttaaggagctcgcctttgagttcggggacgaactttgggggcactaccttcccggggtattcctctgagatttttgagacccatatcacgttgtctatctcagtgagctctctaaacttgtccgggtgctcccttataactgctatcacttccctgttttccgtcagcatatctaagagaatgtactttgctttctcgtcgtcggttaccagataagcacccgatcctagcctctctataaagacgtgcctgcgctcaaaggagataacgatatcgtagaccttctttatctcttcgtagtgtttctgctcaatctgtgaaagctcgaaggctattccccggacatcttcgttctcggcaacgccagccaatatttcataagtcctctttgcgaagagctcgctctccatgcagtactccagcgcccttatgtagtcctcaaccttttcaaactcaggatagaatggatagacctccactgggggaacatctaccttaacgggctcctctcctggaaagagccgctcaaacgtccttctgaggaggagttcatgccccttgctctccctgctcatctttttaaacagggctctcacactctttcttttcgccttctcggcaagttcggcatagtattttgcctcgtcctcctcattgaagatagcatagctcagaagctcctttgggctgagtctctttaacctctcaattatctcgttcatgataacctgggggttggggtgagaagtcattgatcacacctaccattcttaatattcacaaactaacagaaaagcttttctgtggagggcgattctgggaacgggagagaagatgatagacgcccactgccacattgagatgttcaaggggagagcaggcgaggtggtcgaggagagcaaaaagcaccttaaggcggtcgtggactcgataactgaatacaggaagttccacgtctggaagagctgggaactgctggagccatactttggcttcgtcttcccaacgctcggctacgcgcccaacgaagctaggaggggcaactgggagaaagttaaaagggtcgaggagttcatacgtgagcacgccgatgagatagtggccgttggggagataggcctcgacttctactacgctaaaaccgaggaagaaaggaagaaccagcgggagatattccaccacttcctgaatcttgccgtcgaactcgacaaacccgtcgtcctgcacgcgagggatgctgagagggaggtttttgaagcgatccagagggctggagttaaagcctacttccactcctacagcgggcctgcggagcttgccctggagatagttgggaacggccacatcatcgggataaacacggggatagacttcattccagaggtgagaaaggccgccgaagtgctccctcttgaaagcatcgtcgttgaaacggacgctccttacatgagcccctacaagggtgagaagaactacccttggaacgtggagtacgcggtgagaaggatagcggagataaagggtctggagtttgaagaggttgagaaggtgaccgagaagaacactatccagttcttcgacttaaagctctgaggtgaggggaatggttgagattccagaggttgaggagcttaaggcgcttttgaatgaactcggtgaggagggacttctggaaaggcttgatgccttcgtgaggatgaacggggggctcgagagcaagcgcggggaggacttcatcaaagtctccatccttggctttgccgagggcctcctcactgttttgaaagagaagtacgatgaaccgagggtgaaggagctctacgagaagataaaggcgaagagggccgagctggacgagcagttcaggaagccgaggataccctaccttgaggaagaaggttagaacttgaagttttttcaatcgtaccaaacctttgtctttgccctgaactgggggatataggggactttgttagagttcgaaggtttgggctattttcattccgtatagaactctcgaaacagcttaacctcctggacgtagctcctcctcagctttaaagccgtgtaagccctctccagctccctgccgaggtagaaagcgtgcctcgggcttatctcgaagcgctcaagaaccgtgtcgattattgcgttcggctcatcgccgactattgtaagaacagcttcggttcccttatgggcgttcacccatatcttgcctctctccacccagatacggaagtaaactggctcaagctcgacgggtctattctgtgcctccacaacctcattggcaggctcgaagcgccactcggcttctttcttctccttgaggattagcaggtcgaagccaaggtcttttgggaggtcgaagaggttcatgtctaccgcacgcttcagctccctaaccgaacccttcgccttcgcgcttacctccgttgtcaggaggaggtttatggaaagctcctttgcaatccccgcaagaagggcgttcattccaacgctgtcggcgtcgtagagttctaccacgttcccaactcccgcgaggaggacatcgtccgggtttctctcgcggtagagctggaaggccgtaaccgagcgcgctaggtggggaacgtgttcgagaatcaggtcggggatgatagttttgtagccgaggtctagggctttctccttgagcttttcgaggtacttaaccctttcagcaggcttggtggggaagtagccctccctttggtttgttggtattaaaacgacgggcttttccgttacaagggcctcaaggttgctctcatcgacgctcaaaaagaggtcggcgtagtcaagcgccccctcgatttcggacgtgttgagagagtcaaagctgatgggagcttcaaaaccagcctctttcagcttttctcggatttcaggtatcgcgtctacaaactcgaggttcctctcccctgcaaccatgccgatgtcaattatgtccgcaccttcacggaggtagtagagggccctctcgacggttttctcaacgccgagcgtgggggcatcgactacctcagcgagaatcctcgcgggaaagtcccttcccgctggaaggttgccgatgagggcgttccagggctttttcagggcctcttcaatatagttcttgttcttcgtcctgtttctgatgtcctcaactctcttaagcgcatcgaaggaaaagaggtcatctgcaggaacttccttgctgagcttgaagccctcttcaagagccttcagaacctgtggcagatccatcgcgttcctcggccctttgaaggccggaatcccaagttcgtcctcgatgatttgagcagagccccttacaaggccagggatgaggataaaatcgtagtcttcgctttttatcccggcttttttcaggtatctaacgatcagctcaggggtgaggaaggcggcgacgctcacaggggctacgaaaacatcacatcctctcccgtacttcctcacgagcggctctgccagcttcccagtcacgaggaggattctcctaggcatggagaaaagttggatgctgtggttaaaagccctccgccggtaggtggctcatcacacttcaggcgggagtagttcttcatcgggcctcagatcctccccccaggcctcaccggtcggggagtgcccaccctcctcatcggcccgatagtattttagacctttccgctaaaagctctcggtggtggcatgataaaggttggaacctgcggcttctgtgaggctcggagtaagtactttagagactttgacgcagtcgaggtgcagcagactttctaccggattctccaggagaagacgctggagcgctggaggaaagaagctcccgagggcttcacattctcgataaaggcctttcagggagtaacccatccagcgaacagcccgacctggaggaggagcaacgtaaaacccggaaaagacgtgggtctgctcaggccaacgagcgacgtccttcacttctggagggtaacgctgaaggaggccgaaacccttggcgcaaggttcattctcatccagctaccgaagagcttcagggagagtgatgagagctttgccaacgcggagaagttcttcgagatgatagacaggggaaactttgagatagccgtcgagctgaggggatggagcgagaagggaattaagcgcttcgtgagggagttcgacgtcatagatgtcacagacccgctcgtcaggattccacttcacacgggggatgtcagctactaccgcctgcacggtcgctatgaaaacgggagaataatatacagccactcctacagcgacgaggagcttcaaaaggccagggagagggtgattggctggaataggggtgaaagcttcgtattcttcaacaactcggacatgtgcaaagacgcgaagaggttcaagactctgctagccggttaaccatttggggtctgatagcattctttcactattattgattttgaaaaattaaagttcttacaactggattatataactttgcgaatgtctagttatctgtaaaggatattttatccatccagttatagatcgatttatttttcattttttttaactaagagtccaagcaatacttaaatatgggtttagtattcatgatactgcctggtagaatgtataatctctcccgggcaggagggtcggcgccatgaagaagcttgttgccgtgctgttcggtctcttggtagtgacagcagggttcgcagcagcgactcagtggagagtcacttcagtgcatcagagacatgctggaagatatggctgggcctatgcagaggtgcatgttaagtacgacttgcagcacccgtacactaactataagataacccacagaatcggaagaggcggacttactagtgccggtcggagtgccgggtacatctctcaccattacaacattcccgacagagatggcattgagtccgtgactaacgttgtggaccccacgacggataatcttgtggaacaggacatagcctctgcaggatggctgtgcatttgaattctaacatgtctgtctgttttttatttcgtttggagggtataccaatgacgctaaaaagaaaaggtttcgttctactaacagcttttctgctggctatgcttcccctgtccctatcgagcgcagcaccctactgggtcaagcctggagtttacatagagtacgcggccatgcggtacgacccgtacatccagtacaagatttcccaggggacttctccaaagttaattagaaccgcatacattacttatatccacaacggcacgttataccgaatcagggtctacgatgatgtccacgtcaggttcagggtactggaagaaaagaacggctacttaacggtaggggttcgtatcgagatgagaaacgtaaccctgggagtcagcgtccccaagggaaaaaatctgactccgatatggggcgatggggcggttataaagattgagacctctccaagctcaatagactcggagacagattattacaaagtgtaccttcgcagtcttaggatcatcagagtttacaggataagggaaatcgacggtgccgtctttgacatgaacggaacttattacggccacaccttcctgtgggtggacatcgacccgagcacagctccccaggaaaacgagaccttctttgttctcccagacttgaactggacgatgagagtaaacagaatctcctccatggacaaagctttaaaaacgtactacggagaattcgggcctcccgtggacactctctccctggtgggccccccgcttgtaataaaaggcattgtagaattcacaagtccaacagggggaggtatacgttacgatcctgccactggactcgtgcttgctccgacaactctctcagtaatgatttctcccgatctttcggcaataggaataccctttgcaatgttcatggacgagcatgtggcttacgaccagtttgtaaagaacagtttcacatgggcaggcacattgctactttacgatactaacgcccagtttcaaaaggccgaagaagttcctttccctaaaccagggacgcctgccaagtatgttttctacggttccctaatcttagttggggcagttctgggaattaaaagctcacggagagtgaaaaagtgaaaagagacttcttagccttccctttggttttaatacttacacttccggcagtctccgcagcaccctactggaccaaaccgggagtttacatcgagtatgccgctatgagatatgagccgtacatccagtaccggctttcacagggagacaggccggagtggattcagacctcgctgatggtttacaattattcaggggttctatacatactgaggacgttcaacgacacgattgtagagttccgcctcaaaaaggagagggattacatacgctcaaacgtacaggtaaccctttacaacgtcagcataagcacgaccctcccaaaggatatatcgccacccgtattctggaacgagtcagaggtaatagagaccgaggtcgaaaacagccacgatttggggtttgaagactggaaatggtaccgattccatgtgaagaaagttgtcatcagtggagagtacctaatccgcgtgaaggattaccatgtcataaagggaaatatggactacgggcacacgatgctttttgatgaccctgcgaacccgttaaacaaggggaacagcttcagcttatacccgataagcataaagattcaagacgccagaattgacaacgagagagtcctaaaaggaagatacaccaagttctatccccccacaaaaaccgtagtgacgggggcctatgctctcaacatcacccagccgtttgggaagggctacaacatcctctcaattctgatggggacactaatatacaccttcgacgcatccgacggaaagctaatcgccacttacaacgatggacctgatctatgggcagtcggcatcttggacgctcagttcacagacgaatacggtcagtataagatggaggtcgagcatgaagagtcatacgccagtggtctcgtccttagatcgttcaaaattgctagagaaaatgtcaaaggagaggtctcattcaacaagccaatagcaaaagccgcctatctcttttacgcttccctcgtactactgggcctaggcctcgtgctaaatatcaaggcgagtgacaagagagggggtgattgaatgggaaggctctacaccctttttagatgggaaatgaacgacctgataaaggtcgttctgctgttttttggaatactgcttgttggaatgtcaatgaaacaggaactaatgggggttagcaattctatgggtttcatctccggaacggatctacagctctttggagcttcccaggccagtggagtatcaacgtccattcaaggcatgctcagtctcgaagacgtctggaccctcgcaggttttctgatactgttgctcggcgcgctgaccttccgctatgaccgtgacagcggcgttgcaaagtctgtctactccctcccgtactccaacgacgaaatattcggcatcaagctcatctcgttgttaatctacgggtccctgatgctccttctgcccttcgcttacgttgccataacaacatacgccagcatagccggctacctcccggagataacctcaagattcctcagcgatgcactgctcctcgttgctttcctcgtgctctacctaatagcggtcgccactctggtttcccttgccttccccaacgccttcctcgccttcatggcagggtttgcagtcatatacgcgcccaaaatactcggaaactcgagcatgccaccagcgctcttcataaacgccttacacctctgtggaagtaccgacttcaatgtgttcaaggccgcctaccttgagtgggggattgtcgtcccaatagtgatcttcctcctctcgtgggttctcatcagaaggagggatgtcgtatgaggttctgggcggccctccttgcggccatgctgatgctcaccgtcggctcactatgggtctacagctcctacgagggcaggataggctccgctgggccggccttcctcacgacatcaaaggatggaaaccgaaccgacatgagccaggttacgatctacacccccacgagttcgctcgtaaatgtctcctgcaacggcaacggaatagttgaggtctacgacatcatcacagggaagttggtggacaggcacaccgtctacggccatgcgaggtaccagatcgttcttccaagggaaggggactacctggtcatcaacaaccacaccgacgaggtctcatgttcattccgcttcgtcaaaaactatccgaccagagaagtccagaacgccctctacgttagcgggtcaatttttgcgctactccttgcccttatcatctggaggtgggggagatgaagaccataatagaggccagagaccttaaaaagcacttcaggagcatcaaggcccttgacgggattaccgttgagattcttgaaggtgtaacgctcattctcggtcccaacggtggcggaaagagcacgttcctcaagctcgccacaggcgtttacaggccgacctcgggagaaatcctcgtgttcggagagagaccgtggaacaacaggagtgtcaaggagcgtttcagcgttgcctatgaccctcctgcgtttccgcagttcgtgacgggaagggagtggctgaagttcttcgcagagagcaggggagttggtgaggagtccataattaaagctgcagagctcttcgatgcgacctccttcctggacaaaaggataagcgagtactcgtctgggatgctgaagaggatttcactcgctcaggcctttgtgggggagccagagctggtttttctcgacgagccgctggccaacattgacttcgacagcatggagaaagtcgtcgaagtcatcgagggcatgaaaggcaagagaagcttcgtgataatcagccacatctgggagccattgatgcctgtagtggactgggtcgtcgtgattgggaacgggaagctcgtgttgagcggaagggccgaagaagtgcaggaagatgtcgagaagctctttaaaccgcgcataagacgttcaaaagagggaggagccaaggaaagcccctcccccgggcaggagggtcggcaaactcccaccagcgtttgaaaaatcatattttggatttattaattttttgccgtatgaagatatgaagattgttatgtctgctcaggcacgggtccaggtcatcacgtttcagccggggagacctgaactcatcatcgccctcagaggaactcctcgaagaggaggtcttctttctttccgccagccttcttaaagaccttttcgctccagcccacgtttccaactccctcgggaaagtgagcgtcgctcgcgaaggtaagctttatccccctctttatgcactcccggataaaatccagctcgggaacgcgatagcgggagcttatctcgaaagcctttcctttggcttcagctagctcgaggacttcattaagttcctccaccgagggaaatccgacgtaggggaagtttgccccaaagtggcctatcacgtccacgttctcatccatcagggcgagcttcacaaggtcgaggtactcatttggagtatcaacccactcgtggacgctagctataacgtaatcgagcttttcagcaacgaaatcaggaacgtcgacgccgttgggggttatgttcccctctatgccagtgagaaccgttatctcggactcatttccccaccgccttatctccctgatgtagcggttgaacgttttgccaactacgtagtggctgtggtcggttattccaagaagtttgagacctttttcctcggctgaggctatgttgtcagctatcgagccaatcccgtccgaatatacggtgtgcgtgtgggtatcgtgcgggaattcgagcatgttcatggtaaatgcactcgggctttaaaacgcttctggacaaaatatccaaagtaaaggaagaccttgaagtttgacaaaggtttaaataggcctgcgcctaagttaggacggtggtgctcatggtcgaacgctcaaaggttagggttctcatcgccaagccgggtctggacggccacgacaggggcgcaaaggtcatagccagagccctcagggatgcgggttttgaggtcatctacaccggcatcaggcagactccggagcagatagtcgagagcgttatccaggaagacgttgatgtccttggtataagcatcctttctggggcccacatggtcctgataccgaagatactcaagcttcttgaggagaggggaataaagcccaacgaggacattctcgtgctcgctgggggtataatcccgcccgacgacgccgagcagctcgagaagatgggtgtcgccaaggtcttcggcccgggaagcccgataagcgagataatcaagttcatagacgagaacgtgccaaagctcaagaagttcagggagaacgcataactttttatcttttctggatgattaatccagcgtggtgaagatgatagacgggcttattgagaggatgctcaagggagacaagagggccgccgcgaggcttataaccctcgtcgagaacgacgaggaaaaggcccgggagatcgtctcgaagatttatccatacaccggaaaagcctacatagtcggaataaccgggccaccgggggcaggaaagtcaacactactcgacaagctgatcagggtggccagggaagagggtaaagtcgtaggcgttatagcgatagacccgacttctcccttcacaggcggtgccctccttggggacaggatacggatgcagaggcactcaactgatccgggagtcttcataaggagcatggcaacgaggggttctctgggtggactggccaaggccaccaacgacgcgataaaggtcctcgacgcctacggctgtgacgtgatcttcgttgaaaccgtcggagtcggacagatagaagttgacatcgtaaaaacagcagatacggttgtccttgtcaccgttcccggcctcggggatgacatccaggcaataaaggccggtctcatggagatagcagacatcttcgtcatcaacaaggccgacaaggagggggccgacgccacctacttcgagcttaacctgatgctcgacctcgaaaaggaacgctgggagaagcgtggctggcggccgccgatagtcgagaccgtcgctaccacgatgaggggcatccgcgacctctggaaggcaataaacgaccacaaggcttttcttgagaagagcggcgagcttgagaagaagaggcgcttcagggcagaagaggagataaaaacaattgtgtcggacaggatagcgagaaccgttggcaaaaagctctccgaggatgaaatctccacactgattgaacgggttgttaagagagagattgacccgtactctgccgcggatcaggttattgaaaaggcactgggggtgaaggtatgataaagaagattgaccatgttggtattgccgttaagaaccttgaggaggccataaaagtctgggagggccttgggcttaaggttgatgagatcgaggaagttcccgaccagaaggtcaggacggccataatccacgttggggagagcaggattgagcttcttgaggccacttcggaggactctccgatagccaagttcattgagaagcgcggtgaagggatacaccacatagccctcggcgttgacaacatcgaggagcacctcgaaaagctgaaggaagccggctaccgcctcatagacgagaagccgaggatcggagctggcggggccaagatagccttcgtccacccgaagtccgtcaccggtgtcctcctggagctctgccagagggactgaacttctttttaatttctctaggcttctggaagttttttgcggtttttaactcaaatggttttagaggctgaaaaaactaaagccgcttcgctattatcggtacctttcctttcttttccgtgcttaaagcgttggctgtcttctcgtctagcaccgtcaggacactcttaaaccctatctctccagcccgtcctatcgctccggggatgtctttctcatctccccagaggaagaggcttgcctttctaggcctacctggcaaaggcttcaggacgtagtaggagttgcctaccttcccagcttccgcgagctcgtgtactccagcgaagatgtctttaaagcttgagaaccacatgtcataggaactctgaaatctgccggcgaccagttcaaggcctttcaccttctcccagggaaaaaacttaaggggccgaacattgtccccgctggatttggcagtggggacttccacaagccagttctcgtagagaacttcgtggaagcctagcttcctgtaaaatccaattgcttcctcgtccggctgggttgttaggagctccgcttttcctgcgaagctgccctcaatgtactcgataatcgccctgccgattccttttcctctaaagtcggggtgaacctctatgacatccaggtgggctattctcatcatctccccgtttatctgctcttccgagagaaagacctccgcctcaccaacgatcctcccgtccagctcggctactatggggtactgaccctcaagaaggagggcattgatgtggacggcgcacgtttctacgctcatccaggggccgccgcggaggtatctttcacgaacggaaaatcccgagagctcttccccagcagtgtgaacatcaactattcccttaacatcatccagggttgcgactcttatttcgaggttcaatttaacaccccctagcaactccttctcagatcttcccggcgaacaggagaaattcttttccgagcgccctcaccgagtaagccctcatctctccatcaagaaacttccgaatcgcttcaagggttttctcacgcctttttagtatctcccgtgcttcctccggagctactctcttgaacatgatttcagtaccgggcctgctctgggccagaaacggaaggtcggccgttatcacggtcgctatcttcgcgtagccgccagtagtctgagcatcgcgcatcataactatcggccttccgcttcccggaacctggatgcttccggggactaaaggactggtaacgatgtcgggccctttttcggagtgctcaataaccggcccctccagccggtagcccatcctgtcgctctctggcgttattacgtaggcagagctcagaaaggtctcgataccgttctcggtgaagtgttccaaatctgggccgaggacgacccggatttccacgctatcgcccgaatagtccggcttcagctttcgaggcagagagcaaccttccctgcccgttaagagagcgtagccaacactaagcctatcgcccgctttaagcggcctcccgaggccggcccttggataggccgaacagctccccaaaagtttctcgcactttactccgcccgcaaaggcaatatagccgtagaggccgctcctcaaagtcccaacttcgaggatatcccccctcttcgcccagtagctcgtccagggttcgattggtgttccgttgatccttacatcaacgtccccagccaccgcaaaaaccaccgaggcgttgaacctcatctttggccccgctagaaggaactcaaggagcggaaaatcgccggggtttccgacgaggtagttggctaccctggccgagaagtcgtccatgaagcccgagaccggaacgccgagctttcggtagccagttcttcccgcatcctgaacggttaagagtgatgggacgctgaggagctcaatcattgcttactcctccattcgcccctgtaaagctccacgaactcctcctcgctgattggtacaaacctcacttcatcgcctggctggagcagggtcggcggttctctgcttggatcgaagagcctcagcggagtcctccctatgagccgccagccgccggggctttcgattggatagatgccggtctgccttccagctatcccaaccgaacctgcaggaacttttagacgcggtctctccagccttggggttgctatcctttcatcgacgggacttaagtatgcaaatcccggcaggaagccgaggaaatggacgcggtaggtctttccggagtgtatctcgatgacatcgtcaacgcccagcccgttgtattccgctacgaactcaatatcagggccgtattcaccgccgtagaggacgggtatctcgattttccgacccttgaaggctccagtgcttacatcaagcaacggctcaacggccttcttaacgtcctcaaaggtaaccttcagcgggtcgaagatcaccgccagagaagagtaagcaggaacgacttcaaccagccacccgaagtcttttccctcaattgccctcgcaacggcgtggactctcgcgttcacttcgtcgtctatgacctcgccgaaggaaatgagaagggcggagtctccgaggggctttatattcacagtatcaccctttggaattcctgtacggtgggaccaaaactggaaggtctttaatcctaccaaagtgttttacatttcccgtagcgaccgtgagaccgtaaactgttgcagtagccgctattatcgcatctccgagggaaagtccgtagtccctcctaagttctccggctagaaccgcgatttcagttgtcaccgataaagcttcaaaatgagacaaaaagcgaaggagtttttcacgttttatagggtctcttgtgtctctaccagaaaacagctctgcaatcgttactgttgaaataaaagccccctccttgaccagttcgaggatgaactcccttgagccctcgacctttcgaagaacgtcgattattacgtcagtgtctattagatacatccctgtcccactccttccggagcttctcaaggtcgatgtcttcttcaaacagcccaaatacgtcgtttaagtcccgtatgaattcgtcgagtattattatcttgacccttttcttttctggaagtgtcagtttcttcagaggcttcaacacgccattttcataaacagcctcaatgacacccattttctcaccatgtatactttcgctacatatccataaatctaacggattatctccttcatcggcactatcttaacaccttcttcctccagcactttcctgatgtgcgcggctatctctacagctttcgggttgtctccgtggaggcagatggtatctaccttcagctcgacccactcaccgttgattgccctaacgccgccgtccttgaccatcgaaatcacgcgctcggctatttcttctttgtcttctatcaccgctccgggcttcgagcgcgggacgagggttccatcagggttgtaggccctgtctgcgaaaacctcgtgggcaaccttaacgcccatctcctcagcaatctccgcaggtctcgacccggagagggtcacgaagatcaggtttttgtcgaagtccgctattccctcgattaccccgcgggcgagctcttcttccttcacgagggcgttgtagagagcaccgtgaggtttaacgtgctggagctctatgccttctgctcttacaaaggcgtagagcgcccccacctggtagaggatgtagttccttgcttcatcgtaagtgagcttcatatatctcctgccgaagccgagaaggtctgggtagcccggatgagcgccaacggctacaccattctccttcgcgagctttaccgtcttcctcatgacgagggggtctcccgcatgccagcccgtcgcgacgttcgccgaggtgatgtacttcataacttcctcgtcgaggccgagcctatacctcccaaagctctcgccgaggtcagcgttgaggtcgaccttcacattcctcaccgacttcgtttcgacgcaaatctaaaaaagcctttctccaaggtttcctcatggacgatgaaaaggaagggaggaaaaaagcggtcatagactctgccttcttcatccagggggctgatgtggaaggtttaaccacccctggtgtcgttgaggaagtcaaagacccagagtctaggctctttcttgaggggctcatcagcgcgggcaaggttaaggtggttcttccgtcgagggagagcatagaagccgttagggaagcggcaaagaagacgggcgagctcggagagctgagcgaggccgacattgaagtcctcgcgctggcctacgaggttgatggagttctcctcaccgacgactacaacctccagaacatcgcgagaacgctgagaatcgagttcagaaccctaaagcgtgggataaaaaaggtcatccgctggaactacgtctgcatcggctgtgggaaaaagttcgaggagatgccgccgggagaggtatgccccgactgcggaagtcccgtgaggttgataccaaagagaaagcggaagagaagacctcaaaggcgcaggtatggaagaacttcgtcgtaaacctcgctccagtccacgatgccaacccttctcttaacgccccttcgtatgaggttcagtatctcctcgacgacttcctctggcgtttttcctgttgtgtccacctcaatcacgttctcgttctcctcaagcgcctcgacgaggattacatccaccagctcggcctcgacgttctccccaagcttctccctgccgtagcccctctccttcagcctttccgctatcagcttcgggttcgccctgaggactatcacaaggtcagccttgaggaagtggctcaggtgtccatccgcgacgacgtttttgcccttgaagtcccttccaaaggcctccctaagttcatcaacgtcgatttcaagctcattctctttcatctcgcctatacccttctcaagggcgtagtctctcaggttgacgtactcgtagcctagtttctcagccaagagctttgatatagtcgtttttccaacacctggtgttccggttaccgctattatcattatcacacccccatatgaatttaaaatcacgccccggacgggctcggcgctcatagggtacgtcatcgcccctgctcagcccgtcttggattcttcactgcccgcccgggacggcgtcagggccagtcctcgtcatcacaaacgctcggtgcaattcgctgtcatcatccgcaggttttcatctcatataataggatataagctttctcagctccaggtctcgcctcagtggaagcttcaaaaaacgccttagctggttgttctcggccatcaagccggtgagttcaatggcgaggattttgttgtcctcgctcagtccgtaggccttgaaacgaagcggtgcatactccttctccagctcccagactttttcttcgagttccttaacctttccctcaagctcttcaaggtctcccctcggcttcctgaactcgctggtgagggtaatctcgataatcttctctggagggactccgtagcgctcgctaagttgctctatctctctccaaacctcttcagaaagctcgacctctatctttcctaggcctttttcgggtttgattatgagcttcattgttcctcaccaatgagagactttatgacttcaataaacttctcagcgactttcagggcatctttaacttcatcgggctcgggagtgtacgagacgtcgtattgatcttcatgcctgagttctctcatcctgtcgaggagctctacccagtacccctcaagctttccagttttaacgtagaactcctcaaggtaccttgcgacgcagtagtggcttttctcccgccacccgtcgcggaaaagcactgctctggcagcatgaaacatcgcgaggtaggaggccattagggaagtcctgtatgagccgaactctctgttcctcttggcctcttccagccactcttcggccctcttaatgctcagcaacgctttctctctggaaggcggaactcttctcagcagaccccgctctaagcaaagactgaatcctgtcaagtctctcaccccatataacaatcgagccgtagacgagggaatagtaaaagatagggtcttctttttggagccttgatagcctcgacggcgttaaaactatcagatcaacttctctgtccgtcagctcggagatttttctctttagcctcgcggactttaatagttcctccttcctagcgaacacccaaacgtcaatatcactgtcttccctgttctctccggaggcaaagcttccgtaaacaccaagaccgagcatccagtcttctttgagtcctttgagcctttccgaaagcacaatgaagttcagaaacctcttaagctcccgagttttaggagtgtcaaggatgtggaactttctcccttttttcgcggcgatcccgtgctttacgagaaggtgaagggtctttgagaccagacccttgctgacgtcgagttttctcgcgacttcttctacccccaccgtactcttcggcagaacttcttcgaggatcctcacacgttcgggtgttgagagcagctcgtgcatgatagtgcctctcgttcatgatttatgaacttttcgttcacgctccatgaacgattcgttcacgttttgtgaactttcttttcctccagctcccttctcagcctctcgttctcctctctaagctcgtttctcacggtcaggaacttctccttatctgcttttgccttttcgtagaactctctcagttcatccagctggccctctatctcggacagcttctcttcgagctttttgatcttctcacgcagatgctcttccctctccgccttgagagtttcctcggccttcgggaggttttctctgataagttcctctatatctcgcccttttagggctttgaactttcctttcggaagggagatcactatttcttcactcacagaagcccacgctcctcgagataagagagaaattcctcgggactcactattttgatcacaccctttcccctctttttaaattcttcgtctctggcaatcagaacgtcacagttggaattaactgccgaggaaagagcaacggcatcgtaagggtcaaccccgagctcaagctggtatgtaagggcgtctagcaatgcaggaatttcagggatgtacacctcaagaccaaggtcttgaatatcgctctgggctatttttgggtctgcacctttcctcctaaaaacgtgcaccgactccatgattgtaaagatggaaactatacccttaatgttaccttcctcgacgagtttaagaacccgaagtgaggccttccagagtggtcttgatgttctaggatcgatttccttgaaccacacattgaggagaacgttggtgtctataaacgctctaatcataaccctcctcccgcagtcttttgagtaaggaaacgctgtcttcccccttcaacagaccctcaagacggccgagcatcctctcagctgttccaggaacggattttctctttcccttcatcccgattagggtgtttaacgtccgcatgtcaacaagcattctcccaccaccaacgagtaactttgaacactatttaatccttctcctctccagctcggtcttcctgtcgtagcaggtgatgtaaaaggccagcagacccttccacttcccgtacggctcaaggatttccctgacgtctttctctttaacctctttcacgctcttcccgaatatcttagctatacctctcctcagtccaagatctcccgctggataggtatttttcctcagcccataggcaaggaagagctctgcagtccacttccctatcccgcggaaggccgtaagatactttatggcctctttctcgtccatctcccacaggtcaagcttcagctcgcccttcaggtaaagctccgtaacgtgttttatatattctgcgcggtagccgagcttcgctcttttaagctcgtcaggagatagagaggctattttctcggccgtaggaaagacgtatatgttcccagctttttctccggccatttctacgaggtttcttatcgtcctctgagcgaactcgaagttaacctgctgttgtgctatcacctcaacgagggcttgatagggtgagggtgcggcgggaacggtcaagcctttgaactcctccacaaggaaagagaacggcgaatcacttatctctgaatagaaagagtcgaggtcagtgtcgaggccgagaatgaaggagagcttttccctagcctcttttttctccttccttccccatgtctctggaaagaggaagtccccgttgtaggccacaattccgactacgccgcttttcagtcggagtgcctggtagaaagtatcccctttgagcttccaggtgccgttctttaccatttcgtgggcggtctttctgatgtcgacagccatcggtcgagctttactgggttcctctttatatcccttagggtcattacccacagtctctttccgtctgcggagcgctttatctcgagctctccaatctcttcgaggaacctcatggcatctttgatgtggctgggatttaccccgaattcaccgcgaatgaattcccagtatggttccaccgttgagaagcgtgccgcctcccttacgattgtccaggcaacctttcttttcttctctccgcgggcaaccttgtacttcttcacgagctctcccagcatgggctaggataccaccaagttatatatagacatttcccgtcccttaaccaacgtccgagcaaaaggtttaaaccatgaaagttgtagcactaattgatgaagcctatgaagcgaccgatggtcttgacaatactcctagttgttctcatccttctcccttcggtaagcgcggagaagagagtcgtctacgttggaactatcgagggcactatcactcagtatacggtcgaccagtttgagagctatatccggactgcagaaaagaacagcgcggaagcgcttatcatcgaactgaacacgcccggcggtcagggagacgcgatgatggagatagtttcattaattcagaactccactgtaccggttataatctatgtatatccaagaggcgccatagcggcttctgctggtacctacatagcgatggcctcccacctgatagctatggctcccggaactagcatcggcgcctgtgagccgatcttgggctattccgccaacgggagcatagtaagagcacccgacaagattcgaaacttctacgccgcctacatgcgctccctggctgaggcgagcggaagaaacgagacggcggccgttaagtttgtcctcgaagacctcagcctcaccccagaagaggccctgaaggccaacgttattgaggtcatcgcgaatgaccttccagatctgctcaaaaaggccaacgggatgaggacgaaagttcctgtggctggaaagggttacgttacgttcaactttaccaatgtggaggtgaaaaggctcagtccatccctgagctaccagatagtaacgttccttgcaaatccggggatagcgtacattctcttaactgttgggatgctcgggctggtcttcggtttcctcaccccaggctggcacgttccggagactctgggagctatactgctcgtccttggggttataggcatgggctacttcggctacgacgctgctgggctcgtgctcatgatacttggcgtgatattcttcatagcggaggctctgaccccgacgttcggcctcttcacgatagccggactggtcagcttcatactgggaggtctgataatgttcggaaagggtggggaggtatacctcgttaacagcgaaactttctctaccttgagagtcatcataatagtaacaggagtcctgctggcactgttcttcctcttcgggatggccgctgtgatacgggcgcaccgcagaaggccagaaactggtaaagaggagatgatcggtgccgttggtaaagttgttgaagaccttgatcccgagggcctcataaaagtccgcggagagctctggaaagccgtctccaaagacggaagtctgattaaggtcggagaaaaagtaagggtagttggaatggacgggctgacgctcatagttgaaaaagtcgatgaaaaggaggtatgatatccgatggcaggttttggcaccttagtcttgggaatcgttttgctttttgttttgattctgctggcaagtgccataaagatagtgaaggagtacgaaagggcagtgatcttcaggcttggtagggtcgttggagctagaggtcccggactgttcttcataatcccgatattcgaaaaggccgttatcgttgacctccgtacgagggttcttgacgttccagttcaggagaccataacgaaggacaacgttccagttaaggtcaacgccgttgtttacttccgcgtcgttgaccctgtaaaggctgttactcaggtcgccaactacatagtggccacgagccagatagcccagaccacgctgaggagcgtcatcggtcaggctcatctcgacgagctcttgagcgagagggagaagctcaacagggagctccagaagataattgacgaagcaacagacccatggggaataaaggtcactaccgtcgagataaaggacgtcgaactcccagctggtatgcagagggcgatggccaagcaggcagaggccgagcgtgagagaagggctaggattaccctggcggaggcggagaggcaggctgctgagaagctcagggaggccgcggagatcataagcgagcacccgatggcgctccagctcagaacccttcagaccataagcgacgtcgccagcgacaagagcaacgtcatcgtcctcccgctcccgatggagatgctcaagcttttcaagagcttcgctgaagcgggtcaagcagtaaagaagaaacttgaagcagaggaacaatcagaatgattagatgtgtccttggacacattttatttttttggatatcaccacaaaggctaaaaagacttttatgtaggttccgataggcataatcaaattcagatgccatagttttgatcgggggtgctgagtttggaaggcagatcaatagtctttgcatctggaaagggtggaaccggtaagaccaccacagtcgccaacctgggtgtggccctagcacagtttggcaaagaagtgattctgctggacgcagacctgacgatggcaaacctaagtcttgttctcggaatggaagacatcccagttacactgcacgatgtacttgcgagggaagcagacctcaaggatgcaatatacgaaggtccggcgggagttaaggtcatcccaggtgggctcagcctggagaaggtcaagaaggccaagcccgagaggctcagggagctcatgagggagataagccagctcgcagatttcattctcatcgacgctccggcgggccttgagatgacgtccgttacggcgctcctcattggaaaggagctcatagtcgtcaccaaccctgagatttcagctatcactgactccctgaagacaaagctcatagcggagaagctcggaacgctcccgctcggtgtcatcctcaacagagtcaccaatgaaaagacagaacttacgcaggatgagattgaggccatccttgaggttccagttctggctatgatcccagaagaccctgaggtcaagcgtgcaagtgcatacggcgtcccgctcgtcatcaagaacccaaccagccccgccgctatagctatcaagcagctggccgccaaacttgcgggaatcaagtggcagccgcccgagccggagagcccgataaagagggtcttcaaagcaatcttcggagggaagaggtaatggcggcggcagtgttgtacgtcctgctggtgattctcctcatcctagtgatagtcctcacaatgctctacctctcagctaagaacaatccctattacgttgtttacgacgaggaaacgaagacggccctcaaacgtcgtgttctcaacctcaaggaggagctggagggcgagcttgagcagttcgacgttgaagactgggagaaagccctggaagagtcaatagacgaggaagttaaaaacctttgaacttttctttcacttctgttattaaacatttctgtggcgttaaattttaaaatctctttttggatactttagttgggtggggcgccatggtggccaggttgggatacaaaaacaagcttgttgaggttaggaatggcgttgtatacctgttcgatggaaagctctggagcgccccactcgagagggttgttgaatactaccgggagggccagggggctatcccggggccaattcgggaaatcgccagcgacctttatcgcgttcttcttggagaaaacctcgttagggaaatgttgaccaattcaggtgggcggtacggcgagacgacagccagctgatatacaggaacgagcctcaatcctagctttttttaagtggatttttccaggggaatattcaaaaatcttaagaactgtttttctttaatataccaatcccagggggtggtagagtgaaagccaagatccgcatactcgatatgttcagtgggaggtacactgttctaataaacgaggaagatgccaaggaggcaaagcttcacccggacgacctcgttaagatagaggcaggtaagaaggccgtctatggcagcgttgccctcagcaacctcgtcggaaagggtgaggtcggtataagcagggacgtacttgaccttcacaacttctcggagggcgaaaccgtcagcgttatccctgccgggactccagagagcgtccgctacatcaagaagaagatgcacggcgagaagctcaggaaggtcgagatagaggccatcgtgagggacatcgttgacaggaagctcagggacatcgagataagctccttcgtgacggcccttgagataaacggcctcgacatggacgagatagcggctctgaccatagcgatggcagagacgggggacatgctcgatattgatcggaagccgataatggacgtccacagcatcggcggcgtcccgggaaacaaaaccaacattctcgtcgtcccgatagtggcggcggcaggtttaactattccaaagaccagctcaagggctatcaccagcgccgcgggaactgccgacgttgtcgaggtttttgcggacgtcagcttctccctcgacgagataaagcgcatcgtcgagaaggtcggggcatgtctggtctggggcggtgcgctcaacctggcacccgcggatgacataacgataaaggccgagcgtgcgctgagcatcgaccccactggcctgatgctggccagcataatgtcaaagaagtacgctatgggcagtcagtacgttctcattgacatcccgactggaaagggtgttaaggtggagactgtcgaggaggccaggagccttgccagggacttcatagagcttggaaagaggctcggccagtacgttgaggttgcaataacctacggtggtcagccaataggacacaccgtcggccctgccctcgaagccagggaggccctctccgctctcatgactggcaaaggccctggaagcctaatagaaaaggccacaggactggccggaatactccttgagatgggtggcgttgcacccgccggaactggcaagaaaatggccaaagaaatcctcgagagcggcaaggcctgggaaaagatgaaggaaatcatcgaggcccagggcggagacccgaacatcaagcccgaggagatacccatcggcgacaagacctacaccttcaccgccgccacgagcggttacgtcacagcaatagacaacagggcgataactgccatagcgagggccgctggagcgcctgaggacaagggagctggaatcgagctctacgtcaaggtcggggaaaaggtcaaggagggcgacccgctcttcacgatacacgccgagcacgaggcgaggctcgaccaggcgatagtcctcgccagaaggactgaaccgataagaatagaaggaatggttctccagcgaatcggcaacatctgatcactttctgcattcttctacctttttcaggaattcttccctggtaaggcacggttcattcctcttcagcttgaccgccgccaccttgtagtttcctttccctgcgaagcggcagaccttcccgggttcgtctatcagcctcgcaaccgctaaagtttcgccgttgcactccacgtagtctatcaccgtatcctggaagcctgtaaagattatcacgcactttctattcgggttcagttgggcaaggcccttatcaatggggggcagttctttgacgacgcagttttcaggatatttcccagccttcactctcttgatgagctccggcggttctcccgttctttcaaactcctcaagttcctctctcgatacatcaacgggtttcagtgagtagcagagaattctcccatcgtggtacatgaagtaggtgccgtccttcaggaacatgaaggcaatcctctcccgcggcttatcgaagatgtagccagatttgctcttcttaaccgagtacatttttactcaccactaccctatctttggggacgcttatagccctttctgggcagagttgtccaattcattcttctcccttgactttctccacgactcttatgtcctcaatccttgtgaaggggtactgtccgttctcatccttctcgacggccttcaccatgtcccatatcgtcaggagggcgacgctgacgcccgtgagggcctccatctcaacgccggtcttgtagtaggccctgacctcgcaggtggcctctatgtagtcgtctccaaactcaaaggttatgtcaacacccgtgagtggtattgggtggcagagcgggatcagctcgggggtctttttcacggccaggatgccagctatctgggcagccgctataacgttgcccttcttggtctttccagctttaatcagctctattgtctcgggcttcagccttatcctgcctttggcaacggcttttctgaaaacaacgtccttgtgcccaacttccaccatcttaacacccttttcgtcaacgtgtgtcaaatccttcatttcaatccccatttcaagtggaagagcaaagtttaaaaccctgacccttagccacacttagaagcggcaagatttttactattaaatggggtgttattatgtcatcacaggctatcctgatcgaaaaccttacaaaatcatacggtacgttcagggccgtggacggccttactttcgacgtgaaagtgggggaagtttttggatttctgggaccgaatggagctggaaagaccacaacgattctcagcatgctcggcatcatcatccccgacgatgggagaatagagatactgggaatggacatgtcgagggagccgataaaaatcaaggagcgcatcggctacctccctgaaaacgccactatctacggcgaacttaccgcctggaaaaacctggagttctttgccaacttttacaggatgagcaattccgagagggaaaagcggataactgaacttctcaagagggttggtctctgggatgcccgctatcggaaggccaagacgttttcaaagggcatgaagcagcgccttctccttgcacaggctcttatcaacgacccggagctgttgatactcgacgaaccaacgagcgggctcgatccagagggagcgcatttggttaaggaagtaattcgggaggcgaaggctgagggaaggaccgtcttcttctcaagccacatcctcagcgaggtcgaggagctgagcgaccgcgtcggcataatcgtccgcggaaggctaaaagcagttggccctatacgggaaataaagcgtcagttcatggagcttgagggctacgagataaaggtggagacgaaagagcccatacctgagcttcggcatgaggaaatcaccagggttgagcgcctcgccccaaataggattatcctttttgcccgctcggatataagggagtggctctcccagtacctcacttcgaagggagtcactatcttgagccttgaggttgaagaaccaagccttgaggatgttttcatgaagacgatctacgggagggatgaggaatgaggaaagcctttctccttttgctgtccatgctccttcttttgcccctagcgagcgcccagccgtacgtgacggtctttgaaggacggattgcaccggaacatgcgataaccgtgggcgactacaccgttacggtggtcaaatcagcagtggggacaccgtatctcatgctgaagaaaggagctgaaattcttgaactcatgccctttgacttcgggcgcgaaatagagcgcgatggcatcagagtggttatgggaagctacaccccacagggcggttttgtggttgtctccgttaagccaaagttagtagcttcccttaaaccgaaggttggggagagggtctcgttcaacggcacaacggtcgaagttacctcggttggcgctgaaaccgttgatgtttcagtaaacggggtgaccaaaacgcttgaagtcaacggaagcgctgtggttgatctagtggcactcgaatacaatggaaaggagataagggtttacgtcgctgaccccgcctcggagatcgtgaacctggagtacgcggtcttctacccgtatcggaaggttagagcttctggacccgttgacgtgccgatcactattaccagctccagcgacgttgagctgaacctgaagctcggcattctctccctgccctctggctggaaggcgaacttcatctacgggggcgttgaggtgggtgaaatatcggttccaccgaagggaacggtcagcctgaccctccacattgagccgactggaagcggcgtggtgaagtttaccgttgggaatttcacaggcagcctggaagttgagagtgctggaatcgaagtttcaattccctacctaagcctggaagcggaagcgggaaccagcctgagcgtgccggttgccttcgcagggacgggaagggttgagttcacccctggaagcgttccacaggggtggggggtatatttaacggacggcaggtacaggctgaggagcttcgatgtcgatggaagcttcaccgcggagctggtggtggagataccgagaaacgcgacccttggagaccacaggatagagttcgaggttaacgggcagagctatgctctgaacgtttacgtgtacaagacgtacctcggagagcctgcaaagctcactgtaatcctcactgatgagagcggaaaccccattcggggatgggtttcggtcggcggtgagaacgttacagtttcccccgcgggatccgcaaactttgagctcaagccaggggagtacaccgtgctggctggcgcagagggctgttccccagtcgaagaggacgttaagctctccgatggggaggagagaaccctgaccataaagctcaggcgcgcggagtactacttcaaggcttccctagagagggatgtcctaaccgtaacatcaggaagtggggggagcgtcgcgataactatcaagaacctcggatccaaggacgacgattacagggtcactgttgaagggctccccgagggctggagctacatcctcagccaggaccccaaaggcaccgttccaatagcgagcattaaagtcccgagcggagaaagtggaagcgcatatctagtcatccttccgccgttcaacgtagaatccggggacttaaacgccacggtggtcgtttcaggctcaaactcaagagttgagcttcccctcaagattcatgtcgagaaccctgcgtccctccgcgtaaacgtggacaatccaaccctgacggttaaagcgggtggaagcaccgccactgcactctggctggatgcgatgggaacagttaccaacgtcaagttcacagtacaggccccgagcggctgggacgttgaagttgtcccatcaacgattccccgcgttgggatggggggaagaggcggtgtttactggtcaacggggccggcccaggccgaactcaggatccgcgttccaaaatcagctcccgcaggtacgtacactataaccgtgacggctgcgggtgatcaggcaaaggccgagaccgtggtaaccgtcagggttgctcagagctcaagcggcacctggatcggcatcctcctccttgtggtggcgttcggcgtggtgatatggcttatgaggagggtaggcaggagatgaaccccatctggaacctggctctcaaggagctctacgtctctgtaaagagcagaaggttcatcgttatcgttgtcctctactttatcatttttggactggccgtctactctatcaaggattaccttgtgcagatgggcgttccgagcgtcgactccaacgagcttggcctctggggtgtcagcgccgagatttacacaacacccctcgcgatgcttttcaccgtcaacatgacgataataaccgtcctcggtgccgtcttaggtgttgccctcggcgcggacgcgataaacagggaagtcgagagcggtacagtgagggtactgctcggccaccccgtctaccgcgacgagatcataaacggaaagttcctcggcatgggtttgctgatagccgtgacttacatggtctcttacatagtcatgatagccgtaatgctcatccttggaatacccctcgacggagaatcactttttaggagcttcctggcgattctggtgacaatgctctacacgatggtcttcttatccctgggaatcctcctctctacgctctcaaagaagcccgaaacctcaatgctggcgggagtcggtcttgccatcttcctgacggtgttctatggcatagtagtaggcatagtcgctccaaagctcgctggccccgaacctccaataggcacaagtgcctaccagatatgggccgatgagctccacgtctggatgaacaggcttcactccataaaccccgcccaccactatgttcagctggtcagctacatcttcgcaggcgacaggttcttcaactactacatcccgctgagcgattcactcatctacggcttcaacaacctcgcagccctgcttgtaatgctgctcctgccctttgccctggcttatgccaggttcctcacaagcgatctgaactgactcctctctttttaatgtcgaagaatcagaagaacaaaaaacagagaagttacatcatcccttcgcaacgcccatcggcctcattctcgcaacgaggttcgctattccggcctcatggacgacctggacgacgttgtccacgctcttgtacgcacctggggcctcctcggcaacgacgcggagggaagcggccctcacgtagatgcccctctggaggagttcgttcctgagtctgtcgccgcggtactgtctggtggcagctttcctgctcaggagccttccagcgccgtggcaggagcttccgaaggtctctctcatcgagccctccgctccagcgaggacgtagctggcggtacccatcgagcctggaattagaaccggctggccgacgtccctgtatgccctcggaacatccgggtggccagcggggaaggccctcgtagcgcccttcctgtgcacgacgaccttcaccttcttcccgtcaacctcgtgctcctcaagcttagctatgttgtgggcgacgtcatagacgatctccatctccatgtcttctgctttcctcttgaagacttcctcaaagctctccctgacccagtgggttatcatctgcctgttggcccaggcgaagttggcggccgctttcatcgcgctgaaatactgctgtccttcctcgctctggaacgggacgctcacaagctccctgtccggccacgggactccatacttcctgttggccttctccattatcctcaggtagtcgctcgcaacctggtggccgagtcctctgcttcccgtgtgtaccatgaccacaacttggccctcgaagaggccgtaggccttggctatctcctcgttgtataccttgtcaacgtactgaacctcaaggaagtggtttccggagccaagggaaccgagctgtggtgcacccctctgcttcgccttctggctgacggcatctggatccgccccttccatccttcctccttcttcgagatgctcaaggtctctctcccagccgtagccgttgtcaaccgcccacttggcaccgtcggccaatacatcgtcaagctgtgtccagtgaagcctcacgcggcccttgcttccaagtccgctcgggacgttcttgaagagggtgtcaacgagctccttgattttcggtctaacttcatcctttgtcaagttagttctgatgagcctgacaccacagttaatgtcgtatccaacaccccctgggcttattacgccctcctttgcgtcaaaggcagccactccaccgattgggaagccgtaaccctggtgtccatctggcattacgatggagtacttgtagatgcccgggagcatggcaacgttcgcggcctgctcaagcgtcctgtcctgcttcatcttctcgatgagctggtcatcagcgtagaccctgcccggtactctcattctcttgtcgaacttcggtatctcccagcgaatcttgtctatcctcttcagtggcaccatctctctcaccccaccccttaggtagccctaaagttattttaaggtttcgaggaacaaaaccgttactccgccctaagcctcctctccttcgggacgtagtttaggagtctcccgtctttagccttcgctgaaccgaggtagtaggaacgccacttcaggatgaaccagccgtagagattttcatcgacctcgatgctctcaccggccagataccttctcgcccgttcgtcgtccagctctaccacgttcttcgtcgccttcggcccgacaagaaagcttccctcgatggtcagccttatcccgtcgctctcgatccttccgaagtagagccagccgtcgttcctgccgacgtctagggggcagggcttcctcgcatagaccttctggtggttgcccctgatgaggtatatcaggtctagagcgtagccgtagttctcgatgagaagtctctttacaagctctgcatcgttcgtcttccctatctcattcctcgggttcgccttctcctcactcaccgccatcacccggcttgactatcttagctatgaagaacgcctcggtgtcgttgtcgttcgggtggatcctcaaagctttcttcagctcctccgagtactccttcccctcccattcaagcaccggctcgctggtcttaacggggaggtctattctctcaagcctcgcgtccgtcttcctgaggagataatccacgacctcctcgttttctagggggtctatcgtgcaggttgagtacaccataactcccccgggctttaaggccctgtagccggccaagatgagcctcttctgaacgttcatgtacttaaccacggctttctcgcgccactccctcaggaagcgccagctcttccttatcatccccaccgaggagcagggagcatcgaggagaaccctgtcaaaggtgttttcgaagcgggcaaagcttgccccgtctctggttgttaccctcgctatgagaactcccatcctgttgaggttggctatcagaacgttcgctctgtccctgtttgggtcgtttgctattatgcaaccctcgttctgcatgtattgcgctatctgtccagtttttgaccccggtgccgcagccatgtctagaacgagttctcccggcttcgggtcgagaacgaccggaggtatcatcgagctggcctcctggccgaagaccaggccgaggccgtgctccggaaccctagcgaggttgtccacgtttatgaagaagccctcgcgaacccaggggatcggctcaagctcaaactcctctttaagcctctcaacgatgacctctagaggtgcctttagggtatttaccctgatgctctgcctgagcggccttatcaggaactcccagaactcgtcgctgtcctctaacttcgaatacctctcgtaaaaggctggattcgcctccttaacaacgtccctcgcgctcatggtgatccctcacaggtctggaacgaactgcgccatccatcttccatcggggagcttttcaatcttcatgtcgtggtacgttattgccttgacttcttccttcggctcgtgcttttctgggttgagaacttctccacaggccttggctttgagtttgtagccgttctcggtcttctctatccgaaccttaacgtccccgaaaaccagcccttccatgtcgtggagaaccaaaagctcctcaaggaagctgtatagaagtgcctcaaggtcttcctcctcaacttcaacttccctgcactccttaggctcgactttcttaacgttcaccatgacgtcgaagagaccgagtgcaacggcctcaaaggcctcctccagcgttgagccgtaaccgcgaacgcctatatcagcagtgtgctcgtagtgttcccatttcctcatactctcaccccctcacccattattctcttttctctatcgtctcgcatctccctcacgagctttccgctgtcctctcttggaacatccagaggtttaaagaactcccattcctcttccacgtttccacctgaagagaattcgagtgagtttttataaatcccactaatcgaaaccgttaattagaccgccgtctaaatggtaggggtggtgacatgagggagataacgccgaggaagataatcgagatgaaggggaaggaaaagatagcgatggtaacggcttacgattatccctccgctcttctcgccgacaaggctggcatggacatagtcttcgtcggagactcgctcgggatggttgtctacggcgagcctaacactctcaacgtcagcatggaacagatggtcttccacacgcgggcagttgccaaggccgtaaagagggctctagttctcgcggacatgcccttcggaagctacgaggtcagcgtcgaagaaggcgttaagaacgcgatgaggctaattcgggctggagctgatgcggtaaagatagaaggcggctacgatcacaaaaagctcgttaaaaagctcgtccgcatgggaatcccagtcatgggccatacggggcttactccacagcgctacctccgccttgggggctacagactgatgggtgagactgaggaagagatcgaggagattctgcgcgatgccaaggcccttgaaaaggccggcgccttcgctgtggttcttgagttcgttcttgcagatgtggcaaagctcgtgacggaggaggtttcaatcccgaccataggcatcggggcggggcctcacgttgacggccaggtcttggtgtggcacgacctcctcggaatctacgagaacgttcccccatttgtcaagaagtatgccgatttagccagcataattcagctcgccctcgagaactaccgcggggaagtcaaagagggtagattcccggctaaagagcactactgggagttcctcgacaaggacgacttcgagagaaagaagatgaaggcccttgaacgcctggaggacgaatgatgctcggtggtatgaggataagcgtggtaattcctgcatacaacgaggagaagcggcttccaaaagtccttgagaggattcctgagttcgttgacgaggttattgtcgttgatgacggctcgtctgataatacttattcctctgccctctccttttccgaaaaagatcctcgggttaaggccttcaggcttgaaaagaactgcggcaagggctgtgctatgagagagggcataaagcacaccacaggagacatcgtggtcttcatggacgccgacggccaacaccttccagaagagattggaaagcttgtgaggccaatagttgaggggagggcagacctcgtaatcggtgcaaggaaggtcgaggtgcagggtaagagaccactccacaggaggctgagcaacataataacgacgaggctcatcaggctgaagcttgggacttacgtctacgacacccagagcggctttagagcttacaggcgggggtttctacccgagatagagagcgaccgctacgaggtagaaaccgagatgctgataaaagctgcaaaaatgggggcgaaaatagtcgaggttcctgtcagtatgatatacggtgtggagacaggacattttagggctgaggatgtattcagattcctgctggccctgttgagagggtgattgcctttttaggggctcttgaattagcgtttgttgtgtctcttattgttcagcagtggtccatcaaactcttcagctcttttgagaactcattggattttctacccaaaatccaaaggtttataagaagtttttgcaatccctataataagggttgcataatactcaacggattcattggtgcaaggggatacgagcggcttgttgcagttgtgctcccgggtgacagggattgtatcagtgtttgcagtggcttttctactaaatttttgacccttttagcgttagggcacacattgtagataactggtgagaaatagtccagacatcaaaagggagctactcagcggcaatgatgagcaggtgttggaagtgagaatggccttccgataataataatggagccgggaccgggatttgaacccgggacctgcggattacgagtccgccgccctgccgagctaggctaccccggcacgtttaaaagtggggggagagcgatttataagctttttcctcatggctggttcagtagcgccctgaacagcagtatccacttctggggttctagcgaaaacagcagcaaaagagccgccagcagaaaattcagtaaggtgacggcactcagggatctaatctccagctggtacagggttcttggtatttttgccatccacccatcggtcagcgatgaaattgcccacgcaaggaggaacccagccaggacatcgtatatccagtggtgtattagtaagaccgttgcaaaggggatcagggtgttgatagtcaaaagcacctttccaccaagccttttccggtatttccatatggtaattatgtgaatcgccgcaaacgtgttgtggagtgaagggagtacgaactcctgcctcgtaaaaaggttgtcagtgtcgtatcctggaacgttgtaaacgtagtgcggcgcataaatgtggaacgttaaatatatcgctcccgccgtggcataggcgatgaagtatctggcgagcagttcatccgacgtttggaagtccttgaggtagataaggacgtagagaaccatgaacgctatggatccagcgaatccaatgtaataaactgcgtttaggagatggtatacgggaggaatgcttttagttgtgtttaacagtgttagaatgaaatcacgagagttgaacgggagcttgataaattgctccgttacgtcaacactccaccgcccgatgtatatgtacagaatactgaaaaacatccacccaaagtaactcaaaagaaacgcgtttagtctaactaggacgtcttttgcgatccttgatttgatgtcatcacaaagatggccgttcacttctcatcaccaggagtcaatgatttaactttcagtagtatcatccccagattttggacattggcttataaaattttttggtagtatccacgtcaaaagttgaaactaactcagatcaagtcctggaggatcttttggaactcccccaaagaggcacggacaaccgggtatttgggcgtaaacggacatgggggctctttccttgaacttatctcgaacgtccctatttcttttgctattctcactatctcctccttgtccagtcctatgagtggccttaagattggcaggtcgctggcagtgctcacaaccatcaggttgtcgagggtctgggaagcgacctgtcccagagagtcgcccgttattattgcactcgccccgatttcgtggccgatcctgcaggcttttctcagcatcagccacttgcacaggacgcaggtgtatttgattttcccgagttctctaagtttctcaaaggctggaacgtgttcctcggagaagttcacaatgattgggtcgctgagcttcccgtagcgcttcaggatctcgactatctccgaggccttttcttccttgatggagtcctgcctgaagtggatgggcgttatctctacgcccctcctaagcattaggtaaatggccacgggcgaatcaataccagagctgagcagggcgacggctttcatggtctatcctctctggagacccctttaaggctctttccagaacctaaagtttgaaacctttaaggagtaagaggccaatgtaagcgaaccacgctaatatcgtggcagccccaaccagctcagggattgcgagtcccttgaagaccctcgtgaggtagagcatcgcgaagaaagttaggacggctagagcgctccacaggtagccaaacttcactccggagcgccagagcttgatacctattatcgctatgtcagtcagcgccagcaggtagaagagaaccgccgatggcgcgtggagcgccttttcctcgggaaagacgccgacaaggaacaggaagatcgccgccgctggcatcaagtagctgagcccgtttctgaatgccgctatcgatggaaccagtgttatcagcgcgtaaaccatcaggaagccgttgaaccaccaccgggcaggatttttgagagagcccatgtcgctgagggcgttgtcggtgaaggagaaccaggggttctgatgtatcactattgaaagtccgactgcaaagatgatgggaagagaaagcgcgacgtaacccccaaacttcgcaagttcacgtgctcttccctcctcagcaatcccgctttctcggctcctccccgaatatcgccatgtaaatcttcctgaactcttcccatgaacctctaatcacgggatgcttggggatgaacggtatctcgtcctcagggagagttgaaagctcaaacgtgcctatcttcttcgctatgtcgactatttcctccttgtcgagccctatgagcggacggtagatgggcaggtcgctcgcctggctgacgatgtacatgttctcgagggtctggcttgccacctgtccgagcgagtcgcccatgactattcccttcgccccgaactccttcgctatcctgtccgcgtgcttaaccatcatgaacttgcacagtacgcaggtgtacttctccttcccgagctctttgatcttctttagcatctcctctctgttctgcggttttacgacaataagctcagcctttccgccatagtggtacttcttgagctggttccatatcttgcgcaccttttcaagggtcttttcgcccatgtatatgtgaaccgggatgacctcgaccccgcgcttcatcatcaggaaggctgcaactggcgaatctataccgccgctgagcagtgcaacgaccttgccctgcgtccctatcgggagtcctccccaggccctgattttgtcaacgaagatgtaggccttcccctccatcagctcaacgccgacctcgatgtcgtattcgtgcagattgacctcgctctcctcgttttcgaggatgtactcacctaccttggcctggatttcggggctcttcagcgggaactccttggttatcctcctcgcggtgaccctgaacttcggtttttcaaggttgagctccctctttttcttcctgaagagtttgagggcggtcttgttaatcttctcaagctctgcatcgacttccatcgccggtgaaagcgatactattccaaagaccctcgtgaggacttccgttgcttccctggccctgtttgtcctcacaaggactctgccgtgctttgcctccactttcttgaagtcgatcccctcgctcacgagagcctccctgatgttgttcatgagtatgttctcaaaccaccttctcgtctgccgggacttcgttccaatctcgccgtacctaactatgaccacgttgaacataacctcaccccactggagcctttatcactatctcaacgtacttctggatgacctcatagaggacgaggccgaggacgtaggatgagagcagtatcagctcgttcatctcgaatatgtgcctggcgagctccttggccctcggcgtggcattaactatcgtctgcatgtactttctcttcagtttttgattgatcaggatgaagcccacgagaatcagaacaccagctaacccccacatcttcccaaatccgagcatcaggaagagcgttgaagtcattgttagccagccgcctacgagaccgagggctatgacgaactctatcatcctttcacctggagacgtagaagaaaaagaggataaaaaagtttgcttgttcattcagagtatccgcgtaacctcttccacgcccttctttcttctccgcggtttcacctcatccctcggccttccaacgggaatgaggcccacgaggtagtagttctcatccagaccggcgagctctctgaccttctcctcgatccctctgaagttcgtcacgccgatgtacaccgtcccgaggccgagctccactgccttaagcatgaggttctggatggccatcgccgcgctctccacgctccagatgaactcgacctcgtcgaactcccgccccttgaggaagcgaaccctcctgtctatgaagaccgcgatgtaggccggcgcccggtacattccctcctcataaattctcttcataagcttcttaatcttctcctccggcaagttcactgcgcggtagtactctaccatgccctctccgataaggtcgtagatttccttccgcacttcctcgctcttgaatacaacgaaaagccagttctcgagtccgctggccgtgggcgcccttatcgcggcctctatgagcgcccttatctcctcgtcgcttactgggtcatctttgaagtacctcacggatgcacgcttcataatagcttcgtcgagcttcattgttcttcccctaaggagaaatgggtggggggcttatttgtttttgcctaaatttttcactctcatgagactcctttatggggtcgattggaataaaaaggttatctacactaactaaaatagagccaagagagcgacctataagcgttaatcctccagtatctttgagaggattttgctttggaaatcaaggggattatataacccctttctgcctcagaacactcaagtagtcctcataggtcaatggacactccacgaagtcttgaaacatatcatcctcttcaagatgcagctgtttctttattctccttaaaaggtcgttcccgagctctttcttatccctacctctgctgaacaccgttattaccctggtcttcttcccttcaacgtaaagaatgtacttcgtgtgcctcccaccctcctttttctggaagcccttcttttccagtgcccgctggacatctcttgccttcatgtccctaaacctccacgagctgaaggagagcttttctcagttctttggcgctctcgtcgagaatttcttcgtcttccaagacgtattcctcgatcagggcttcgaaaactttctcggcatcatgaagggcatcgttcagcgtggggccgcatccgtaaacttcaagctccctgttctcgacacaccaggttccagcctctctctccacgttcagcgtgaggggttttctaagcttataacccccaaactcgccccttatctcaatgactctgggaatgaaatggattagcttcttgggattctgaagttcaagctttatctccttcagttctctctcgatctcctctattttcttgaggaagtaggtgtaatctacggcctcagccatccataaacctccttgctctctgaatggatatcgtcctaaaaacattaaaacattttggaatcatccctgatacttcaaccacttgaaagccgttgcttttagcccgctttctacgaattggagggggtgtatacaaaatgtttatatgtttgtactacaaatttttccctgggtgaattacgtgggaagcgttgttagtgtccgcgtcccgccagatgtcaagcgggaaatggacgagttaaaaggcgagatcaactggagcgaggagattcgggagttcataaagaagaaaatcaaagagtacagaaagaaaaaagcccttcaggaggttgtttcctacatccaaacccttccagaggctccaaaggggacggcacaaaagctcgtgagggatgaccgtgatagtcattgactcctcagcattctcaaagtttcttctaaaggaggagggctgggagaacgtgattccttacttggagccagaccttgagcctcacgccgttgacatgctggcccttgagactgcgaacgtgatatggaagtacgccagaaagtacgggttgataacagaggagcaggcttttgggctctacgaaggcatgatgaagctcgtaagggaggaagtgataatcctggagtctagcggaaaatacctgggggaagcgttggaaatcgcgatgagatacgacattcctatttacgacagccttttcatagcccaagcaaaaagcctcagggcgaaactcgccacgagtgataaaaggcaagctgaagtcgcaaaggtacttggactggaagctgtctatattggctgattagaaatgtggaagagattgtgccttgtatggatttatgtatttctttttatcccaaaggtttaatagctccatttctgaactccctaaggtgaaagacatgtacggatggcgcggaaggctcggccttatagttccatcatccaacacgacgatggagatggagcttcataattacctgcctgagggtgtttcacttcacacatcgaggatgcccttgaggaacgtcacggaagaggagctcgtcaagatgagctccctcgccgtggagagcgcgaagctgttgagggatgcagacgttgagctcatcctatacgggtgcacgagcggctcgttcatcggcggaaaggactacgagaaggagcttgaagcgaagatagaggatgaagtcaaggttccagtcataagcacgagcaccgcggtgatcgaggcgctcaaaatcctcgatgcgcagtcaatactcgtcataaccccctacaccgacgagataaacgccagagaaaaggagttcctggaggccaacgagtttgaggttctggacatcagaggtctcggcatagaggacaacctaaaaatcggcaggcttgagccctacgaggcataccgcctggccaaggcgagcttcatagacgaggccgatgcaatctttatcagctgcaccaactggagaaccttcgaaataattgaggcccttgaggaagacctcggcgtcccagttgtgaccagcaaccaggcatccctctggctcgccctgagagagatggacatcatggagaagattccagagctgggaaggcttttcacggagtactgacttttccatttctccccatacttcccgaaatccttttaagacctaccaccatttcaacaacgttagtcactgagggtgatacacatggtcagggagctcctggagaaggcaaggggactttcgatgttcacagcctacaacacaaacgttgacgcgatagtttatctgaacggcgagacagtccagaggctgatagacgagttcggcgccgaagccgtgaagagaaggatggaagagtatccgagggagataaacgagccctggacttcgtcgcgaggcttgttcacgcacttaagacaggaaaaccgatggcagtgcccctcgtaaacgaggagctccaggcatggtttgattctcacttcaagtacgacgttgagaggatgggcggccaggcgggaattatagccaaccttctggccaacctcgacttcagggaggttctcgtctatactccccacctggccaagaggcaggccgagatgtttgttaagaagccaaaccttttctaccccgtcgttgagggtggaaagctggttcttaagcacccgtgggaggcctaccgcgagaacgaccctgttaaggtaaacagaatttttgagttcagggccgggacgactttcaggctcggaaacgagacgataaccgtccccttctcgggcaggttcattgtttcggcccgcttcgagagcataaggatatacaccgagcccgagctgaagccattcctccccgagatcggccagcgcgttgacggtgcgattctgtcgggctatcagggtataaagctccgctattcggacgggaaagacgccaactactacctcagggaagcgaaaaaggacatactcctgctcaagcgcgagaaggacgtcaaagttcaccttgagttcgcatcgattcaaaaccgcgagctgagaaagaaggtaatatacaatctcttcccgctcgtggacagcgttggaatggacgaggcagagatagcatacgtcctcagcgctttgggctacgacaagcttgcggagaggatattcacttacaaccgcattgaggacacggtccttggaggaaagatactcatcgatgagatgaacctagagctcctccagatacacacgatatactacatcatgtacatcgcccacgccaacaacccgctgagcgaggcggagctcagacagagccttgagcttgcaacaactctcgccgcttcgagggcttctcttggcgacatagcgtccccagaccagataagcgttggaatgaacgttccttacaacgagcgtggtgaatacgtaaagctccgcttcgaagaggccaagaggaggctgaggacgaaggagtacaagctcgtcatcattccgacgaggctcgttcagaaccctgtctcaaccgttggcctcggcgacacaatctcaacaggagcgttcacgagctacctggcgatgcttaaggaaaaaggtgagctctgattttcttttcaggtttttgtttgttcgtttaggcttctagcccgcggaggagggccatttgcttgggatcccatgccattggatctgttaccagataaacccgtccgctggttagtatggcataatccctaacaagatggaggaacttgaggacactctcaaaaccattgtaaacggtaaggtattcaaggcagtcgattatcacgggcacgtctgggttgtgtttgaggtgctcgactattccttcaaggattctgtgcagttccctcggcccaaaatagcccttaaccgagctaacgggtatcagcttccatcttcttgggacctctgtgcccgccctgcctattaccacggccctcttttcagggatatccctaatcgattggactatcctgaagtggtacttttctccgggggaagacgcgtcctcattcgagagcaatgctctgtgtttaaacacactgaacatccctatcccctatcacagtctttgcggcgggctttaaatcccttttttgtaagtacctgtgtaggtgtccctcagacaagaccgatgtcgtcaccgttcggccggttgatccgtcatcatcggacggcatatacctaagggtgtgggtttatagactttctgttaataagatggaagaaagagacatcagaacagctcttcgagcttcacgtcgatcttgtcggggttgaacggaaggacgtgtctggttgtcttcggtgaataaacctcaccgcgcttgacgagctccatgacttcctccttcgtcggggccttcctgatgaatacgtagtctatctcacctttggccatgtcctctctcgcgtcctctttgaggccgtagtaaatgagctctatcttcccctcaacgctcatctcgtcgagaaccttgctgactttcttctgctcctcaaggccaccaggaatggcgaagctcttctcgccgacgagggcaaaggctatctcgcccctctcggccttctcttcagcctctggatcctcgatgacctcaaggccttccttcttgagcctctcaaccacctcgttgaggtcgcccttgaaggcagggtaccaggtgtacaccttgacgtcgtcactgaagtagtcgaggataaccgagggagccctcttcgcgccgagcttctggaggccggcccagcggtggtggccgtcaacgatgaggtacatgtcctcaccgggaaccttcgcgaggagcatcggcttccagaagattccggagccagtgacgctctcaataaaagcttcaagctccttctgaacgagctgttcgtggggcttcatcttgtccagctcgataaaaacgtagtcaaccttcttcgtgggtatatcgtacttcggaaccttctcaactcccattcctgaccctccgtaaccttaacctgcagacgggaatcgaaacgaggggataaaaggctttccatcgagaacatggggaaatttacggccattggtgaacacttcagctcatcctagcaaaggttaaaacaccaaacgtacaaagcggaggtgatgaggaacgttgctgatttgcccctccacggcgggcacgtccctcaatggctcgcacgaagaatggggaagctaacaaggctagttctcaagctcgctgttgaagagtacggaacaagaggtctcctcgagaggctctccgatccagtgtggtttcaagccttcaacaacgtcatcggtatggactgggactcctccggttcgacgacggtaactgcgggaatgataaaagaagccctctggaaggaggaactcggagttaaagtggctggggggaaggggaagaaaagcagggcaacaccggaggagctgaagaggatagcctctctttacgaccttgatccagagccatacgtgaggacttcccgtctggtggccaaggtcgacaccgttgccctccaaacgggctaccagctctatcaccacgtcttcctcctcgacgaggagggcaactgggcggtcatccagcagggaatgaacaagagggagagaatggcaaggcgcttccactggttcaacagcgaaaccttcaccctcaacccccataaggccatcgccggtctggagaaggagttcgcacttaacaccgtctcaagggaggcgaaggagtaccagaagacgctcctcgacgttgttcaggagagtcccatgaaaatcgagagagagcttgaaagcctgaaggcaatagcgaatggctaccgtccgctcgtctactacaagccgagggagccgtgggagaaggacgttataaagcgctacgagagccttggaaagtttgagcttaacaagagagcccttgaatttgcaagggagctgagcgtcagcaactatgaggagtttctgcttttgaagggcctcgggccgagcactttaagggcgctctcgctggttcttgagctcgtctacgacgtccatccgagctggaaggatccggtaacccatccacctgatccgttcaagttcacctacgctgtcggtggcaaagataagattccatttccaatagacaagcccgcctacgacgagctgatttcattcctcgaggagctcgtgtcgaagcatcccaaagaaaaggccctcgtgaggaacgtgacaaagataactaagaactggaagttcccgaagtgggagaagagacctacctagcccgcagacaaaccatagctccctgcgggacctccagctccctcgctatcggcctgcacttcgccttgagcaggtagaagaccctttcatcgtttatctcgctcagggtttcaaagttgccctgacccttagcgattatcacgtcgactttctcaaagattgccctgaactcatccgaaactctatcaaaaggaacccccacgatcctcgtgcccgttgagacaaccctcccaagcttctcaaagccagcattctgtagatcttcaacggttgcgtcgtttattattggaccttccttacccgctatgtagatttcaaggcgcgggaaggcctccttaagctttttcaggaacagcctgtcaaagtaaatctccccgcagttgtcggttagatagagaagggtctttgcgcttttgaggaccttgaaaagctcttccgaatggtcgatgtagagctcctccccgagcatctccctaacgtcctcctctattttctctggagagtagccgaccgcgaagtctatcacgttcccaatgatggcgagctttagggccgttctgaggtctatctcctccttttcaagatcactaactactctctccgcgagcctgttggagagctccttgtactctctaaacgggtcgtcattgcctataaccctataaaccccgaggaagacatcgctcccgaagattgctggaatagagtcttcactgatggttgccatcagcctggccgcctcgaccacgcccttctttctgagttcgaggtcatcggtccccatctcgactatcctctggcactggttggcggcgcaggcaaagcactcgtagtggatcttcattttcccaccccccgcattttgtccaggaggattaaattttttgtgtatatcggaactgtcatccctactgggaaagagcctctttctggaaaaagcttcccagagaaacccatttttattcactcgttatccatgagtttgctttgtaatcgacgtccgaagtgtgtcaaggtaagagaaactactttccaattgagcaattgcaaggaattcatccactttttaactcgtgatacgtggaatccttgtagattgtgtttctccttttttaacgcccgaagggcgttatactacgaataaaccctctaaaaccgctaattgggcattgagaatcattgaaaagcaagatgctcaaaaggacattccctctttgatgaaactttgcccttcaagcttttggaaaaagcttgaccaaaagggttcccttctcctcgagcttgcctgttagggaagtatatgctcctatagaaggcaagctcgcacgggtttaactccaagatttcctcgctaattgagattttaacttccttttttagtgtcctttggacactatacggtgagaaaatcccgtaagtttggcagattggcgagtaaacccgcttaaaagctagcttgttagaattgcatacttttcttccgccagcgctgaaactttgccagcaaagtttcatcaaagtttgtggttcttgattagagggctgttttgattaggattttctttttgaatactgtcatggttgtgaattctatttttaatttgcccgatctgtgtgagtttgctttgtaatagacgcccgtagggcgtcaaggggaagaaactcctttttacaggtcgaaacttaggggattcactaaattgtggctaatttatcatgaaaatcctcttagaagagcaattttagaaggaaccacgagccttgatcaaacttcgcgcaggagaagtttgtattgctggcgggcccggcgggattcgaacccgcgacctccggcttagaaggccgttcccttaatgaattgtgggctgctgaaagggccaattttgcagaatggctctctgctgaagttggcgaagaaacaaggaaagactacgttagagcgctcgacaggctgtttggtcggcacgtgataagaacactcgaagatctagagaaggccctccgcgctgaaggatacaagcggaatgtttcaaaagcactcagaaggctcgcaaaatacctcgttgagcgcgacatcatcgactccaacagttatgagaagatcaagaacatcgcgaagctcaaggcgacgggagttagggaagtcttcatcacgaacgaggatgtgaggacagcttacaatgaggtacaaaaacgcggaaagcccgctgaaacactcttcctcttgctggtgttctctggcatcaggctcaagcaggctgttgaattgctgagaacctacgatccgacaaagctttacctcattgatgacaaagcggcgcggtacccaattttttcaacaagcaaaggcaagaagaaggccttttgggcttacgggccgcgagactttttcgagagactcgaacccctggaggtaaagtacaacactgcaaaggatctcgtagcttttggaaaagtctcggctaacagtatcaggaagtggcattatacgttcctcattcagaaaggcatgccgtcggagattgcagactttattcagggccgtgtgagcgggagcgttggagcgacacactacctaaataaggctgttttggccgacgagtggtattctgcagtcgtggacgatttaaagagggttctggagggtggagaatgagcgtttggggctggcttcttgggtttctcctgctcggagcgatactctcaatactctatgacatactcttcaggccatggaagcttgtcagagaaggcatcaatgacttggagaggcaactcaagctcttggacggtcgctttgcgcgcctacgctcgttcatcatcgctccttggctttggggtgacgtggagcggacgcgcactttcgtttctcacaagctcgctctgaagcgggccgagttggagctttttgaaaagctgaaggggggtggagaatgaacccgattcaacttatctggctgtttttcggcggagcgttcgtagtagtgctctccgcatttgcctatgaagcctttatggagtggcgggaggctcggaaatgggccgagcggtacagcaaagtcatgaagaaatgaaaggaggatgaggtagtgattgacctcatgcctgccctcgacaaggccctctatcaagcaagttgctacacgatttgtctcacattgactttctttttcgtgctgacacttgttatggttgccctcgtgttcgtgctgatctatttgaaaaaatgtaggaggtgagcggaggaatggcccaatctaagtttgttcgtggaatatatattgattcggaggttgagaaaagggcaaaagcccttgccaaggccaagggaacgagcatcaaccaggtattcagagaggcggttctgaaactctatcggctggaactaggtaacacaaggccggaggaaattcttgagggctgacttcttttttacgcttaatttaagcttaaaatgttcttatttgcttttaaactcctcctgcgacttttctctggcgcctttgggccttcctccgcttaaatcagttctcgtcaaattggcaaagccctccggaggcggtagtatggacgacctagatgggatttctcgggagattgaaactctcgatcggtacgctgagcgtttgaggagacagattgaggcagcgcagagggagctcgcgcgagtcacgaggaagaagcaacagctcctcgcagaggtttctaagctcaaaaaggcgcgcaaggtgatggcagtatgaagacaaagagcctcatccagctaatcatcttctttgtgctcgcgggagcgtggtactacatcgcttggcccatgatgacaaaggaggctctagcggtcggagctgttggcggcgtgctcatgcattgggcgctcacgaacaagggaaacaaggctttagtaatcatcgagccctttacatcaagctggcgcgtgctcctctatgacatgatgctcttgagcttcctggcggcactctggcaggcgaacggtgcagctcttctcgacgcgctcaaggactctgttgagaacctcgcgcttctgctggccttgctcggcggcattggtgttgactacggagtggagggatgaagagatgaagaaactcggtgttttgctcgctctgttggtgctgttcggaacgctggcaacgggcacggttggggctgtttatattccgtctagtggagatttcggggtgtatatctttgggtcttcgtctaatgtaacaatatcggacggtcggttggtcttagatgctacggggtctgagtacgtcagggcttggcttaatgttactgagtttcaggctatcgagtttgattatcaggcgtacgcaaataacgttttatctggtgtgtcttttatgtcagggagttcaggggttggcttaactttcattgagtatgatacgggttcaatcgaggttaggaaaatctcaggggctaattatcctcagtatgatgggagtagcgacactataggtggttctattgatgcagggacgagctttaggaataagtacgtacattttagaattgagtttcagcagaggggcacggagtgggatttactggtatataaggacggtttcttattgtataatctgacgaatgttcagcagcatattgacccgttgtcaatcgagaaggtagtttttggtgttccggctgtaggcattggtaataacttgggctggcaggggaaggtcgagtttaataatatacagatttatgaggttgagtatcatattcagctctcgctcaaggatgctctgagtaatcaacccctcacgggcgttacggtgaaggagaacggtaacgttatcggcacgctggtcgatggtggaagtttagatttaactaagggcactcatacactcactttcgagaaaagcgggtactggagcgtcacgaagacgatagacgtccagggtgacatgactgtcagtgtcgagatgtaccctgacagcgccgccttcaagtttgaaaacttcccgtctgacatcagcattcccgagaacacgatttacacgctcactttcactctctcgccgatcagcaccgacgcggcttacaacacttacctgagcctgagcggcctctccaacgtcctcgaagtccagaaagacggccaggccgtctctcccgagtcgggcaagtactatctcggcgacatttcaggcccgacacagatttccatcaagttcaaggcgggcgcggtcggccagcacgggttcactctgagctttgagagtcatgacgcaataatgagcaagacctacacgacgacaaagagtgtcacctacaccgtcgagccgctcccgttttcggttcagatgccctctgaatggcaggtcggccagaatgagcttcgcatctcggaaagcagtggccagagttacctcatcacggcggttctgaaggacagccagggcaacgaggtttggagtgattcccacgccttcagcccctacgaggcgtactccttcagcgtcaacgtgccgagtgagggccagtacacgctcgaactccagtggaacggccaggtcgcgacctatgacgtcaccgtgaatcctgcaatcacgctcaccacgaagcagctgacagtcgagaagggtggcgagggcacgattgtcctccacttcaagaacccgtcgagcgatgtgcagtattacacgatcaaggtctcgggcggcttcctgccgagcgagatcaaccagagcatttcggtcggcccgctcaccgagaaggatgttagcatagccttcgccgtgccagaagacctgacttacgacgcctacgagctccaggtgcaggttcttcagggcaacgcgacggtcttccaggacaaggttgccgttagcattggagattctggagggttcacgctcttcggcggctcaagtgggaacacctggctctggctcggtgttggcgggcttgggcttctcgccttagttggacttgccaggaggaggtgaggtaatgaggctcttcttttcactttttgagcagaaaggaggcgaggaagaagagcaggaaaggaaaacctgtaatagaaaaaagcgcctgtcagggttactgttactcctcatttttaccacaagcatctatgcacagccagccctagcgtttgacttcggcagctggtggaatggtgtcaaagagagggcgagcaacaccggcaaaatggtcgtctcgacagtagtgggtgttgtcgttggcggagcatgcatggcagggaccatgggtttcggtacaggtgcatgcgttgcaatgggaatggcagccgcaggtttgacatattcagcgctagaactagcgtttggagggtctcggggtggagatagtgacagtggtgcaacaataacttacgagcgccaagcaaatggaactaccgtcaaaaacgatgacgatgaactcaataaagtcatagacgacgctaaccagcagacatatgaagggattgcagagcttaccgcgaagctccgctctgatctggtgaggtatgacactaaggaagatggagcaactggcgacctctggattgagatctatgctccctcaaagatctatggcttttcagctttccccgtccaggctaaactctacacaaaagagagcaacataccatttaacgtcatacaccttcgcagtgttgagatctatcttcagaaggagaacagtagcgtcccgctctggaagcgcgtttgggattacggaactggtagcgagggcctaaacggccaaagtgtggtttattcaacaattctcaaggttccggacgattgggtctaccaggtgcagaacgctattcaaaccggtcaggtcactagagacttgatcgaacagatattcagcgcgaacacttcaacgtgggagatcttcgttaaggttgacgcttaccgtgaggtctggcagaacgacccgcagtacactgatcagtcatcctgtactgctcaacctaaccataagtgggactcaaacacctctacgtgctacgtcttcgttaggaatgatgacattaagtatactgcttacaccaccagcgcctggcggcacgtgagcatggcccacgacatcgccgatcttgcagatggtttctatgcatctctaccagttaagttcctcaatactgaagcctcaacgaaatgggcgctttatcaggagaagtacgctggagcgctctcaaacttcattatactgacctttgcgactccagttcatgtcattggttcaacagcagactacaagttctatattgtgcctaatccaggctattttgagcctcttaatccgtccttcaatgacgacttcaggttcgtagcagtgagagagtacaaggatctaagctggacagttgcagattcaatatttggaaacctcggcacgatgagtccggacactccaactcaaaagctcctgacagcccactacactgaagacctgagcacgttaacctataaggtctatggactggcttacttcacgatcacgagagatgacaatatcacaataccgctctggcttgttgtcaatccgaaggtctctgttatcccgaacacaaggacagtgttggcggataatcagatagaccagctcgttcagtttactgacgatggcaagctcgaagcgagtgagatcaatcagactaaagcgatcgcagccagcctcattaacggtctccaggagaagatcactgccgccgaggatctcaagaagaaggcagacgccgagggcaatgaaaaggcttccctctacgctgagaaagcgatacaggcataccaggatgccattgaggctctcaacaaaattacacagaccgatgctgtccaagagtacctcaactggctaaacgttgccaaaaagcttgagcaggccggagacttctacatgagcgcggctgagaaggcgctctacggcgagtacgaacaggccgaacttgacgcacagaagggtgatgagctgagtcagcttgccgatgagtacaagccacacattgacatcctaacaactgcaaagagcatgctgagtaagaagattctcggaattccactttgggcgcttctcgcaatagtgttcgtgttagttggcgctttcgtggtttggagaaaactgctttgaggtggtgattgaagatgggggaggaacaacaaccaaaaaaactgaaggccgggcaatgggccttaaagacggccctagcctcgggctttcttggtttacttttgtggtatgcaggacaacacagcataacagtacagcagacaacagaagcaatggcatcggtgccgctggcattcgtagtgctcgttgaactcttcgataagctcgcagataagaacgactactacaacaagctctacgcgggaatctacggctcaataggcaaaaagaagagcagagtaggtgcaatcctcatcagtttgctcttcgcagcgctcggaatgctaggggtcatgtgggcaatcacaggaaccatgacgctcaacatcggcgatgtcgggccagcaaatcttttcgtctccggattgatcggcctatacatcttcgctccagagactggcaacaatgagctgatactttggttctggaccgccgcaacgatcgccacaaaaggtgcattcatttcaatacttccacacatccccgggctgatctgaggtgactgacaatgctcggcagggttgcagcagctctcatcgcttacctcctttgcattttccacttccagaacagcatggttacagcaggcaacctcctcggcctcagtggcttttgggcgctcttcattccctcggccctcatagggctcgcagtgtacagaatcagcgacctagacagttggggactttgggacgcggcggcattccttatcctcggcggaatcttcatgctggcgattaccggcgatccaacagcaacggccctggaattcattaagggagtcacgggcttcggcttagctggcgttctggcaggattagcagcaaagaacaggagggattgacatggacgcgaacagcatcattgatcagctccacaaccttgcaggaagccacccatacctcgcgctcggcctaatcctcatcctcatcggcgtactgacaaaaggcaaggtgagcctggtgttctacgctctcggcgctctcgcgctcctcaaagagtttggcctcgtggacactttcttttctttcctgaaacagattccagaacttgttaagtcgtttggaggtgtttgagaaatgagaaagaaagagagacagatcataaccgttggcctgatactactcttcgccgccatcggctggtgggcctatcacggcggcggaggcggcttcgttgacataaccaacgctctgagtggcaacagtaccagcaccacgacctatgagctcgccgtcagcaaccttctggctacagttgaccaggcgaccggccacgtcctcgtgagcttccagttagcaaacgaggagcacttcaacatatccagcgttcagatcctctacgcgctcaacgtcgccgatccaaataacgcgacctacactgccctgaacgctacagccgagaacggcacttacaaggcagaaatcccctctaagttcggagatgtggtttactacaagatcaaagtttcctacaacgctggaaagaccctcgaaagcgatgtcaagagcataactgtcaaggacacggccgctccaactctgaattcagttagcatcaactataacagtacggctggaactttcagcattgacttcaacgcgaccgataacgacgccatagcgacctactacgtctattatgctgatctcggtactagcagcaccgtgagcaatactaccaccttcaccgcagtcaacgcgaccagccttccagttgtcatcagcaacgtcacggcgaacaactactatgcgttctacttcgtggtcgaggacatcagcggcaacaaggccatgctctacaacgagaccagcccgtacatcgtccaggccaatgcgaccgctacttggccggttgttgtgaccgagcagagctctagttgaggtgggctgaaatgtacgcccaccactcttccccatctttttcaaaagtcgttttgagactcttcgcagtggttagcctaatttttttggcttatttcagctattcgacgttcgccgagcacgacccactaaaagaaagactgtataagctaggttatccgactgagggattcatcttcagcaacaacacaatacggtgggctgacggacacctcacgatagtccagggggcctatgttgaggactatccaatcactgccgagcaggcgtacgagatcgctcggcagtatctagccagctacaacaagaagctggagaagtacaactacaagctctaccctgacaagaagacgctgacagagaaggaaaagaacggtcaaaaatattgggttttcgagctgaagctcgatactggtggttctaagctctttgctggcttcatttgggtgaaccggaagacgggagcggtttcagtgaagggcctcttggggtgagaagaatgaagttcatgggtatgaagtcatatattcatatattatatatgatagtagtcctcgcggcggttgtgagtaccgcagggtgcattggttggggtggcggtggaatcataatcggctttggcaacgagacctacacaatcccacttaacacctctaacagcacaaactccacaatcccaacttcggaactcaccatacacaggtacgaggagctggtttacgttggcggaaacctgacgatccaggagctgaacctgacaattaggcccgactacgaccccaacaagggcaagttcttcttcatattcccggatacgatctattgggagccgatgaacgtcactatcaacaacataacaataattgggactggctacttcacgggcacgacgtactacatcgccaacatcacgattctgagtcctgaaaagttgacggtcatcgtaaacaacccggagggacagtgatatgaagcggctggttttcgcctttatcctgttcctgctgactgccagcctcgcgtcagcagggactctctacgactggagcgggagcctcgaagttggccaggccgtttacgtcaatgacctcaccctgttcgttgaccaacacgccaagacgaacgagatcgttctcgttgttaaacaggcccgtcagatactgaaggttctccacaatggtgagaactataccgctgagggcctggaggttatttttacgaccttcaacgacagggcatacattcaggttcaggggagtgatcccttctcggtgagtttcaacggaccggataaggccgctgaactgaggaaagagaatatagaattgagagaaaagctggcgaaccttaccgttcagaacaacaagctcgcgaaagaaaacgaacagctcaagcagcaggtttcagagcttcagagcaagctcaagaaccagcccaacacagccgagctgaacgcaaagattctgaacctgacgagggaaaatcgcgagctcaaggcacagttagcgaacctgacaaatcaatacaacaccgtaaaggccagggctgattttctcgaacagcagaacgacgagtacaggaagatgattcagacccttcttgagggggcctcgcagaagagcgagcagagctacatagagaaggcgaaaaaagagaagctaatcggttcagttctcttgaaaacgctcctcttcggcgggataatcgtcgggctggtggggtatggcctgtacagggcaaagaggaggcatgactttgcaggcctctaactcactcaattgtaaaaggaagtatggggggctgatggaaaaataaagctcgctgagttgagcttttacgggagatagtagttttttgttgtaatcaaagaaaatcgggaacaaaaaaggaggttcgggatagatggcagtctcgacgcgagccgcgtcccctgcagaggtgaacattccccacttcaacccagccagcgggccgtacctcggcaggctcatgagcacgaacaggaaagagaagctctacctgccgctcaaggtcggtgaggcaaaccacatcttcatcctcggaaagacaggctacgggaagaccagcttcatgaaagccctcgccgaggccctgtgggagtactacaccagcaggggacaggaagtcctcattgtgatctttgagagaaaatatgactactcaaagttccagcgcctgaaggcgttttggaacaagcgcgttgaagagctcgggaaagaagaagccaccagagtgcacccgtacctcgcggcatacttcggaacccttgagaagtacccacagctcaaaagccagctcggctttcccggcgactttgcaatgagcattcccaactacatcctcgccgagacgtacgtgactagaaagccgtatccaattgacgtctttacctggcacggcctacaacccgacagcttcccgaccaggaggatagtcttcaggccgaccagggcaccagaagcaatcaagctcgacaacggtggtggaaaggtcgaggttgcaatcggcaggattcacctgagagacatcagctttgagatgctcgcgcggaagtttgacatcccaaagggcacggcctacggcaggatcctgaggaagtactggaaagtgtacaagatccacgaccctgacgagattctgaggagagtcaaagctgaagagccctcaatgcgcgagagcacttacgagagcctcaagagcatcctcgacgagatcagagctgacccgctctacctgaaaggctcagtcctcaagccgaaggctgagcaggtcactagaagcggaaatggcatctatgatgagcctaagcccttcacggactacctcacgaccaaagccatcaacatcattgatttttcagataactccgagctagacctcgaggagcagcgcctaatcatgtacctgctctggcagaagattaagctcatcgctggcaggaagcgcgttgatgtgtggctcttcttcgacgagattcaggacctcataggcacggcaggcgaggccagccgccacaaccttgcctggaaggcaatggaggaaatctataggaagggccgctccctctcggtgaacgtcgtcgcgggcacacagtacctctacaagctgccaatgagcctcataatgggtgccgcccacattgcggtaatcggagccctagccagtccaaaggatctcgacattcttcgcgttgcgataatggacggcgagcggctgaggattccagtcgagcacgacagctttgaggagtttctgaagcgccgcaagaagaaaggccgcggctggttctcgtttgaccgcgagtttaccgtcaagatgtattttcgccctaatcaaagcttttgagaggtgatgaagatggtgtggccgtttggaaggaaaaagaagaaggccgaaccgaggcccgggatagtaatgacagatgaccagttcgccgaactcgtccgcctggacgacttcagccttgaggagaaagtagagcagagagtcgaggagcgcctgaggcaacagagaatactcgcgcagagaatgagccagattaaggaaacctatcagaaactccttgtcgcagtcacgcccgaggaggggagcattatacttggcttccccgaggcttacctcataaactacgatgagtactggatttactatcaggagcgcccgccgagctggcttgattcagtctggtggagtctcgccaggttcttcggcaagaggccaccacacaaagtcctcaaggcaaacaagaagatcgtccagttcaacaacgaaacaataaccgtgtactgcaagacgattgaagagatcgtcggcaccggccagcaagaagccatccctatggtcgttcatccagcgatctcccgcggttgggaggcctacgaggccgtcaaggccgagcgggacaagtaccgccagaaatactttgacctgctccacgaggccaaaagagaagtcgagctcgccctacagatcaacccgcgcgtcaaggtatactggaaggagaaagaacagcagggcaagaagcaggaagagcgcttcggcggcacagagatggctttcgaagagaatcccgtaaagcgggagctgaagagcgtcctcggtgagggatgatggaagtggtcgaagacgtagggattccagaggacattctaaaggacctcgccagcaaggacattgcagaggaaccgcaggcgaagccaaagcagaagaaggaagagaagtcttcagcatggggactgaagaaaaagaaggaactgaacgaagagatactgaaggagatccagaagaagctcgcagaagcgtgggagctcatgggaactgaatacgggagaaaattaatagaagacgtggcggtcgaggtgaagaagctgtgcataatcaatgatctgccttaactaccccttcatagctccaatagttttttctctaatttttcttcgtcttgaaagagttcatcttctatccttttaatcttctctaataactctcttgtcagtgtttttaattcctttagcttcttttccctttctacgagtttattgtatatctccggctttttctcaaggagaaactcgtagaatactttttttgccttattccacacttctagtccataaaggcgtttttgctctgtattcagtcctaatctaccataagggggggcagacaattggttagattctctagtttctgtattggatagtgtaacgagctcctctaaaagagtatcggctttaataatatgtgcttcttttatgtagaatctctcagcctcttcttgggatatccgctgtagagattctacgagcttaaattctccctttagtgcgtctatgacctctcttctcaacctattcgtatccgtaacaagtgagttatatttctccaaattaatatcatactccttcaacagccttttgatttttcttttgagcctctcttccaaacctcgttcttggtaactcttcgcccatcctggagtctccggagtctcgggagttaagttagaatattgaggaagctcataataaataggcacctcgttatgtagagcatcattaagcatatcttcaagtttcttaatgtatccaatcacttcatttttcatatattcaatgttcatacgttcttttttcatttctatcaggctcttgttcataagttcagcttgctttttagtttgctcagctgcctctgcagtagtaattgcttggactgctataataccggccataacaatattcgctagaacctctgtaaattgtaggagtatagaattttgtgtattagctccaactaaggcaccaaatccggcaattaaaacaaaagccattataataaccattacaatcattacttttctattgctctccaatcttattccctcctacaaggggcagtctcagtatctgtcaaattaaactttatattgctgtactttttactttttctggtgattacatgcggaggaaggccctagtcctaagcctagtagtgatcttcctagccgcatttatcagcggatgtatcaacaacggagaaccaaagacagtgacagtcactaaaacagtcaggccagaaaaggaaagtaatgctccagcgactacaagtgcctcaccgaacacggcatcacagttcacacaaactacatcctcacagaaaacacccaagataaactgcaatgacgactcttggagagataactttagccaagccttgacctgcgcacttgatcccaagatcaaccacaattttgatccagtatattccctctccctaacgggcaacaagaccaaagacgctctcatcattacagacttcctcgttaactatgtgcatctagatgagtttgtagagaacctgagcatgaagaaaggccattattacaacattaaaacgccctacgagcttttccagacgagacaaggaacttatgcagatatggctctgttcggggcttatgctctagccaagaacggctttgagacgtacctctttgaaatagcaacaacaaacggctttggagtactacctggctttaagcttatagttaatcatccatgggtgccgaacaacgacccgctagtaatattctggccatttagaataccaatgcgcctctcagcggctttaaagctcttaaacctctctggagagacccctaaaaatgtaactgtatacacagtatcctataactcaggcaaatataaagttgagaaagttgggacatatccagccagtgaattcaagtttaatattatggagtgggttcttttcggattccctgactcagagactatgaacaggttgcttagtagagacttccccggctgtaagtacactacaaacctctcggcaatatcctcgaaccaagaagatgtaaaaaatatcaaagtagtgtttccatatggaatcctattctacaacgttccattcaaacagaggtacacagaaatcttatacactctaatgatctcaaaccaggaaatcgccaaagatcttcagaattgtagagtactgctcctcggtccggagactgactttgacttcaacaacccaccagcaaactacacagcaacatacagcggttgggtgagcagataaccctttccttttccctaataagtccagtcgttacctttaatatttagatgagcaataataaccgtaccgtaatatatttaagggcccctgacatgttccatattagagccaagaaatagatcatggtgactaggatgtcctatgagagctttgctgaaaaaataaagtttagatctggagaattcgacaaagaactcttcaaaaggatcgttgaatacattatagaaaaggaattagtaactcctaaaagcatagaagtatataggagcggtgtcgaagtcaagatacgagcaattgcagagatgatgttagtcgatgaatttgatctagatatagtccaagcagttgattatctaagtattgcttcatttgtaatctcaatgaccatactttcaaaaatagaggggaacgaaccatctgatgagctagaaaagtacattatcgaaaaattatataccccacagattaaggaaatgttccttaccagaaaattcatgacgaaccctatcttggaagaatttgaagtcattaaatttgttaaagatactcctgaagggccccttgaaagctatggggtaagaatactaatagataaatcaggagacagagattttgacgaggtattcctcgaaacgacaaaaggcactctccaagagattgttaattacatcagcgaggtgatctctgatgatgcccgcaagaatagtgaaaaagaataaaaccttttaccatccctttgaaaaggtattctcttacagtaacgttcgtgaggtacgctctgacctcatcatagctgaaaaggaaaccttattagatgacattatcaatgaactcagagaacattatggacacgtattccatgaatcagtatacacagaggatatctctgagaataaagcaaaacgtgaagacaaaatcaaggccattgctgagggtatattaaaaacaataaaagaagttcctcacttaaagagactagtgcctatgattaaagttgctatagacttaaacgaagattacaacacgaacttcttctatattatcgtatctctacggaaggacaagatagaagaagccgctgatgcttttgataagctagaggagaacatcctttctaagtaccctgataaagatatacgcattctctatacactccaaagtgcttaaatcctggagggatcccccgcaatggaacccgaagaattcaaggaacttgcaagatatttagagggactccttaacgaacgcaatattacaaaagagatctcaaatgaggccatcgtaagaactacaattggaagatactattattacatttttctgaaactcagaaatgagattattgatgcaatagacaatacaatagacgtgtataaaaaggaaaatcccaaatatgtagtttcactcactcagctgaaaaaagctatagagcctgttttacctggcactagcaagtcatcaaaaaccagtgtccaccaagttatccaactgttcctggatgaattcgcagacttaaccgtagcggatgccttgtatagactcagatggcgtcgcaattttgcagattatcacttaaaaacaccaatagaaaccaaactccgtggagaagaaataactataaaattccaacgtgaagaacttgtaatgatacggcgcgatatcgcaaagatagagaaatggttgcaagaaaaaagatttccaatacatagcgcactaaactcagaagaagctccagaaaaaattgaaagcatactaaaaaccaaatgaaaataatttttcatatcctactcatctgtcaacacctctcaatgagacgaccgtttaatggtaaacccataggcattaattctcgaaaaataaacaaggtcggacaacgtccgacatagttataaaatatatgacctcaataattacgataattatactaggagttgaggccaatgcccgaccaggacgccagcgaagcaagggtagtcgagccactagccaagtttcatgcgaaagtcactaggggtggtcagttcacatttccattatacacccggctttatcataacctcgacgttggggactacgttgaattaatcataagaaccaaagtggatggcgaagtgctcagagggatgttcatagccagactcgttgataagggcaatattacaatacccaagggccttaggagcgagatgaaaattgaccagaattcgattatagaagtcatagttgtcagggcataccggctgaaagacttattgggagacaaagccaagtttatacgtcaattagccctcaaaaaatacaagattctcacttgaatcttagctctgtaagctttttgagaatccaaaagcaagaatagaccatacccaaagataccataaaactggcaagaactaagtacccaaaaattctgttgtgcggtaagcttgccccaccaattattgaaagtgttaagacaacaagcagaaacatgaacgtaacataatatatggtataactctgtttaaaggacttaaactgttgtagttctctatatatctctacatcggggagggcatgtaatattgtaactcccactaatacgaatcccgcgagggcgcctgagattgatgccattgtccagtagaaatcgggagtaggatctaacactttcagaggtccatgaatggttagaactatcacacatataaatgcaataagccccccaacaatgcccctgcgaagtatcttgggaagcattacactcatgatttagagctacaattttaaccttttaaagacttttcaattttgtcatataggtcattgtaagcctcaatgattttattatacatatattctgtgtccactcttgatagctcttccttagcacggataacctttttagtagaaatcagtttgtcctcaaaaatatgcttttcttttagttcgtgcgttttaggatcttcgtattttataatgatattctccacaacccctaatttatcgtttatcctcatcaagtcattcaaaagcgaaattacggtgtcttttgagagtctcttctttttataccgtccatccactactgcttttatttcaactaagtcaggctctaagagataaatataatctcctaacaaatctgttatgtcttcttccattttcttttcatgtttcatataataggcatactttgttgctgccatttttatatgcattgaaactacgcgaggcgatcttaaaagttcctcaataaactctctatagtatacctcatcgagatcaattatatttggctgtccaaatagatacttgctaaggaaatattttaactgatatactgtaggcccctctttatatctctccatcccaactatgccattaggaaaaacaacaaagtgggtcggataatacagtctctcctttcggcttttatctaactgtataccatcttcatgaccagcttcatcaatttttgtgggaagatctctctccttcccatacccaattctcgctgtgataagccctctctcaggcccacccacccatggaatcagattgaatctcgatggatcgtccctaattaggattagatcttgccctggtgtataccgagtttctaaaatgctattcatggataggttactatcaagaaaatcaaatggatcatttaggaaatcttcaaacttttttcgaaaccttgggtcgagtattttcccctgcttgtaattcttcaaaatagcgtcccctggaattaatctgtaaaagtatatcttacgctccagatactctttcatattagtcccccatctaagtttacacacccacttaaataatttccgtacgtaatccttacgccctaccttagtgtttcagttttacccttctcataccgcttagaatccagagaggtcaaggtaaagcctgagaaggctactgaatcagtcgcttaacggtaaaccttatgaggatttcaaccataagaataattcgtaaaatcagcacactgaggtgagccaatgaaagaaaccaaagaaccactagcgaagtttcaagcaaagatgaacaaggatggaagggttagcctcccaaagcaaataaaggatgttctagaacttgaatcagatgattacctaaaggttataatccgcaagataaaagcaaaaaaagatgagggaattatctatgtttatgggcaagaatttgccatcctaagggttggagtcagaggatacgttgtggttccacagaaggttcgtagacagctcaaactcaaaccagatgatagtgttgaaatagtaatcctcgattattatccatcaaccaccgatcctcaaaacattggaaagctaactgaagctacaagattcaaatatcttttttcaccagaaacaggagatccaaacggaactagaaaatatgcagaggtggtctcatgaaagaaaccaaagaaccactagcgaaatttcaagcaagggttaacaaagacaaccgcgtaactatccctcggccaatcctcgaagcattcggcctaaaacaaaacgactacgtcaaagttctaatcagaaaaatcgaaatatcagacaaaacagttacggtaatcgctcaagcccttctggcagtgaaaatcggaaagtatggagccataacactcccaaaaaaactcgtaaaagagtttgagttgagagaaaacgagccggttgaagtcatcattttggattattacaaattcgaggagttagtaagtgaaaaaggcaaagagcttttatccaagcttcagtcaagaaacaactactggattcttccggccgattctcaatatctgtctgagataggtatcaaatacaaatatcttttttgagcgtttaatatatacatatatataataattcttgaaaaagaagaaagaagagaagagataaggcatgttttctgtccgctgatggcttcttttctgaaggttaaatttttgtatccaaaaattctggctgattcaactaggaaaagtaacggctctttggatgaataagacgtttttagagctttgcacttctgtgcacttaactacttttgaacgttgcaaaattgagacctctaaattattacttattgtggtatttcagcagaatttttgtatccaaaaattagacgtaacaactctgcccaacgttgaacttctccagccacacaaaacttataaactttccatccgtacgatttatgtggaaattccacttaagtgaaatatccacaataaggtggtgatgggatgccgaagaggaggaagtggagggctgtgagaaggatcgaggttcagcttccgccggagaaggcggatgagcttgagcaggctaagggaaagctctcttggggcgacttcgtttggaaactttgggagttctggaagcttcaccaccctgaaacatcttgaaggtgttatgaatgccagcgaagagataccagcgacgttcagcaggccctggacggccacgaaaatacggggaagacttaaagaagttccaatctccagttcccgaatcaacatacgacgggctggtcccattatactcgttgtgcactgtgcataatgattatgcaagatgcataacacttatatagtttcttccgtacggaattatggtgagagaagatggcaaaatttaatgggtacgaactgaccctagaaactccagaagagctccaaaactttgtcatggcattcgaaaaagccaacaaacgcaacccaaaagaagtagaagacaccgttaagagagccctggctatcgccggccttatctgagttctttacctcccaaatgttttattaaagcccttctaacttccatcgcttcattaacaaacggatagaataattcatatgtgccacccttagaaacaacctggaatccacttgctagagggtctctttcaggattcaaataaaacctctttgccactttcttatcagcgtgaagagacaaccctacaccaccaatttgagccgcataaagaaccgcataaggcttaattacctttgctagtagttctccgccaattctctttccccgatattccttctgaagacagaactggccaagaagaatagtgggcacagaagaatacttgatgtccattcccaccaactttacgagcttcttcctcaagtcttcaataagttcctttttagattcttccatatccttacggattttaaggctaactataaacggagaaagagtaaaataagagatgagttgaccttcctcaccaagaacaacaaaaaccgttgaaaggcatctcctatgaacatcccacgcttctcgcctagcaaacttcgtctgctcttctccaccctcaccacaatcaacacccctcattactctgcattatcctctctcaaaaattctacccgaaccttctctccaagagtatccaatgtaacttcgtagggttttatcatcccgacaccaaacccaagtcccgatgcaggctttaagtaaattacggatggaaagattacttcgcactgtcttgtgaatcagtcacctaacggtaaaccttatgtatgcccgagggcatacaaaaaacaagcaatacaccattaactaaaatccaaaagagggtgagccaatgaaagaaaccaaagaaccactagcaaaattccacgcacggctcgataaggaagggaggatagctatccccaagacaattagagaagcgttgaacatagagaagaacgattacgttgaggttattgttcgtaaaattgagatcaatcctgagaaatcaataatcaaagttcttaagcaagggtatttggtagccagggtaggagctaaagggttaattttccttccagccgatctcaaacgtgatttcgacctccacgagaaagatatcattgaagttttgctgcttggatatcacaaatttgacgaattggtcagtgaaaaaggcaaaaaactgctctcaaaggttcaaacatcgggcaaatggattgaggtcaagcaggatgaactcattccagaggataaagtaatgaaacatttcacttatgtttttgtttgagtttaatattaagtacttaaaattaaagaaagagaaaagagaagaatagagaagagtgttggtcttttggcgtattctcatggcttctttagaacctctcaaattaatatgcaggaaaaatatttctaattactactataaagcgtcataagttgaactcttttggagacccttatacactgttgtccacgaaatctttttaaggaaatcttccgtactatcttacgagaaatattctcgtatgagaaaaaatctcgtaaggtgatggcagtgggaaggcgggggaagtatgatggacctgtcaaacgcttcgaagcgtggataccatatgaagtctacaaggagatggaggctgtaaaacagcggttaggtgcttcttggtcagaacttgttcagagcatgtgggaagtatacaaagctacgagaaggtgaatcttatgagaatacccgcgagaggtccaggccgaccaagaaaatggaagagcccgctaatacaatggagaagcgatgtacctttagaggattttgaatttgctgaggagaaaaggactgaattgggcctctcgcgggcagaattcttccatgctctcttacaccacaccaactggagtgtggtagagcttcatgcagaaaataaaaagaaagacgagcttctcgaagagaaagaccgctacattgaggagctggtgaaacttcttgaaaaagagcgtcaggcccgtgaaagggccgagaaagaggccgaagcctggaagcaaaagtactacgagcttaagggcgagaagccagcccacacctacaacgagggcaagctcctccgccagcttgctgagaacgcgaaggaagacgtctcgtgggccgacctctgcgctgaggttcttgacctaagagatgagaagaagatgcgccggctcatgagccttgccttcaacatcgagaagtcggacaagaacaactacaagagcattttctacccgaagaggacagctccagagttcaagggttgggttctcaagcgtccggagcgcgacggcccggttctgctggtcgactacgtcctctacaaggaagacaccctcaaggcggctaagggcctcgctgtgggggaggccgcggccgagaaggttcctgaggtcaagcctttgaagaccggaaaggcggccgagcgctggcttgagatgttcttcgaggtcgtccaccgcaattacatggacttgatcaaccagaagcgcggcaaggacgcggtgaagtacctggaagaggccgtgccggagaagcttgagcaggtcctccaggacattgatccagcagactggcgccgcgcagtgctggcagtgctcgatgagcttgaggccagggctgaaggggatgagaggtatgaagttttcgtttctaacctgcggcgcgttgttctgcgcgccctgaacgagttttacgcaaaacctgccgaggtgaaggccgatgtctgagttttctggaagggagattgactggagggcatctaagccccgactaagtgagagactcccgatttccaagaagaccaaggagtacctcctggagttcgtcagaagccacaggaaggaagttgagaccgtggatgaggcgatcttgttccttctgaggttctactaccagcacaggggaaagaccatgagtgaggccgacttctggtcttgggtcgcttcggagaagcgccgccttgacgcggtgcttgagcaggtcgaggaagtgccgaccctgctggagtacatcgagcgcgagctccaggtagctcgcgacacggcgttctcactctccgctcgcggtgagaaggagaacgcggcatactggacagggtacgccgatgccttggaagacctgctgaagaagattgaaagaagggaggtgagggcatgagagagtattcgtttgttttcgtgaagatagatggggaatggatagatgaggacgatgcgatagaggagtatggcatgagttacgtggacatggttgaggactctttcgagctgaaagtcgaggcagagaattggaaggatgctgaggagaagatccgcatcgccgcggaggcgctgaggaggtgagggcatgactacgatgattgcgaccgttgatgagttgatagactttctcaagaagcacaaaaagaagggcttcaagtacgccataattgcgatggatcctattggtgggtggagggccccatcagggaaaaagaagtactaccaagccaatttcgccatatcgagaggtgttttcgcgaaggacgatctcacaaacctcatgaaggccgcaggctttgcagtcttcctatacaaggacaccgacccctttgacgaggacacgaaggcctacttcgaggaggccgattcagcttcttcatcaccttccgaggagggtcgctcatgatcgcgcgagttccttctgctttcctcgttcagcaggctttggaagacagcccggccactttttcagagctggtcaggaaaaccggccttccagccaaggaggtcgcttcagccctggacgagctcgggcgcaagggcgcggttgtgaaggacgagtatgtctttgagcttaggggggtgaggggatgaactatctcatcatcatcgacggcgagcagttcatggtcgaggctcctcacgtcttggccgcttggggggtcgcgatagctcaggccgctctgatgctccatgagggtcggctccgctcggaagatgtcgaaatctatgttttctcagagcgcgaggcaaagcgcgagggggttcccgtcatcttcccaaagcgcctgaacaggcttgaggtccttcagaaggtcgagagcttgagggatgagctccgcagggtgaggccgcacgagggtcaggcgacgcttgagcagttcgtcggggtgagggcgtgatggtcgcagcccgggctgaaatgatccgccaggcggccaaatacggccgccacgtttacaagcctttctttgactatatgcaaagagaaattaggagcgcggagaacaagtatttgttcagcactctgatagaaggggcccttcctggtcagttctcgctctatgacctcgatgcccttgtgttcaggaagcattctgaggttcctttagcggcttttgaactcaaattcatcagttggcgcgtggctaaggattcatgggcaaagggggagcttctcgtgaatggctggcagtttcagcggctcagggcgctttcagaagtcctcactctcccgctctattacttcattcaagtgggccaggagcggttcgtgatgttcaacgtgcagcatgttgagccttcttttgagtaccggcgcggcggttcagcgagggattattacgccgtcatcccactggaggacgtgatcgtcagcaggagctttgaggagttcgcggatgacctcggcctcctgctcggtgtgaacttgtcgaagccggctcaggtgccagcctacgccgttggagggaggtgacggggcgatgaaatctctcatctcattgtatgctttttcggcgatgatagcaccagttctgacgtggttcatattaggggcagtgattgtgaattatgggactggtgctctcatgaaagtttcggggttggtctcgattgtcatgggcatgctctccttgtttggatttagagagtattacaattacaagaacgcggcgctcattatagttaatatggaggacatcccgaggcttgccaaagctttgaaggagcgtgaggggcgatgagcgaggagtggtattattgggatattgaccttcgtgatgggtgggctattgtcttggcaagaactgaagaggaagccattgaaactcttcgcaaggaggtacaagacctctactgtgatgagataggtgagtgggttgaagaggtcctaactaaggagaaaccacgtcccgtcaaatttgcgagaccccttgaaggcaagaaaatcacagagcctgagctctatgaattagctgtctctccgtactgctgagaggggtgaggaacatggttgaggctaggtctttccaagacttgcatgaagatatggtagaagtatggaaactgtgctatatgatagctcgttataaaacaatgccagagggcgccaggctactcctcgaggaggcatggggtattatcgaggattggaaagattgggctcgggaggctcagatggttctcgagaggcttgacgaccttgctagggccgagattgaggctcactatgagaagtacttcagtatcgctcaggaggatgagaatggttgcgtgtgggttcctctggatgaggtgtatgctgcagtcatgagggcaagagacgaggtgaaagagaatgctggtcttgaagaatactaacacttcccgtatagtatcattctttccaaactatctttcaccaacaaccaaggtcaatcaccaccaaaccccgaataataacaaaaactgttactataaccctcaactccgcgaggggaactctgagaataatatttttggcatgttggccaactaaatggaggtgttgttatgccgaggagaaggaagcttcctgactatgttgccctgaagatcccaacttacgagcctgcagacaatccactcgagctaatcttcgatggcagaagccttgaagtggccctcaaggttcttgagtatatcaaagagcacggtcgcctttatcctgacgactacaaagagttattccctgagaagaccgaccaggtgctctacttccgcgtcatcaagaaaatgctcgccctcaaaatgctccgtgtcagctctgacaagtcatacatcctcagcgatggcttttctaaccgcatggagacaatcgccaagctctggaagttccagattggcgacctgaaggacttatggtgaggaatatgaccgcaacagcaataacttggtggggcgcaggtcagaattggtggagttttatggataaatatggaggaaagcgccataaaaagacagatgtgcacattactcttgaccaggacgtccttcaagaactggacagattggacgtcgtgaggtctcgttttatcaacagcctgctaagggcggctctctttggagatgagccgactgtagtcgtgaaattgcttttagaaaagcgtgcggtagaattctggtgccccggccgggatttgaacccggggcgcgggctcgaaaggcccgcatgtttgaccgggctacaccaccggggctcgatattagggaaggaagaccgtttaaaaatctttcgggtctggtaccactgattgagcaccactgcattagaggcagtaatcccaagctggacggaaatctttttaaccgttctcataagccgaaagcgatgcccatgaagaccctcgcagatgttttcagagaggcgcttaaggaaaaaggcatatccagcataggaacgctgtcaaagcgcttcaggaaatcaaaaaacaagctccaggatatagcgattgagatagtccacgggaagggtgccgtcttcagggttccggagaagacagccgttgcatgggatttaaacggaaacagggttgatggctcttactatgcctacgcccccctctgcatgagggagaagtttgaacccgttctcacacccgaggagctgagggaaaagctcccggactggccgtacttcataatcgacctctaccactgggacaagcacacccagaaggaaaagggcaaaatctgcctccaggtgaaccagagctacggccttttgagggactacttcacgggaagtgaactggccgtcacctgggcgaacgaagagttcagggagatgttccacggcccgctggacaggataacgacctatgggggccctacttcggagtttctcaaggagaatggcatcaatgaagttgttctgctcgatccctgggcggaagaagtcctgagcgagaaggactttgacgttaaggcgttcataatcggtggcatcgtcgataccggcgggaacaagaagaagacgaccccaaaaatcggcgaagagctggagagtgctggcattaaggttaggagaaggaaaatagtcctgaggggagacgtcgttggtgtccccgacaggataaacagaatcctcgggataatcctcaagatgatggtggagggcaagtccatggacgaggccgtctatgagatgcaggagcctctccacgcccgctggcgcctgaggaaggaactgccgaagagggccacccgctacatggtggaagggaaagtttacagggtagtcgagaaggagcttttcgacgagtactcaaaatggttaaaaatccgctgggaggacttcgtgaaggttctccgcgagctcgatctggtggcgcttgagaggaagcggattcatcacctgaataaaatatccaatgccaggataatcaacggcaagctccaccgtgtcatactgctgaagagggcggcaatgctctgctacaactgctgaacgttgcattaggatagtttttacaagtttttccactgttttacagcactttagaagtggaaaagaaaaacaaagatcaggcaacttaagtttgcaccgcagttcatctgagcgtcttaacgacaaaggccagcaaatccgtaagctccctcgccctcgtctccggcgatgcgcccatgtgcccgctcttcgtctcaactctgagatagaccggtgctccaacttctctcagcttcatgaagaacttgagggcgtgagcaggatggactctgtcgtcgtgtaaacctgtgtagatgagcgttggcgggtagcgcttgttcgggtcaacgttgtggtagggagagtacttcagcaggaactccctgtccttcgggtcgtctgggtttccgtattctgggatccaaacgctgccgatgtagagcttgtggaaacggagcatgtcaatgacgggatacccaatcagggccgcgtccattacgtctggcctctgagtgagagtagctgagacgagcagaccgccgttgctcctaccccatgcggcgatacggtagccctctttcttgagcttctcaaggacggctatgaaatcatcgaagacgttctgcttgttctccctcattcccgccctgtgccactcctcgccgtattcactacccccacgcaggttggccattgcaaaggttccgccgcgccttatgaaaggaatcgcctgcgggaagaagcggggtgtaagcgagatgttgaatccgccgtatccgaagacccagacctttttatcgtccttctcacccttgacgtggaagtagtgaatcttcgtcccgtcctttgaggttgcaaagtcctcttcaaccgtgaacttcccttcgacctcttgcgtcccaatgagcttcagctcgccgtcaaactgatagagtctgtagggaaccgtaaagctctcgtagcggaggagggcttttttgccatcagaatcgaggggatatacactcccgggaagatcaaaggctatctcatcgagcttctcaccgttgagcgaataaacttcaagcctgtggctcgcgtggacgagcctacccgcgaggattctgtcaccaacaataacggcccactcgagcgggaactcgccctctggaacgacttcgatggttttctcgccctctatcgcaataaccttgcctaaacctttcccttccctcgttaggatgtagagtctgccgtttacgacgtcaatgggctccgccggaacgtccgcggagtaaaccttctcccagcggtctggggcttcaattggccctatgtagatatcggccctgttccagccaaaggtcactgttagcatcgcccacttcccgtcggtgctctttctgagccccatgaagtagcccgaaccgagaccctggccaaaaaccattctctctcctgattcgtccttccagaaaagccttacagctggagctttgactccgtctggagtctccccgtgcctgtaaaagcgcgagaagtagtagccgttctctaggaaggtcacgttccacacagagggcctgagttcatctatgagctcgccactctcgaggtcaattatcctcgtgacgccctcgtccgccccgccgattgagaagctgtatgcgagccttttgcccttcccgtcggcagtaaatccctgaagaagaacttcatcgccgatttcagcctcaagggccttcgagtcaactatgacatcgccattaagccaccttattacctgcctatccctctccttgaacaccgcaatgatgcctttctccgtgagtctggcactgtgaagagttggaagtgaatacagcccccatacctccgggaacagctcgtcgctcagcttcccgatgaattccctaaaacgcctgttttcttcctcgacgagcttcagaacgcgctcatcctgaaggttctccatccagatgtaggggtcttccatgaaaaatcaccattttaacgttgagtttccagcaataaaaaggttatccaaagtcggcaaatgcccgttgttccaaccttggaacaaattcttataaaattcggtataaatctgcgaacatgagggacgaagacgagaagttcatgaggctcgccctcgagctggcgaagcgcggagaaggttggacaaacccgaacccgatggtaggggcggttatagtcaaggatgggaagataataggcgtgggctggcacaggaagttcggcgagaagcacgccgagataaacgccatagaggatgcaaaggcaaagggttacgacgttagaggggccacgatgtacgtaacgctcgaaccctgctcccactgggggaagcagccgccctgcgcggatagaataatccaagagggctttaaaagggttgtcgtggccatggaggacccaaacccgcttgttgctggccaaggaatagagaagatgagaaaggctggaatagaagtagaagttggtcttctggaggaggaagcgaggaagctcaatgaaatcttcctcaaatacatcacaactaaactccccttcgtctcgataaaactcgccctcacgctcgacggcttcatagccactgaaactggttcctcaaagtggataactggtgaaaaagcccgccagagggttcaggagctcagaagaaagcatatggcgataatggtcggttctgggacggttttagctgacaacccgaggctcaactgcaggcttgagaactgtcccgagaaggttaaggttatcctcgaccgctccggcagggtggcagatgagatgagaaagggacggaagttccgcctcttcgaggacggaagggttatcttcttcacggaaaagccggagaagttcaagggaatagcagaggcatacccgataaccgagccagccaagatcctgaagaagctcggcgagctggggatagacagtgtcctggtcgagggcggcagaatagcctgccagttcctgtccctggccgacaagttatacctcttctacgggccaaagctcttcgggagagggataaagcccttcgagtgcctcaaggtcgagaacaccaaggaggctcccctgctgagaattgagtcgatcgagaggctcggcgagagcttcctcgttaccgcttacccagggtggtgagtatgttcacggggatagttgagggaaccgggaaggcccgctattcagctggaaagctctacgtggagcttcccttcgaagtgaaggaaggggacagcgtggcagtaaacggggcctgccttaccgtcgtctccttcgacgggaagacggcagtcttcgacgttggtgaggagactctcgcgaggacaaacctgagggaggcgaaggttgtcaacctggagagagccctacccgccaacggccgcttcgacgggcacatagttaccggtcacgttgacgggacgataaggttcatagcgaagagaaagagtggaaacacgacctggatggcctttgagatgccgagggagaaatggggaattgcggagaagggttcaatagccctcaacggtgtctcccttaccgtcgctaaggtcgaggcaacccgcttctggattcaggttatcccctatacccttgaaaagacgaacctgggtctccttcggcctggggaaaaagtcaactacgagatagacgtcctagcgaggtacatgaagatgattctagataaatcatagtaattggttataaaatccaaaaagtttttaaaataactgtgtactatattagcggtgattgaatggccaagactggatacgccttgtttggcctgtttcttattttgcttttcagcagccagtacgccctcggttcccctgaaaaaattgccgaagatgttgcactaccctcgtggaccgctccccatggatttccctaccacagcaaaatgattcatccaacagcggtttggccagggtatggtggtggctccgactccgcggtgatacactatgtcagggactcagacgagaattattatcattctgacttagtaatgggcatcctggccaaacatgggtattcagtgtattactgggacgcctattaccatggatcgcacggggatccgattcagagctattacaacctgttccgcggaaagaagattaaggtgttctactactacggccatacagctaaaatcctgccgtccactgaggtgaacggttttatgatactccagaaccccaactttggggatacggccaaggtgttctggggcaggataacgggagatgcagacatgcacgacgcgctaatatttgtactgggatgtgattcgttcagactcagggtgggagcaacatacaggacctacataggaacagacaggccgatagacgttagactgataaaagacaaaggaacaactttctggaagaagcttgatgagggcaaaaccgcttatcaggccatggagagcatccaaccaagcttctgggaaaagctaacccatagatattgggccaacctccaaatcgatggggacaagaactggaggctctgacatgcccgacggtaatcgggccggttttatttccgcgtttctactttttttagttcttggagtgctcattctttcccataacccccacaggaaccaaacaccccctgacacagccaggttcgcaacgttcaacggcaacatgagggtcttctctgttgaacggcttgataacactgggtattcagcggagttcctagtctgctccttagcagagcagaggttgcacattgagctagaggttccagactggattgactcaaacgtctccttctacataatctatcctgagctggactacttcaacctgcagtggagggggataaaggaaaacatcctcaactccacggagggactctacaacgttcaagatctaaagttggttgcacccaacccaaaggcggttcacagctccagcaggaagttcacgtacgaaccagaacttgcggcaggccaatgtacaggtctgtctgttaaaggggtcttcaaaagatctccaagagttatttatctacgtaacggaacccccatggagttcgagtctaaaatgacaaaaatttccgatgaacagtgggtcttcacccttaaggttcccgaaggctttagagcctggaacgcctccgttctagtaccagaaaagctgggaagagacaacgaatttctcaaggcgtgccaagaatacagagagagtctcttttccttcgtgaagaaaagagtgctgacactcgaagaactctctggactcaagattcctgcggaacccatccccccagagaaatactgttccgaactgaaagcaaatggagagaggatatcctcaacgagacttctgggcggttcatgcctatatggaaatgggaactactacatcagggattaccagggaggcacatcaagaactatagagaccaactttaactcaaccggctgcaagccggctgtgtgggttgtttttaacggacttctagagggatcgagcgaccgcgttgaggttaatgatcattcaagggccgtgtttggtgtcttcgggaacatgtccgtttacaatggggaaggtgaggggccgctggccgttgattcagccgggtatattaccctcgacataacaaccgagccttaggcgtttctttgattccatttttggaacaaattttttaaaaatttagaacatttctttggtggggaggataaatgaactgggacagagttaggggtctagtccttgaaggaaagccagttgttctcatagacaatcgaagggagttcgaggctgatctaatttatccagccgagatagcttctcccgagatcgtcaacttcatgctctccatgaaaggcctcctctgcctcacgatggacatggacgaggcgttgaagaggggcttcttcccgcttcccagcaaggaaggagagacgaacttcttggttcccgttgattacaaagaaactttcacgggaataaccgctgaagagagggccttaacggcccggaagattgctgaagggcttggtgtgggggccttccgctatcctggacatctccacctccttggcggcatcggcctcaacaggaggagggggcacacggagagctctcttgagctgatggagatactcggcttcaagaggtacgccctgatggttgagatactcgacgaaaagggcgactctcacaacagggagtacgccttgaagctcgcggaggagcacggccttccagtcctcaccacggacgatgtctggaaggaattcgtgaggagaaaacagctgatgagaatctacgccagcgcgaggctcccgacgaggtacggcgactttagaataatagccttcgacaacgagctggactttaaggagcatgtggcaatagtcaaggagccctatggtgaggtcccacttgtcagggttcactcaaagtgcctcacaggagacacattcgcttcactcaagtgcgactgcgggagccagctcgccaacgccctcaggatgatagcccaggagggcgggatactcctctacatggaccaggaaggcaggggaatcggcctgaaggagaagataaaggcctacgagctccaggacaaaggctttgacaccgttgaggccaacaaagccctcggccgcggtgaggacgagaggacttacgaggccgccttccagatgcttcgtgctctgggagtttcaaagatcaggctgataaccaacaacccgaggaaggcaaaggcccttgaggagttcgggatagaggtcgttgagacggttccggctccgggggaggttactgaacacaacaagccctacctgaaggtcaaagccgagaagctcggtcacaagctcccctttaaagtttagggaattgtttaattgttctattgatgaattacacaattaaataattacagaaaacggggtgaatggtatggaggttcgcgtgattgagggcgaatttaagggagaaggtgtaaagattggcgtcgtcgtcgccaggttcaacgacctcttaaccaacgagctcctcagcggtgccctcgactgcttcgagaggcacagcgttgaggaggttgacgtcgtaaaggtgcccggaagctttgagatacctctggtcgccaaaaagctcgccgagagcgggaagtacgacgcggttcttgccctcggagcagtcgtcaggggtgagacaaagcactttgacctggttgccaacgaggtcgcaaagggtgtcgcaaaggtctccctcgacagcggcgttccggttatcttcggcgtgataacagtcgaggacgagctccagggcttcaacagggcaggggttaagagcaacaagggctttgagtacgcgatggccgcgctggagatggcgaatctgatgaaaaaactcagagagaaggagtgaaagaaagctcccaccctttctcattttccactatcccaatcgcgagcaccttgtgctcgaagggaagttccataactttttcagcgagctcttctggagtagagaaggccagctcaatgctctcaaagccctccatgttgtacgtcgccgtcaggaaggctttgccctcctcaagctcaagttccctcatccagagcatatctcttcccacaaagccgagccagcccctccttcccccgtgctggattatccccgctatcctcggagtgctgtaatcgtccctttcgtaatcgagggcatccaggacatgaacgagggccttccttggcctctcccactcaagggcctgggctatgaagtccgtgtggaggccgttggtgacgaccgcgtagtcttccatcagcctcacgacgggatagctcacgtaggggttctccgtctccgtctgattgaggatgtagaccccgtttcccttcaccactgccctcctgtttgggaaggatctggagcagaggaggtagaaggcgaatggcttcccattgttcagccctattccgagcgtccttcccacgtacctcacgttaccacctcctcaagcctgtcttcctcctcggcaagcctgagctccctcgctattctcctccccatgctgagtctctcgccccagtagagctccgagtaccagtggtcagcgttacttcccccgtctatgcgcgaagctatgccgatagctttgaaagaaccgtcgtaggcgaagtggagggcgaacggcccgataacccccggcggctcaagctccctcatggtcctgacgaaagccagcccgtagtcgtagagctgcgggaggagcgattctctaagggcaatcgccctgttgccaactattgtgtacgggagaggcttcactggccagcgggcgttgccgtcggctattagaaccctctcgtcaacgccgaggagctcaagcctctccaggatgggcgagtagaagaagtggacgtagaggtaaacgcccgggatgaagcgctcaactctgtaaggttcttcaagcgttgaaagcctctcctcgagctcactgccctctacaatgaagtggccgctccctcccctaggcccttcaatcctgacgaagtatagctcgtccggcttggcatcctcgggctcgacaacctcaaccctcggaattccagccccctcaagggccttatcctggagctcaaaggtcgtctcccacttgaggaagcgcctgttgccgaagaacctagcttttgccttttctattgcctcaattccgaggtaggcgacgaaagagccatgaggaacaactattccgtcatcgttcaggatggaggtcatctcctctgcaactacgagatcatcaacaatcggaagtgaagagtagaagggccttctcttaggcgaaacgtagagcctcgtcttaaatccttctttcttcgccccgaggagtatctggagcgaggagtgggacgctatggttgaaacgatcattttatcacctccctaagctcctcctggctcaggagcttcccgtcctttataacgcgcatcgtgtcgccgctcagctcgtctatgacgatgagctcgccgtttctccggccgaactccagcttgaaatcaacgagctgaaggcccttcgaggagaagaactcccttaaaatctcggcgaccttcctggttttctccttcatctctctaacttccccttcgcttgctatcccgagttttactacggcttcttccgttatcagcgggtctttaagggagtcgtccttcagcgtgaactccactatcccgagcggcttcagctcctttacccaaccttgatagcgcctcagaaagctcccgtaggcaagctcgcggtagatgacctctagcggtatcctctccgccctcaggaagcgcgccctcctctcgtcaatccgctcgacgaagtgcgtccttattcccttctcttcgaggaggcgaaagaagaactcagtctcatcaagaacgatactccccttacccctcctctcacctacgatctcgttgcctccagtgtcttcccttccatcctcgccaaggactgagtctttgaagtaaaagacaaggtaaggcccgtcctcgtacacatctttggtctttccgcggtagatgggcctcacttccgctcacccgcgagcatgtcgttgatgagctttatcgcgcagaggtcaccgcacatcgagcaggcctcggtcttcgtcggcctctccttccttatctcaacaaagcgttccttgtccatcgaaagctcgaactgcctggcccagttgagcttccccctcgccagcgccatgagataatccttcttgaagtcggcctcgaagcgggtcaggttgaccgcgtgggctgcaatcttcgccgctattaccccctgcctaacgtgctccacgtctggaaggccgaggtgttcagcgggggtcacgtagcagaggaagtcagccccattgagggccgctattgccccacctatcgcggccgttatgtggtcgtagcccgggaagatgtccgtaactatcgggccgagcacgtagaagggcgcgttgtccgttgcgactttggccagcttcacctgggccgctatctggtctatggggacgtggccaggcccctcaaccatggtttgaactccagcctctctagctctcctcacgagccttccgagcgtgtaaagttcagctatctggagttcgtccccagcgtcaggaaggccgccgggcctaagtccgtcgccgaggctcaggacaacgtcgtactccctggccagctcaagaaggtagtcgtagtccttgtagaacggattctcctcgccccagtggagtatccaagctgccagaaacgtcccgccgcgcgagaccattccgacggccctcttagttctcttcattttttcgacgacttctttggtgacgccgacgtggatggtcgtgtagtcaacgccgtccttgaagtgcttctcaactgccctccacatgtcctcctcgctcatctcgatgatggccttgcccttagcgagcatctcctccgcggcctggtagatgggaaccgtacccactgggacgtccacggcgtgcattatggtcttccttatctcgtcgaggtctcctcctgtggagagatccattatcgtgtcggcgccgtactttactgccaccttcgccttttctatctcggccttaacgtcaacgatgtcccttgaggtgcctatgttagcgttcaccttgactctaactcccgcacccacggcaaccggcttaacccagtcgtggcggacgttgcggaagatgacggtgtatcccttggcgacgttcctcctcagcttctcggcgtctatcccttccctctcggctatgaacttcatttcttccgttacgacgcccttccgagcttcctcaagctgggtcatgtccatcacccggttttataacccatttcataacaaagtttttaaatctcaaaacttagttttgagcgcggtttaaaaggttttaggtggtgggcatgagggagatcgagataagcagggcgatagttgaagcctacttcaacgacctcctccagaaccttcagcttgatattgccatagtcggtgccggtccttcgggaatggtagctggctactacctcgccaagggcggcgctaaggtggccatctttgagaagaagctctccgtgggaggaggaatctggggcggggcgatgggattcaaccgcgtcgtcgtccaggagagcgcgagggagatcctcgacgaatttggggtggactacagccaggttggaaacggcctctacgttctcgactcgatagagcttgcctcgacgctcgcgagcaaggcggtgaaagcaggggcaaagatattcaacatggtggaagtggaagacctcgtggttaaggacggcagggtctcgggactcgtaataaactggactccagttatgatgaccggccttcatgttgatccgctcacggtcgaggcgaagttcgtggtggattcaacgggccacggggcgcaaatcagccagcacctcctaaagcgtggactcataaaggccatccccggagaagggccgatgtgggccgaaaagggtgaggagcttaccgttgagcacacgagggaggtctttccggggctgtacgcaactggaatggcggccaacgccctggctggagctccgaggatgggtccgatattcggcggcatgctcctgagcgggaggaaggcggcacttgagattctccagaagctcggaaagtgatgcccatggccgtgcttataatagcgggcctcgacacgggcggtggggcggggctgaaggcggacatcgagacggtttccgctttgaacgagcacccgctcccagtagtttccgcgataacatatcagaaccccaacgaggttaggggcgtctttatagcaccaccagaaactatcagagagcagataagggccgtcagggatgcctttgacatcagggccgttaaaatcggcctcatccatggcggtgcgatagaggccatagccgaggagacgaaagggctgaggaagattctcgatccggttatggcttctacctctggcttccagtttttaagcccggaagatgttgggaggctgaagaaaaggctcgttccgggctcgatagtcaccccgaacgtccctgaggcagaggttctaacgggaattaagataaactcggtagaggacatgagaaaagccgcgagggttctcgtggaagagctgagcgcggaagcggcggtcgtcaagggcgggcacttgaactttaccgacgtcctctactggaatggagaggtcttcgagattccgggagagcacgctgagggcttcacacacgggactggttgtgccttctcgacggcccttgccgctttcattgccaaaggcctaaggcttccagaggccgtcgagaaggcaaaacgcttcgtcgagggggcgataaggttctcgaggggagaaggaaaagcaatcaatcctatctgggagcttcagagggatgctcagagatggagatctaaggaagagcttggagatgcagtgaacaggcttgtgaaaatgggcgagcttctgaatcggcatgtggctgaagtaggcacgaacttcgccctagcaacggatttcaacgaggtctttgcagttaagggccggatagtccgctacgataaaacggtgaagccagtaggtccagttgagctcaacgccagcgaccatctgagaagggccctcctgaagatgagggagttctacccagaggtcaaagcagtactcaatctccgctattcagaagaactcgtcgagaaggcgaaaaagctcgggctcaaggtttccttctacgaccgcagggaggagccggaggaagtcaagagggccgagaggggcacgatggagtggggcattgagaccgcagtcaaaaggcttggagagaggccagacatagtttaccacctcggagactggggaaaggaaccgatgatactcgtgtttggcagtaatgcagaagaagtcgtcgaaagggtgaggctcctcattagctaacgttataacctctcctccctatttttattggtggctctcatgatagtgcggggaaaagtgacaggaaacgaaatcccgcggttcaagcaccggtggttcggcgttcttgaggttgatgccggggaaaagtacaggctctatatgacgggcaacgcggcccagtggtttctgactggggacgaggttgagattgagattctgagcaagccaaaggagaagaacggctttaaggttctcgactttgatgactaccgcctgtggaagttctacaacggtgaaaagatcccggtctggcccctctgggaaaaggagcttgaggcaaagcgctactctccgctgacgggtgagctcctctacacatacaaaatccaggcgagggaggccaaatacgagtccgacttcgaggcgatagcggagcttgagcagtaccattacgcgagccagaaggagaaggtggcgctgtggcgctgtgagaacggccacatcttcgaggccaacacgaagggggcctgtcccgtctgcgggagcgaggacgtccacatactcgaaatcaagggctcaactccggcctcgcgcttcctgatccttgagctagttgagagggaggagtacgagccgaggattctcagctacgtccgcgttgacccgcctatacccctgatgcaccgcagactgccgaacggagaaatcgagaagaacatccgcgagaaagtcttcccagaggactggttccaccccgcattctggccggagaggataatgcgcgagctttacgaggagctgaagaagaagtacaagaagagggttgcccgctcgtacctctgggaggaggccaagtggaaggccctaaaggagacgaacacagctggggcgaggatagccagggttgtggttcaccccgactaccgctccgacggcctcggtcagctgagcgttaaggccgcgctcgagtggatagccgagcgcagaattccggagatgaggaagagaaagcacatagtagagaccatagcccagatggcccgctacaacccgttcttcgagaaggtgggcttcaagttcctctgggagactgcaagcgggaggcccgttctcttctaccctctgaccgaggaggcgaaggagtacatagagcgcttccttaaggaggatccgtacgccccaaaggacggaaggctctggcgcccgagctacggaaaggtcgagcctctcagcgggccgatagtattcaaggatgtgagcaaggtcttcgaaagcgagctcgacgtgaagggccttccggatgagataagggaactcctggaggcgttcggcgtcaggcaccgcgtcatccagaggcccgtccttaggaacctcaacttcgagataaaacccggcgagctcatagcggtcgtgggtgcgagcggagctgggaagaccaccctcctgaggctaattttgggggcggccaacggctggtgggaggagcgcttcaggccgacgactggagagatagaagttcccaagaacgttaaggtctccgttatgatacccggcgagttcgagccgagctttgggactgagagcatacttgagcacgtttacaggaagataggcgaccttaacgcggcagttgaagttctcaacagggctggactgagtgacgcagtcctttacagggcaaagtactcggagctcagcacgggtcagaaggagagggccaggatagcctcgctcctcgctgagaaaccaaatctgctcctcatagacgagttcgcggcacaccttgacactctaacggccatgagggtcgccagaaaggttgccgagataatccgcgaggcagggattaccgcgctcataataacccaccggccggaggtcctaaaggcccttgatccggacagggtgctcttcgtcggctacggaaccgcgagggttcaaggtaaagaaaagagttagttccaaggtgtttcaaagcttaattttggctatattttttatatcttcaacgaattcaccaagatccacaaggttccagccattttcccacacgagaactttgaactttatcgggacttccccaaacagcttatgccatatcttctggcgtaatttgattttatggtggtgtatgagtgcggacaccggtctaaggactatccagagttcattttcaggaagttgcaactttccactgactacgtacttttcaacggtgtggtcaattttctttaagggattctctgttccgatcagagtctcgatttcaatcactgagtggtctgcccattgaatatcaggaattatgcctgtttctagaggttcttctatcttgacaatttggtttgagataagttcaatagccttgtctagtatctccgactctgcgtactcttcgatctcctgagaaagaatataagagagaactgcacacttcagcttatagtgggttccctccgaggaagtttttggcaccagtggagagaacactttggtggtctcgattaaatactcgtccatcttttcctcagcttttaggaaatcttcgtcccgaattccagttaccccataaacaagtgccctatatctcggcaaaatctctgagctttccgtttctggaaggattatcgtatgcattatccctctaaagctggacattacatcttccaagttctccacactaagcctatcagttatcgttactaaaaagccgagacctgttaaataactggtctggagcctgcctgcaactttgtatatgaacgtcttgagcttattaagtgaaactcctcttgagtcaatgacctctatctttgatgcgggtgaaaaggatgtcattagataaacatccttagtggaatcaactctctcaataccgtccatgtattccttgagggttctatatgtcggtctaggtctttctcccttatactcgaggtatatctccgaaagaatgcgcaggagtggccattgccactctcctagttcttgaccgagtagaatgaaaacgggtttgtcagtgatttcgtctgccccatgggggaattttcccctcactccaagcagggtatctaaaacgttgctcatctttcgtacctcccactcaacgaatccggagatatctgccaagtagggatttatttcaaaattcaaatccagctgtaagggggcaatagcgtttctttttaggtcaatgagctgtattgacctttgatcataataaggcaaagagactttgaattcagcttttggaaaagtctcggattttaaggggaactccattctaccaacatttgagctcttggacactctcaaagagactttaagctcctttggaacctctgtattggatagaggaatctctgtaattgtcctaacttgatgttgagtaaattcgagggacagggaaagactatgtgagaccatatcggcggggactccacgtccaaacgggggtggattagagtgtttgctgggaatttttgaatgaacagtgattctaagctcctgtgggggcgaaagggtaaacctaaaagaaggttcttccccggtttcggatgttctaatgtctatacttaaatctcgtggaaagttctcttcttggaagagtagagaaatctcgtgtggagccgttacaggatttacatcgctttccagtgaaataccctccattgctgaataaggagagatcagtttaatctcgctaaactttctctcagaagtttttctctttggagaaattggtgttctggcaatttgttcctcattttttgacgttttgcgggtatccattgagcgaggaacattcccactagagcttggttgttttatagtgcttggaattttcttgactttgagtttttcatcttcctcaggggcctcttggatcagcggctttttcttttgaattctcctcatattcccacctaaagaagccctttgatgacccaagacccaccatcgtaataaaactgctttccatacctgctttcggttctgttgacctttatcttgagatatctcttctctaaaggagtccccgactcattgcccacccaattgggtgtcctgatgtaccccgcggagatgagggggaatatctcctcgatgaaccttgagagaggaatagtggctgtataggtcttataaccagcattgtccacaagtacaaatgaagtgcctgaagtggggactaaactgtattcatcaccattttgaatgtatcttaatatccccctggtatcttccgatatgtcccaaccttccaagttatacgtccttgttacaaagttgtacttgtccttccaccactctttaaaggcgctccttacatctcttgagagccttgaaagaatcgcagagacatctccaaactccccaaagagagcgtttattaaggctggaatgctcggtggggaagggttaaaatgacttagccagaagaaatcatccacatcttcttcactggccttctcaagatcaaccttttcgagctttgagttgtaaatgtacccaatgcgccataacgaggagagttctcttaggctgtggatgtctccattgagtatctcctcaatgtgtaacaagggagcggtgtcaagatagtacgaaattgcggagtatgggttaaacatgggcagcagagcgcatccggttcttagaagatgattgaatttctccacaagcttcggctcatctggagagacccatgagagaaactcttccttgggaatctctggtacttggcccccgagactgagaataagatccttaagctggtttaggatttgttcaaagttatcatgcgaggtacccagtactagatcaccaacgacgaacgccactctatcacctcttcttttgtagagggttagtgtatcatcatagtcgttcgccccaagggcgcgaaccccgaacaaagaatacataaatcttcctatggcatttggagagtcttctccacctattagaagcattcttgcggaattctttaggtgatcatcaagaaaggctattctttttccatgaagttcagttttcgtccacttccagaagttctcgaactgataaagagccacatagagctcagaaagctggttggtgtattctccccagttctttctgttccatagtgctttttcacgagcccacgatgttaaatccataatcctcaccgtttataattttgcttaggagtgttataaagctttgttgtggagagtcgctcgtcaaactatattctgttgggatttagagcgcgcagagcacgtcgaagaaagccgaaccgagccagtgaaggaggaagcttgggacgaagctctctccttttaagtccatttttgcaaagactatcccggctatgaaagcgtagggaacttctattccgggctttccgatgtggactattgtataggggatgtcctgaaggattacggccagccactcgttcttttttgccagagggaaaagaagaaagcctcgataaaaagcctcgtgggccagcattgtaatccccatggcaagctcacccagaacgaagtcaaaggcgcttgaatacggaaaaaccggatagtaagacctcatctcggggatgcttctcccgtagatgctcagtggaattgaagccagaaagagaacggcaaagagctttagaccagtcctgtttggtaggcttatgccgacttctccccactggaagcccataagtcttgagactaccgccggaattaggaggtaaaagaggccgactatggcaacgtggtcccagaaagaggtatgaataagccatgggacgaagctaaggggcagtaaaagtatgaagagcaaaacttccctcaaggctcacaccatgaagcttatgtgcgccgttctgacgtaccttccaatctgaatgccgcggtttgtgaacgctatctctatctcaagcggccggtgggggtttccccttctgacaaccctgattccgacaaaatcaccaagtctgtccttgttgagtctgttcacgtgggagtatagaagcctgaggaaattgcggtagtcctgcatctcctcgaagaactccctctgctcggggttcagattgggatagacgtatttgtggaagaaccagtcgaaggagccatacgtgctcgttgcatacgtgaagagaaccttgtaaaactcgatgttcttgttcccaaaggccgagtccatgtattcaacggcctttccaaggtagctagcagcctcgctgagcttcattctgataagcccgagctcaatgtcgttgcctctaagggttacgagtatatacctgccgccgccgtagtccagatagacggagctgtaaaacaggacgagctttctcggcctaacgctcatgtactgggctattctcctgagggcgtcccccattctgttcagggttctcgggtcgccgataagcacggcatcaaccccgagaaggctttcgtggacggctatatcgttgtccagccagaactccacgaccctcttccagccgggcatgttgtagcggttgaggatcttcagctcaagcagggaaaccgggacttccttgactacccgcccaaagcgctttttgaacacgacaacaggatggtagccgctcgagggatttagatacgaaacggggagctccatcacttgtctgagagcgagtacggcgtcgcgtatcttaggcacgtcatctttcgtgaaccttccgccgaggtcttcaaggagaacgtcaaagcgagacttcataacctctccccacagtataataaaaagaacgggggttaaaaacctcactcagaggcctcggcgttttcagcctcggcttcaccattctcttcggctgctttggctttcttcttggttgtgctcttcttccttgtggttctcctagtcttcctgctcttggtgctcttcttgggctttttctcctcagtctcttcagccttttctgaggcctcctcagcttccgactcctccgcactctcctcggtctcccctttctcctcgctctcttcctcaggggcctccttgattgcttcctgttcagctgccttttcggtttcagtttcctcaggagcttcggttgtctcactggcctcctcctcagaggcctcgccctcctcggcttccggcggcttgagaagctcgtcaacgctgggcctgaacttgacttcctcgtaaccaaggaacttgaggtcgccctcgaggaggagctcgccgagaacgagggtgcccttgtcaacctcctccctaaccggggtgaagtcaacgacgacgtccttctcgccgacctctatgacgaccttgttcgcgtcaagcctgggcaggcgaagctcgatgagggccttaaccttctcaatcgggtcgtcaatcttctcaacgacctcgacctcgtaaacgaggtgcttgcctgcgtaggggtggttgaagtcaaccctgacacggcctccgctaacggtgagaaccctgcccctgagtttcctgccaccctcggtctctatctcgacgggcatcccagggaagggtatgagcccctgcctcctgaactggccgagggtgaaggtcttgatgagcttgggatcgcgctttccgaagcccttctcgggtggaacctcgatctcgtacttctttccgacttcaagaccctcaagctgctcgtcaaggccctgaatcacgtgaccagcaccgacggctatcgggacgggcccgtaaacgccgttctccttgtagattccagcctgcttcgcgatctcttcatcggttgtgtcgaatatctcaccggtctcctttatccttccggtgtacttgagcctgataacgtcacccttctgaaccttggtcattttcgtgacctcctttccttttccagacccagttgggtggtcggtttttaagcttttgcagattttcagaaatagtgcctactgaagaattttaatactaagaagttatataaataatatcaaaaagtttataagtagaatattgatattgaataatgatgatgctacatgaaattcggattatggtatatcaagtgggatagttcgactggcaagtacatctcaaggatacgaacactaagcaagaatcctgcaacagtttatgattttaaagagagattcgatattgcaatctttacaactcgagagggactagatgcaaattacagcggtaatggatatagggatggaaaagagcttgcaagtttcacaaagttaatggccaaaagggagatagaatattacgtttcaataccatattacatgccctcaaaggatattctactgggaagagggaatattcagactggggattattggcttagttgggttgatggggttctatcagtggaagaagataaccttttggggttttactgggatctagaatatgcatggatgttcaaagattactggaaggggaaacagaactcagtgataaatccagaggcacttttgagaatagccgaaaaaattcacgatcacggattaaaattcatctggataccatcagcacatacatacgcgttaagcaatactgacatttggtcacctcaatctcttgacgcctttgatctcattttcgtgcaaccaaattactatatgaacaattcaggaaggtatcctttctcattttacgaatttaaagagtggttaaggactttaaaaaatatgagttcctctaaagtacacatggtgatggaagccgatgaatgtatattaacaaagggcaatggaaattgtaggacctgcggcaatcatgagcaatgtcttaaacttgccagtgattattacctcgttcaaagagaagttcttcgtagactggacaccaatttagcatactatttcgggataactctagatgtagttgatatcgtatttgattactatctaaaaagaatgggggtgctataggcagtgaaaagttatcccagaaatactcactcaaattttattgaattgatgctagtgctttctttgtttttcctgatttttatcccttcctcaaaggcagaccccactctaaccattagtttctgctcctcgggcttcagaataatcataatgcccaccagtgaaggtttcatctacgtatcaactggatactacggattaaaaccccactcattgggacagtgcaccgttgagtatgacccgacaacccagtacgacaggttctacctcgtgaactcgagcggagcccactacatcggcggctactacgagtacgaaggccaaaacgagagcctcaccaaaatcctgaattcgatctcagaacggaagacgaccaacccagtgcgagggaaggtagaaggggacagtgtggtgttccaatttaaaaatcggacttacgctataaaaataagagagatagctccgtatctgtgggatgagaaggagctaagcaacctgatcgcgttctcccgcggaaacgacatcgtcatagttccagccattgagatggacgtgatagagaacaattttaccctgaacgcagttccaggggaaaaaacagggacgactcggattgagctcaatttcacctataagctctacctggggtatcccttccttctaaatggctccactacaggtattatcgaatgggcaaacacctcaatggactatgaccagataccctgggagaagctcaaggatatgtttgagaaacccctctacgtcttttacttcaatgagacatcaataattccgctacccattctgaaagtgacgccagacatggtgctaaaagacttcgagctttctccagagtacggttttgagaacctggcggacgtctacatcctcaaagataaagcatcctcaacgagcccgacgttcaacgtctccgagggcacacattcctcactgacggcatcgtccatggtctccaaaggatcgcaattcaatgagaacactgagctcttaaaagagttcttcctggttgcgctcatagttagtatggcggttatggcactccaccgacacctgcggcgataagctaataaaaagccactcccaaaagcgcccggtggtaggaatggggatcaaaatctacaacaccctgacgaggcagaaggaggagttcaagcccctgagagaaggcgaggtcaggatgtacgtctgcgggccaacggtttacgattacacacacatcggtcacgcgaggacttacatcgccttcgacgttataaggcgctaccttgagcacaaggggtataccgttctcatggtcatgaacttcacagacatagacgataaaatcatcaagagggccaatgagaccggcgaagacccgaaggagctggccgaaaaattcctgaaatacttccttgaggacatgaaagctttgaaggtcaagccggcggacatctacccgcgcgtcaccgagcacatccaggacatcatagacttcataaggaagctccaggagaaaggctacgcctacgaggggagcgatggcgtctattttgaagtcaggaagttcaaagactacggaaagctcagcaaggtaaagctggaagacctcgtcaagggcgcgcgcgttgagccaggagagggcaagaagaaccccgaagactttgccctctggaagaaggccaagccaggggagcccaaatgggagagtccctggggcgagggaaggcccggctggcatatagagtgctccacgatgagcaccaagtacctcggcgagagttttgacatccacggcgggggaagcgacctcatcttccctcaccacgagaacgaaatagcccagacggaagcgtgcaccggccacgagtgggttcgctactggatgcacacgggctttctcatggtgaatggcgagaagatgagcaagagcctcggcaacttcgtgacgattagggaagcactggagcgctacgacccggaggtaataaggctcttcgtcctgcagagacactacaggtcgccgctcgactacaccgaggagggcctcgagcacgccaagaacaaccttgagaggctctacaacaccctcgagaacatccgcgtggcgatggagagagcggagatatccttcaagtggggcgaggaggagtttgaggcctacgaggccataagggacggcaggaagaagttctacgatgcaatggacgacgacttcaacacggccgaggcactcaaagcggtcttcgaggtcagcaacgcgattaaccgctacctaacgcaggtcgaaaagcccaaggagagcattctcaggaaggcctgggagttctttaagatggtgagcgaggtcttcggcatctttgaggactacttcagggagcagaaggctggagaagaagaggccctgataaagctcctcatcgatgttcgcgcccagctcaggaaggagaggaagttcgacctcgccgataagataagggacgagctgagaaacctcggaatccagcttgaggacacgccgcagggaactgtttggaagaggatcaaggtctgaggatctttttctcggactttctctttctgaattcattttgaatttttctcagagtttttattgcaactgtgcgggatgcattcagggaagccgtggccatgacgtactttcaattctcttagagtcttattgcaacgggcgctccgtgacgtcaccgaggcacctaacacctaatttcaattctcctagagtcttattgcaacacggcaccacccctgcaaacaccaccagccaaagcacggatttcaattctcctagagtcttattgcaacttttccgaagttcactcctgaggccgagaggaggattgatttcaattctcctagagtcttattgcaacacatagatatagagaagcccgcagacatcaagaaggcgatttcaattctcctagagtcttattgcaacgtgatggaggtgaaagccgatgtctgatgtccagattcatttcaattctcctagagtcttattgcaacgaatggcgatgaagagcaggcgaagattgacgctcaaaatttcaattctcctagagtcttattgcaactatcctcctcaccgctggcctctgcgccgtacccttatttcaattctcctagagtcttattgcaaccaaagaacccgaaccctaccaccctcgcggaattgatttcaattctcctagagtcttattgcaactttcgcggagtatttgccttaaatcctccttgataatatttcaattctcctagagtcttattgcaactttcacgttacctcactcagaaagccctcgcaaactcgtttcaattctcctagagtcttattgcaacagaaagcaccagtatgagatagctccaatgaaaaacctgtttcaattctcctagagtcttattgcaactcgttgaacccgttaaaagccatctccccatcttcgtgtttcaattctcctagagtcttattgcaacttctcgacatgaaaagggagatgggcagagtcattgagtttcaattctcctagagtcttattgcaacttgagtttgaagagctttacctttttctttgcgtggacgtttcaattctcctagagtcttattgcaactacccgaagcagaacatgaaacatttatcgccttaacgtttcaattctcctagagtcttattgcaacagggcggttttttcctcctttctccctacaaactactaagaacgctcggatcttataagcttttccgcaaagggtgctctaaaaagcccctaacggtccccaattaaaaagcttttgagcggtttttttcagccagaaacaagttctcctccttccgttaagagcatgcacaacaacgttcagaagacttcccaggcatctttagagtcttaaaaagaactttagtggttttcagacgctttttgccaaaaatatcgtgtcagaattaggaacgggcacaaaaaggccctaaagtgcccccattcagaattccgaaaaaatttcgtcacgatttttgctgaatatataacttttcgtttgatagtaaccaaacgttactaaagacttcccgaggctgatcagcaaatattttgaaaattcaatggctaatacacctcagttcagacaactggacgatttaaacgtgataggaccgaaaatataaaaggaactaaccggagtttgtacggtggtggcatgtacatcatagtggtctacgacgtctcggtcgagcgcgtgaacagagtcaagaagtttctccgccagcaccttcactgggtccagaacagcgtttttgaaggcgaggttactctagcagagtttgagcgcataaaagccggaataggagaactcatagacggggatgaggattcggttgtcatatacaaacttcgctcgatgccaaaaagagaagtaatgggagtggagaagaacccgattgaggacattatctagacttctcccatggcctatctatcgcggcgcatatgggtctgaatggacagtggttgcaaacccacgtcttgttgccgacggtggatatccactttgggaactcccccctctccaagtcctcaactgcctctataactttctccgccctcttgatgaatctcctgaagagtctttcgttaaaggtcacctcaaagaccctgaagtcaagcccgttcctgtcgaaaatgtaaatgtaccctttttccttcccgaggatgcccatgtatgcgtttatctgctcaatcgattctttggacggctcggcgtgatctaagtcgatgtttttctttgattttttcgaattcttcttcgaatcgttgttctcgaaacccctgaacttaaactccaggaggtaatcgcctttcacggcatcgacctttccaacgagcttccagccgtctttgaggtcgtgctcaacgggaatctcgaactccgcgcccctaacgacttccccgagccagccgtggagggcagtacctatcctagcctcccagcttctggagggattgtacgtgttgaggtatatcgagagcgccgtcttcctaaggcagtggctcagcgaggtcacccatatcttcctctccactatagggcttccactcacggcgcggcggattccctcgttgaactcctctatttctgcagggagggacatttaaatcacctcaaccataccaaacccgtgagggttcctcattccgattccaagctcatacgcaacccgaaggagctcttcctcgccccacatcttgaaatcaaactcccagacgcgggcgtagattggctttcctgttctctcatctatcttgacgagaagcctgcggctcttcggcttctttgtgaggactctaatgtcaaagctcccctcataaggctcgccgtaaaccatcatgtactttgacttaaggttttcaaagagaagctccttccaaaccttaggctcgttctcaaaggggctgtttggcggaccaactggagaaagatcccactgccgaaatccatttggaggattgttgtggtaaacactgacgggcgagagggttttaaagcgctttccagagaggtgtttagggatctcttcgagctcggcctcgtagctcaggagtctctgaccccttacgtggagcattcctactccctgcccgaggcctctaacaagagattcaaggatgatgtcctccgtggaacccacgtaaagctccacggttcctgactcgacaagaaggccctgttcaagcctttttgtgctcccaataggcatgaacttagaggccacgaacttgatgtctctcttgttgttgtgaatcctgcccgcgacttccttatcggcgagctcaatggcacggaggaggaaggagtagaggtagcgcgggtagttgtaggggataagaaagggaggcttgaagcggaggagcagtttaatcctcatggcagttttcccccttgatcttcaggtagagcctcccggcattggttgctttatatcttggagcccttccatcgagcttttcggctttaacaaggccgtattttgtcatttctttcagctcgttgctgatagttgctggagaaaccccaagctcctcggaaatcttcctcacacttttaccctcaaggaagccgcagattatctttgcccatcttctgttggaaggcgccagaaagagccccagttcaagagaaatatgtcctgagaggttctcgaagtcactttccactataaccctaacatcctcaatgttcaaaagtgccaggagcgtggatacgatgagtggcctcataccacctgagagaaccgctaggatgagacggtcgtcggttaggttgtcctttatggcttgggatatcctggttactatctcctcgccgttaagaggaacttccagaatcatgatgtgctcttctccaattataggggaggctatgttttttattgcattgattgcgtttgtggttctttgctcactccgataaccttctggaacgattgccaaaagcgtatctcccggttcgagtccatcaacatcctctctcttcctcactaatgccctaatgataaatctctcatcaaagcccacaggaaagaccaccagcaacgtcccaccccctaacttttaagacttcaaaaatttcttctacaagtgtgctgccctttccacccctatttaagtgcgcggcgtagttgtctgcaacaaccagaggaagaaggagtgaataaacgcttctgagatttcgtctcataacttcttttgtttcttgcataaattcattccactccttccattggatttccctaggtagcttttctcctgaaagctcctcaagcacggctatacagtcatcacaaagcctaagattccctggtcttttgggacttttacctctaatccaatcgtgatggtgaagtagtatcgcaacggacatcacattccctatggccccatattttccaaaaacgtttctcgccacaagcgcggagtagaactcatggaaaccaaagcttgcccttcttttctggaattcttcaaggcactttccaacgtcgtgaaggatgtaggcctttcttagaagctctcccgcaagcttgggatctacgtccaaaattctggacaggaagcgagcatagcccctacgaaggtataacccgtcgataatctcaaggccctttcttatgtgggcttccatcggttccacgcaggctccattctcaaaaaatgcgcacgtactcatgggataccacgctcccagtcatactcgcctataaaaacgacctcaacattttttccgagtgcaacggatttcgccacgttgtaggcatcgtttaagctccgtatattccccttccaacctcttatctccacgactcctctgtagtaaagctccaccagcttggaggggcttatcagcacggcttctccccctactgaaagcggaattaggaaacctctcatgatcggagtgccactagctgttaaccgctctatcgagcttaaaacatggggtgctcttttagtaggatctgacataagcttgagaagcgttctcttgagctctctattaacgttctttttgacagatattggctttttcccgtgaacctcagtaactattgcctgatatgtgtctggcacccgtgggaggatctggtgttccttcatcaagttcacagtcttttcgactttatcctttggatatggcccacaaggtgcatcttcaaggacaaatatattagctttcatgtcactgccatatctggccactctcccaaaacgctggaggagggaatttatgggcgccctatccgttatcataaggtcaactgaaaagtcaacgccggcttcgactgcctgtgttccgatgaggaggaaattttccttctttgtccactctcttaagcgtttgataagctcccgcttgtgacttggagtcatcctgccatggatcagcataattctctcgctttcaggccagatttctggattgtttttggcttcgttaaacagatcaacggctcgtttaactgagtttactataattgcgtttcttctcccaggctctataaaatcaaggggatttccttccctaaactcaatttcaacttcttttttcagctctctctcgatgaacggatcatcttcttggggacataaaacataaaagttatagccgtttttctttgcatatttctcgaagattcctctgtgggcttccgataaggtggctgtcataaccacgatgggaactttctgggatgtgaggaactcaatagctgatagaaatgcggtcaccattgattcatcctcaagaaggaagtgggcctcatcaaagattaccagcgaggtcagtattgaggcctgggtcaagtaatcgtagccgaactctaagccagctttaatcctgtgcctcttctttgtgttgagctttagcaaatcccacgtgaatgtgtccgcggtggttatgttgagcggaaagaggtgaaggaattcaccgctcgaacccatcatcttggttctggagaatccgaatgcatcctccgctgttttctggatgtcctctatgattgaacgcatcgggagaacatgaatcaccctgtcaaagatggaggcatcccaaagggagtgaacagccagggcaaagcttaggagagtttttccgtagcctgttggtgcctggaggattaaaaaaggcggattctcggagggggtgataaaatgaaaagcctcctctagtaggggccttttttctggcttaaacccctttgcctccgcgagcttctggagtgccttcttgaatgccctcaaagaagcacctccaggtgttcctgccacatgaaggttttcatgaccttccgaaactctccgctcgccctaccgcttccctccagaagggccctgccctgacggaacagtctgaaaacggcgtctctgattaactctctccttccgctgttaatggccctgtacaggtctttgacaaagatatatgctagcatctcgccgtcaccgttaacacccttccagagttctctttctgcaatatccacaagggcccagagggggtacttctgaatcgtggcgtttcccgctttaagttccacgagaatgggcaaaccacccatactagcagactctattctattcacgtattcttccatatactcgctcaatccagtcaaattgagctgtgtggtcttgagctcggtgtaaacctgcccctcaaggcttatcagatgtagtgtcacgggatagacttcctcaatgacgtcgcgtccctcctcggcgagcttcattgccaacttcatctcatagagctcctccgtgctcagagaaattctacccgatgctcctgcacctgttagcggcaggatgcccttctcgatgatctcttcaacctcgtatggccagaaaacctcaattccaggcttcgtcattaggtaatacttcccccctatgaatcccgcaaagctcgtgaagaaaccgagggccatgaaagagaaccagaggggatccatgcgtatctgggctttctggccggtagtcggacttagaaaaccgctctggcgctcgtaatactctggttgcttgattattgctggcaggatggcttgctccccgttgtacgctattccgagataggttccgtttttgtctgtttttattgtggataaagactccccagggtctatattcccgtctctgagcagctttatggtctcagtgaccacaagttcaaagagttcaccgtaagtttcaggggcactcctcccgaaccatgcctttagaaccttgtcaaaggaactcctgtcgtttctgcccatttttgatgtgtgaatcttcaccctactaccgagggatttcaatgccccttccaatgtatcggcgagttcttcttcgtcaggctcaatacctgcgtccattacaacccacgacatgcctagggagagcagttccttggtcaaaccttcgtatggatagcttgagagagcctcaaggagcaaggataaccacctccccgtcgagctccacaatcgacagtcccccctcgacttcaactgtttcttccggataaaacattaccatgcgcttggcattggagtagtcgccgattcctaagcgccagtctacaactgcctggagggttccttttccatgcacgttgactcccttaaagggaaacgcgtacgctgttctaaccttattcgcctcccgaaatacggcctttcccatcttaacatcctcaacgctgactatggattcccttgagccgagcctcgttattccccatgcggctctctctaagtcttttgcactgtaggtactctcagagagagcgtcctcgtcaacaaaataagcggctgtgagtgagttggtagactctccatagaaaactgcaaatgggaacgaagtcactgcgctctgaacttttccgcggtaaattgtgttgatcttcagtagagacccatagagctttggtctgccctctgtcttaatggtgacccatttgaagaggccaattactgattctgctttgctcttgaaagttttcttttcgtaaattgtctctcctctgtcgtcgctgatgtggagaagggggtatgatattgcccctattagcgtagttggtggaacgtagcgtagggcagtgcgcatcttgctctgggggagggcacggagggctattattcccgtgggtcttagctgaaccttcaaaaataaagtcaagggaaccacctcaaaaggcttccttctcgtggaggtagtcaattgcctccttcagagcctcttctgggactttctcctctcccgccacgacgagaaagctctcctccccaaagctcttaaggactttcagccgtctctgagttttctcaatgtagtcgtcgtaaatcggggaggtaacgacaaaaggatgatccgtgactgccacaataagctccgttattcccccaaccgggaagaagcgggagagtttggctccaaactggctcgaagaaagcattctgaagagcgcctttagagacgcctcacgtctcttctttatctcattctcatcgagtattggcttcgatgttatcgcgctcacacctattgcgtcaaggtcgaggttgaacgtgaaaccgtagagtgcggtgccagtttcaacgtagtatatcatctgctcggaggcgttgcccttcttgctcgatgcatccatctgagcgtgcctagcgtggagttgcggctcggaagtggcgaagagggcgaccgacttgactgggagggcgtagcttacttggaaggctgaactccgtcttatgggtgctgaaccagtatataggaaccctccaacatcttctacgacacagctcttgacaattatgtcttctatcttgacaggaggcaaatctaagatgccttttttgattacataattgccaaagacctgtgaagcgagtgagaggtttttgaggatatagtctcgaggcttctcggacttcactaagttctccatgaaccctctgaatttctcaagttctttgatcttatcttcgttctgtttcttcttattgcgctctttttcaatctctgaagataaaacggagattgtgatatccactacttctgacaagttggccagaacactctcaaatacttcttctctattgaatagcttgggggcgaagtggacctcgtccatggacttgtagaactcgcctctctgacagtcatcacagacaggtagacctgccgagagggcctccctaacgaggtgctcctggtatgcgtgggctaggctttcgccgctcatggcgggcacgtagaccgttttcagctttccgtcttcctcgactaggtagggaacacgcctgtgcttgccgtagtttccggctgtttcgaccatgttgagggcctcaacattggcctcaaacctaactccaacgctcaaaaacatcactcatcacctccagagttttctttctttgagggatacgcgagggcaagggtagccacgagttttgcaactcccatatccgagcgaacatcgtcgaggaatatctttacttcctcatcgcttggaattcccggcatggggattttattcccatccttctccacgtacctccttccatctccttcaatggaagcactttctctgatcgatctaaaggccctgagagcctcgagaagggccacttcaacaggttccgggttcagtgcgtttccaatcctgtccacatagctgaagttcttcgtctggacaaagaacctcagcatttttacgataccttcatactcagtctttaccatacggttcacctcgattgtagtaaatgcattacaagaatttaaagtttacgtttagttagtgtttagctaggattaaaaagatgtttagaaaaagtcaaacacagatccctctcctacagggtgatatatctaccattttgcgggcggcatctaactatgtctgtttaaagattatcaatcacctcaaaaccatgccaccagtggctcgtagtccttaaccccaacgagatgcttaatcagcttgtacgcctcaaggcggataagtctctgctttgtaacgttcttcttaagtcctgggtgcttaacgcttctgcccagctcttcgttgtaggccttcaaaacaaccttcataccctcctttgtaagcaggacgccgttcagctcacccctgaagtgctccctctttattattccctgcttcacgagtctgttcgctatcctgtccgctattatcggcttgaatatctcgctcaaatcgagcgcgagcgaaaacctcctctcgccgggctcgtggaggtagctcaccgtcggggcaagctgggtgttgtagagctcgctcacgatggtggcgtaaaggcgagaattgagaaagcttatcagggcgttcatctcgttctccggtggtcttctagtccttttcacgatcttaaagccttcaggcagggcgttgtcccagcgggtgtagtattccccccttatccttgcctcgacgttcatgacctcagttatcttcctcgcgctctcaagctcttcgaagagttcatctaaaagccccgaaaacccatcggcaaccttccagcgcttcaagttcttctccatattgagagcggaacctctcacgaagagtttggcaaggatgaggcgtttttcttgatcgaggtagtgtttggcctgcttgattatcaagtcccccgaaaggaggctttcccgcggataaaatgagccatcgtagtgaccgtagtggttgaagaagtggacgggtatccccttctgggccagaaaatggagggcctgcgagcttatgttgacgtggccgtagacgtagatatcgtagatgccctcaacggcgaggggctttcttccctgcgcgttctcgaagtagagtgtgttctcccgccggaagaggttcccgtcggaaaagagggtgagagagcgctttctcattctcaccaccaattatactttcgctgggagaacctccacgccatttttaactgccagttttctgaattttttgtcaaacgtggcaaggggatagctcctttggagagcgtgatacaggattatagcatcgttaaaacgagatagtgacaaggagttcttttctataagctcaagtgcgtagactatagactccccgttatcgttcaacctgttaaagcgaggatcatctaaatactcactaagcatggaccttgcaagcttcacgggtaggttttttctcctgaagaaccaaacgtattcctgcagaactattgggggtacgtaccagcgatccagcgaatccaaaagccgtcgggctttgtgatgaaatgggagatcttcaaatgtgtcgtacaggagcacgttggtatctatcactgcatgcattcttccatgccctcctcaatgaccttctcaatctcctcgggcgtgagcctctctcctagtttgagggttttcctccttctcttcagcctcttgactacgattttttccccttcaagctcaacctccagcaactctccctcctcaattccgagggcttttctgatctccgcggggagcgttatctgatagttccgggttacctttgtcacaggcatagtatcacctccttgttagtaagttagagtatctactatattagagtttctactactcaaacccagcacagctcgtagtaggcgcactttttgcacctctttgatttcaccggctcgggtggagcctggagtgattttatcctctggacttctccaattgccgcctctacttcttcctccctgccgtcgagggttatcaccttcgtctcgttgagctttggatagtgaagaactgctttggcttcgataccgagcctcttgaggtagtaaaggtagtagagcgcctgcatctcgtgagccttctccatgctcttgccgagcttgacctcgtggacttctatgtagtcctttttcctgatgaagtctatctttatgctcccgatctggacttccttctcctcgctggcatagcgcctctcgtggaggaactttccgagatcaacccactcgttctcctgctccatcgtgatgcccctggagaagtaccagagcttggtcgggcagatgaagaggtagttgacctcggtgccgccgatgaggagctcgtcgagagaatacttatcttccacttccaaacctccagagaagccagtgatggaggaaggggtcgctgatctcaaattctccgttaatgcggtgtatcagctccttctccctgagggccttgattgagtattgaactgaggaagccgagctaaacctgtaccttataaggaactcagaagagtacagatccttttctccccgggctatagctaagagaaccttcctctgggagagcggcagggagtcccatatctctatgtagctggcttcgctttctttaacgagttcttcaaacgtcttttcgacgtcttccatctcgaggcttcctttgagctttccgacgtaccagagccggtggcagaacttttgagtgtaatagggatggcccccagttagctcaagaaccatatccacgatgttctccctgacctcgatccccgtttccttgaatttctccagtataaactctttgaactcgtccttcgggatctttccaagaaccatgtgcctcccgaagttgtagaacgggctctgggccgagcggaatattctctccatcatgctcctcctgctcccaatgaacacgaaggccacatccctctgccactggaacttcgagcgcatttttttcaggacgtcctccccaagttcagcaacttcctggaactcatcgaaaacaaccactaccctcttctcaagatgctctgccagccgctgggggagttcgagagactcctcaaaggcagtttcctcttccccaaaggtgaactcgacctcaagtgcatctccgagacggatttttggagtaacttttttgaacagccttttggcactcttcagaaggttttggaactttaaatgcttcagggattcagaggctatcttctccgcaaactccttctttgtcagcacgccgtagcagtctatccagaggggaacaatccggtctcctagggagagaatggcgttgtaaacgagtgagctcttcccgaaacgccttggggagtaaattatcacgttctggccgctcagcatttccattttcagctcttcaagctccttttttctgtccgcaaagtccttaccgacgaccggttcgccgtatctgaaggggttctccattacagtctcacctgtaacagtttatactgtaatgatttttatagttttggctgtaatcactcaaataatatcgccctcactcaacgggactctctggagtcctttattgggatcgtactcaagctccgcaacaagaatgtatttcccatagcccttatcggagagcctgtggaagtttttccgctcagcgtgatagaaccacatagggattggaataagatatctgtacaattccatacccattttcttatcaagcagttcgctgaccctcccttgataaaccccaggaacagcttcgagaccgttaaacatctgatagaacttttgttcatcttcacctgtcctcataggtttcacattgttgaagacatcttgagctgtgttttgatagtcgcgaaccttttctacaagctcgtcggaaacgggtgcgtaagcctcacttactagctcagggattaaggattctcttagttctttaccatcgaagtcttggagtatctttaagctctcctcaacaacatcatagggattgtaaatctttctatcagcgtctgcgcctttggttaggacgtagacgtcctcaatccgcccctccttccaaccttgcctattcacgcgtccaaagcgctgtattaacgcgtctagaggtgccggctcagttagtatcgtcgagaagctgaggtcaagggaaacttccacaacctgggtggcaacaacaaagtcgtactcggacatcttctcaaggagtaacttctccttagtctctctatcgccgtatgtaaaccggctgtgaagaagcagaactctataatcttcactcagctctttgtagactctaaccgcttgatctacgctattgcatgctaccaatccaggccttgaagtttcctcgacctttttgtgaattccaagatcagctattagctcccctacagactccattcccccatcgataacatgaaccctatggcgggtaaacttgtccgcttcttctgcagaggtcttgagctctctaaaatcagcagtatccgtgataagttcttcaaggaagtccggtaaggtagctgtcattaccattgtctttgctttcagaccttcgagttctttaagcattgcaaggattatgccgagaacgttgggctcataggcgtggatctcgtcgaatatgatgagggatcctgaaagctcggttttcagcatctcgtggaatccaaccccaaagaaggccttcataagctgaaatggcgtggtgacctttagcggagtgtaaattttatggtacagcgagctcagtcgcttgtactcaagggcagatgtgtaaagataaaagctcgcagagctgtgtagaacccccaccaaggatgggtcggaaaatatatccatcattctctggtgcatcgcgtttatgctggctttgtagggcaggacataaaaaattctgctcgttataccttccttgtttctgaaagcgttcctgttagcccacaggagagccgcttcggtttttccgtatcctgtaggtgctcttaggagcaggtttccctccgaattggaagccgcaacctgaagaggcctgagcttcctcattgggatttttaattcaagccgctcgacaatgtcggggaggaggagtatttctgtttcgcccgcagatgcaagatggtctgacgcattaaggaggccgcgcatgaacgtcaatgttcctctttcagcttcgaggttgttctcataccattcagtcagcttttggaaatcgaaatctctaagccgttctttccagtctggcggaaggttaaacctttttggcagttttgtcgtaccaaaatagtaagcctcaatgttcggaatccgtgatatgaacgtcttctctatgtactcagctcgttcaaggagttcatcaagcttttcgtcgaactcgaggggacctatgttgtcaatacgaactgggagaatctcttcaagttcatccagagttttatggtgggttaatatggcgagcgctatcaggttgcgttccctctccgaaaagtccagaaactgcacaaacggaaccgagagtatctcatggcggtaaccccacttgtttttctttttctgaaagcctgaagcacacttcccgatatcatggaggagaacggcataaaatgaacgttcaaagatgccaggcgagagctcctcaagccagggaaaggagttctttatgctcttcagcacgttgattgcatcgagtgtgtggcactcaaggtactggtgcggattgaatttggcgtagcagagcttcatctgctccacctgtgtaggtagactccaatcccaagctcgctgtcatagaaacctcttgtggtctgtctccttttttctgccgctgtttttggatacggtagtactacaaatggcttcacgagctttgctcttcgtggaactgtggagtagtcgtattcaacaacgagcgcatgaaccattccagggactccaagctcgataggcactacggttcctccaaggggtgcctctttttcgtcgagtgaaatgttttctttgatctcctcgacaatcgccaggtcacttgatctgccaagcagaagctgatagcgaggtcttttgaaatattgcttccactcatctggaagataaaggtagagctccgcgttgtagtgaaactcgcgcttcatgatatcggtctcgacctttccaagggcatagatcttttcaagatccactccctttccactgcttttgaagatatagccaacatatggaagctgggtgaggtagactggttccccttttgcggccgagagtatgccctgaatagttgatggcggcggaactggcagagttggctggtaccccgactgaaatgttgggaagcggaaagatgccgtccacgcccttagtttcacccgtatcatgggctcacccgtagtacgcctcgacttctttcacgaactcctctatagcttccttcactgttccgaggaacacttcaataccgctctcctcaagcttctggacgatatcgttcatatcccagccaagggacttaacgaagccctcgtcatagccaaggtagagctttgctccctctggaatgacatccctaaggtcgcccagcctcttcgatagagcttctgcgtcaaacttgatgtctcctttgtcctcgaagactacgtcgcttatgaacggatttattcctgcttcaacattaaggaggagcacaaacttgggtgttatgtccgtgtggtactgcgtctgcttagctccacccgagaggaggcgaagggcttttatggcttcactcgcgcgtttcttccttatctcagagggcataacccattctttttcgttcatctggactccaagctctttagcaagcttttccatttcctcgacttcctggaatatctcttcgttgtttttgtttctgttcttagggagatcttctctcgtgagaaggttcttgaagcccgccttgcttatgattgtgaagcgcccaactgcatctaagtctaatgagaatgcacccttgaagaccgtggaatagaactcttggctatagggaacgggatcgccctcgtgtcttgaagcatagccttcgtcaactgttagggagttcctgtcagggagaaccgaaatgagtggggtgttcttaagcggagagactcttgtgactgttacgttaacgccgcctttcttgaaggccctcatatagccaaaaacgtcatcgtcagggtacttgagtgggtttgctgccgtaaacacctgcttctgctccctgtaaagcggtgaaagctcccagttgaagtgctctttcagagtggaacgccaccagtagcgccaggcctgcgaggagacgtagggatagcgctttccgccgcgtttaaaggttttgaccctcgtaacgttcctgtccgcgaggctttcatctatgccaagcatgttcagcgccgagtggggtgcgtctatcaaaaccagccctgttgcgaacctcattcttcaccaccctcctcaaattcttcttcgttctcttcggcttcgacctcctcagcggaggccttcatgagcctgtcatggagcttttcatagatgcggaaaaggagaagattcttaacggtcttccaggagacgttcagatcttcgccgtagctggtcaatattcttgcaaagtcatcaaagctcatcagagcctcgggaatgccaagctcctgccgatctttttcgactcttatgaagaagctttcgaactggtagagcttctctgccctctcaagctccctgatgcgccttgagagcttgttatcgggtaatttctcgacagtttccacaatcctgtcggcaatccctttaataaactccaaggcttctctatccaaacccaacacctccgagcagtaaaatgagaggagcctccaacttgcattgaccttgcggttttggaaatcgatgaagtagggtagaatgctcccgcctgaaagaagttttgagtagacatcattagaacaagacttaggaatttcctctggtttcttagagagccttttggcacatcctttgttccatcccattgagactatcttcttccatcctgccctgtccactctggccgcaaaggcgacgaagcggagaactgggttggggatgtatattacttccatttcttggctctgattgttgttaacgaagtagtagagcgtaatcgaggcattttcgagtttaccgatttcgaacttcgttcctatctctgtgagtttctcaaacaggaagttttcaggcctcttgaagtcccgggcagtagaagcaagttcgctctttttgatgtcttctatagcctccttgtggaactcaagcatcagctggtatggatatgcatgaattataagaaccctagagagcctatatgcaactaatggcatcatctgggctaggaataagcagtgggagcagatgtttgccccatctttcccagaggggaaatagttcggaactcctccagtgcctacaagtggaaagtcggagcgatatacgggcttaatcctagcgtgccttcttccacaaatctcacatattggggctcttgggtcttctttctcattgagcaaactgaggagattctttttaattgcttctggtgttcttttcttggccatactggggtttgccataagaattccactgtttgggagcatcattgcgtgtatgtaccctgaactccattcttttcgagcatataacctagaagcaaaatttacaacattttcaatgtcctctttactcagctcttcgggctttttcttcccacttaaaagcaacagtgcaacaagtcctgcgtcagtaaatggatgtcctgtccacgtgaaaagcgatgatgtagttgtcgtatctgtatctttgctctgagttttttgctcctcggattttgtcaggaacttatcaagcctcttttcctttctgatggtccgcacctcctttccatttcttcttcaccctctccttccgcgcatcaaccttcaccatcccaaaccctatcgagttcttctcgccgaagccagcaagatagcccgtcctcaacaagccttcgtccccgtaggccctgaacacgagatgccacgctatctggaagattcccggcttgacctcgaagcgcttcggcttggcgttgaggactctcatttcaaagtcttcaggcggtttcgacccatagatgaggacgtacttctcccgcaggttttccctgacaagttcgtagaactcgggttctctgggtgataggtcgtagctcctcggcttcccgaactggattctcttcgtcgtcacggctatcggcgagagagtcacgaacttcttcccgctcagcctctcgggctcagccaaggccttgacctcttccaccgtgaacttctcccgccacagctcgacctcagggttttgaaggagcccccctatgaatgcctccgcaatttctggaacgacggtagagaagtagaagaagccctttccgcggccgagcagagaactcttatcctcggcaagctctctcctctcccccatgaagagagagtacgtaaatagttttggaactttagggttgtgtaatctcaggctcaggtcgggattaacgcgctgaatgcggcggtatatcagcccttgtaagtagtgctggtggctgaatggtatgcggaacggctcattctcaggatgaagtcttattaggaacctgaccattgctacccctcggagagctttaatggcacaggaggtacattctcgaaccttataagcttttctctggtatgaagtagaaaacgtaatgagcattatgtttaatgtcggctgagttattgtcggtaatcctggaatttggatgtacatatttgtcatgaccgtagcatcgtcgtaaactatgagatagcgcagaaaagaatcttccacgggaacagcacaataagatgggaagtagaaaagggccaaaagccctcagagaagcatcctcgcgtcaacggcaacggcgccgtcctcgtaggcgaagatcgggttgatgtcgagctctctgatctccggaagctcgagggcgagctcgccgaccttgacgatgatgtcagcgagggcctcgatgtcgacgggcttctcgccacgcgctccggcgaggatcgggtaggccttgatctcctttatcatctcaagggcctcgtccttgcttatcggggcaacgcggaagctgacgtccttgagtatctcgacgaagattccaccgagaccaaacataatggccgggccgaactgcgggtcgcggatcataccgactataacttctttgccgagcgggagcatcctgtagatgatgacgccccagaggtcagcatcgggcttgtagttcctcgcgttctccatgatggtcctgaaggcctgtctagcttcttcatcgttcttgatgttgaccttgacaccaccggcgtcgctcttgtggatgatctgcggagaaacgatcttcataacgaccgggtagccgatttcgcgagcgaactttacagcttcttcctcgttggtggcgaccttgaagtccggaaccgggacgccgtagagcctgagaatttccttcgcctccggctcaacgagcggcctgttttcggccttggccttctcaattatctccctagcctttgcgatcctgtccataccaatcacctcatcagcttgacattcctcaatcagagcggacggttaaaagggtttccatttgcaaacctttgggttcggcctggattgaaccgatggtgggggtataaatagtttgaagacgattcctattgaggtgaaaattatggagaaaaagtgggttcttgccgctggcgccgttgtgattcttctgctggcagtcttctcgtttcagggtgaaagggcagtcgagggcacgacagcggtcgccctttacaactccgtgggtataggagtcgttgaaaaaacgctgacccttgagttgaacgagggcctaaacaacgttcccctaaaggagctggaagggctcaacgttgcggaagtcacgattatgccccctgagggggttgaagtcctcggaatattcagcaggggaacaaacgaagatgcctacagcgccaacgttggaatggacgttgaggtaaagctggacaccggggaaacaatccagggaaagttctacggcctcaaagacggaaagctggtggtcgagggtgaggactactacctgatcgacccggcaaaggtcgtttactttaaggcctcaacccttgacgagtcaagtgtctacgccgttctccgtgccgagaaaaagggcgagtacaacgtcaccttaatctaccgcgttgaggggatgaactggaagagcaggtacaagctttacataggagagagagcgaaactccagggatacgtcgtcataaccaacccgacggcggttgggcttgaaagcgcggacgttctcctcgttgcgggcgatgttcagctctaccagaccctaccagggccgagggtagtttactccctcgacgaaaaggcatcccaggccaccgtcggagaacctcagaagctcgaagcgttctacgtctatgcacttggaacggccaacataaacccgtcgagcacgatggtttatccctacgtatcaatggaagtcccgttccagagggagtacctctacgagagctgggtagccgacggagagcggccggtttacgagtcgatctccttcaaaacggacaaagtcctcccggcgggcatcgtggaagtctaccgcgaaagcgaaggaagagccctactgatcggtgagatgagcatagagcacacgccgagggatgacgttgtgagaataggcatcggcagggactacgacctgaagggaaggacgaccgtgctggacgtccagcggagtgatgacaggacgtattacaagataaagatagaggtcgagaactttggaaacgatacgaaaaccgttattattagacaccacaagagcgggaatctcctaagctcgagcgttgaacccattgacgaaactgccagctacgtggagttcagcctcaccgtgaaccctggagaaaagaaggaagtagtctttgagtacagttataaatgagatttttttctctctgtttttagatttaggtattcttaatccctagcacttaaacattatttacaacttaatgattttcaatatgacagatcataaactttaaattgatacctagatttatagagtgccgacaaactccggaggtggctacaatgaccacaagaaaacgtgctagcgttctgttagtgatgatgttgttcttggcaattgtgccatataaagcatccgcaggcaacagcatccaaggttactttactacaataaagagtacggtgaaaacattcttcgggggagattacaacgggtggaacccacaacttaagatagttcccgggtcagaggtcaggatttcaagagacgagatacgagtcggtgcagacttcttcaaagaagagtattctggcgttaaaggtggtaaaggatattacctaatcgcttatggcaccgtgaagagctatctagacagtattgccacaaactggcccggagatgacagaagtcctctctggcacatgaacatccagacatacgactcggactattcaacagatctgttcagtgagatccttgcaatcgagattctaagaactctgctcccggaatacaacggagttgatctaaaggccgtggccaatggtaggtttgaagatataaactcgaagtactcaaccctcggcaaatctgatgtcatgaaatggattcagaaaatatcaaacccccaagttatgcaagtgatcgcccgcaggatgaatgattttgctggcgggatacctaataggaatctatctacaatccccgacatctatggtgctccatacagaacggcagttttggtggctctagttgaagaagtagatcctcagctttcagaagaggttccatttgatattcccggggaaattctcgaactagccagagtgtatgttggacagaatcggggctgggactaccttaatcgtgcaaccatggcacttcccatacttcccataaagcacctaagcattactatccttggcaccaattacaccataggaaacgggatcgatgttctcatgatagacaccacaaatagagaataccttcttggcctctggaacgggactgactactcggttatcctgaagataaaatacctgaacgcaactaacctagcaataacacccgtaaaatatgcagaaagagctggggctattctccatgcaggagaataccctgtcacactaactccaagttcaattggcaggactataaagacccccctcgcaggattcccctgggaattaagtgaagttgttatgtactggacaggtaacccaaccagttatctgaactacaacatcaagaaagaggggaactcctacgtttatgaaggcgatccaggaggtctcaggataacaccccttgcagaaggctcgttccttgtgacattcacgaacagggatggctttacattcatatttggaaacgccgcaattaacgtaacaggggacatgaaaggaaagacgtaccttgtatatccaagagaaggggccataatccagtggaactctattcagatgcccacaacggctttgataagtgcaaactcctttgataactggcatgttgtgggcaacgcatatgtggatccaaccattaacgccatcgtgttaactccagatcagggatacaaagcgggagcaacgtggtatctgatcccagtagatctaacgatgaccttccaagctagggcaaagttctattcaggtcgctgtggagggggagatggcatttgggttggattccagaacgctggtactaatgttgttggcggaaccggcagtggtgttggtattagtggtatttggccagcagtaggatttagaatatgggaaatcggaagaagcgttgatctctatctaaacggcaacttccaagagattacaagcggtgtttgcttcgcagacgaaaaagaacatgatatgttgttctattgggaccccgatacagagacacttggcatcaaaattgataacacttatgaatacactaagaacatagacctgatatccgaactgggacagaccgcatactttggattcaccggtggtactggcggtgcccgtaatctgcactacgtaaagccaatattcgttggagtatctctggaagacctcaaagacctcattgaaagcactcgcgaattccttcagaatgtctcctcccttggtgttgatgtcagcgatctcatgacaacgctcagctcagcggaggaatctcttcaaggtgttgatccttcagacacacgtacgatttcaaagatttctaaagaagtagcaggaatacagaccgaagctataacaaggctcgccaacaaagttgcagatctgtattacaaagtctctctcgccagatcagttggtctgagcgatatctcattggatgttaactttgagtcaggtaagaattcaatgatatccggtgacttaaccaatgcattaaagtaccttaacgatgcatttaatgaagcaaattcaatggccaaagagtccctcgatgagatagagcagaacataacatcgttgatgtcagaggccatcaagtacggagtagctataggcgaccttaaggatagacaaaaaatcattgaggcttcgaagtctcaaggagactacgtatccgcgtacgtcgaagcaatgaaaatatataagcaactctcaaagaaagttgaaattgcaaagcagaagaccacagaacaaacaaccacaacacaatcgaataataaaactctagaacagaaaacagaagagacaacaaccactcaaagaacctctgagagttctcctgaaagcgctaccaccgagtatccacttaaagttggagactgggcaaagtacaaactcaagttcgaagcatcaggagacaacgagaagatctcgggatcaatagagtacaaagtcgtcgtcataaatgtggatgatcaggggttcaccattaggtttgaagacgtcaaaggagatctggacaaatacaagaagttatggggcgatgaaggaaaaatcaaagaaggtgataccctaaccattccgtgggatgtggaaccaggagataacaacatttacgcagaccccaaaaaattgccagaggacggaaaagttaagaatatgatagaaacatgggaatatgatacgagaacaggcttgctaaagagttacaagggatcagtagatctattcggtgtaaagatcagcgaggagattcatctggaatcatccaacgctgtcaaaggtggcagttccggcagtggaggaatatgtgggcccgcaatgttcattactctagcgctagttcctctaatcctcagaaaaaagcgattttgaattttttctcttattgccttttttctcgatcctcttaactaaaggtataggggttaagtaaatagaggttagctcttcctcagtattatctcaaagctcctgtctcctttcgttatttccattacaaggctcttgtcgtagtctatgaacttggtgctcacgatagaatagccgttctgcttgaggaagtccgccatctggaggccgagatcttcgaacatctcagccgccattgtggcgagactcggttcctttaccccaagttcgtcgtgatagcgccgggcgagttcaaaaacgtccaccatgttcaccaccaggaataataagtcatcagagcctataaaccttccctccgaaaccattttaaacgccctctccaataaccagcctcagtggtaaaaatgggaagcgtcctgtgggttctgaagagcgggaaaaagatccacggcaaggtgctgggcctgtacccgtactacgtcgagattgacctgtccaccggtgaaggcctctgcacctgttcgaagggcggcaactgcgaacacgttgaagccgttaggagggcgtacgaaaacggtgcatacttttcagagaactccaaactggccgaggttaaccctgaggccgttgtctgggaatttctaattgaagtgccgactctcgccgtcgaagtttcggtgaaggagctgatatcagccctgaagcgcgacgagagtggaagcgaaacggcgaggcttttcttcaggactatgaaactcattgagctttccgggcgggaggaatacctccacgttttggaagaggcctttgaggagttcgcgcgggtgttccctgattaccccctgactgaaaagatcgagaaagaacttgaagccctgaaaggcagaaccagaaaagccttataaattctccttttccagagaaagacttagagggtggggccatgaaagccgtatacagggagatgtgcccaaactgctgggggagaatatccgacgaaaggctcgtaatgaggaacccgtgtgaagaatgcctcgacgaacccgttcacgctgactcctacttccagctcgtttctgcggtgaggaatgcgcttaaactcaggggcactctcaaggagtgggagaaaatataccagcttgagaaccagacgagggagatagaggagttcttcaagaaagccacaggctttacgttctggagcgcccagaggacttgggtaaagaggcttctcaaggggaggagcttctccatcatagcgcctactggaatgggtaagagcacctttggcgccttcatggccgtctggcacgctctaaagggcaagaagagctacatagtagtcccaacaactcctctcgtcatccagaccgtcaggaagatagagggtataatggagaacgcgaacgccgacgtcaggctcgcctactaccacgggaacctcaggaagaaggaaaaagaggagatgcttgagagaatcaaaaacgaggactacgacatccttgtaaccagcgcccagtggctggccaggaactacgaagaggttctgaagggcaggcacttcgacttcatattcgttgacgatgttgacgctttccttaaggcgagcaagaacatagaccgctccctttatctcctcggctttacggatgagataatccagaaggcctgggaaataatcaggctgaagaagcagatgtcaagatacctgaacgggaactcagaggacagaaatgagaagctgaacgggcttaacagggaaatagaaaagcttcagagggagatagaaaagttcaagcggaagaacaagattggaataatgataatcgcatctgccacgggttccgcgaggggcgacaggataaagctctaccgcgagcttctgggctttgaagtcggaagcggaaggagcgcccttaggaatgtcgttgacagctacctcaagccaactaaagacattaaggagcacgttgaggagcttctcacaaggctcggaaagggcggcctgatattcgtcccagttgatcagggtcttggctacgctgaggaattagctaattatctcagcgagaagggctttaagatagagctcgtctcgtccaagaacaagaaggcccttgagaaattcgagaacggcgaggcggactacctgataggttctgccacctattacggctccctcgtcaggggtattgacctaccgcacctcatacgctacgccgtcttcacgggcgttccgaagttccgctttagtatagaccttgagagaccaaccatatatcgtgccctaggcctgctcagcgagataatggacttcctcagtgaggaagacaggaggcaagccgaaaagctccacgcccgcttgaggaggctcataaggaacatcccgcagttcgagctcctaaagattgaagaggcccttgccgagggtctcccgatagaaaacgagttccacaaccacgtcctcggcgttttccgcgagctggtggagttcctgaggagggttctcagagacgaggaagtccttagaaagctcgccgaagatccgttcataagcctggtcaaggaagagggcaagtggtacattgagatacccgacgtcagaacctacatccaggcaacgggaaggacgagcaggctcttcgcgggaggaatcacgaagggtctgagcgtcctcatagtggacaacgagaaggtcttcaacggcctcgtcaggcagatgcgctggcgtttccaggagttcaagatggttccattcgaggagcttgacctcgatgagattctcaggcagatagacgaggacagagagaaggtcaggctcgttatggagggcaaaataagcgccaaagtcaaagacctcgtcaggtctgccctcatgatagtcgagagcccgaacaaggccagaactatagcgaacttcttcggtcagccgagcaagacgaggataggggacctggtcgcctacgagataagcgttggggacaggatgctgacgattctggccagcggaggtcatatgttcgacctcgtcacgaacgagggctatcacggcgttctaatccagaacgagggtgacatgctgaagttcattcccgtttacgacaccctcaagagatgccgtgactgcggccaccagttcgtggactgggagaagaaaggggtgtgcccgcgctgtggctctactaatgtcagggacgcccttgagaacgtcattgctatgcgcgagatagcacaggaagttgatgaaatcctcatagcgaccgaccccgataccgagggtgagaagatagcctgggacatcaggaacgtcctcgccccgtacacgcccaacataaagcgcatagagttccacgaggtaacgaggccggccataatgaaggccatccaggaggcgagagatgtcaacgagaaccgcgtcaacgcgcagatcgttaggagaatcgaggacagatggataggcttcgagctgagccaggagctccagagggtctttgagagctacaacctgtcagcaggaagagttcagacaccggttctcggctggataatcgagcgctataaggagttcacggagagcgaagtttacttcctcggcctgacccttgagaacggcttacaggtaactattgaactcggaaaagacggcaaagacgtagagccgcctgaatacgtcaccgtcgaggaagtccagctcgaggagagggaactcaacccagctccaccatatactacggacgcgatgctgaaagatgcttcgaccttcctgaagctttcggctcccgaaacgatgaggctcgcacaggatctcttcgaggcaggtctctgcgtcacacccgatactctcgttagccttgccgacggaaggatcatggagataaaggatgcggtggagaagtccgaggggaatctgctctcagtgaacggccttaagccaaaagaagcaaaagccctcaagttctgggagattgactggaacgggcctcttaaggtcatcaagctcaaaaacggacacgaaattaaggcaactcccgaccatggtctcctcgtgatgagagagggcaagctcggctgggtctccgccaagaacgtcagggaaggagactacgttgccttcgcctacaacaccggccaccgtggaagagatgaatacacgctcctcaaactcatgataaagctcggaataaccgacgtgatggtcgagctggacgaggagtatttcaacgagaaggtagctccaatcgtcagggagaggatctcaacgagcaccaagtacaagtatctccgcaggcgtgtccttcccctctaccttctccaggaatgggggcttgatgactacgaggcccacgtgaagtccctctaccgccaaagggcaggctcaaagcccatacccaacttcaaacttgacgggaggttctggtacgtcttcggcctcgtccttggcgatggaaccctaagggacagcaaggtcttgatttcccagactcccctgaaggacgttaaatccgtactcgaagatgttttcccgttcctccgtgtctttgaaacgacgaaccaggttggcttctcgaactcaatcatcgccgaggtcttcaggagacttggagcgagaaaaggaaagctccacccgctcgtgtttggactccgtgaggagtacatcaacgcaatgatcgcaggctattttgacacggatggaactttctccatcctcaacgacaggaaagggccgaacttcagggggatcctgacttcaaagaggggcgacgtcctcagaatgctcagcgtttacctctaccagatcggcatcatgaactacctcagacgggacgagcgcactggggtttgggacttgataataagcaacaggagcctcgaaaagttcagggagaaaatatacccgtaccttagaattagaagggcgcagtttgacgaggcgtattccgtttacagggcatcgcggagggcctttgagggtgacctgctcccggtcgctcccgtcttcggaaagctgaagttcaaaaacggcaccaagaacaggatcctgaaggaaactggaatcgacgtttggaactggctcaaacgtccggagggagagattccacgggacaaactctcaaaggtgcttgagtacgcagaggaaagcccagagaaggagttcctcaagtccctcgtcgaggcgggggttacctgggttaaagtgaagggggttgaagaagaactttacaccggaaagctctatgacttcacgacgaccactgagaacttcctctccaacggtgccgtctcccacaactgtacctaccacagaactgacagtacacacgtcagcaacaccggaatagaggtcgcgaaggaatacataacccaggaactcggcgaaaagtacttcaaacccaggccgtggggagaggagggagcacacgaggccataagacccactagaccgatagacaccggcaggttgatgcagctcatccgcgatggaataatccagctcccgaggaaccttacaaggaatcactacaggctctacgacatgatattcaggcgcttcatgacgagccagatgaccccagcgaagatactctacgagaaggccgtaatcaacgctggcgtcggaaaggccgagcttgaaggctacgttgagataatcgaggacggctggacaagactgcgctcgccgccgctcagggagcttccaaagcttgagaagggaatgaagctcaaggtggttgaggcaaagaagtggaaggctccaaaggtttccctctacactcagggagacataatagccctgatgaaggagaggaagataggaagaccgtcaacgtacgccaagatcgttgaaacgctcatgagaagaggttacgtcgtggaaacaaagggaagaaagaagctccttccaacggaaaaaggcatcaaagtctaccactacctcgtcagcaagtacagggaccttgtgagcgaggagagaacgagggaacttgaggaaataatggaccgcatagaagaagggattgaggattacataaaggttctcggggagctttattcggaaattcaaagatacgtttcgggttgatggtgttttaatcgcttgccactatctttttatgctgtcccattctgtctttttgaatgcttgagccttagggtatgtttaccgtaaataatccattatgttatcttgttctctcttgaggttctgatttccaaaaactttaaaaccccagctgtggtaacctggttgtatccccatacaaccagagtataatctaagtaagttatccaatccaactatgtccgacacatgccatgaacttcccctgggaggaaaagatttatattggttgggacccaatttagaaatagaaaattaggtggtggtaaagatggtcaaggacaggatggtggagctccttcaggagcactttgagttgaacctctacgaggcaagggcgtacgtggccctggtcggttttggtgttcttacaccggccgagcttgccagcgtctcagaggttccggctccaagaacttacgacgtcctcaggagccttgagaagaagggattcgccatcagccagccgggcaaggtcaacaagtacaggccggtgcacccggagaacatcctcgagaagttcatcgaggagtggcaggagcgcgttaaggaagagctcgaggccaagaagaaggccaaggaggagctcatcgagctcatgaagccgctcatcgagaccgagattccgaagtacggcgttgagagggtctgggttgtcaggggcataaggaacgccaccctcaagaccaaggagatgttcgaggaagtcaaggagaagatcctcctcgccgacgacggttacatcgccataaacctcgagaacgacctcattaaggccatcgacaacggcgccaaggccaagatcatcgtgagcaagtccctcctcaagaggcttgagggctcaaagatcatggagtacgccaagaagggcaagctcgagctcagggcccttgacaagttcgagctcccgatgctcatctgcgacgacgaggtcttcttcgcccttgaggacatggctgcaaggtacttcaactacgagacccaggtctggatcaaggacttcagggtcagggacctcttcgaggcaaagttcaacgagtactgggagaaggccgagaaggtctgatcccttctctctgttcttgcttttactgttcttttcttcggttgttcagagaaacattgtgctacctatcataggcgttcaatcccatactgggccgagaagtcaaaagtggagagaatagaggttagtcaaacgtacttgaactcctcttcctcctctctcttttcccggattttccagaagatttttccttccctctggaagctctccaccttgccctgctcggcgaaccttaggaggtagcgccttacctccatcgggctgattccagtctccttggctatctcatcaacggtcttcgggccgctttcaagggccttcaaaaccctctggttcttcattcagatccctccagtcgtttatacctctccaacaggtcgattatcttctccatcacccttaaatgtttctcaagttcttcaatgtcctctggaagggagttcgcaagctgggtcagcttctccctcagcctctcttcgacgtctttgacctcctccttcatttcggccttcctttttctttccctgtactcgcatactggacagaaaaccctaccgtccttctcaaagaggggcgaaccgcacctcggacagtgtctatcgagcatcttagcgccggaaagcatcagaggcattatcacgttcctgatttcttcttcggttggccccttcactccaatccctccgtcaggagctggaagacctcaaagagtgcccgctttccaagacgggagtgccttattctgtccgaaatttcggcaatgtcaaacgcaacaacgttgaactcccgctttatcgcctcaagtatctcgattagctcatcgagagtcagctcaccgtgctggaatcgagctattttgtactccggcctgagaacgtccatatcgactgtgaggtatatttcatcgccgaggtacttctttgcatcggctattatgtcctcaatggagttcgtctggaagttcttataagccctccactttccaccccgttttctgctcctcaacagggctggatatatcttgactcgcctcgtccagagctgggttctgtcggttgtcggtatcatcaagaccggagccatcacggcggccctctcaacgagcctgttctcaagggcataggccagccacgagccgtgatcaaggtagtcgtgcatcaaatctgtgtgagcatcaacgctgatcagggattttggcctcagcctgtcgattatcccgtaggttgcgaggtgttcaccgaccacataggccctgtcctggggaattcgctctgatagaaggtcaatcctgctggcctcgacgatgacgtagtcatcaatgagcttgttcctttttaggagctggagggtgtagagaactccatcgcggttgggcttctctccaaagggtatgaaagttaccattccttccaccagcacaacattgggaactttttttaaaagcgttgggaggaataataggcatttttatgtcaatcttcacggccaaacctttaaaaactcgacccaaaaccttcaactgaaaaatctccggaggtcgtgtcatgatactccaggtcgctcttgaccttaccgatattgagcaggccatttctatagctgagaaggccgcccgcggcggggcccactggcttgaagtaggcactcccctcatcaagaaagaaggaatgagggcagtagagctcatgaagaggcgcttcccggacaggaagatagtcgcggatctcaagacaatggacaccggtgccctcgaggtcgagatggccgcgaggcacggcgctgatgttgtttctattctgggcgttgcagacgacaagaccatcaaggatgcagttgaggtcgcgaggaggtatggaataagggttatggttgacctgatcggcgtcaaggacaaggttaagagggcaaaagagcttgagaagatgggcgtccactacatcctcgtccacactggaattgacgagcaggcccagggcaagaacccacttgaggaccttgagaaggtcgtaaaggccgtcaaagttccggttgcagtcgctgggggcctgaatctcgatacgatacctaaggtcatagagctcggcgccacgataatcatcgtgggaagcgccataaccaaggccaaagaccctgaagaagtcaccagaaggataatagacctcttctggggcgagtacatgatgacgataagaaaggccatgttcgacataacggaccacataaggagcgtcgccgaaaacctcaagctcgaacaggttagaggcctcgtggatgccatgataggggccaacaagatattcatctacggcgccggaaggagcgggctcgtcggcaaggccttcgcgatgaggctcatgcacctcgacttcaacgtctacgtcgtcggtgagacaatcacgccagcattcgaggcaggggatttactcatagccataagtggttcgggtgaaacaaagagcatagtggatgccgctcagatagcaaaggagcagggcggaaaggtcgtcggcataacctcgtacgcggactcgacactcggaaaactcgctgacgttgtcgttgaaatcccgggaaggacaaaggcagacgtccccactgactacatagccaggcagatgctcacccagtacaaatggatagcccctatgggaactcttttcgaggactccactatggtcttccttgacggcattatagcactcctcatggcgaccttccagaagaccgaaaaggatatgaagaggaagcacgcgacccttgagtgagggtcgcgatgttctcctttacccatatttttgctggaattggtagcaatggttcaaggatagtcaatggaattgaaacggactccgtggtaaaggtatccttgaatccagccaggtacattctgcggcctaaggaataccgggaaaggattgtgaacttcttctctaacgttcccgaaaacagctttgtgtggctcgtctttgatgacacaaagacaaacagggaaattatggagataatccttgaagcactcccctcggattctataaggctcgcttatgtactcacgcctaaagttgagctgatcaaccagaaacccgaatgggcggataagttcgagacggtgttctacgactccctctgggacttcttaaaggaggacgtgccccttggaaaggcttttgaggaagcttcaaagaacatttctgatatgttctcaaagctctaccgttaccttgaaagtgagatgctcgtgaacatagactacgcggacctgttcagcatgatacggggaggaaacgtcggcataatgcgccttctccgcgaggttgacttcagctggcactggggcatctgggagcgcgggcttgttggaatacttgtcggtgaagacttcccgctgagcggtgctcacagaatactctccaagtttcaggagatactctctgagaaggacataatctggggtgtgatcaccgacaaaaacgttaaaggctcggaagtcctcgccctgcttgtgaagaggtggtgatatgggcaggataaaggccgttctctttgacatcgatggcacactgctaactgaaatgccccttattcagctctttctcccgcaggtgtacgaaaagctggcaaaaaagctggaaactaccaaggaagaggccaggaacgtgtttctgtccgagatattctcaaggcgagacacctacgactggcacgactggaactttttctttgagctttttggcctcaatatgcggtatgaagaccttctgaggaggtacccacacaagctccacgtttatccggacaccattccgacccttgagtggcttaaaggatctggataccctctgggagttgtcacgagcgggcccgaataccagcgccttaagctcaagctgactgggctcgaagggtacttcgatgtcatcgtgaccagggaggatgttaaggcgataaaacccgagccaaagatatttctctacgcccttgaaaaactcggagttgaaccaaaagaggccgctttcgttggggattccctgagccaggacgtttatggggcgaagcacgttggcatgctctcaatatggataaaccgtgagggcgaacccgggcatcacttagcggactatgaaatcaggacgctccacgagcttagaaaaatactgggggtggtagaatgaagaaggtgttcgaaggggaagggacgtttgttgaatacgaggagaagaaggtaaagcttgagaacggccacgagctgacccacaggcgcgaaaacccgactgagctctggtggaagttaaaggaagccatcaaaggcaggaaagttaagatcgtggcctacgagctggaggagagcgaagactgatgatcgcccaccttgtaaacaccgacgttggaagcaggggaataggaaggctgtatcttgactaccgcaccagaaacttccattttttggaggacgccgctgagacgtttctcaacaaccttgagagaactcttatagtaaccggcttcccgattccgccttctatgactcctgaaaccgacggcccacccggggcattggcagtcgcaaaagccgtagaaaagctcgggggaagggcggaagtcctcagctatccggaggtaatgggagcattgaggccgtttggcgtcacttttgcaagggacggtgatgtctcggaatactcgctggtcgtcgccattgagactcccggaagggcagttgacggcaggtattactccatgagcggcatggagataacgagggaggcctttgacgggctggtaattgaggcgagagaatatggaatcccaacaatagcggttggtgacggcggaaacgaagccgggatgggcaacgtcagggacctaattgagctgtacattccccttggagaaaagatagccagcgttgttgaggttgatcaccttataacggctggagtgtcgaactggggttcctacgggctggtggcacatgcctcgatcttagccggcacaaatctccttgcagactgggatgaagagagggcagtaaaagccctaacaagcgccgggttgatagatggggttagaaagaaatccagcgagagcgtggacgggatcggcctcgaagtccataaggaagtcgttgagcttttaaaggcactaattaatgatgccctaggtggttgaatgaagcttgaggagttcatatctgacccgaagtcaagggagctgatagagaccgtcagggagttcgccaaaagcttcttcgacagggagggcacgcacggcttcagccacgttgagagggtcttcaacctctgcatgcatatcgggaaagaagagggggctgatttagaagtcctcgccctggcggcgcttctccacgatattgcccgcccgctggaggattcagggaaagtcgaggaccatgcccttgagggggcaaggatagcgaggaggtacctgaggagcctcggttatcccgaagacaaggttgaagccgttgcccacgcgatagaggcccaccgcttctcacgtgggcctgaaccggcaacacttgaggcaaagatcctgagcgatgccgataagctcgacgcaataggggccgtggggatagcgagggtcttcatgtactcgggggagcatgggaggggcatagacgcctcaataaagcactttgaggagaagatactgaagctgaaagacctgatgtacacagaaaccgcgagaaagatggccgaagagagacaccgctttaccgaggagtttattgagcggctcaggcgtgagatagagggtgaaatctgaccttttggaggagagcttttctccataataacctttttaaatgccttcctgaattatggggtagtctgctcagggtcattctggggggtgagaacgtgaaggcgccgatctgtgaggtgtgcttgaagacggatggtattctctgtcccgccgatgagaaaaaactccaggagggtataatctccgagcttgacgttaaggtcgcgaggcttctctacaagcttctcggtgacgctgatatcgagttcaagaatgccgtcgaagctggagatctcgttgtcatcgtcgttggggaaggagacgtgcccgtggtcataggtaagggtggaaagaacatcaaagccctgataagggagcttggaaagcgcgttagggttatcgagggtatgaaagcggaaaacccgaacgagctgaagaagctggcctctgacctgttctatcctgctggagtctttggcgttaacgtggtctacaaggccggaggagagagggactacaagatcctcgtctttggaagggacagaaagaagctccctgagaagccagaagttcttgagagcattctcagccagataaccggcaaagacgttaggatatcctttgtttgatgctcttttctgttctcatcctgtttttggcactttgcttttgagtttcttccctcgatgtgagacgattctggtggcattatcccgcatcacatagcgacttctacttttgtttccaactttaagtttacgaaattcttttaaagctggattattcgtccatagttgaaaccatctggaggtgagcggatgagccgccagatggttggagcgctggttctcctgctcttgctgacgctgcccggagtctccgccgtttccctgccgtggtcagggctttccatctttggagcaagctcaggggcctacccaatccgcctcgacggcgttgaacagaccggcaacatcgcggtcgtaacatgggacgtcccgcccaactgcctctccggctacggcaccgtgttcatcagcagggatggaagaaccatcacagagcgcgtcagcctcggccggctgaagccctggggcaagaaggtagcggttttcctcaacgtcagggagccggtttacgtcaaactgcgcatcacctctggaaacggaatcttcatgagctcgtgggtgaagttgaggccccaatccgtaccgagagtcttctcgacaggctatacgaccacttattcctggggagacggggagataaggccgcagttcgtcccaattccagccatcatcggggcaataatctcggtgggctttgcgctctgggacgcctacgatgcctataatgcgtgttccgactacggggaggactcaataaagtgcaccgtcgccgctggttcggtgttcgttttcagcctggctatggagggcgatgagctggtcggcgtgctcaggcacggtgatgaactcgttgaggttcctggaaagctatacagcacgctgaagcgcctcgacctcgttgaggaggttggtgatggagtcgtcagggccaaggagaggttcgcccacatattcgacgacatagtaaagcacggcgacgatgccgcaaaggccctcgacgacctcgtcagggctggagtttcaaaggaggccgtcgaggagacagtcaagcacggcgcgacgataaaggagataaaggaaggaattgaacggtcggagagggcattagaaaggatagcaggtggagcggaaggaaaacatgtcctcggaaaagtacggacgtacgacgtggccatagagaaagggaacgaaaaggaggggctcattcacatgctcctcaggcacgtgtggggatacgacatggaaaacgtgggaaaaacatccttctggccgatgggccagaagatcatcgtgagcggtcaggagaagcagcttcccagggttttcagggatgagggggagctgatggagttcctgaaggaagttgtggagagggtgagcaaggatccagagtacatatctgagaaattctttaagaatggggtgcccaacaggaactttgggattccagtggatcttaagaagcttggaatgcgtgttgatgggattgatgttgttcagctggagtttaggttcgagaagggtgaattcgtcctgaagacggcgtatcctgttgatggttgggctgttgagacgtttattcctggtaagggtggctggcagtgaggtgatacgaatgtgggccaccatacaaggaaaacacttgacgataaaaatagacctagataggtacattccatctccagatcctttcttttcgatttttacgataggtgaccatttactcgtgggggcctgctggaagggaaaactcgaaggagatgaaagtgatgtctacagagtttttgagaacttgttgactgcttgttattactttttacagccagagcatccgcacgttcagaaactaaccaggtttgagaaaaagaatgtggaagaggcaggattcagattaaaaggggaggaggttgttgtgtatcagggtgttgagaggaacagtatttactacgcttgctctacagggaagaccgcgagaatttactatcacaatggactccttgaattcactgattgtccagaatacaagggcaagcacaagggtgtcgttgagctcccgcttagagagttcattgaagacgttctgaaagtcagcaaggagtacttggaaaaatacgctccaattattgagaaaatcaggctggagcatggggaaaagcctgacgactatgacttcctccaaaagttctatctggaagttgagagactgtataaggagaagtttgggtaagaggatcatcgtgaacggtcaggagaagcggttgccaaaagtcttcaagaacgagaaagagcccagagagttccttgatgaagtgttgaagagggcacttcaggaggaagagtactacacagaatttaggggacagagctttgtgaagctaagggtaaacttggataagcttggggtgcatatagacgggatagatgcggtagagttccagttctcgtataaccaagctaagggtgcctatcaacttatcacagcgtatccctcaaagggtaagaatgttttagggtacgtgtgggacagagaaaaacaatctggtaaatggatacgcatggggtgacttcaatgaggtgcaaacttcgtggaaaatttattgaggttgaaatagatttggaatcctttgagccagacccatttcccggccgttttcctattctttttttggtggctgggcacgaagtaggtggataccacaatgagggatggcttggcgactcatatggcctctttcaggatctactcctctgtacgagagatctcctaaagtgccctgaaagttgttttaacaaaaggaaaaacgctgagagcgatggttttaagttgttacctgatagctatgtctgcggaccnatacttgacttagattttaacacgtattatcttgaaagaaagggagaattgttgcgttttcatttcataaatgaagctcccaagtatatttcttcgaagaattcccttcagggcactatcgaactaccgtttggggcctttgtcgccgatattctcaaaataagcgaggagtaccttgaaaaatgtttcccaatagaaatggagactaaagccatgcaatataacagatttaccgaggaaatttctcggcttaggcaatacttagaaaacctcatacaggaaattaaaacagaactggattttgggcattaattgggaaacatccttctggctgatgggccagaagatcatcgtgaacggtcaggagaagcagttgcccagggttttcagggatgagggggagctgatggagttcctgaaggaagtcgtggaaagagctctcaaggacccagattatcaaaaagaattctttaatagacttggagcaccgaaatcaagctttgggattccagtggatcttaagaagcttggaatgcgtgttgatggggttgatgttgttaggttggagttcaggttcgaggatgggaagtttgtcctggagacggcgtatcctgttgatggttgggctgttgagacgtttattcctgggagaggtggctggcagtgaggtgatacgaatgtggatcaccatacaaggaaaacacttgacgataaaaatagacctagataggtacattccatctccagatcctttcttttcgatttttacgatagatgaccacatactcgtgggagcctgctggaagggaaaactcgaaggagatgaaagtgatgtctacagagtttttgagaacttgttagatgcgtgttcttgtcttttagacccggagcatccgcatgttcgggcactaaccaggtttgagagaaagaatgcagaagaggcaggattccggttaaaaggggatgaggttgtggtgtatcggggggttgagaggaacagtatttactatgcttgctctaccggacggattgcgagaatttattatcacaatgagctccttgaattcacagattgcccagaatacaagggcaagcataagggcgttgttgagctttcacttaaggagttcgttgaggacgttctgaaaatcagcagggaatacttggaaaaatacgcttcgattattgataggattttgatcgagaatgaacacaatcccggtgatgactatgaataccttttgaacttttatcaggaggttaagaaaatgtacgagaaacccagttgcgggagctctagcttaagcaaaaaagaacattgggcgtgatcccatgaacacgctcaaattatctggcaagcacatctacatagaggctgacttagggaaattctatgggggagcatatccctttcccctcatcatgttactggatgaccatgtcatcgtgggcatgtgctggaaaaaatggagttcagggaagctggttgggtcgccaggggacccatatggagttgtgcaggatttactggacagtgtgaggttctttatggtggcgaagccaagacggctcgttggtgttaagccggacactgttagagagtacggatttcaggttggggaggactcttcgatttactctgcaacatcggtagcggactcagtcttcatttttcttgaaagaaagaatgatgtagtgaaaatacattactataaccagcttctctacgaaacagattgcccggaattcaagggaatgggcaggggtacaattgaattgcctttcttggaatttgttaatgatgtgctcgagatttcggagggatacctcaaaaactatgcaggtgtcatagaacggattatgagagagtatgaggaggaaccgtatgaccatgatatcctctggagatggtatctggaaatcaaggaggaaattacaggcaggaggatatgaatacattgtcactagcttggaatacacgttgatgggattgatgttgttcagctggagtttaggttcgagaagggtgaattcgtcctgaagacggcgtatcctgttgatggttgggctgttgagacgtttattcctggtaagggtggctggcagtgaggtgatacgaatgtggatcaccatacaaggaaaacacttgacgataaaaatagacctagataggtatattccctctccttatccattttttctgatctttgggataaaagataacctgattgtaggagcctgttggaagggtaagcttgaaggagcagaaacaaacgtttatggggttctccaagagctccttatagcgtgcattcagatgcttaacccaaagagtagcacttcaaattttgccagaaaggaagcgaagtggcatgggtttgttcttaacgagaacaatccgtcttatgagctcattacgtcatcaaatccatctagcattctttactttgaagcagatgggaatatcctaaaagtttactattataatgatctgcttgcatataccaactgtcgtgaatatgagaacagacataggggtgtcgttgaactcccgcttagagagttcgtggaggatgttctgaaaatcagcagagagtacttagaaaagtacgcttcgattattgagaaaatcaggctggagcatggggaagaacctgacgactacgattccctcagggggctctatcgcgaggttgaaaggttgtatagagagtcaggattccgctgaggagctctgggggtgattctgtgagctggtggctcggaagtttaaagcccatgaggctcgttgggaagcacatagaaattgacgtggaccccaacgcccccacgtgctttccatctcctatcccgaccctgatgagaattgacagaaggctgatcatcggcggaatattcaaatcctcgggatgcactcccttgatgatggatacaaacctccacggcatgttccaggaccttctcgacctctgcatctcctttctcgaccccgacttcgacgagcagggggagatggcgtatcccagaagggaggcaagaaagttgggctttaaaataggggacagcacaaagctctaccagacgagcctctttgtggaccaaggggttaccaccgtgttttttgagctcgtcggggaaaggctgaggattcactacctcaacgagcttctcggatggagcgactgcgaggatgccaggaaaacacacagggggacattcgaggttccctttttggagttcgcggaggacgttttagtgctctctaggaggttcctaacggaggtagcacccattattgaggaggtctgtcccgagcttgacgatcccgagtacctgtggaagctgtaccttgaactgaacgcaaggttggtgggggaggatgattaagtgggcgaaaacctactggaagggcggagtggcatctatctccctcacacggggcggagacatgattgctgcgggggtggcggaaaaggagctgcatttcttggcagaatatggcccacgcagggtaatcctcagtgggggcttcgtggcaaggctcgggagagatggaagcctcaagtggtttagaatcatcccgaaggtgaccataaccgatgctgaagttactggtaacggggaagtggtattggtgggggtaacgagggaaccccgctccatgatgctgggggtgatcctcaaattcgatggtaatggaaacttcctgtggggcaggaggtttaacggaggtgtgcttgatagcttcaatgccctcacgacgacaagagacggtggaactgtagttgtcggcgaaacaagaagcttcggcgcgggggtcagcgacgccctggtcctaaggctcgacggagatggaaactttgtctggtggggaacctacggcggcaagctgtgggacggggcagagtccgtagctatcgacagagaagggaggatagtggttgcgggctacacatacagcttcagtgaaggcccatcgaacgcgtggctcctctggctcgataacgagggtgatgttcttctggggaagacgtacggaacggagagcctggaaaaggccgttaaaatcgcgctgactcctgagggtgaccccgtggtggtcgggaaaacctacgttccaataaagtcccgccacgatgcctgggccatccgcctggacggcgagggggaacctgagtgggggctgagatttcctgggatggaagccgtcgacattgcggtaagccccagcggtgatctggttgtcgccatggaagattttgagctggccggaattggctccacaggagaacccttgtggggagaaaggctaaagctgaaaatggacggtggactgagaacagttttggcggatgaacacgttctcgtgggaggtggagctctctggggaatcggagaagcgttcatcgcatcaattcagcccgaaggggaacctcctgctgtccttgactggaatcctgaggtgaaagaaagcgagtgcacggttttcagggcgtacgctaacggcgaggcctgctttaaggccactcccgtcggaaggttcaccgaagtgaggctaaaacccgtggagttcaagccagatgtattcagcagcttcgaggagttcgcagaaagcagttacgttcgtcgttgaaatgtctgcgtttccatattccctcacgaatacctttaaaaggtgcccgcgactctttctggggggttgccatgtacaggacgcactactcaagcgaaattacggaggagttgaacggccagaaggttaaagtcgctggctgggtctgggaagtcaaagacctcggcggcataaagtttctctggatacgggacagggatggaatcgtccagataaccgctcctaagaagaaggtcgacccggaactcttcaagctcattccaaagctcaggagcgaggatgtggttgcagttgagggagtagttaacttcactccaaaggccaagctgggtttcgagattctgcccgagaagatcgttgtgctgaacagggccgaaacgcctcttccgctcgacccgacaggtaaggtcaaggctgagctcgacaccaggcttgacaaccgcttcatggacttaagaaggcccgaggtcatggccatattcaagatacgctcaagcgtcttcaaagctgtgagggacttcttccacgagaacggcttcattgagattcacacgcccaagataatcgctaccgccaccgagggtgggacggagctcttcccgatgaagtacttcgaggaggacgctttcctcgctcagagtccccagctctacaagcagataatgatggccagcggtctcgacagggtctacgagatagcgccgatattcagggcagaggagcacaacacaacgcgccacttaaacgaagcatggagcattgacagcgagatggccttcatagaggacgaggaggaagtcatgagcttccttgagaggcttgtcgcccacgcaataaactacgtccgcgagcacaacgccaaggagctcgatatactcaactttgaacttgaggaacccaaacttcccttcccgcgcgtgagctacgataaggcccttgaaatcctcggggaccttggaaaggagattccctggggagaggacatagacactgaaggggagaggcttctcggaaagtacatgatggagaacgagaacgctccgctctacttcctctaccagtacccgagcgaagcaaagccgttctatataatgaagtatgataacaagcccgagatatgcagagccttcgacctcgagtacagaggagttgagataagctccggcggccagagggagcacaggcacgacatccttgttgagcagatcaaggagaagggcctcaacccagaaagctttgaattctaccttaaggccttccgctacggcatgccgccccacggtggctttggactcggcgccgagaggctgataaaacagatgctcgaccttccgaacatcagggaggtcatcctgttcccgagggacaggaggaggctgacaccgtaaggcctttatacttttcaccatttaaactgatagccagcaacataaacctgcggaggttggaaaatgaggaaactcctggctttaattttggggattgttttaatggtttcaggtggaattacgtctaataagggcattgtccgcgctgaagaaactaattatgcaaccgttgggccgtccgttcagcttaatctaggagattctgtaacccttggtgagtacactatcaagttctcggacatcagcgttgattatagccaggtttctctgacgattcaggggccgacaggggcaccttcaactataatagttcccgagggctctaacgcgtactatcccaacagcaagaaccccaagctagtatttggagcggctgtatggaccaaagacaaaaagccgctcctgtaccttgacataaagtccccactcaaaaaggtaaacggcgacccgttgatactttccgcaggaaagagctacaccctcccagtgggtacaataaaagtctataaagtcacttccacagaggtaactttcacgatttacctcccgaacaatccatctaagagcatcaccctcaaggaaggtgaaagtgggggagttgcctacgcattcccgaacacggacttcaagtactacgacttcgtctatgttgagctccttgacattacacctggaaaatcagcgaagttcaacgtctacatgccggcagttcccgctacaaagatatcagtgagccgcgcggggggctcgagctcaagctcgggctcgggaacatcaacaacccaaaccctcatatccctgtacgatggtctcctctacacgaacgaaaagctgaccatcacccagaacaagaccaagtacgagctacagctcgtttcggccgtctccacgaaggccagtataaaggtctacaaggacggcaaggcactagacacttacataatcagcataggtgccattaaggacatcccaaacactcccctgaaagttttgatatcgaaatctgaaccgcagtatggaagggtgtccctaacggtatatggcccggaggacgcaaaggcgacgccgattcttaggccggcaaccatagtggcctcgatagacaccgttccaaagaccgtcatggttggacaggacatggttatcatagtaacggtcgagaacaaaggcaaaggcgatgcctacgatgttaacgtcgcagccccagttccgaacggcttcaaactcgttagctcagtcaagagctggacgtttaagagctttcctgcattcacaaagatgcccgctttaatatacgttctccagcccacaaaggtcggaaagttcgatattggaagggtgatggtaacctactacgatgatcagagccttgaaactggcaagcagaagaccatatactcccagcccctcagcggcatcatcgtgtacggactacctgagataaaggtctctgcggttgcctcgaacggtactcatgagggcaactacgttcacacagaggcaggcaaaaaggttctcctgaagttcaacgtaagcgcctctgagggagacccaactacgagttcataaagaacgcgacgctccagttagtattccctgagggcatcagcggtgaagccgttattccagtcggcgaccttaaggcaggttcatcaaagctcatacaggcttccgtcactgttacggaaaacggcaccttcccgattggagcagaactcgtttaccaggacccgcttggtcgggaacaccggcttgaaatcggcaacgtagtgctgattgacagcatcccaccgacgatcattacaaaagaggttaagatcaaactatggccgacccctgaggagcttccagaatacataaacaagacactcgccagcatgaacaacgcaaccccactagcggagcagattctcaacgtttccaaggcatacctaccacctgaagagaagaaaggcaacccgtggaaacctgcggcaatagtattcctgctcgttgcgctcgtggcaggcgctctagcaatcaattactggaacgaggccaacagactcaaggagcagctgatgaagaagaagcagagacgcccaggaggacttccaaagaaggaagaagagaccgaggaggatatctccaaatctgaggagaaaaaagttatctgagctttttccattgtttcttttcttacttcatgccaagttcattcttctgaagggcatttaacccctgttgatctccttcccgccgtaaacggcgaggctttcaaagaaaaaagtaacgatcaaaataaaaccaaaagcaaaaaagaagctcgacgatcactcgctcaaaaactcgaaggccagggcaacttccattgccgttccaatgtagaggacatcctcatccacgtcgaacttcgggtggtggtgaggataaatgattcccttctcctcgtttcggattccgagggcaaggaaagccccgggaactttctgaagatagaaggcaaagtcctctgcgcccattgttggtctaacctcaccgtacttcaggccatacttctcggcaacttttctggcaaaatcagccatctctttggtgtttatagttgggggtgtcagctcctctatgctgagctcataccttgctctatgggcctttgttataccatcgaggatttctctcatcctcatctggattagttccccaacttcgggcttgaaaaagcggaaggtccccttgaactcaacctcctcagggatgacgttgaaggctgtcccgccgtggactgaggtgacgctgacaacaccagtttcaattggctcgatgtttctgctgactatcgtctggaaagcgagaacggtctcggcagcaattgggattggatcaactgtctcgtgcggagaagccccatggcctcccttgccaataatctttccgttgaatatgccagccccggcaagaaaaggcccgtctctgataccgataataccgctcggcaaatccatccaaacgtggaagccgaagatagcgtccactccctccaaggcgccgccttcaatcattttaaccgcgccgtttccaccttcttcagctggctggaagataagtctgacccgacccttcagctcatctctgtgttctgctattatcttcgccgctccgagtagcatagcggtgtgggcgtcgtgaccgcaggcgtgcatctttcctggaacttttgacttgtagggaacctcgttctcctcctggatgggcagggcgtccatgtccgccctgagggctatcgttttttcaccttcgccaatgtccgctattattccagtcccaacacgctttattgagtacccccactcgcgcaggtgctcctcgactatcctggaagttctctcctcttcgtacccaagttccgggtgcatgtggaagtccctacgccaggatacgatcagactccctatcctcttcgcctcggaaactgggtcaaagttcatggtctcaccgagagtatttgcaataaaggacgatatcaactttttgattcacatctgggcgaaccgtaaaatttataaacccacccagataggtgattacggcgtcgatggaagtgggccggtagctcagcctggtatgagcgccgccttggcaaggcggaggccccgggttcaaatcccggccggtccaccatccttgggttgggcccgtggtctagactggttatgacgccaccctgacaaggtggaggtccggggttcgaatccccgcgggcccaccacaacagccctttcttgcgaaagcgctggcggaagaggagtatgcgcttttaagcaggcttattttatgggggtttactttcaattggccaattcaaaggatttttctcaccgtatagtgcccgaagagcgctaaaaaagaaagttcgaaatcacaattaccaagagattttgaaagtaaacccgcgtgaagttgctttctggtagggcatacactctttgacaggaaagtcaaaagaaagggagcacttttggtcaagctttttccaaaagcttcctgcacgacgttgaagcggagcttcaacgcacggaacgatagttccattgagtttgatcaaggctcgcggttccttttgaacttgccttttgagacaccagcagaatgtctttttggactattaagccccctatccccgactattttatcatgcaggccacaaaaggtttaataaaatatatctctgcgctccataattgaagtcatgagagcccaggggggtgagtgcttggattggagagacttcttaatgtcactagacgatggtatcaaaatagtgttctctgagacggggttgctagtaagcagtttattttttagcgttattctgacctcctccccgccgtgaacggcgagggttccaacgagtcaaccccttgccaatgacggagaggtttgaggggtctcattgaacccaactttcagccaggttttcaacccctctggctcgggccttgagccagttacccctcccttgggcatacaaaccgcccaagttcggggttatggttttgacagccttcttcaagatgttgaaagctccaactaagtcggcgttgaaaataagccccgttgcgggacacttaaacaatcctctaacaaagcgagccccttcgtgaggcttcccgcaaacgggacaagtcctcgaagtgaaagcctcatcaaccaccaaaacctgaataccatactcttcggcgacttccttgagccgttttatcactgtgttaaaccgccaaacgtgagagagaaggtaattttgctttctacccttgttcgagttcctcgctattcccttcggataaccgaccacaattctggaaactccgcggtgataaagcttctcaacggtttgtctcaccgccgtgttaatgtagtgcttcgcctgaagcttggccttctggtgcattcttgcgagtttcttgctacttttagcaccgcttttgttaagtttggactgatactcggcaatcctcttctgccagtagaaatcaatgctcttgagcggtcttccattgactaagaagctttcaccattctccacataaacggccattaagttgttcactcccaagtcaattccagcggagaggttgcccaagggttgccttgggagttcaacccactcaccattgattagtttctcttccaccgtgtatgaaatatgagcataccacttccgccttattgggttgtaagttatttctaaccgcccttgcttgcccttcaagtgaattctcccctcgaactggacttctaagcgtttaaacttcccaaggccttttaggattaacttgttcccttcaattctgtattggtcttttcttagaacgattaagcctctctccttgatgtagtttggaggtttgggtttgaaccattttggtagttctccgttccgtttgttcctgatgagtgagaagaatgaacgccagctttcggcgttctttctcgctatttgctggactgttgccgagcctatctcagccttaaactcttcataaactattttctcggttttgttaaagtctattggtttgccgtcaaagaattcttgtctcctcagatagttcactttgttccaaacttttgaactgattagagctaactctttgaggattttctcttgggcttttgaaggttgtagcttaatggttactgaacgcttcatttcaaagcatggtatgttttttaggctttaaaatagttttgctttcctgctctcaggctggtctttcgattactgcatccccgccctgaagggcgaggctttcaaaagaaaaaagtaatgctgtggcgtaacaaggatattaactggattatatcctattggtccgttattctaactacagtgggctttttcgttgggctgtttattgttctccacagtgtacggaactcgtacgagcatgcccgcaacgtagtcttaaggggaataaaaagcatatcaggactgctgctggtgacatcaatgataataatactaggtcccctctcattaaggacatttataataacactaggccccattaaaatagggggtataattttatcaatactggcccttggtttaatatcagttccgttttacagagtatttaagaatcaaaatacaggcgattcataaaaaatcttttaacttccttcccaatctcccctccgatgctcgccgttaaagttccaaaacgtgaagcagaaaaaatcagaagaaagctcatcgagcttggagtcttagctaaagggtactccccgaaacgagagggaaatttcgtgctctttcccgttgaaatgcccgtggagggattcgagttagttgaagcggagttcgaaaaaactgaaaggcgaccccacagctaccgtgaggtcgttgaagtcccagatgagattaaaccactcctgccaagctcctttgacatcataggcgacattgcgataatcgagcttcccgaagagctcatggactatggaaaggccattggagaggctattctcaaagtccaccgccacataaaagcagtatttgcgaagggtagcaaggtttctggggaataccgcataagagagcttatccacctcgctggtgaaaagaggactgaaaccctccaccgtgagaacggaataaggctgaagctcgacatcgcgagggtttactacacccctcggctcgccacagagagaatgagggtctttgagagaacccagccgggggaaatcgtcttcgacatgttcgcgggcgttgggccatactcgatactcctcgccaaaaaggcaaagctggtcttcgcctgcgacataaacccctgggcggtaaggtaccttgaagaaaacaagaagctcaataaaacgcccaacgtcattcccatcctcggagatgtacggaaggtagctggtcagattaaggctgaccgagtgatcatgaacctccccaagttcgcggacaggtttttgaaggaggccatgatgagcgtcaaatccggtggaatagttcactactacggctttggtccggaggaagacctgttctccgagcacgagcagaagataaaggccgtcgcgagggaactgggctttaaggtcgagcttctagatgagaggagagtccgtccctacgcgccgaggcagttcaacatagcgatagacttcagggtttggaaatgaaggcttgttttgtgtggaaaacaatgtttataaggataatgttttatccataaaacatgattgaacagagggtctgggaagaggtcataggcgataaccttgaactccgggtgaagtacgtagagcgcaacgtgaaggttatttttccaaaaagccgagccctggcggttgtcggaccgaggagggcgggaaaaacatacttcctctttcagctgtgggatgcgattgacagcgagaggaagaaaagtctttacgtgaactttgaagacccgaggttaattggggtaacttccagtgacctcatggagatgctcagggtttactactcccttctgaaccaccccaaaggaacaaagctcaccctcctgctcgatgaggtgcaggtggtcgagggctgggagaagttcgtccgctacctcctcgacaggggacacagggtagtggtgacgggctcctcctcaaagctcctttctaaagaagtggcaactgtcctcaggggaagggcagtgaccctaaacctttaccccttctcccttccagaggttctcatggtcaaggggctaaaaggggagcttccaagcctggagacaagggggaaaattcgaggggttctgcgggagtgtctcgaatggggctcgtatcctgagaccgtcctccagccggagctgaggcgggaaattttaagggaaatactggaggtcaccatctaccgggacgtggtcgagaggtggagggtagacaacctcaaggcgctccgcttcctcttcaagcttctggcctcttcgagccatgcaacgataaccaagcttcattccaccatgaaaagcctgggaatagcggttggaaagcccacccttgctaactacctcgaatacctgaacgacgccctcgtggtgtttccgctcagggcgtacgtgaagtcggagaagaagagggagctccttggcttcaagccgtatttcgtggataacgggctactcgcggtgctgggcgtgagagactggagcaggttgctggagaacctcgttttcacggagctcctaaagcgcggccttgagccgaacagggacctgttctattacgttacccaggagggcagggaggtggacttcatactccccggggaggagcttattcaggtctcgtgggagctccaccccggaaacgagaagcgtgagctctccccattggtgaacgccgcgaatgaaacgggaattgaaaagatgacgctggtcacttgggagaggtacccggcagagggcataaaaattggagaaaaaagcatcagagttgtcccgctcgaagagtgggcactgtggtgatcacttgcccgctatcttcacgttctcgaactttatgtgcggcgttatcatggtgttcatgaagggcattacagtctgctcttttgagacctcgcttgcctgctggagaagctcgtagacgttgcccgctatgaggaagaccgctgaacccttcacttcgccgtcctcgatgaggaacgctggattggccgttaccgcgaagtttccgttgtccgggttgctcgaatgcgcaccctggaggccgtccacgaggtatcccctgtctatctcccctatgatgtcctcaagggagcgctttccgttctcgatgacaacgctgtggaagcctatgtttattccgccgctccttatatccctcttcccgtttcctgtgctctcggtgccgtaaatcttcgcccagtagttgtcccagacaaaccccttgaaggccccgttttcaatgaggacgttcttcctagtcgggacgccttcatcgtcggctattgttggcctgagggagagcggatggaacgggtcgtcatagagcgttatgacctcgctcgctatcttctcaccaacctttccggcgagcggcgtggtctccttaacaaggcgctcgccgctgaaggccgggaggagggtgtagctgaagagcccagcaatcgcccacgggccgaatattagcggaacttcctcattcttgcttgggacgacgttgtaagcccactggaccttctggacggctctctccacgatcccctcaacgtcgaggttgaggtctctgcgcgcgtcgaagtcgaagattcctggtgtaactacgcttcccttccttccaacaatctcaaggtacatgtacgccgctccaccttcctggaagacgtcaagaccgtgtgagttgaggacgtgcctctcttcccatgaaactcctccggctcctccagccactacggcgttcttgtccttctcgcgggcgagctttatccccttgacaagcttctcgaccagaatatcaggagaagcctccttgagctcgtagttcggcttcggcttttccctgtacttgcccggctccggcagggaaacccacttctcgtcgggtgagttcagcttcgccatctttgctgcctgttctatggcctccttcaccttctccggctcgtcgctgtcgactatcgctagcccgaggcgcttgtcctttatcccgcggattatcgtcaaagccccgcttctcgtcgaggccatcgaaatctcgttgagctccaccgaggcctcgatatcccttgagcggtaaacggctatctcaagctcgtcaaaaaacttctcgccgaagcgtatgaggttctccatacttcaaccctccacctctgcggtcttaagatcaagaccaagctcctttatcttcctaaacatctccccgaggagaacttcccgggcacgccatatttcgatgccgacgatgtttcctttctcgtcgtaatccaccaaaaggtcgtcgtcaatttccacagtctcagcggcctttccgctggatacctcaatgtaaagtatgtccccgcgcgggtcgtacctgaccttcatacttccacccacctaccttttttgatgcgtctctctatttgagtctttcttgagacctcgtaaactgttaccacttcaatgccctcgtgcgccgcatcataaacaacgaccagccagcggccatttttcttcactgctatgaaatggcccgtcagcatgtccactgcccttatgtcggggttctggagtgctgagataacgtcctccccagctatttcccttttcctgagcgcttctacggcgtgcccagtaaagcggacttcaaccaatgattattcctccatcaaagcgcatgtgcgggccgcccgagcttacgaaggccgtctgtcccttgccgcagaaccctacttcaaggccgaagtccttgccaactgctgaaatcttcttgagggcctcgatagcgactcccgtaatcgaggtgtcccttatcggttcggctatctcaccgttcctgatgacgtagccctcctggattccaacctggaaggccgagttgagctgggcctgtccaccgcggaagtcgacgacgtagtaaccgaacttgatgtcctctatgagctcctcgaaggagtggtcgcctggctcgaagatggtgtttctcatcctgattatcggtgggtagcggtagctctccgctcttgcgtgtccgttcggctccatgccccatttggccgcgtattccctgttcagcattatctccttgaggattccgttctcaatgatgtggatgtccttgacgggaacgccctcgtcgtcgtacttgtcgtttccaaagccgccctcaacaatcctctcgctcatcgtgacgaactccggagctatctgcttgccgattaagtccttgaagggcgagtttatcgtcaggtcagcctcagctaaatgtccaagggcctcgtgggctatgatgccgacgactatcggtccagccacgatgggccactcgccgcgctttggagcaactcccttgagctggctccacatctttctcttgagcctctcggcgaccttctcgttcggctccctcttagtcatcagctcccagccgtagtcaaccgcgccgatgctgtccctcgccatcgcgagctttccgtcggcctttcctgtgacgtaggctccctggtagaggtagttgtagtcccactctatcctcgtcccttcattggtcagcaggagctttttaccgccaccgtcctcgtagcgtatctggacgctctttacggcttcgtcctccttgaggatcttctccagctcgcggaggtgggagaccttctcctcaatgtcaacttccctcggcttgatcttcatcttgctcttcacaaagtcctcaacgggctttatctccgccagctctatcttctccttcttcgtctgggccgcggccttggctagcttgtaggcttcctcaatcttcttctcgaggttggtgaggtcactggttgaagcaaaaccccacgctccgtcagccagaacccttatggcgacgcccctgtgaagctttccagtgaagctggtaaaaacgccgtccttgaggccgagcgttgtctttctcaggtcttcatagcggagctctatgtactccgcattcaggttgttctccgcccacttaagggccctctcaagctcttccatggccatcaccgttgatgtttgtccagtatgggttctcaacgagatataaaagtcttttgaggtagattgaacatttcgatgaaattcgaaagcgaagattttttcaatactggagataattataccacgggaggggtggagataatatgaaggccgaaatcaaaaacctcatagacagaggcacttatagaaagctcccactcttcgagggtgagctacctgaggggagctacgctcagatagttgaagtcaagccaaagcagaccgtcaagaagcattaccatgagcgccaatacgagctcttttacatcataagcggcgaggcgaggttaggcataggtgatacagaataccaggcgaaacctggagacatcttccttgtaaagccgaagaccgttcactgggtagtcaacgaaaaagatgaacccttcaggctcttcgtcgttaagctgaactatcacggcgatgactcagtgtggcttgaatgagcgggtgggaatatgcccgagagggtaatcggaatcctcggtgggatgggcccgctggcaacggcagacctcttcaggcgaatagtcgagaggacgccagccaggagagatcaggatcacccgagaataataatctacaacaaccccaagatacctgacagaacggcctttatccttggaaacggcccagatccgaggcccgaacttatagccagcgcaaagaaactcgaaagctggggcgcggacttcataataatgccctgcaataccgcccacttcttcgccgagacaattcagagggcgataaacatccccctagtaagcatgatagaagaaactgcaaagaagattgaatcaatgggcctcaggaaggttggcctccttgccaccgacggaacgataaagggaatggtctaccacagggcgctccttaagaggggcatccacatagcagtgccaaacaaaaaggatcaggggctcgtcatgaaagcgatctatgaaggcgttaaggctggaaacctcgaactcggcagggagcttctcttaaaggttgcgaagaaacttgagaggaggagtgagggaataatagccggttgcacggaggtaagtgtcgtcctgaagtcggaagacttgaacgtccccctgatagacccgatggacgtaatagccgagagggctgtaaagctagcacttggtgccgaggacttctaaatccacccctttcttctaaagtagaggagcatgcctaccgctatcacgagcatcgttgttaggactgcaggataaccgtagcgccactggagttcgggcatatacctaaagttcatgccgtagaggcccgtaataaaagtcagcggaatgaatatcgtcgaaacaaccgttaggattctaattatgtcgttagttctcatcgagatcgtggagtagtagaggtctatcaggctgttggcgagctcacgctggccctctaggatttccagaacctcacgaacatggtcgtggagctcgtcaagaaaaggccgtgtaccttcactgaaaaaccttgacccctcaatttcgagccgtctgaacgcctcaaggagcggaaaaacagttctccgcatgaagaggatgtcctgccgtatgcggtgtatctttctaagggttcttgtgtcgcttctcgaaagtatctcgttctcaagtccctcgattttggagcttatggcctcaattatcgggacgtagttctccactattgcctctaggagagcaaagagaaggtaatccgccccctgttctctgaaaaggccctctccctcgcggataccttcccttatggggtcaaaaacgtccccgggtatctcctgaattgttatcaggaagttgtctctcaggatgatgccgactctctccctttttaagcctccctcgctctcgtaaacctggtggacgatgagaaacagatattctggaaacacgaagactctaacacgggaggtctgtctttgaagagcccttatgggcctctcgtggattttaaaaacgtcccttagctgctcccccaaagaaagaccgtcaacgttgatccagacaacccgataatcttggaatccaagggcctcttctaggtttgagagtttcctgctaacgaatttgtcctttgagtaagctatcgcagtaatcttagactcttcctgttttttcatttctcttcctccgttcaacggcacggacaattggtagagaatagtaaaagaagaaattatagttttcggccgaaaggacttaaaagccagtggcgaatttgggctggtggtggagaacatggagataggcctcgttggaaagccaaacgttggaaagtccacattcttctcggcggcaactctcgttgatgtggacatcgctaactatccgttcacgacgatagacgctaacgttggggttacctatgcgatagcagagcacccgtgcaaggaactcggatgcacgccgaacccccagaactatgagtacaaggatggaaaggcgctgatcccgataaagatgatagacgttgcgggtctcgttcccggggcgcacgaggggcgcggccttggaaacaagtttcttgatgatctcagaatggcgtcagcgctgatccatgtcgtcgatgctaccggaaagaccgacgcagagggccagccaacggactaccacgacccggttgaggacatcgagttccttgagagggagatagactactggatactcgggatactcaagaagggctgggagaagtttgccaagaggataaagctccagcatatgaagcttgagggggcgatagccgaccacctctccggaatcagcgtgagcgaggaggacgtgtgggaagccattcacaggctcggcctcagcgacgacccaacgaagtggactgatgaagacctgttcaacttcgtccgcgagctcagaaaggtgaacaagccgataatcatagcagccaacaaggcggatgccgcaagcgatgagcagctagagaggctgaagaaagagggtgaaaagaggggatacatagtaatcccgacctcggcggcggccgagctaacgctgaggaaagccgccaaggcgggctttatagactatgtccctggaagctcagacttcaaggttctcaaaaaactgagtccaaaacaggagaaggcccttgagctaataagggagaaggttctccagcgcttcggttcgacgggtgtgcaggaggtaataaacagggcgacctttgagctcctcaagctgatccccgtctatcccgtccaggacgaaaacaagctcacagaccagtttgggaacgtcctcccgcacgtctacctgctcccgaagggctcaacgccaaaagacctggcctacaaggtgcatactgaccttggaaagaccttcctctatgccgtcaacgcgagaacaaagaggcgcgttggtgatgattacgagctccagttcaacgacataataaagatagtggcaacggcgaagtgagctgccgttttgggtcagtttcccctttttcaatcagcttttatcagctggagctcgtctgaatcttttccttcaggagctcctggtagagcctgggttcaacgtccttctcactgagcccgagcttttctgcaatctcccatatccttcttttggcgtattcaacgtccttactcatgacttcgatatcgagaaaagcgcccaatccttcaacatcgctcagctcgaatgtcacatcgtcaagtttgtaaacgagcctcctcttccttatccaaacgtcttcctcaaaccctagtcttttgagtatttcaactgtagtctcgaagtcggagacctcgacctcaagctcgtcgaactcctcgtttctgccaggatcctgtatggacttatacgtcagaaaagccttcccaaggttggggatttttctaacgcggaggaggttggggaggggaagggaaaaatagaggtcttcctggacttcttccctgatgaatgatgctccaagcccttcaatttttctcctgatgtcttcaaactcaactctgaactttatttcaatctccatcagacgtccaccaggaagcctatgacgtcttcaccctttacgatgttggtgaacggaaatacttctacctttctgaggctcggaagggttcttatcgtatcgtcgacgaacttctctatctgctcctctgtttccccgccgatgagggctataattccgtttctgccgctccttgcaactgccagaacgttcgggagcattgagagtgtttttgtgatgtgattgatgtacttctcaaggaagtcctctatcacgggaatctccgtctcaatgtacactgcaactacggattttggcttcagcggctctccaaggattattgtgtacctatcgattacacctttttcaataagctttttgattctaaagtggatcgtggattccggtctatttaacctctctgctagctctgatatcgttagtcgggcatcttgttttaacagcttgagtatagccctatcaaggtcgtccagctgtaccatggatcgtcccccaacgtttgtataattcatgaggtattccaagaatatctaagattctgccaattataaagtttatcatatcatccacagttttaggtcttgtataaaatccaggggatgcgggcataatcacagcccccgccctggcggccttcatcatgttttcaatatgaatcatgttgagtggagtctctctgacgagcagaatcagttttcgtttttccttgagggctacatcggctgccctcgttattaagttgtcggcatagccgttggctatcgccgagagcgtcttcattgagcagggggcgacaaccatggcatcgaaaggatgagaacctgacgcgaccggggcgaataggtctttttcgtcatagtcgggctttaacttgattccaagctcgtgatatgtgactgctattcctgtccttgaagcaagaacaacaacctcatgcccaagctctttcaaaacttctaccagcttcacaccataaacggccccgcttgcccccgttattgcgacaatgactttcatccaatcacctaacgttcgctagggacgcttgttttaaacttttccggcagatttttatactatttcaggttactatcctcggttgagggagatgagcgaagtcataagagtgcttttagaggaggcaacaaaggtagcggagaaaattggggcaaaggcattggtcattatggaggagcttcctgaagaggaaatccctgacgttggcattaccgttgttatagttggctctacgtttgatgttgaaaaagataatgtcaagaggatatcaattccccagaacctcgacctcaacaaccttctcaacctcatttcggcttttctgcttgagcatggaatcctgtcagagggcgactcatttgtctacgtaacggagaacctgatcggcgttcgtacaataaagaggtcaatcgttgccatgaagagcttcttcgcccagaaccagaacgtccttcaaaggatgctggagattgcgatagagctgagtatagaggggagagagggaaatcccgtggggacgatattcgtcataggcgacacgaggagggttcttaaacattcgagacagctcattccaaacccgttcaaagggcacaggataaacgtgctggacaaggagagcaaggaaataataaaggagttcgcccagctggacggagcttttctcatcagggaagacggcaggatagtggccgctggaaggtatcttgaggtagagccgagggttatagacctgatgcttccccccgggctgggaagcaggcacatagcagccgctggaataacaaagataaccagcgcgatggcaataagcctctcggagagcggaactataaggatattcaagaacgggctgatgctcctcgaatacaacccgagactgaaatactgataaaagaagagatcaaacgttgaagatgcggatggtgttcgtccccgcggtctttcctatgggcgttcccttcgtcagaagtaccgtatcgccctcatctaccagtccgagcccggttatcacgcgcagtatctcctcttcgctggtgtcctcaacgaggaacggataaacgccgtaggagaacatcagagtgtttttgacccattcatcagttacaaatgccagtacccactgctttggcttaaaacgggctattagcctcgcagtttgtcccatcctggtcggtgttagtatgtatttaatgtctatggagttcagggcctctattatactcctcgttattgcgtcctttatggtaccctttgtcggccgtgtacccctcaactcactcatcttccattcgacggttctttcagcccatttggagtccctgtatgcctcggtagtcttcgctatcctggccatcattttgacggtctcaaccgggtactttccgaccgccgtctcctcggagagcatcacggcgtcggttccatcaaggattgcgttcgcaacatcggtgacctcagccctcgttgggagcttctcgtgggtcatgctctctagcatctgagtcgctgttatcacgggctttcccgcacagtttgccttttggataagctttttctggagaatcgggagcttttctatgggcatctccactccgaggtctcccctggctaccatgaccccgtccgccgccctgagaatctcgtcgaagtttctcaccgcgtcgggcctttctattttggctatcaggaacagcttgccgttcctttcctcgacgaatcgccttgcctttagaacgtcgtaggcggaaccgacgaagcttatgccgacggcgtcaactccgtgctccagagagaactccaggaattctaaatccttctcggttattgcttcgatagccaggcgagccttgggaatgttgattcctttgcgggagaagagagttcctccgacgagcaccttacagatgacatcctggtccctgacgtcttcaacccttagcgctatgaaaccgtcgctgagatagatgacgtcccccttcgagacgagccttggaaagtccttgaactcaacgggtataacggcctcgttgccgattacgtccctcgtggtaagggttaccgtctgccagcgtctcagcgtcactgagccgccctcaatctcaccaacgcggatcttcactccgggcaggtctccgagaattgcaacgggcctgttgagcctctcagagacctttctcacgagttttatcgacttctcgtgctgtttcagatcaccgtgggcgaagtttatccttgcaacactcatccccgctcgaaccattgccgttatggtcttttcgttgagagacgcaggacctagggtggctattatcttggttttctgtcctgggagccgcatgataccacctaagaagagattatggcaacatcttaaattaatctttccccttggtatctgctaaaaggttccgttcaagcttcctgcggcaagagtcgcagtagcccagaaaccttgagtcccactcctcaagcgtctgtggtgggttcattacacagtcgttgggacagtgttccagcccgaaagagtgcccaatctcgtggagcatgcccttgataagccgcgtcttgaacgcaggaagctctctagagaggactctctccgctaagctccttaggtcatcatcggccaggggattatcgagtatcttcagggccatcctcatggaatcggactcaaatgggcgcatggagaggagcattactctcctgccaagcctctctgtttggaatcccagaaatttttcatagaatccaaagtacttatccctggaagctaggggaaagcttgttatcccgaatatcttattcatgttgagcccgtcgttcttttcaagttctaccttaagccggtagtccataaaatccaccaggacgtctagcgggaacagcctgacctttccttctggtgtttcaagggttattaagtacccgggctccagaataagcttgtctaaatacacgaggcgaataggaagcctccactcctctaagagcctgtttacgtcgttgtatgcctcgaagagagcttcctcaaccctttcggatacgaagttcgagacgtatgtgaagcctatgtactccattttactgcccaggggattttgggaggagccttataaagtttttaggggcgaaccgtgaaatttttaaacgacttcatataattcagcgcgggcgatggcgtccgcccggggcttcgagcccgaaccgctcgaaagggctgatgacgcctgttctactccataggaggcggtagaatgggctcgaagcttgatgagtttgcacgctttgttgatgtgcacaaagcacttgagtacgtcgagaagagaaggcacgaagacggcggctactgcttcgtcagcgtcctgaacgacaccaacgtgaacgacacctactatgcagtcaagatgtacgacctgctcggcctcggagtccctgagaaggagaagacgatagagttccttgagagggcaattcagccccagacggccgttgtagccatagcaatggccctcgaaggccttgcgatacttggagcgaaggacatcgcgagggagcacgtgggcatcgtctataccaagtacaaccccctcgaagataagtttgccgttggtcttggcggcagtgaggagttcggaactgcgacgccccttgaggcaacatactgggtcgttaaggctttcaaggcaattggacagccaataagcgaaaaggaaagggagaagatacgggccttcgtgatgaggttcaggatgagaaacggcttcggcgtcaagcagccgacaacgacgatgacctatcaggccctctacaccctctacgcgcttggttaccacccacccagaagtcctcacttccggaactgtgagctctgcggcgactggggcggctttacggaggttccgtacagcctgccaccctatcttgagccgacgttctacgcaacaagggggcttgagctccagggagagaccctaacctgcccgaggaggcacatctggtttatccgccagcttcaaaactccaacggcggcttcaggagaagtcttgagcttggaatttcaaacttccagaacacatacagggcgcttgcagtggtagatgccatgatgagatatctgtaaatcttttaaacaatccatcctttcgaaagctcctgtgtgtaggactaacgtgcgggaggaagtaccatgaacctcagaatagcgatggcgatagcactgggaggcgcgtttggagcagttgcaaggttctacatctcgggcctgctccccgtctaccgggacttcccggttggaaccctgatggtgaacagcatagctagccttatcctcggatacctctacggactcctgttctggggctttgatgttccgcctgattggagggcctttttcggaacgggcttctgtggggcgttgagcactttttcaacgttctcctatgagaccttctcgctcctgcgcgagcgtgagtaccttatagcgaccctcaacattttggcaaacgttataatcacaatcgcgttagtatttgcgggctttatgctggcccggaggtgaaaacatggtcgaagttgagcactggaacacgctccgtctcaagatttacatcggcgagaacgaccgctgggaggggaagcccctgtacaaagcaatagtggaaaagcttcgtgaaatggggatggcaggggctactgtctatcgcggcatctacggctttggaaaaaagagccgcgtccactcaagcgacgttatgaggctttcaacggaccttccagtggttgtggaggtcgtggatagggggcataagatagagaaggcgatatgcgagataaaacctatgataaaggatgggatgataacggtcgaacccgtcatagtggtgtgggtcggcactaaggaagagatcgaaaagttcgaggaagacgccgttagagaaacttagagtgctaatttttggacattaatcaaaaacttaataaactcctaaagacgatggccttataagactccatataatcaggggtggtcataaatgatgtcccttgaattcgaggttccccttgatctcctcaacgatgtcatggacttcatcatcgaggaggatgcaaagctccagtgggttcgctactcaaagagaacgaattccgtggtaataagggttttaatctccgccgaggttattgagcagtttctccttagacttgcgagggtcgttggtattcccctcgaagttaccatagtagaagaaaaaatcggtgaaaagctgattcacgaggcgtttctgtttagtgttgaggtctcctctggcacttatcccgtgttcgtgctcctctactacaacgtcagcaagttctatcccgacagaatagtagttgggacgctggcagatgccccccaggagctcgtggacgccgtgttctcaaggacggttggcaagctcagactcctggacactgagaaggccaaaagtaccgtggaaaacgggatgcttttaatatacctacgagccaacccgccctcgggacagctcggagttagttccgcttaactggttgttttaggcaaggtctttaacccctttttctaactacctacggtgattcagatgctccatcacgtcaagcttatctacgcgaccaagagcaggaagcttgttgggaagaagattgtgctggctattccaggaagcatagcggcggttgaatgcgttaagctggccagggagctgataaggcacggcgcagaggttcacgcggtaatgagcgaaaacgccacgaagataattcatccctatgccatggagttcgcgacaggaaaccctgtagttactgaaattactggcttcatcgagcacgttgaacttgctggagagcacgagaacaaagccgatctcgttctcgtctgccctgcgacagctaacaccatatcaaagatagcctgcggaattgacgatactcccgttacaacggtcgtgacaacggcttttgcccacacccccataatgatagctccagccatgcactcaacgatgtacgaccacccgatagttaaggaaaacatcgagaagctgaagaagcttggagtggagttcatagagccgcgctttgaggagggcaaggcaaaagtcgcttcaatagaggaaatagtttaccgtgtaatcaggaagcttcatcccaagagcctcgaaggaaagcgcgtcctcgtcaccgcaggtgcgacaagggagtacattgacccgatccgctacataaccaacgcgagcagcggaaaaatgggagtggcgattgcggaagaggcggagttcaggggcgccgaggtaacgctcatacgtaccaagagcagcgttccgagcttcgtggagaaccagatagaggtagagaccgtcgaggagatgcttgaagcgatagagagtgagctgaagggcaaaaagtacgacgtcgttgtcctggccgctgcagtcagcgacttccgggtgaagaacaaagcggacgtgaagataaagagcgggcaaccgctcgttctcgagcttgagccgacgccgaagataatagaccgcgttaaggaactccagcccggggttttcctcgtgggtttcaaggccgagaccggtctcagcgaggaagagctcatcagcgccgccaggaagcagattgagcgcgctggaagtgacctggttgtagcaaacaccctcaaggcctttggaagcgaggagaacgaggttgtcctggtcggaagggacttcgcaaagaaactccccagaatgaccaagcgcgagctggcggagaggctctgggacgagatagagaagatgctttagcccggttttatcttttatcgcttattctcaaaacgtgaacgggaagttttttagcgacacttcttgaacttccatcggtgtgtaaaatgaaagtggaaatacctaactacggagaagtccagatagactctgttattttcgacctcaacggcaccctgggggagagcgggagagtcgatgaggaagttaagcacctccttgagaggctggcggataagtacaccgtcgtcgtgataagctctgacacctttggcacgctggaagaagagcttggaggtcttccagtacgaatcgcgagggcctcaaacgcctctgaaaaggtcgagatagctaggggctacgctccctatgcagcagttggcaacggaaacaacgacgttgctatgctggagggagcggagcttactttctgcgtcattgggaaggaaggggctaccgttgatgccctcctggcgagcgacgtcgttgtcaccgacgtgagggatgccatagcgatgctcctcgacgagaagaagctcatcgcgacgctgagagggtgaggtgatagcgtttggagtacaagacgctgaagggcctcggcactgcccagctaataatcaagaagtccgtcttcataggctacgcctcgcctgccagcactgaggaggaggcgaaggagttcatagcgaggataaaagcacaccacagcgacgcgacgcacaacgtctctgcctatctcatcaacgacggaaagaacttcgcggtcagatatgacgacgacggcgagccaaaaggctcggccggaaagcccgtactcaaagtcatccagaacaaggggctgagcaacgttgtggtcgtggttacgcgctacttcggcgggataaagctcggctacggtggtctggtgaaggcctacagcgatgcggcgagcttggcaatagagaacgcaggaatcgttgaggtgcatgaaacggagcgcttcgaggtgacttttccctacaacctctttcacacagtcaggagcacgatagaggagaacggcggcagggttgtgggagaggagtacggcgagcttgtaaagttcacggtagagactaggaaaggggaagcggagccgctgatggagcttttaactgagaggacaaggggaagagttaggctgaggccgctgtttatgaggagcgtttagatagcactctcctagctttgtccaggaggaagaggaggatggccaatgttatcggtctcctcacagcgtagaactgaacaccttcttccgtttttacggctttgagcttgtagaggtaggggttaacacccctggagcgcaggagctccctttcgtgctctttgtatgcatgtataagatcgttcagcggatctccattttttaaatcttccaacatacgttttctgatctcaatgaactcctcgcagtcggggacgggctctccctccttcaggtcaagcacatcagctacgagctcacgtcttcccccctcgtcgaggagttcgcatatcctcctgacagactcccagtcctctaaatcctccgccttccagtaaagccactcgaaggcatcgtagcggtaggtccgtttgtggatcctcctcgtccactcgatcccgagtctgagagctattcttgccagttcgggctccttacgccccagaactcccgcgatccgccccaagatttcagccttattatcgggatcaggaatgaagtaatgaagctcaaaggccttttttgccctctcggcgctctcatcttcccagaggtagacccaaaacgccctgtaaaccgcccattcgaagccttcgccatcgaggaggtaagccactcccagggccttttcaaggtctccagtcttggcgaagtgctccacggttttaaccacataccatttcagctctccgttcagcgtatcctccggcagggttttgaagaactcatgagcctcatcgaacattcccgatctaataaagtgttcggccgattctgcggggttctccggttgcatggaatctttctctagagtcaagtttaaaaatttaccgaatggggagtaaggtcaaaacgggtcttgtgcatccgctttatttcccttcaaaatcctctcccaaacctttattgcggcccacttgtccagaaactcgttgaaggttccgcacttcggcgagagaacgcagacgggacagccatcctggcatttacacgatttcaggtgctcaaggctcttttccatcagcttctcggcgttctcgtagattatcccggctagaccagcgccgccctcgttgccgtcgtagatgaaaacgaccggctttccaaaatagggcgtccccggaaagctctcgtagctgtagccgccgagctccctgctgtccacgtaggtgaatatcggcgctatctttatcatgttgtgctctatcgcgtggagcgcgcttccaattccgtccttgctgtccaccatcttcttcacggcgaaggcgagttcctcattctgaatcccagccttctggagggcatcacctattgccttccttattatgaagctcgtggcaccgaggtagagcgggaagagctttcttctatcaaggctctcgtatatctggaacgccaaatcctcaaaccccttctcggtcgccctgccaaagaactccctgaactcctcttccgttagttctcgtatctcctccgggaagacgagccatattccttcggtctcgaactccctgacgtagggctcctcgaattccactttcgcgaacttctcccagttgagtatcgagaagtcttcctccgtctcaactctctcgcccgtcgctggagaggagatttcgcctttgagtatgccagcttccttcagccgtaccagttcctccacgtagtttccagtatcgagccccttcacggcgaagccggtgtagacgtgcctgacgcggagccttccgagacctatctccacgcctttgtaggccttctttgccctctcttccagtatctcgacttcttccagcttcctcgcgaaggtctcaacgtcccagaggcggtttagttgcttcgcaaatacgaagtggaactttccgatgctgagccgctccatcgccatgtagagctctccccttgagaagtaggccattccgggtaagagcgagcggtggtattcgtcctcatcgacttcttcaatgatgtggcccttcatcttgagccagtttatgaagtttaggagctctcggagagaggacttttccatcagcttcgcccttatccacggctcgtccttcacgaggaagaagctctcgtcactggcagttctcagcgaggagtactcgaaggccggtcttctaaccctgacctcaagcttccctgtcagcgggttcttcttgaggtcggccttcctctcgaccacgagcttttcggctattctcctctcgaactcgtccagctcgtcccagtcaactattccaagctcggtgaggaggtagtggaggtgcttctccgctatgcgctcgttgtcggtcttgaccggcatgtactcgatgatgcccttctcaagcctctcgacgagctcattgaagtgctcgcggtagtagtaatcgaggccgttcttcctcaaaacaacgccgttcagggcttccctgtcggcgctccttccagccctcccaaagcgctggatgagggagaacagcccgtcagggggaatgccgtagtttatcacggcatcgaggtcacctatgtctatcccgagttcgagggcgttcgtagtcaggagggcaagcaatttcccatccctgaagtccctctcaacttcccatcggacgttcttcggcagggtgcccttgtaggtggtcacctttgaaaagaccggagagttgaggaggaagcgtagggtcttctcggtgcccttcctgctgtcgaaaaagacgagggtctttatcctcttactcacgagcctctcgattacggcccttaggagctgtttatcgccaaggttcttcggctcaaagagaacgagatacctccgcgggaacggattggttgcatgggttattggctcaaactccgttctaaagagcttctccgcgaactcctttgggttcctcagcgtggcggagagggctattatctgcggcttcactccaaggcgcttgagcctgaaggacagacgcctgaagagccacgcggcattgctcccaaagaccccgcggtagacgtggagctcatcgacgacgaggtatcgaaggttcctgaggagccactcgtactctctccatcttcgtaggatgttgtagtggagcatgtccggggtagtgaagaccaccctcggcctctcgcggaggagccttcttctctcttcccaagggacgtcccccgttagaatcttcgcaggtacgagctttccagttatgcggtagaatgaaaggttcgccctctggaacttctcgagctggttgtttatgagcgcccgcgtggggtaaacgaggaggtaggtcttccgcggatctaggaggtaggagtcgaagatagccaggcggaagatttcgctcttcccgctggccgttggcgttgtaacgacgatattttttccagcgtagagcttttccagggcctcaacctggtgacggtagagagaaaagcccagctcctcaacgagggcgtttatttctgggtttttgaacgcgaattctccaaactcaccttctctcggaggaaaaacgtggactctcgcgatctctgacttcaggggtttgaggacttcaaagagggacatgggttagaattggaaccgcggttaaaaaataaagcggtcgggaagtcacccctcaaagagccacaggacggcatctgggaacctcttgccccagtagtactcgttgtgctgggcgccctcgtctatcacgaccttgaggttcactccttcaacatagcccttctccttcaggatgctcaccatctcctcgttgctcctggagaacgctcctggatcgctcccctccatagtgccccagtcgatgtagattttctcgggccctttctctgcgttcctgacgaagtcgtatatctcaggattgaaccagaacgccgagctcatggctccaacgtagcggaagacctccggatatgcaaagcctgcatagactgccatcagcccgccgagggaagagcccattattcccgtttcgttgggaactgtgcggtagtgggagtctatgtagggctttagcgtctcgactatgaagcgcaccatggcgtcgccctcgccgccccttccgtactcctcgttcacccagggggcatactcgtctatccttttgtccccaccgttgtcgattccaaccactattatcgagaatcccctctcggtgtagagcttttcaagggcctcgtcaacaccccactcgcccgcgaaggaagttgcgctgtcgaagaggttctgcccgtcgaacatgtagaggactggatagctcctgttggtagtcccgtagtccgggggcaggtagatccatatcctcctcgtccggttgagctgggggatgaccatcttgaaggtcgttacgttgcccgttatcgtgtgttcgcccactccgacctcctcgacgtagtcgcgccagtggtaaacggtgaactcgtaagtcccgctatctttgaatacaaactgcctgttggggatttcctccccgtttgggcctttttcaacggtctcccacgagccacgggtgaacttaaactcgatgacctttccgtaggggaacgtcaggtttattgcccacctgccgtcggggagcttcgtgagcctgtagttttcgtctcctgggttccagccgttgaagtcgcccgctatgtaaactgcatcgtcttcgggggtgtaacctggaaccgagacgatgaaggtaactgttatctccctggattctgtttttgttgatgtgcccctgggtgtggtagatgtttcggaagaggaagaactggtagtttgagattgtgttgaggatgtttgactggtttggtcaccctgagttatgtcagatccagcccctttttcggcggaagaggttggtgggccctgagagcctgtttgtgctgtacttgagttctggcctacgcatccggctgaagctaccatgagcagaaaaatcagaaggaagcctgcaactttcatgctcatttgatcacctgaaagggttgcctgcgtaggttttatctttttccactgctcccctctaacggcggttcgggaagttttgaggcagtgtaaaaacagagcgtcaataaaactaaactcgacaattacgcaatatttttatacatcaaagtacaaatttgttgtgacgactttttcaggtgtctgccaatggtagtgaagagggaaatgacccggaagtttttggaggatgctttcgcaggcgaaagcatggcccacatgaggtaccttatcttcgccgagcaggccgagagggaaggacttcacaacatagccaagctcttcagggctatagctcatgccgagttcgtccacgctaagaaccacttcatagccctcggcaagcttgggaagactcccgagaacctgcagatgggaatagagggcgagaccttcgaggtagaggagatgtatcctgtttacaagaactccgccgagttccaggaggagaaggacgcggtgaggacgacccactacgcccttgaggctgagaagatacacgcagagctctacaagaaggccaaggagaaggccgagaagggagaggacatcgagataaagagggtctacatctgcccggtctgcggctacacggccgttgatgaggcccccgagtactgccccgtctgcggcgccccgagggacaagttcgtggtgttcgagtgaatctttcgattttccttttcacaggtttgagacgcaaaccttataaggtatgactaataacattaaagcggtgaaagaaaatggcgaagtggaagtgcatagtctgtggatacatctacgatgaggatgagggcgaccccgacagcgggatagccccgggaaccaagttcgaagaccttccggatgactgggtctgcccgctctgtggcgctcccaaggatatgtttgagaagattgagtgaggtgatggaagatgcttagccagaccataaagagtggagactggaagggtgagaagcacgtccccgttatagagtacgagaaggagggcgacctcgtcaaggtcgaggtctctgttggaaaggagataccgcacccgaacacccccgagcaccacatagcttggatacagctctggttccacccggaggatggagccttcccgatactcgtcggtaaggttgagttcagcaaccacaccgacccgctcaccgagccgagggcggtattcttcttcaggacacagaagaagggcaagctctacgcgctcagctactgcaacatccacggcctctgggagaacgaggtcacacttgagtgatcttttccgtttttatctttatccatgtcttggaatctggaaggttacgttctcaccttcaaaggatacaacgacagtactggcatttttcggtgccaaaaacgtcttctttatcgaaacaacaccgtgagtgtaaaacaggttttctagtactccctttatctcctgaatctgataatctggggaatatatttctcgtccatcaacgtagattttaacgttgcatggatgtcttgaatccacgagaagaaggcttccgtctggtctaggtttgtatttcacgtctccacacgttctagggacatacacaagctcaagttctatgccatggtcataaaagtttccatagagtgcaactttttgatctttctttatgatctcaaagtcgtaatcgggcttgatgaaataatagagcgttcctccaagcaccagcgtgacgagggctattcctgctatttttttcagtgagacaaagggtaaaccctcggttctagtgcctaccaggggaactttccagaggctgaagaactcaacgagcttccctatgttgtatagggggattccgataagtagggggagcagaagagcgccgatgagagccaagttacccgcaaggttgaaattgagttccccagtttcttcggcaaaaaggcccattctgatccgatagagaacggcggaggctactatgaaggggtaaagcaccaagagtgataagacgagagttttgaaccccaagaccggcgagagttccatacgatacaccagcatattgagcaccaaggcacctgcggctatcaaagcagtctcccccacgaagagtagcaatggtcttgagtcaacatcaatgctccagaagtacagcccagcggcgtacaggagccctccaacgataaaaatcgggaggcctattaccccaaaaagaccgcttatcattgttataacagtcccgataagcatgaactcctttccgtttaatagaactgttcgaccctcgcccacttcaacacccatggcatattttaacgccaagtatttaagctttttttaaatttatgtcgaaaactacagagctatcaaatgaaaaagcttagttctttaagagaattgaccagaactgcccaggaaggcttataactgttcaaacaaaatcccacttaggtgggaggaaaatgaaagtttacatgcccgaccgtgagtggcccgaacactacagggccgttctggaggagcttgcaaagataactgacccaataaccgggggagacatcctcgactcgggtgtcgtcgccggcttggaggtcacggaagatactctcaaggtctggctcaacttcgagagccacgccgagtacaatataacaggcgagagcgccatagcgtattctaagataatcggcgacataatggagcgctttgccctagtcaagtttgagaacgtctacgtctatgacctcaagaacaaccccgttggggtcttcgagaacaggggaaggtacagggccgaagaccttgagggcgattgaataagctccttagagttttcaaaggcttgggtatagtgtgccatatactatgaagaaaaatgatgaaaacggcccttacacctcaaaaatttctgcgaaccctaatgtacatctcaggacacatgcacactttaggtaaaatttatatcccccccgttcaaacaaccatcgaggtgttcccaatggctgaaggatatagagagtacagagacaaggttcttggctttattgaagaccacgagaactggaggaagcacacgataaacctcatcgcgagcgaaaacgtgacttctccgagcgttaccagggccgttgcctcaggttttatgcacaagtacgccgagggctggccgaagcagaggtactatcagggctgcaagtacgttgacgaggttgagctcatcggtgttgagctcttcaccaagctcttcggaagcgacttcgccgacctgagaccgatttctggaacaaacgccaaccaggcggtcttcttcgggctcacccagccgggcgacaaggcgatagttcttcacaccagccacggcggacacataagccacatgcccttcggtgccgccggaatgaggggtcttgaagtccacacctggcccttcgacaacgaggagttcaacatcgatgtcgacaaggccgagaagctcatccgcgaggtcgaacccaagatagtcgtcttcggcggttcgctcttcccgttcccgcaccctgtcaaggagctcgctccggtcgccaaagaggttggcgcctacgtcatgtacgacggtgcccacgtcctcggtctcatagctggaaagcagttccaggacccgctccgcgagggagccgacataatcacggcctcaactcacaagaccttccctgggccgcagggcggtgtcatcatttacaagcgcttcggcgagacggaagagatagccaagctccagtgggccatcttcccgggtgtcctcagcaaccaccacctccaccacatggcgggtaaggtaatcaccgccgccgagatgctcgagtacggtgagaagtacgcggcccagatagtcaagaacgccaaggcccttgccgaagccctggcggaggaaggcttcaaggtcatcggcgaggacaagggctacaccgagagccaccaggtcatcgttgacgtttcagacctccaccctgcagctggaggatgggcggccccgctgcttgaagaggccggcataatcctcaacaagaacctcctcccgtgggacccgcttgagaaggtcaacgagccgagcggccttaggattggagtccaggagatgaccagggttggaatgatggaggatgagatgaaggagatagcaaggttcatcaggcgcgtcctcatagacaaggaagaccctgccaaggtcaggagagacgtctacggcttccgcgccgagtaccagaaggtttactactccttcgaccacgggctcccgctcaggctcagggagtaaattggaacttttccacatttttatttctaatttcaatcgtatccaggtggaaagccttcttgctggatttttttgaagaaaacgttataaacaaccttttctagccctttccagcggtaccacaccttcattagccacgcgcccccggtaccgctaacttcccccgaaacgggataaaataaggggctcaaatccagtggttcaaattaccaaacgtttcgaaactccttgaagtgaacgaaaggattattattctggaagttcaaaaacctctggtgaaatcaatgaggaaggcgcttgtgatagggatagcagttgttgttttggttgtagcaggatacggagccctcagctgggatgggaaagaggccagcggttcgccgcaggacagccacgcgaagttcgtcaaaatggagcttgacaagtccacctacagtccttccgataccatgattatcaggcttatcaacgagggcgagacaaaggcaactaccagctaccacttcaggctctaccgagaagaaaacggagagtgggaggaagttcccgttaacctcatgttcatagagatcgccgtttcgatagaacctggaaagagctgggagcagaaggtcaatctcgcggatctgaagctttccccgggacactacaagatcgtcaagaaagtcattctaacttcacaggggactgaaaacgctgccagctacgaggtcagtgcggagttcgaggtaaagggatgagtccgatgaagtggcccctagtgttcatcgttgtttttcttctcctttccggcgttttttacgtggaactttgcaaaaaccgcgagataaccgagaacaatgcagcctgtacggccgggactgccgttatggacctcgaaaaggaggcatacaaagtttgagacaaccttaccctgaccataaccaacacggggagcgagacgataatagtgggcgcaccttacagattatacctgctggaaaacggaagctggaaagagatagaaactggtttcacgttcacaagtatcgggtggcagataccgccgggcggcaactggacgcaaaccgtgcccttggtcatacgcgtccctgacggagccttcggaaagctcaaaccacttccgccatgtagatacaaaatagagaaaacagttctcattgatcgagacaaatgtgaaagcaggagtaacgaaataactctatcggccgagtttgagattgtcaggtgatcccaatgagggggaagacaggggcggcctgcaccctcataatactccttgtctggggccttaccggacctcacttctacgtggggcttgacaagagtggctatcatcccggagaagagccagttttaaggacatgcaacattgggttgacgccaatctcattcggagagggctaccatctctaccgcttagaaaacggaacgttggccccggttagaactggccttatctttcctgcggtactccactggctcatgccctttcagtcctgggagcagaaagtcagtttgaagtatctgctggaaaatgaatccgtcggaggggccccttcactccgggacctgccaccgggaagatacaggattgttaaggagatctgcggctggccaaggggctgtgtaaacgccagcttggagtttgatctgctgtcataatcggagcaaaactttttatcctctttcaacataccgaaccctcggctaaaggggtggtgagagatgaagttctgtccgaaatgcgggaacctgatgctcccagacaggaagaggaaggtctgggtctgccgctcatgtggctatgaagagcccttcgacgaggagaaagacagagagaaaacgaagatcaccaagaaagtcgagcacaagccggacgaggagatcatagtggtggagcaggacctcaagaccctgcccacgacaaaggtcacatgccccaagtgcggcaacgacacagcttactggtgggaaatgcagacgagggctggagacgagccgagcacgatcttctacaagtgtaccaagtgcggctatacctggagggcctacgagtgaacgaggtcgagcttgaaaccctgagaaagctcgcccagaaggccctcaaggagcttgaggaggcctacctccgcttacccgacacggacaatggaaagacttatttattccgtggaaaagaaagggttaggctcatgcttcagatattagagtcagctaaaaaggagggataaaaatgccgttcgaagttgtttttgacggggccaaggagtttgcagacctgatagcgaccgcaagcaacctcatcgacgaggccgcctttaagttcactgaggaaggcataagcatgcgcgcaatggacccgagcagggtcgttctcattgacctcaacctgcccgaaagcatcttctccaagtacgaggtcgaagagcccgagacaatcggcatcaacatggaccagttcaagaaaatcctcaagcgcggcaaggcgaaagacaccctcatactcaggaagggcgacgagaacttccttgagataacttttgagggaaccgccaagaggacattcaggctccctctgatagatgtggaagagcttgagctggagcttcccgagctcccgttcacggctaaggtagtcctcctcggtgaggttctcaaggagggcataaaggacgcttccctcgtcagcgacgccatcaagttcatagcaaaggagaacgagttcacaatgaaggccgagggcgagaccaacgaggtcgagataaggcttacccttgaggacgagggccttctcgaccttgaagtcgaggaagagaccaagagtgcctacggcataagatacctcagcgacatggtcaagggcatcgggaaggccgacgaagttatcctccgcttcggcaacgagatgccgctccagatggagtacatgatcagagacgagggcagactgaccttcctgctcgctccgcgcgttgaggagtgacctccctcaactcttttttgaggtgggaacgtggatatagtgaagctcagggaactcctggaggcagagctctcaagtacggatttaaacgaacttgacgaagacttctacgttgagttcgacagcctgataaaggccctaaagctaagcgcagagagctccagggaacgcggagaagacgtcgaggaaaggctttacctcgcccagctcaagatagcggagtccctcatgaaggagatcatcaagctcagactccataagatagttgatctcgcagtcgagggtaaaatcgcggagatgacagccgaggaaaagaggctcttcaacgtcataagagcatttatcgagagggaagagctcccggaaatttcagaggaagtccaaccgcaggaagagagcgaagccgaggcagagtacaggtccaaggaggttccaaaggaagcttacattatccagatagacctcccagccgttcttggcccggacatgaaagagtatgggccgtttatggccggagatatggccattatccccaccgttattgggcgagccctcgttgagagagaggccgcacgaagagtaaggatattcctctaaagtaagtccttttaagttgctccagtttttattctctaaagcaatcctccaaatgaatggatgttgaggtctatcaatggccacattttttgaaattatgcccacaatctaggtagaactgaccaattatgacaatctaagaatccagatttagacgtttataaaacagatgttcacgttgatttgtctttccgtcaaatttgttcccgaaaccaaaccgaaagctttatatattcgaaccaaccaggtttatagtgaagacgacacacaaaaagaaagaggtgatgtaagatggtcgtcataggagaaaagttcccagaggttgaggtcaagaccacccacggcgtgataaagctcccggactacttcgccgagcagggcaagtggttcgtgctgttcagccacccggctgacttcaccccggtctgtacgaccgagttctacgccatgcagaagagggttgaccagttcagggagctcggcgtcgagcccatcggactcagcgttgaccaggtcttcagccacatcaagtggatggagtggatcaaggagaacctcggcgaggagataaccttcccggtcatagccgacgaccgcggtgagctcgccgacaagctcggcatgatacccagcggcgccaccataaccgctagggctgtcttcatcgtcgacgacaagggcatcataagggccatcgtctactacccggccgaggtcggcagggactgggacgagatcctcaggctcgtcaaggccctcaaggtcagcgacgagaagggagtcgcccttccgcacaagtggccgaacaacgagctcatcggcgataaggccatcgtcccgcctgccagcaccgtcgacgaggtcaagcagcgcgaagaggccaaggccaagggcgagatcgagtgctacgactggtggttctgctacaagaagctcgagtgagcttctttcccttattcttctctgaacttctcgaatatcagctcatccacgaacccgtagccaggtatgtgggagtgcttcttcatcctgcccacaagctcgaagccgttcttttccaggacgcggattgatgctgtatttggctcatagacccgggcgtagacctttctgagattcagccattcaaaggcgtattttagggccagtccaaccgcctcggtggcgtagcccctgttccagtactccttcgctatgaagtatcccagctcggcgtgaccgtctttgtggtttatcctgtgcaggcctacaaagccaaccgggcttttggacgagttttctaaaacagtaaagaccctgttttcgcgctttcctctccgcatagcctcgtaccactcaagctcgtcctcaaaaaagaacagcccatccggatcgcttaaaaacctcctcacatcgcggtcgttgtaccagagccaggccctcctcacatcgtctttggttgggacagccagcgagaccagttttccctttaccaccacgggacgcatcgaccacaccttaaatttattaaggtgttatgggtatttaaaaacgatggaaagggagaggctcataaagaccgttgaagcgatacttagaggcgcagggtaccgcgttgccaggttagaccttaaagggtcgtgctttgacctagtggcgagcaggctctttctcctgctttttataaaggctaccgtgaacatcgacacgataacagaagagcaggcggaggacttaaagcgcctcgccaagttcttcaaggcttctccgcttattgttgggctaaggagcaagagcggcgagcttgaagagggtgtggtgtacgagcgctttggaatttatgccctccgccccgagaccctctacgatgctctcctgaacaacgaactgcccgctgttttcgcggagcgcggtggtctgtacgtcaggataaacggagagctgttgagagaactcagggaaaagcacggctattctgtaaatgaactggcacagctgctcggcgtgtctagaaagagcctgctcaactacgagcgcggcgaacaggcagtttcgcttgatgttgccatccagcttgaagagatatttgatgaggccctcgcggagccgatagacatcctgagggccaaagttgaagccgacctcaacgttaagcctgaaacgccgctcgagcgcgaggtctttgagaggctcaagaaactcggcctgggccttgtgaaggtgaagaaagcgcccttcaacgcgatttcaactgaagacgacatacgccttctcacgggtatagatgaaaggaagacacgctccaccataaaacgcgccgagatggtggcggaggtcggcagaatagttaacagcgggggcgttttcatactggagaagactaaggctgaagtcgtttcagaagttccgctcatccccaaggagagccttgaggaagttaaagacgcagatgagcttatagaactcatcgacaagctgaagaaggagataaaggaaaagctcttcagctgaagataacccttctccagacttccctcagtctgtccacgtacttctcgggcgaagctatcatgaccgcccacctgggagtctgcctcctcttgagtgcattcgccagaggcgttaccttcgtcaggggctgaatttcgccgttatcaaggagaacgtttatcccagtttccttgagcctcggctcgctcagcatgaggtctgcgatgctgaactccaggataacctcgccctcactcgctccgacggcatccgccaggttcctttcgatctcctgcctcttcttgacgtttctgtaggcgttgagaagctcccgcttctcttcagtgctaagttcctcggccgttatcaaaacggccgccttgtagagctttctgtggagaacacgttttgtgagctccgcagggaggccctcaaggtcttcaagttccaccagaaccctgcagtctgtcatccgccagaagtcccataaatgcccctcgtcgagggcgaactcaagggccctcgtaagcattccttccgctatcttaaccgtgtggtggaagtagacccttgagtacatgagcgccctggcaaccatcattccctcaactgcctcgatgcctttctcgtcaacaacgagctgaccatcgtgaatcttcataaccttgaggagtctttccaggtctattataccgtgggcgacgccggtgtagtgggcatcccttaccaggtagtcgagctggtcaacatcgacgcccccgtggagcatctggccgagatagggcttctcagagcggccgagaattatgtcggcgacggcctttgggtctatcccgtgtttctcaagtatttcgggtattctccccccatcttcgtcgcccgttatgttgatgttgccgaggattatgtcctgaccgaggcgcatgtggtcgcgctccttcacgtagtgcttgtagatgccctcaaaggtgtggctgagcggcccgtggccgatgtcgtggaggagcgcacccacctgaagtagttcagactcctcttttggaagaccaacttcctcagaaaggcgtttggccaggtgccaggctccgagcgagtgttcaaagcgcgagtgattggcaccgggataaacgaggtacgcaagcccgagttgctttatctgccttaacctctggaactctggtgtttttacgaggtcgaggatgactccagagaccttcatgctaccatgaataccgtcgtggatgattttatagccgtcgtgtccgtcactcattttcatcaccggccgaaaatctgtgaaactccttaaataatttttcggcaatatgacgaaaaatatcccgctgatggaagcgattgcagaccatcaatttataaacctgtcagtggagaataaaatgcccctgcgcgaggaccccggggagaatgaaccggggggcgatgcgggggcaacagcccggcctcagcgaggtccccgcgggagggccttccgcgtcccggagcacgatgaccgcgggaaacccaggccgggcacagttctggcccgccagggttagcccgcccaagggtggcgtacgccttcgatgagggcgggagttaccggcgggccatattctcaatgaattctgggtcatggcgtagagagttacactctttccagattttaaagaccatcagcaatagtatgcaaattatgaataaaaaaggttattaatgctgaaggctaggtatgaatatgaacccagagaaaaaatcaaaagagatcgtattaactgaagtcccctggcttgccgaagattaccaaagctatctaaggagaatacttgaggaaaaggaaagagaacggaaagaagttattaggtgtttaaaggaattaacagcaagtgcgcggaagatcctgcccaaggagctcgtggatattatccctttttctagtgagtgtataaacgaatgaaaaatagagctcagtacaacacaacctccacctcttctccctccaggtaaccctcgctgtcctctggaatcgttatgtatccgttgctctccacaagcgagcttattatgccactgcccttcttctttatcggtcttgccgtaccgttttcgtaccagaccttgacgaactcgtagcggccgagctggctcggaaccctttcggtaagccttgccctgacccgggtttcgtagtttcttgcccccacaagcttcgcaagcgcgtgcttgacgtagaggtggaactgagtgaagaccgcaaccggatagccgctcattacaaagactctctccccgtatcctattggccttcctggttttatcgtcgtcccgtggaagagaaggttcacaaagcggtgggcaaagtccatatcgccgaaagctgagccgcccgtgacaaggacgaggtcgttctcggagcgtgctttccttattgcctctccgattttctcctcgtcatccggaattaccccatagaacctcggctccccaaagtactgcctgactaggcctttcagcataaccgagttgctctcaagtatctttccatggttcagggcttcttcatcaaactcctcgatgagctcgcttcctgtaactattataccaaccctgggctttctcctgactcgaacagtcttgaagcctatgcttttgaggattgccaggtcctgaggccttagaatctggccctttttaaggacaacctgtccctttctgacgtcctcacccttcattgcaacgttctgaccgggagcaacggggcggagaacccttataacgtccccctcgcgctcggccatctcctgcatcagaacggcgtttgctccctccgggatcttggccccggtcaggagcttaactgcagttccgggctcaacggtctttttactctctccgccggcgggaatttcgtctattaccctgagctccaccgggctgtactccctcgcctgaaacgtatcctcggcgcggagtgcatagccatcaacggcagacctgtcaaagggtggactgtctatgggcgatacgacgtcctcggccaggactctcccaagagcctcatcgagaggaacttcctcaacttcttggatctcgctcagatcgttgaggagaaggcccagggcctctttatagggcgtgagcttcttgaactccctcatttttacacccccagagttttaagccacttcactcttttaaagtccgagtcaaaggtagcaatgtgcttaacgttatgattccggcaggcaagcactatttgtgcatcggagggcatcaggttgtactctttcatggtatcatagagttcttcccgcctgaacgaatcggggactatgatgaccccaagctcatcaagaagcccgttaagagaggtcaccacatcggaaaatggcccccatccctttcgagccacgaacttcctcaggctgtattttccctttattccgaatttttctctcccaatgataagagctagagcaccaatggcttctctatagactgtgggagacgttagaaatgcccagggtcccaacagtatttcctcggcaattcctgccttttcaccgtccacgaggtactcaacgaggacgctggtgtcgagaaacaggaagtcgctcaaagctcttcagcctccttaatcgcccatagtatagtctcctcacttgccttaccgagtattcccctgaatttccttattttctgttttttggctaaagtgagcttactgccctcctcagccgtggtgatgtttgaactcccgactttctccatgttttcacccattatgtcttgtgtgctttcccttaaaactattcacgaccgtgctttagcacgtgaccagcctcggccagtatgagctttaccccagttttggcggcaccaaggcttcccggaaggcagaagactgccattgccctgcccgagctccttattatccctcctgtggccctcgtcattatcgcggcggtccctatctcctcgtagctgacgagcctgaatatatctccaaacgaaagctccttgtcaaagagcggtctgaggctctctattgtcacgtctctgctcgatatccccgttcctccggatgttacaaccacatccgctcccgcgcggaacgcatcaacgaccgccccgatgatttccatcttctcatccggcacaaccttgtagagaaccctctcgtggccggccttctcaagctcctcaaccagaaactttccgctcttatcctctttctctcccctgctcgcagtgtcgctgaccgttataacggcaaacctaaacttccgcggggccttctccttgtgatccttaacgcccatgataccacccagttaaactgctctttggtcttaataacctttcagaaaacaatactgcttaacagaaaccaatcggtgtgggcccggctgatcccccgctctcattgacggccagagaccccctccagcggtccggagaccgggccctgtccgcccggcatcgtctcatcccttcactgtgggcctcggccccctccgggacacgggccaccgggcgggaccgtcgtagaaaattcttcggaaggcattttaacgttttcgaattatataacctgcaggaataggaacattttggattcatgccgaaaagtatataagacgatgcacagacccgaccactgcactgattaagtcgaagagaaggtgatgctcatggctggaaaggtcaggaacatagtcgttgaggagctcgtcaggaccccagttgagatgcagaaggttgagctcgttgagaggaagggtatcggtcaccccgacagcatagccgacggtatagccgaggccgtcagcagggcgctctccagggagtacgtgaagaggtacggcatcattctccaccacaacaccgaccaggtcgaggttgtcggcggaagggcctacccgcagttcggcggcggtgaggtcatcaagccgatctacatcctcctctccggaagggccgtcgagatggttgacagggagttcttccccgtccatgagatagcacttaaggccgcaaaggactacctcaggaaggccgtcaggcacctcgacctcgagcaccacgtcatcatagactcccgcatcggacagggaagcgttgacctcgttggagtcttcaacaaggctaaaaagaacccaatcccgctcgccaacgacacctcctttggtgtcggctacgccccgctcagcgagaccgagaagatcgtccttgagaccgagaagtacctcaacagcgacgagttcaagaagaagtaccccgccgtcggtgaggacatcaaggttatgggtctcaggaagggagacgagatagacctcaccatcgccgctgccatcgttgacagcgaggttgacaaccccgacgattacatggccgtgaaggaggccatctacgaggccgccaaggggatcgtcgagtcccacacagagaggccgaccaacatctacgtgaacaccgccgatgatccgaaggagggcatctactacataaccgtcacaggaactagcgccgaggccggcgacgacggttccgtcggaaggggcaacagggttaacggcctcatcacccccaacaggcacatgagcatggaggcagcggcgggtaagaacccggtgagccacgtcggtaagatctacaacatcctctcaatgctcatagcgaacgacatagccgagcaggtcgagggcgttgaggaggtctacgttagaatcctcagccagattggaaagccgatagacgagcctctcgttgccagcgtgcagataatcccgaagaagggctactcaatcgacgtcctccagaagccggcctacgagatagccgacgagtggctggccaacataacgaagatacagaagatgatcctcgaggacaaggtaaacgtcttctgaagtcctcgcttttctcttctacccttttgatggcttccttgcattagtagggaacagaaaagttagagatcagactgcgggagcgctctgcttgagcgccctgaggacttttgcttcttctgccataagggcgagcttttccttcttaaccttggcaagaaccattgcaacgtccctcttctggcgggcaagccttatgagcctggcctcctcgcggagaacggcttcctttctcctcctcacaacctcaaggcgcctctcgagcacggacttaaccttctccatattgtatcacctgataaatgagggcccccgatccttataagattttcggtgaacgcttaagtcaatatcgctttttgtcgaaaaaacttcttaagggcaaacgctgaattccctcggaggtgacagaatgagaatagtagcggtcactgacattcacggaaagctcgaaaaggtgaagaggctcgcgggggttctcgaggaagaaaggccagaccttatcctcatagccggggacataacgaacttcagcggagcggaagttgccagaacagtccttgagccgctcatggctctcgacgttcccatcttggccgtccacggaaactgcgacggcagggatgttccagaactgctggaggaactcgggatatcactccacaacaagagaaaggaagtgaacggcaccggctttgtaggagtaggcggctcgaacataacacccttcaacaccatctgggagctcacggaggacgagataatggaaatcttgaggaagaattacaggccaggggacataatcctctcccacgctcctccgaaggacactaaagctgacagagtccactccggcctccacgtcgggagcacagctctcagggaattcatagagaagaaccagccgccgctcgttgttacggggcatatccacgaggcgagaagcgttgacgagcttggagaaacgataatagtgaaccccggcccgctcttcagggggtattacgctgttatagacttcgacgaaaaggaaaaagttgtgaaaaacattgagctaagggagctttaaacgagctttttctccttcaggactttttccatcctgtccatcgcttcttcaagcttctcgtaggccgtggcgtagcttatcctgatgtagccttctccggctttcccgaaggcagagccgggaaccactgcaaccctggcctccttgagcataagctcgctgaactggtgatctgtgagacctgtatccctgatgcgcgggaagatgtagaacgctcccttcggttttacagtcggaaggcccatctcatttaagcgcttccagacgaggttcctcctcctgtcgtactccttcctcatctcctccacggccttccagctcctcgggtcttcaagggccttagcggccgcgtactgggcgaaggtgaccggacaggtggagttgtacatctggaagcgcgtcatcttctcgattacccaagctggagcggcgacgaagccgagccgccagccggtcatggcgaatgtcttggagaagccgtttaccgtgatggttctctcgaacatgccgtcgagcgaagcgatgctgtggttcttgacaccatcgtagacgaagtgctcgtaaacttcatcgctaattaccataaggtcgtgctcaacggcgaagtcggctatctcctcgatgtccttcttggtcagaacggagccggtcgggttgctgggggtgtttatgatgagcgccctcgttttgtcggtgacgtgcttctcaaggtcgtcaactgaaagcctgaactcgttttcctcgtaggttggaacctcaacgggctttcctcctgccagaatgaccgcaggggcgtagctcacgaacattggagagggaatgaggacttcctcaccatccttaagaaacgttgccagacccatgaggaacgcctggttggctccggttaggatcataacttcagtttttggatcggcctctatgccgttctgctccttgagttttttggcaacggcctcccttagcattggaaggcccgcgttcggaccgtagtgggtataccctttgtcgagggcctcttttgcgtatcctttgatatgctcaggggtgtcaaaatcgggctcaccgatgccgagtgagataacatcctgcatcccagcggcgaggtcgaaaagcttcctaatctcagaagggttaacgaggtcaagcctgtcgctcagcgccattaccatcaccgctctcccttctcagcgatgtttataacgttacctcaatgaaaaaatagacatcaaagtattaaaatgctcattaaaattcaagaacacccacatcctttgagcggtttggtctcaattcgcaactaaaactcacaactaaatagtatttagttgggatctggttcattttaattctcctaaagtcttattgcaacaagccaggtcgagagcctcgaagttgacgcggccaagtttcaattctcttagagtcttattgcaacggtgagaaaatcgtaaaggcgttcagagagccggctctatttcaattctcttagagtcttattgcaacaaactttccacaccttgactttcacgtcgacgtcggtatttcaattctcttagagtcttattgcaactcctcgtcgaggaagcccatgccaatggctctgcggaatttcaattctcttagagtcttattgcaacgcgctggaaggccctccagaaaattgcagaaatcctatttcaattctcttagagtcttattgcaactttgaagtcttcaggaaagagggcattcatggaaaactgtttcaattctcttagagtcttattgcaacatggccgggttcacctgaacgtcataggtcgcgaccgtttcaattctcttagagtcttattgcaacagcacgaagaacgcatcaacaccgccccacttgtagttgtttcaattctcttagagtcttattgcaacgcgtagcatagttgggtagtgcggccgcctcgtgaggtttcaattctcttagagtcttattgcaacgacgtggggacagccattaaagaactgggcgaagaccgtttcaattctcttagagtcttattgcaaccctctccttgataacatccagcacggcgcgcgtggagtttcaattctcttagagtcttattgcaacgccctcactcagggctgcccctcaccactccccaaagtcgtttcaattctcttagagtcttattgcaacgtccgggcttttgattgtgggcaattcctcccaggcccgtttcaattctcttagagtcttattgcaacgttagagatcaaaagaaggtcaaggcgggtggttctcccgtttcaattctcttagagtcttattgcaacttgcgcaacacccaccaccgtcacccaccacccacctttttgtttcaattctcttagagtcttattgcaacttcttgctcgaaggcctcatcagcgatgggcttgacgagtttcaattctcttagagtcttattgcaactattgacccgccgaaaagcccagattacgccgatagttgtttcaattctcttagagtcttattgcaactccccgaatttcccggattttccctatatttccctatagtttcaattctcttagagtcttattgcaacaggtctctgtcgtggagagaaatgcagacggcaagcttggtttcaattctcttagagtcttattgcaacctgagccaaggctagatgttgagcctgagccagaagcggggtttcaattctcttagagtcttattgcaactgtggcccagataagggctgtggcataggtttacgtttcaattctcttagagtcttattgcaaccagtcttccccgacttcggcgcgagcatgatctacgggtttcaattctcttagagtcttattgcaactaggtcttgctcataatcgcgtcgtggctctcaaggttgagtttcaattctcttagagtcttattgcaacagggcggttttttcctcctttcgccctacaaactactaagaacgctccaatcttataagcttttccgcaaagggtactttgaaaagccctcaaaagcccccaatctaggagttgtgggcggatttttcaagcagaaaaggtttctcctccttccgttgaaagcatgcacaacaatgttcagaagacctcccgggcattttaagggcattaaactcgaattattccactctaacgccttcttacgataaaacactcaattgccattgggataatatataaaaggacttctcaagtatcatcgttcaaaacttcgaaaaaatttcgtcatataaatcgggataaaatgtaactttttgtttgataataaccaaacgttactaaagactttccaaccttcgacacaggcctattttcaataaaaacccacgaaaaaggagaacgatcaaaaacaaagcttctcagcgcgatacgacgaatttgccgatgacaaggacatcaagcttggcctctctaaacgtcttcacagcatcggcaggcgaacagactatcggctccccgtgcatgttgaagctcgtgttgagcaccgcaccgattcccgcttttttatggaattcagcaattgttgaatagtacaattcgttgatttctttcctcacagcctgcggtcttgtcgtcccgtcaacgtgaacaacggcgggagccacacccctaaactcctcgctcgcggtgtagctcatcgtcatgaactcgttgggccttccgttcaggtcttcgagatattcctctgccttctcccagagcattgaaggcgcgaatggctggaagacgtccctcttcagggcgacgttaagcttttccttcacgctttcatccctcgggtccgctaagattgagcggttgcccaaagccctcggcccgtactccatcctcccctggaaaagtccgacgagcttgccatcaaagagggcatcggcgacgaaacccgggacgtcgcttatctcctcgtattggacgccttcttccctgagggtgctctcgatgtcttcatcagagtactcaggcccgagatagacgtgttccagcctgaacggcctccactttccatcgagcctctccagttgggccttgacgaaaatagcagccccaaaggccaggccgccgtcgtccatagctggaaagacccagatgttttcgtctccaaaaacgtgccttaaaacagcgttggccttgacgttctgagcaactcctccagcgtaggccaccggaagggagtagcctttgagcctgaggccgagctcctcaacgagcttctcaaggtgagcctgggcgctggccgctatttctattgccttcttctggagcttgccgtcgagcttcccgcgcttcatctgcatcgctatctccttcgcgtgcttcagcgggtacttgaacagctccgcgagccttctcgtcgcctcgatgccaacaaccttgaggtggttctcgaaggtcaggccgttgagctcgattatcgagcttaaatcgtaggtgggcttcccgtaggccgctaggctcatcaccttaccctcgtgcctcatcggcttgaagccaagcagttcggttacagatgcatagaagtcgccgagtgagtcgagatacgtgctctgggctatccttatcatctcgccgtctctcgcgacgtagatggacgagctaagcccgtcgccagccgcgtctatgctcagggctattgcatccctccagccggaggtgtagtatgctgaagcagagtgggccagatggtgctcgacgaagaggactttcctcttgaagtctttaccaaagattgcctttagattctcctcaagctcaattaaacggctctgcttccggaatattccggcaacggctatgacctcaacgtcctccggactggcgccggccatctcaaggactttcctaatgctcagctcaggaaagccgcggtactttttaacgcggttcagcctctcctcgttaaccgcgaatatcctctcgccgtctatcagaacagccccagcgtcgtggccgtcgtggactccgagtatcattccttccaccgtgaaaaattttgaaacgaaataatattatcgtgattcaaaaatgggagaagtcagtaagtcctcgcgaacctcgcgatgaacttggcttccctgccgcagaccgggcacttcttgccctctggagccttcgccttctcctcgggatacgggattccgagcatcttggcgtcgagctcttcctccatcctgaggccgcactcctcctcaccgcaccagggaatctcgacgattccgcgcctgtcctcaaagacggcttttgcctcctcgatcgtgtcaacgcgcttgatgtggctctcaaggaactccttagccctctgatagaggttctcatgaattgcatcgagggtctttctgacctcctcgacgatgttatccctctcaacggttatcttttcgagggtgtctcttctagctaagacagccttctttccttccacgtccctcgggccgacctctatcctgagcgggacgcccttgagctcccagtcgtagtacttccttccgggccttatgtcgcgctcgtcaacgtggaccctgattccggccgttctgagctcctcggctatctcacgagcataggcgaaaacgtcggcctcgctgtcctttttgggtatcgggactatgacgacctgtatcggagctatggtcggcgggagaaccattcccctgtcgtcgccgtggatcgctatgacagcagccagcagcctctcgctcattccaaaggttgtctggtggacgtactcgtggtcacccgtctcggtctcgtactggatgttgtaggcctttgcgaagttctggcggtagttgtgcatcgtgcctatctggagcgtcctgccgtcgggcatcatgacctcggcgccgagtgagtagtaagctcccgggaacttgtcccactccgggcgctttgagatgatgtagggcagagcgaggaacctcgcgaggttgtcaaatatctcaaggtcttcctttatctgcctctcggcatcttcgtagctgtcgtgggcggtgtgggcctcaaagaacctgctgatttctctaaccctgatgagcggcctcgtgtgcttggtctcgtagcggtaaacgttgacgatctggtatatcttgaacggtaaatcagcgtgagaccttatccagagtgagaacatcgagtacattgccgtctcgctcgtcggcctgagtatgagcctgacgtcgagcggttcgagaccagcgtgggtgacccagtagacctctccctcaaagccctttatgtgctcggcctccttctggaactcggtttcggggatgagggccgggaagagaacctcatcgtgaccggttctctccatctcagcgtgtataaagcgctctatgttgcgcataatcttgaggccgtaggggagccagacgttcatacccttgaccgggtagcgcttgtcctggattccagcagtttcaatcagctcgttgtaccactcgctgaaattctcgctccacttctttctctcaaccgccatctcgaccacctacacgagagagtgccgttttatttttaagctttcccggtttctccaaaagccttattaggttcgtttcgatgtatatcttaaggtgataacatgaggccgagagttcttgtgacatttaagatgaagagcaagcccgtcgaggagctgaagaagtacgccgacgttgattttctgctatatcccagcgttgaagagctggctgagaagatcaaggactacgacgggcttattgtctccccgctgaacagggttccgcgggaagtaattgaacgggccgagaggctcaaggtcataagctgtcattcagccggctatgaccatgttgatgtggaagccgcgaccaagaaggggatctacgtcaccaaagtttcaggggttctgagcgaggctgtggcagagttcgccgttggcctgacgatagcccttctcaggaagttcgtttacaccgacaagctcatcaggaggggtgaatgggacagccacgccaagatatggagcaccttcaaggacattgaaaccgtctatggcaagaaggttggaatcctcggcatgggggccatcggaaaggccatagcgaggagaatgaaggccatgggaacggagatactctactggtcgcgctcgagaaaagaagacatcgaagctgaggtcggggcgaagtacctcccgctcgacgaagtcctgagggagagcgacatcgtcatcttagcccttcccgcaactccagaaacctaccatatcatcaacgaggaaagaattaagctccttgagggcaagtacctcgtcaacataggcaggggaaccctcgtggacgagaaggccgtcgttaaggccattgaagagggcaggctgaagggctacgcgacggatgtctttgagaaggagcctgtaactgagcacccgctcttcaagtacgagtgggagactgtattaacaccacaccacgcgggcctttcgaaggaagctatggaagacatgggctttcaggcggtaatgaacctcctcgccgtccttagaggagaaataccaaaagacctcgtgaacagggaagtcgtgaaggttcgcccgccggaagaagttaagatgctgtgaggtgggagcatgtggcgggaagagattaagaaactcctcgaaccctacggtcttccagttaatacggaaaggggagtgtacatcgaactgattgacgacgaaggagaagtctacgaccggctggcattctacgtcgagaaccccgaggaagagtggccccttgtaaaggccctcgtcgaggcgatagcggacttaaccgaccacgacattccggggaggaatgtttttgctttcggatttaggcccgatttcggtggaattgtgatcaagctgtccttctttgatgctgaagctggcaagggggccgtcattggagaggttccggagaggatcctgaagatagccgagaagaacgccattccgatatcgcgggcagagggagatggcattggccttccaagagaatacacaggggaggactttgaggccctcgtcaagctcgtggaagcggtaacctttgagtggtgacgaactttaaaactcatcgcaagcggttgatttttaaactccctcactatccccctccgatgataatccacattggaattgacgatacggactctccaaatggtatgtgcaccacatacctgggtgccatcctctaccgcgagctctcaaggttagccgagcccttggacctgcccaggctgatccgcctgaacccgaacatcccctacaagacgcgcggaaacggtgcagtcgcgatgactttcgaggccagtgaggacattatccccgaaatcaaggacacggttcttttctacgtttcgcagctggcggattttgaacacgagaacacaaaccccggcgttgtcttccttgagggagatgttcctaacgagctgagaaagttctcgctgagagcactgagggagcacgtgaccataggggaagccgaggaagttgcgagaaaggttggggctgaatacttcaagttcaagctcgggaggggggtaatcgggtccctcgcggcaattggctacccccttgagaggtttacctatgagcttctggcctaccgggagcgggagtactgggggacgccgagaagggtaaacgaggagagcgtctttctggcggataaatgggcttatcccttcagctacgacaacgtggacccctacaagcgtgttgttctgataacaccccacggaaaagaccctgtccttgtgggaatccgcgggattgacaagggcaaagttctccaggtctttgaaatggtggagttcgaggaaccagtggctttctaccagctctacaagacgaaccagaacaccgacgaccacctcacccccaagaggatcggcgagctaaagctctacgacagcgcggtcgttagggggtgggttgcttcgccatactgggagcgtggaaggcacgtgttcttcgagcttgaggacgagacagggaagattcgcgtggcggcgttcgagccgaccaagaagttccgcaactgggtgcgcaagctcctccccggcgatgaaatcatagccgctggcggcgtcaaggagcacgagggcatcctaacccttaacctcgaaaagttctacccggtcgagctggttccgaaggttgagtacagaaaaccaaaatgcccggtctgcggtgggaccatgaagagcaagggcgactacctgaagtgcaagcgctgtggatacaaaatgccgaaaaggctaatccccgttgaagtcccccgagatctggagagaaagatctacgaggttccccccgatgccaggaagcacctctcaaggccgcttgtccttcccggtggggaagagcggctgatggaactactgtaaaagaccgtggtgggcaaaatgaggacgttcatcctcaaggcgaacaccgccgtgacttctccggacttctcgctcaaagacctgcctggaactgggggacgaattgacctgctatgcaggttcctcaacagcgccttcctcctctcgcacgggataaggaaggatgtgagagtcttcatgacgctctacggcaggcccaaccctccgaagacgattcacttcgagggtcctaagctgaaggtcaggctcaacccggacgagaggagcactgccttaatcctgaagaaggcccttaagatcggagaagacctcagggagcccacgaaggaagttgaggtctttccgggtgtttacgtcagcaacatgacgtttgaggacgtcgtgagaagggtcatgaaggactcgacgctctactacctcgtcgaggacgggaagccgataaccgaaatcgagttccctcagaatccagccttcgtcctcggagaccatctcggcctcagcaaagaggatgagcgctttcttgagggcatagcgaagaaggtcaggattggaaggaggagctaccttgcttctcacgttgttgccttcgtgaacatctggctggacgggatgtgaaaaatcctgaaattataaccaaccgttcccaaccttccgtttaagaaaccctttaattcctgccagcttttgggctattgatgatcgtgaggggcagaatcctcggggctggagttgttgctccctttgaggtcagaaaagacgaaagagggctttatgttagggtggagcttccggacaaactttttgagcactcaatagactgcccctgccttgaaccccttgagtttctcggacttcttctcccggcgctcgaggaggagctcggcgaggttaagggtgttttcgtggaaaaagttgagaaagaaaagcatcactccctcttgaagagcttcttgaggttcctctcgaaaggcggccacacgacgccctgatccgtgattattccggtcaggtacttgtggggcgtcacatcgaaggccgggttgtagacgtcaacgtccggcgctatcttacagccgccgcaggtgaggacttcctccggcttgcgctcctctatgggtatctccttcccgctcttcaggctcatgtctatcgtcgagagcggcgcgactgtgaagaagggtatcccgtgctcctttgcaaggactgcaagggtgtaggttccaatcttgttggcgaagtccccgttggcgactatcctgtcggcaccgactattatcgcgtcgaccttaccctgctgcatcacaaagcccgccatgttgtcgcttatgagcttgagaggaatgccgtcgtagtggtactcccaagctgaaagcctggctccctggagaacgggcctcgtctcgtccacccacaggagcttgagggttccgtccctgtgcatgacccttaaaacggcaccaaccgttccgagctgaaccgttgccaaacttcccgcgttgcagtgggttagaacgttaccctctggaagaacctcggcaccgtagtgtcccatcctcaggttggcctccacatcttcgttcgctatcttctgcgcctcggcaacgatgagcctctttatctcgtcaagagggtcttcgaggtgttcctcaaccaggctcttcaccctgttgagcgcccagaagaggttaacggctgttgggcgggtgttcttgagcctctcgtaagccctttcaaagccatccatgaactcctccttggttctggcattggaggtgtccgcgtagagagctaaaccaaaggcggcagcggcccctatcgcgggagcaccgcgcaccttcatggtgatgatggcctcagccacttcatcaacagtccttagctctatctccctgaactccctcgggaggagggtctggtctatcatggttacccttcccggctcgtacctaacgctccttggaagcctcgtgagttcctctggcttgtaccttatctccatgagaaccaccccaaagggtttaagggaggaacttaaagctccttcggtgagtgaaatggctttgaggatattcgtgacagggccggctggggtcggcaagacaacgctcgtggagagagtagccagggaagttgaccgctggggctacatagttggtggagtgataaccagagaagtgcgcaggggaggaaggcgcatcgggtttaagataactgcccttgacacgggcgaggagggaaccctcgcaagcctaaggggaacttcccacctcccaggggttccctttggaaagtacgtcgtccacgtagatgagatagaaagggtggccgttccggcgataaggagagcgatcgtcgaagcagacctgatagtgatagacgaaatcggccctatggagtacacaagcaacgagttcatcagggcagttggggaagtcctgaagtcagagaaaccgctcctagcggttgttcacagaaagttcatcgacaggttcagaccccttggagaagtccataccctaagcttcgagaacaggaacgcggagttcggaataatcctggacagggtaatgaaagagctgaaggggatcagaggttgagctcatccttacagctctcgcagacccacttttcgccgccttcaatgtagactttgtagagtggaccgtactggccgcagacctcgcagatgccgtagacctcggtctcctcctcgacttcttcctcttcctcgctgttcatgctgttgagcgcggccaggaggtcggcggcagtaacgaagcctatcggcttcccgaccctcgtgactaggagccttctgattcccttgtccatcatcttgtctatggcatcctggatagtatagtcatcctctatggtgacaggcttcgtggtcatgacatctttgacgagaaccttcttgggatccttccccttggcaacgaccttgtcgaggatgtcgcggtcggttattattccaactatctcctcgttctcatcaacgaccacagcactgcccaccttgttgcgggccagtattctagcgaccttgtgtatggtatcgtccggcctaacgagcactgccttcctcttgacaacctgtcctacggtaatctctgccatgttaccacctctcaagcggaaatcctcacggtatcttaaaaacgtttccggaaacgatactctaaaacaccaaatacaagaataaacgttaagattgcaataataacggcaatccagtcgagggagcttttggaagcttccttggcagttttaacggttagagtcctaacggtttcggactgttcttcgctccctcccatcaaaagcttaaccgcaaagtacatcccagtagaagccacggcactcacagcgaggtttatgacgcgaagcttttcccacgtcctatgcttcttcttacctcccggaagaatcagtatcggcttgcttgaagccctgtacagctttacctcctggaggcgctttccgtacttctttccagcgacttccacgagcccgactttgagcatgcggtctatgtggtatgagactgtcgatataggaatcccaagctcccgagaaatctcgcttattgaacggggtctctcctctattaacttgagtatcgagagtgccttctcgtttgaaagtatctgggcaagctccttagcgcgctcgtcgtgaatgtcgatgacctcgtaatccaaaaggtccaccgtggagaatccgaagggaaggttataagaatttccagagcttcaagaaaaactgaagcgtttgaaggaaaaggaaaggaatcaaattcacggcttctcaaggatgatctcgatggttgaggtgttggcagtcctgccgtcggcagtcgggagctcctcggtaccgatcttgatctccttaaccctgacctctgggaggaacctgttcctgacgatctcggcgacgtcaacggccctgctgatagccctaccgcgagccctgatgctgacctccttggcgccctcgttgaactgggttatcacagcgaggacgtagttcataaccggcttctttccaatgtagacgacgtgctcctcagccatttctggcacctccggaagttttgtcgttaggctatcgccgagatggggttaaatacttttcggtcgtcttcaccaagcgggaaacaaatttgacacctccaaggggctttgcgagcttcacgagattaagttcttacaaaattatggcaacataaacattttaaggcgcaaaaattgacttaaacgtggtgataaaatggccgttcacccgattgactaccgctacgggagcgaggagatgaggagaatctgggacgaggagaacaagttgcagaagctcctcgacgttgaagcggcgcttgcaagggcgcacgcaaaggtcggcaacattccggaagagagcgcgcgcgtaatatccgagagagcgaacacgaagtgggtgaagcttgaaagggttaaagagattgaagcggagatacaccacgacataatggcagttgtcaaggcgttaagcgaggtgtgcggcgagcacgggaagtacgttcaccttggagcgacttcaaacgatataatagacaccgcaaacgcgctcctcataaaggaaagcctcgcgatagttgagagggatctgaaagagctccgctccgttctcaagcgtctcgcgatggagcacaagtacaccgtttgcatcggaagaactcacggtcagcacgcggtacccacaacctacggcatgaagttcgcgatatggctggacgaggtacagaggcatatagacaggatcaaccagctcaaggagagagttctcgttggtcagatgagcggcgcggttggaacaatggccagcttcggggagagaggccttgaaatacagaggttagtcatggaaggcctcggcctcaagcccgctagaataaccaaccagataatccagagggacgtttatgcagaactcatgatggttctcgccttaatagcctcaaccctcgacaagatagccctagaaatcagaaacctccagcggacggaaatacttgaggtaagcgagccctttgggaagaagcaggtgggctcgtcaaccatgccgcacaagaggaacccgataaggagcgagaaggtgagcggtttagccagggttctctactcaaacgtgattcccgcgttgttgaacaatcctctctggcatgagagagacctcacgaactcctctgtcgagcgcgtcatcctcccggagagcttcgttctcctcgacgagatgctgaagactacgataaaggtgctttcgggccttgagttcttccccgagaacattaagagaaacctttaccttaccaacaacctcataatggccgagccgctgatgttgaagctgacggagaagggtatggggagacaggaggcccacgaactcgttaggcagctggccatgaaggcgttccacgaaaagagagaccttcttgaggtcgttagggagagcgaagaggccatgaagtaccttacagaggaagaccttgagtcccttaagccggagaactacatcgggcttgcaccacagattgtggacaatgtaatagcgtttataggggaaaaagagagggaagaagcttttatgggtcgctaaattcttttttgagccttttaatacctttttctttgcatgttctcttatgatcatcgtctcaatgtatctctcggatttttaggtgaattgttacgttttatactcttaaatctagaaatttgtttgcgtttaatttcatttatttaaataagacgcttatatatttctatttaactttttattttagctaatattaaagtttatccaatatgcttagaaaatttgaagttttttagaaactattaccaatagtaaaaaatgacaaattagtactacttcctggcgttaaatagacaaagacgaacatttaattcctagaaatggtcgaatgtcaagaatgctaattattcacttgagaagcccgctatcacaagaccagtttttcattacgatgaaagatattatcgaccgatgagattagcaagattctaatctaaaagaccttcactatcatgttgatcgaccccttttgaaataccgacaacccaaaagtagtcatttccaatgcttctatgagagatattgtctcactccaaaatcttatttgagagtgccctgcctctggagacaagcgagaaagctggatgtgattcaagcgataaaaactccgtttcttataagattaagcgggagagtctttgagaatatcctctgggatgatgttaaacacgttgccgttaatgattccatgtggtcacttttagggcaggtagtttacttggcttcacattatttgaataagcaccccacaataacgagaccagcgatgaaggtcggcttattggagaaactggttcccataagaagttcctgatgaataaatcctgccacgggttaagtagaacactgtgctagctaccagctgaagctatatatgtcttgctcttttggttaactatgatgtaagtgcccatttttgtactgcagtttttgatataatgtaccttatatgacaaactaatgaacaatagcgagcatagaaaagagaaaaattgggggattatgcttacatcttggtggggaataaagaggggcccaactctctacttgtggtgcatgtctaacgctcctatgccagaccgggattagtccagagctattgcctgttgccccccctgttctatttttcgcagactcgtatttgcgtcgttcgagagcccgctcttttttggccttctggaaaaggtagtatactcttcgtggtttatgaggatatatccggcctatagaaacccttaagcttacttctcatatcttggaaagggcctaggcaggtactttttgtgaattcctggctttcgagtagtttgtgagtaggccttctccactgggaggggtagtataggtgactgtgggctcagcttctatctctttccagcttcctcttcacgttgatccataaccacctttaattgtaactggaatttggttgtgtgatagctggcttatttatgcaactttccctgttttgagtgcatgttttgagcggacctgctaattcattcattgctccttgtcgctggtagctcagccttttctgctggccctctattgactatagttttgcccctttaacaacttggtattgtaaaaacttgtgattttatacacaattaaaacgtaattttattacccattttatttaaaacatattcaaatttctttgttttgtatttatatcacgagctttttatataaattttatgaaattgatatttatcagtttatttacgctatattaaagtaacaactcacccaaaaatctgagagataactctgcagggaaattttaggctgccctaacaaaattcaaaagggctttagatgccgagaacacctaagaaaagacacaagatgccaaatctggcgaataaaaacttgttaaggcttcactcgtctgctccccttggaacctcatttcccccggggagaattataagctccctgccctcgacgagcatctgtgcaacctttttccttgcagaggtcaacgccctccatactgtgccccttgagacacccatcctctgaccggcctcttcctgagttaagccttcataatctacaagtcttagtgcctcgaactcctcataagtcatgaaaatcgggggttttggttgaaacactggtggctgggcaggatagaaatgcctgacctgtggaataaaccctatcatcctcatctttcgtcttcttccccttcctctgccccagcccatacccctcggcattccaacaccttcccagctttggccagcaagggttataactttattgcctcctttagcttacggtgagaaaatgagtggaaacttcagggtagttgagagaaagataagctggaacaaggacttcgacagctcccacttccttgcactgccgtacgagagcaagtgcctcaggattcacggccacacttaccacgttgatgtggagatatggggcgagctaaatgagagcggcatgatatttgacttcaaccacctgagcaaccttgtcaagctcctcgaccaccgaatcctcgtaagcgaaaactgggtaaaagagcgcagagatggagctgtcataattgagaagaacgacaagcggcttgaactgcccgaaagcgaggcggtaatcctcaacaagcccaacgtgacggccgagtacatcgccgaatggttcgcagagagggttgcggaaaaggcaggggacaacgtgaggaagataagggtaagaatatgggaggacccaagaagctatgctgaggtaaccctcgaacgttaacagccctttcctttttccaccattgcgacatctgttccgcatttttctctcagttcatcaagtattccattggccgctttgaacagttcatcgtagtactcatcgttgaacttctccatggcctccctggccagctttgctatgacaactgcgtaggctccagtggtctcgcagtcctcgttctccacgatcatcggcatcatgctcactaggtagccaacgaatgacgccaggagcttttcccagtccctttcaaagccgttttcgttgagccatcccttcagggttatgaagaccttgaccaccggcttgacaaccgcgtactcgttgaagcggcggtagcggatgaggaggtactgaaggagcgacaccagaaagctcctgacgacctcctttccaagcccattttcctcaacgaacttctggaattcgactaagccttcccttccagatttctcaaaggcgtctataactccgggataaggcgggttgaactgagagaagtcaacatctctcatcccctcgatctgcggcaggattttcatgacggtttcagctttcatttccttacacccaaagcgttaaagcttcctaggtttattagggttgaggtgagagcatggaatttaaagctggacggaccttcctcttcagggttcccgcgggggaagaccttctggaggccataaaccgctctgctgagagtaggggcattaagaccggagtcgtcatgggtattggctccctaaggaatcctgtggtgggatactactctgaggaagagaagaggtacaggagcatcgagctcagcggaacttttgagctcctctccttgaacggcaacataagccttaaagatggaaagccctttgcacaccttcacgtgaccctcggcgatgaagaggggagagtttttggcggccatcttatcagaggagaagtcttcgttgctgaagtctacatagaggagctaattgggaaaccacttgaaagaaaagatatgggaaacaacctctggctctgggagactgagcgttagcgtatcatcctcccttcttctatctccctcttcagtatcttcgccccctcctcggtctttctcacgcggaagaccctcgctatcctctcgatggcttcgagcttcctaactatgccgtcgagccacgtgaagacgtcgcccggatagactatcagcccatagaccttcctgaagtgctccgctatctgggtcgggtgctttccgctcctcctgagctcaattatcaggttgctcaccctctccatggcatattcggtgcagtcctcctcagggcacatgaagaactcctgatagatggtgaacagcctctcagcggcatttgggctcagctcggggataaccttatcgagttcttcaaggatcgaggcgaagctcggtgagaaaacgttggcgctcagtcttcctctaactgccccctcaagctctctctggagagttccgctgaggtagatgttctcgaacggaaggagcttgaccgctatccacctggcttccctctttccaaggtttcccctgatgaaggttgcctccttcggcaggaggaagctcatgctgactgcccttccgtagggggtaacctcaacgatcggccgcttcatcttcacgaagtcgaactcctcgagcttttcaaggactttttctgcgctctggttcgcccctaagcacatagattggacttcttcgatgacgtccagtctattgaagacgcaggagtgagctaagacgttgtcctgctcaagctcgtcactccactccacctggactggctcgatgggtgcagtcagaagcttgaaggcgacctcatcttcagttccttccatctgggctgaatacttccttccgggttcgacgagaaggtagactttacccttctcgtggtagagcggccttccggcccttcccagcatctggtggaactccctaacgctgagccacttgttgcccatcgcgagactctcaaagattacctgggaagcgggaaagtccactcctgctccgagcgccgccgtcgtaaccacgacgtcgagcctttgagccaaaaactccatttccgtgagcttcctctgcttgtagggaaggccggaatggtagggcttcgccttcagccccttgctcgtcagataagcggccagctcgtgcgtcctctttctggagaatgtaaagactatgctctgtcccttgtagccctgcttagactttctcatggcctcggccctgcacaggttagctatgtgcctccacttctcgctctcgttcctcactatgattatgtgcctctccaggtcaacgggcctctcgtcgtagagcactagttttaatccgagctccttagccagctcgtccgggttgccgacagttgcagagagccctatgaactgggcctttggatagagcttcctcagcctcgctataaggccgtccagccttggtccgcgttcctcgtcgtcgagcgtgtgtatctcatctatcactatggttccgacgtttcctatctttctcccggcgcggaggaggtagtctatgccttcgtatgttccgacgatgatgtcagcatctatccccgtatcaacgaccacgagctcgtccttggtctttatcctgctcatgccaactcttatcgccaccctgaggccgagcttagagtagcgccttttgaagtcctcgtacttctggttggccaaagctaccagcgggactagaaagaggagctttttaccctgcatggccttcggtactcccgccagttcgcctattagggtcttcccgctggccgttgcggaaacaaccaggaggttctctccatcgaggagaccgtttttgacggcgaggctttggaccgggaggagttctcttacgccctcagacttcagaacttccttgaacttctcggggactggaagctcgtccaccttgatcttctcgactttaacgtgcttggccttgagctcgtcccacttggttatctccgggtgtttagtcgggtcaaagcgcgggtcgaaggcgtagaggactttatcaaggtcgcgaaaacgttcaagaagctttttggcctggtcaaacatggctatgcttttgaagcggaagcggagctctctcttcagctcgtcctcggcacagcgttcgcagatgtactcgttgtggtactttatgcggttgccctcagtcaggacggttatcctgccctccagcaaacagaggcggcacagctcggctttctcgactcgcttgttctggagcctcctcttgaagtagtcctcccactcgtcggcgttgacgagcacgattctggattggcggagaagcttctctatctccttcggattccggtactgacttccctcaagtactttgaaaagcctcccctctctcattatgaagcggtaaatccggtcagctttaaggttctgcatttgggatagcttttcgggctcgttctcgatgaagaacgcctcaagctcgttcttcttccttcccggtctcacgacgaagagcatctttcaccgcctcgaagggaagttttcgctccttcttctctcgccagtgagagacacccagcagtttttaagttcttccagaacgagcgtcgcctccacgaacgtcaggttcaatccaaaaatggccttcagcctttcaataaaacgtctgagttcatcggtatcggcgacgtttaccttcatgatgacctgactctcccctgttctcacatacaagaattcgatgttctccatcttggaaagtcttgaaaggtacggtctcaaggaatcatcgaactctttgaagtgtagctctaagattgctgacacgaactcatcaagaaacgcatgatcaacaacggccgaatatccctttatcgcgccgagcctctccagtttatccagtcggttcttgacgctcgcaggggagaggcctaccctcctcccaagctcggtaagagtaatcctgccctctttgcggagtatcctgaggatttctctgtccttttcatctacgcctgccatcttcttcaccgggaacagaaaagagaggaaaaatcaccgggttatctttatctccctcatcagttcaaggggctcggggtgtttctcgaagtactccctgaccggcttgaggagctcgatgaggtattcggcgaccgcgttcttgaggtcaagcgggtggagctttccttccgcgaagtccttctttagctcctcgaaggtggtgtatgtgacgtcgccgccgaacttagccggcctgtggatggtgaactcagtcggttcttccctgaagattatgtactcggcccagtcaaggacggggttgtacttgacctccctagccgggcagaaggctttcctgagcttctgctttatctcctccgggctgtcgtggatgaagacagcggagtagggcttgctcttgctcatcttcatctgggtcttgagctccttgaactgctcctcgctctctatcggccagacaggcggctcctgcaggccgaggagaaggtggtggtggagggctaccggctttagcttctcgcccttccactcaagcgggtggtacttgagcttctgggcgacctctatggcaataacgtgggccttcctctgatccattccggcgtgggcaatagtgacgccctggtagaatatatccgccacctgcatggctgggtatatgagcttggcgaagtctatggcctcccccatctggcgtcccatgatggttatggagcggagcattctggcaagcgtaacgttcttggagatgtctatgaccgtctgccagtagtcgcccttatcaagtatctcgctcgctaagacgaactcgaccttgtccgggtcgccgcccatgacctttatgctctgcttcatcccctccttgaagtacgtaagcgcaaccttctggataacttcaaggtctccaccgagcttgtcgtttatccagctatgccagtcggcgaggaaaattctcgtcttcacgccggccttctggagatctgctatcttggcgccggccatcagtccggttccgaggtgaatgtaaccgcttatctcgaagcctatgtagtgctgaagcggagcgccgacctcaagcaggtgtctcaggttttcctccgttaaaagctcctccgtgggttttttcttgatgagctctatcttcctttctatgtccattctatcaccaccgcttggaaaaaggtggggtcctttaaggactttgcggaagtttttcaggcctgttaaagttcaggcgataagatttataacttaatcatgattaaatcaaacggtgataccatgaagaaggctgcaataatactggcggctgttgtgttgctgtctgtttttggagttgttggaatgccgaaggtcagcgccgctggggaggtcgttatagcggtcgacctcgcccacggcgagaacccgaaggggctgactgacgttacttacgagaacgagaccctgaccgaaggaatgctcaaggttctgactgactacacctttgtctacttcggcgactctaagtacgaggcagacctcggcattaagaacattggcgacaagataacctacgaggccctcaaagagaacaacgttacaatattgatcattggccagcctaggagcccgttctacccggaggaggttgaggccatcaagaagtggcttgaggagggcggccacgccctctggattgccggcgattctgactatggaaccagtggtgttaacaccatcaacttcgttgacagcgtcctcaaccagctcaacatgactaacctcagactggaccaggcttcagttgaagaccccgtcagcaacgccggagctccctaccgtgtcgttgcctacgccgacccgtggggggacacacccaagagggacatcatcgtccagggcttcgaacacgatggagcagtcctcgcccacggtcctggtgtcgttgcctgggttgacggtgtcgatggtagtggtgactggcacaagcttacaccggaggagaagcccgagaacacttacgtgctgattcgcagtaccggtgactctgtcataaaagagaacgaggatcccgccgcgaacgcttacactgccggtgagcagggtgagttccccattgcggctgcccagattatcgagcttgagggcaagaacccaagcgtgatcatcgtcagcggcgagaccccaatcggcggctacgagcccatgtggaccagcgtttactaccagaagccgctcgacgggccaaaggtcgtctccaacatattcaagtggagcgttgagatcaccaagggtgaaagcggaaagagcacttgcggtccggcgttcctcgtcggccttgccgtcgtgccgctcctcctcaggaggaggaagtgacttccttcccttctttttgtttcattcaaccgacatccttttatttggttcactaaagttctaacggggatggtaccatgaggcgctttattgggattctcttgataatcgttcttggcttaagcgtagtcgccagcggctgtatagggggaaacgaaggcagcagcgccggatcttcgggcaagggaataacactgaccatcgtcacaaggcatgatgcaacgatccagtataaggtgaagcagctcttcctacagagcgacatcgctaagcagtataatatcgaggacatcaagttcataggcgttcccgaatccctctggccgagctacatcgagaagggtgccgatgtcggctggggcggagggccaacgctcttcgacaacatgtacaggatgggctacctcgccccgataacagaccagaagatactcgacctcataggcaatcagattccggaggagcttgcgggaatgccgatggtcaggaaaaacgggagccaggtttactggatagcggcggcgctttcatcgttcggtttcacagtgaacaaggaggttctcaacaagcagggacttcctttcccgaataagtgggaggacatagcttctcctgactgggccagggatccgcagatgtacggcatagctgacccgacgaggagcacctccaacacgaggatataccagattatcctccaggcctttggctgggacgagggatggaggataatgacgctcatagcggccaactccaaggtctatgaggccagcgacgccgtcagggatgcggtcatcaacggtgagatagcggctggaaacacgatcgacttctacggctacacggcgatgaagcagaacccgaactgtgtctatgtcatcccagccggagagagtataatcaacggcgacccgatagccctgctcaagtacagcaagcatccggaggctgctcaggccttcatctactgggttctcacagagggacaagccgtatggatgagccccgagataaacaggctcccgatcaacgcagaggtgttcaacaagaccataactgaggacgaggctaagatactcttcaagggcgaaaacgcggggaagacctactctgaggcggtgccggcgctggtaaaggcgtacgagctcacgatatccagtgagggtattcccttcgacgatgccagagcgctcaagaccgtcaactccctccagtactacttcaaggcgaccctcgtcgatgtgaacggcccgctccaccaggcctggatggccctggtcaacgcttacaaggaaggaaagattactcaggagcagtttgagaagctcaaagacgagcttaccgcaccgatagagttcaaggaccctgagaccggacagatggtcaccttcaccgaggagtatgccgccaagattaacgacaggatcgcaaccgacgcgggcttccagagccagctcatggacgagtggcgcagtgccgcccaggagaagtacaacaaggttcttgaggagctgaaaaagattacgggttgaagtcttttatttcttttctccttatgttttgaggagttggcccacacttgtttccacttggacgtctaattttgtcgcttgaagtacagaatgttcctggaatcacgaccagaaacatttaaaacacgcttatagacccctctctgttggaacatactgtaactcagcgagaggtggttgtccgatgaaggtcaataagtggagcgaaaggctgttcgggacgccgctaccagatggcgtcgtcataacgtcgttcctattccctctgctctacctcgtggcgtttctcatcatacccacgttcgtgatgctagcgacggcgtttgagtacaacggccatatctctgcccactggttcagcagcatcttcaggtctgcctattacttcaacccgctgcatcctgatgggtacctcgtaaagacgctgacttacggcgggaaggaggtctatcacttctacggctgggacttcggcgttgtcattaactccatactggtatcaatagcagtgatgatactgacgacgatcctcggaacggtcttcgcgttcataatggcgcgctacgactttccaggcaagaacataatgagggttctcctcttcatcccgctcctggttacacccttcgtcaacgtggtcgtcgtcaagaagatgttcctccccgacggaatcataaactggatattctacgagcacctccacatcttcccgaagcccatctggatagacgggctggtcggtgtcatcatcgcccagaccataacttactacccgatagtttacctcaacgcctacgcgagcttcatcaacattgacccttctctcgaggagcaggctgaaaacctcggaagcaaggggttccacctcttcaggacggttaccttcccgctcgcccttccgggaattatgagcggtgcaatactcgttggaatattcagccttgaagacctcgccgcgccgatagtcttccagggaagcccgatagcgaagaagctcatgtcctaccagatttacagctccttcgtttcggggttcgccataggcaacccgcagatggcggctttggccctggtgatgctcgtcctggcagttataatgttcctcgcggtcaggtggtacgtcggcctcaggcagtacgccatgctcagcaagggcggaaggtggaacccgagggttgcaaagcccaagtggtggcaggcactccttatagcctttgtcgcagttccggtgctcctcattacggtgttcccgcagataggcgttctcctcctggcgttctccaagagctggtacggaacctggccaagcggcttcacgcttgacaatatgaaagcgataataacacagccggacattgagagggttatcataaacagccttatgtactcaaccgccgcagtcttcatcataatcctgctctcccttacctcagcttatgcctccaacaggttcaagaaggccaggctcgccccgataatagacagcctcgccacgataccgatagcggtccctggtatcgtcatagcgatgagctatttcttcttcttctcgacggtgccgccgtttaagggaagcagcctcgaccccaccaacctgctggagttcttccctggagcggcgctgatactggcctactcgatcaggcgtctgcccttcgccgcacgttcaatctccgctggcttacagcaggttcacgtctcccttgaggaagcggcaatgaacttgggagctggaaggtggaaggccctcaccagcgtcataataccgatgatatacctcaacctcttcggaggtgcaatgctcagcttcgtctactgtatgagcgagacaagcgttggcatcaccctcggttcgataaactcgacctggtacccgataactgcaaagatgaaggaactcatcatcggtgcagttggaagcgcaaaccttgccgcggcccttggtgtcttccttatggccgtccagataacggccatagtcatagccaacctgataaccaaacagaggtactccttcataggcctaacctgaggtgatgataatggtcgatgtcaggcttgaaaacgtggttaaggagtttgacggcgttcaggccgtcaaggggataaacctccacataaagcacggtgagctgtttacactgctcggcccgagcggctgtggaaagaccacaacactgagaatgatcgccggcctagactatccgacgagcgggaagatatacttcggcgaccaagaggtcacttaccttccctcctacgagcgtggtgcggtccttgtcttccagaactacgccctctggccacacatgacggtctttgacaacgtcgcatacggcctcaaactgaaaaaagtgccgaaagaggagataaagaagaaggtcgaatgggcgctcgagctggtcaagctcaagggctttgagaaccgctatccgacccagctctcgggcggccagcagcagcgtgtcgcaatagccagggctttagtggttgagccaaaggttctcctccttgacgagcccctcagcaacctcgacgccaagctcaggctcgagatgcgctccgagataaggagaatccagcgcgagctcggaataaccgttatctacgtcacccacgaccaggaagaggccatggcgataagcgacaggatagcggtcatgaacgtcggaacggtagagcaggtgggaacgccgagggacatctacgagaggccccagagcgagttcgtggcaagcttcatgggcaagaccaacgtcattccggccaaagtcgttgaaagggatgggaacaaggttacggtcgagttcgagagcttccgcctcgacggcctttactacgacggcgacaaagatgacgtcgtcctcgtcataagaccggagagaataaaacttcacccggttgagaacgcggtctccatcgagggtaccgttgacctcgttgagtactacggcttcttcacggaggtcgtcggtctctttggagatactaggatcatcgcgaggacgataagcgacagggaagtccagggacttcgcccgacccagcccgttaccttctacatcaaccgtgaggacataatcgtcctgcccaagcagctttgagctcttctctcttctttttgaggtgaacacgatgttagagctgatgagggaaggtcaggtttacgagctccttctagtctcaaagtccaacgtcacccccgttggcgtcgtaagaaggggagcgacgctccatttcaagctcttccctggaaaaagctttagagatttgctggaaaacaaccggatcgcccttcagatgacctgggacgccgagctcctcgtgaagacagcccttaacctcgacgtggagctttcctttgagtctcatgatcagtatcgatggatacaaggactccctggctggctgggagaagcccggtgcagaagagatgtctggacggacgggctcgggactacagaggttcttaaatgtgaattcttccccgagaagaggctggtaggaaatgcccggccaattccctttagcagggcagactgcgttcttgtggagatggcggttctcttcacaagataccttgtcaaacctaccttggagcttaagaacagaatccttgacctttacgccctctacaggcatctcggtggaaactctgaggcggcagaatacatcgttggacatctcgattgaacctgaattctgcgactgccgtgtttttcttctcccctggttcgaaaatagcatccagaggaaacgttttaagcggtgtggatttcttattacccggtgataccatgctgaggaaagtcctctccatgctgcttgctataactgccgttttggctgccgccggctacgtctcggcggaagagtactcctacacctacagcgactacctctaccagccggctcccgttgttccagcgtttgcactcccaggagagagcttcgagctctacgttaaggagggagtctcagtaagctcaatagaggccgtctcagtccttcacggcccgtaccagctggaaatccagggaacatcgccgggagaagacggaatgactgtagtgaaggtcaagacaccggacgacatagctcctgacacatacttcctgctcataaagaccgacaagggcactctcgtcctccccaacggcctgaaggtgttcaaggagtggccgaaggagcttaagctagcctggacgagcgacacccacgtcaccacgggtgcaaaaatcggctacgtctgcggcgactacttccagagcaacatctacaagcttgaggagatgtgctcaaacccgattccacttcacagcgtcgtcgctacctacagcgcctacctttactggggaatgaatggagcgaccctgatgataaacactggagatgaagttgacaccagcggcgacatggtcggttacaagattatgtttgacataaccaaggacacttccgccgccgacatgcccgttgtcggaatcaagggaaaccacgatgacccgccgacggtttacacccagctcctcggtccgaagtacttctacgtaaccatcggcaagttcatcataattggcctcgacaccggcggtgaccagggatacccgacggaggatcagctcgattggatggagaaggttctcgaagagcacaaggactacacgccgataatcctgtaccaccacccgtacttcttcgatccgcgctggaactacctcggtggagttctcaagggccttgacccagatgccgactgggatcagattaagggacacctccgcaggagctggtcatcacaggaagaaatctccaagcgcttccttgaggacatagtcaagtacaacgtgccactcaccatgagcggtcacatccaccacgatatgtactggctctacattgacaagaacggcaacaagcactacttcctaaccctaacatcaaccggtgcccctgacaaggagcccaacccacctgcaaacccgaagcacagtccgacatggtatggaagcaacctggttgtcatcaaggaggacggaagcgttgaaatgccctatgtcaacgtcgagatcaaggacgacaaggttcagagcgacttcatgagcgttcccgttccgcagaggttcatggccttcaggcacgtttccgaagcgggaaccgctgtcaagttcataaaccagcttgatgagagcgtcagcggcccgatagttctcccgataccggagggggcaaaggttgatccagaggccacgaacataacctacacagtcctcggtgagaggcagatagccgaccagtactacataatgctgaacgtcacgattccgcagggtgtctcccagctcgttattgacactggtgcagacaccgagaagccagtggttcagatagcctaccttcagccgagccaccccaagccgaacgccaacttcatggcatacttcacagctcaggacaaccttggtataagagatctctacgccgtcatatacgacgagaacggaaaccgcgttaagtacggcaaggtcgacaagttccctggagagccctccagtggaaagcctggagacaccttctacatcgtccagctcccaggtcttgaggagggcaagtacaagattgagatagttgcagaggacttccatggaaacagggcgaccgccaccaaggagataaccataaccagcacctcaaaggccgctaagaccaccacggccaagcagacgtcatcagagggcaagagcacctgcgggccagcggccctcgttggcctcgcagttgtgccgctcctcctcaggaggaggaagtgacttccttcccttcttttattcccgcctaccgtaacttttataagagcacccctcaagttctctccagagggcccgtagcctagcaggatagggcgccggccttctaagccggaggtcgcgggttcgaatcccgccgggcccgccattctccagataatagcttccatgcgcgtcaccttctctaaatgttcccgcaaaagcttgttaacgagggccgacaggctataaccggcttctctgagaccgccgaccacttcttcatcaaggtacaaatgaacacgcgtctttcgccttctttcgggccgttctcgtttgtgagagccgctatttttgtgggccatattgggcttttgtcccactctttatcaccgaggtcatatagagtattatgatatatatgcatagggcatcaccagagctctgcaactttgcctatctcaaacttccacatctttgcaagattctccatcctctcggagaagcggtcggagagcttatacactccagcgtcctctctgaccataccgagggccaggagctttttcataaccctaaagtataggaccttgtcagcaccgtccacgccgagggcttcttggtattcatccttgaacaggccaccgttctgcttgaggtaatcaacaactttcctggctatttccagagtcttgccatcaaagaggagttcaagaacactgttcggcggctggtacacgggaactcggatcgaaacatagtcagggaacttccgcctgcgcggcattataccacccctattatttcgtttacaacattcatatttttcaccgtccaggacgcttcggaagttgggaggaataggtacagggcttgtatattatccttggttttctggcgaataaggttggttgtacgggaaaggtccttggaaaagaatgatactatacgggaagtgttagtattcagcatggcttggacaccacccctataactttaggaccgctgaatggttcaatattcacctcatccaccatgacctcatcgaagcattgttcgaagtattctaatgccaacctttctgcacctttgtaatcccaagcaattacaagaacctcccaaacagcttcttccgcaaacgggtccaaatctcttgtccagacagttgccttgtataacttcaattcactcatcgccccgtcacctccctccaaccgcgtaggctggcacctgagccggcttcgacaagttcacaccgagcaggaggccgaggtcatccgcaaactccccaaagtccctgctgacgaccacatcatcgaggctgatgacggcgtagtaatctcttgccgagccaccgcgcctgtactcaaaagagggctccacattggcgacattgaacatcacgaaccgctcctggcccacttgaatgaagtaatagagcgggagagtgaggacttctgaaagcgccctgagcctctgaaactgccacccattcacgagaagctccctctttgcccatgaatccttagccacgcgccaactaatgaacttgagttcaaaagccgctaaaggaacctcagaatgctttctgaacacaagggcatcgaggtcatagagcgagaactgaccaggaagggcctcttctatcagagtgctgaacaagtacttgttctctgcactcctgatttctctttgcatataatcgaaaaagggcctgtacacgtggcggccgtacctggccgcctggcggatcatttccgctcttgccgcgaccatcacgccctcaccccgacgaactgctccagcgtcgcctggccctcgtgcggcctgacgcgacggagctcctcgcgaagatcctcaactttctggagaacctcaagcctgttcaggcgctttggaaagagtattggaaccccctcgcgcttggcctcgcgctccgagaagacatgtatctcaacatcctcggagcggagccggccctcgtggagcatcagagcggcctgagctatcgcaacctcccaagccgcgagcacgtgaggggcttcagtgacgaactgctcgccgtcgatgatgatgaggtactcggtcatagccgtccctcctgcactttcttctgaatgaagctgtcctgatacgcgtaggcgtacatcttcgtgttgatcttgcccgcctgaatgttgaagtcagtccaggcctctgcgatgagactccttgcaacatagccgtccctgctcatctcgaacaggtcaatgacatcattcagcatgcctctcagtctgagaagctcagtgtaaagctcctcttcgttcatccccacaccccccggagcgtgaagcagtactcgtccttcacaaccgcgcccttgcgcccgagctcgtcgagcgcgctggcaacctctttcgcgggaaggccagtcctcctgaccagttcgctgaacgtggcagggccatcctcgagggccctctggattagaaaggctgacgggatgcgcgcgatcatgagcgaccctcctcgactcttggtgcgatcaggaagctgacctcaccggcatcccgaaccatgtacttcagaagcagtggtatgtcaaagccaaaccgaatgatgacttcatcagcatcagcgagactccttaggatgtcctcgagatatgcaaccccgtacgcactcttcgcctttgtcatcttgtgctccaagtcaaggagacctggatcctccatagtgagaacggttctaacctcggagtcgttgccctccgccttgaaagtcaatttctcaggggtagccatgaagtagattgagtcggagacaagctttgcggccttaacggctcttttcagagctccagcgagcacgacggccttgacagtccatggcaggctcggaatttcaatctcaggagtattggcgtctattagagggagcttgaaccacgtgttctcatcaccgagcaagccgacctcgaggaaattctctccacccttgcggagaacaagcgtatccctgctccttgcaagcttaagaaccttcaggaaacgctttagatcaaaggctatcgcttcctcactctcgacggagtacttggagaagagcatttctggaaggttgaggtcaacgaggacgaccctgctcgggtctatagcacgcatctgaattccttccatgttaacctggaatactgcctcatcgaagaacttctcaagcgtggctatcaggctctcaaactctctagccgaatcaaacacaatctcaaaagtcatgccatcacctcctcggaagaagatgaagaggagggctcgtcgcactcatttagatactctttcgtgtcgtcggcgaagacgtcaatgtcatcgtagtctatcttcacgaaaacaaacgaatactctctcatgccctcacctccctgcgctcgatcttcttcagcaggtcttcaagcgcgtccgcgtaccccgtccagtaggccgcgttctcgcgctctcccctcgcagagagggagaacgccgtctccctggcgatgctggcctcgcgctcgacgtactccagcagggtcggcacttcctcgacctgctccagcaccgcgtccagcttgcgcttctccaaagcgacccaagaccagatggcggactcactcattctctatcacctccacgccgtcgatgtcaaaaaccactccatagtccacgacctcccttgcgagcaactcccccttgagcatctcaatggcctcatcagggtcgttattgaggagctcctggaactcctcgacgtcaattcccggggctacactcgaaagggcttcaagaggcacggcggcctcaatctccagtcgaatattcacccacttgcccattcctcctccctccttagccatacgcggaacagcttgtagctcgactcgaccgagcgaacaacgaaaccatcactttgcagggcttcaaccgccttgaggaagccctgaaaatcctcccacgaggctggcgtcgtgaggctcagcactacggcaccaggaacctccgagggcttggtgatgctcgtcttcgggccgaagtcaggagagttctcctggaaaggctcagacattggaagccacccccatagggctaaatctgaaaacaagcgcgtcacggttccggtggaagtaaatacgctccaactggaacccctccgcaccaaacacggtctccagatacactagctcgctggccttgaccccgccatagactaccacttccacgccgttgctggccggcactacatcagcccggttcggaaaggccttcacaacctcctcccgggcatactcaagccccgacatcatacacgaccacctcccgtgacgacatacgtgtcaacaatctcaaacccaagctccctcgctcgggccttgttcagagaatagcgcccatccttcgggagaatcaccaactcccgctcaagctcagtgataacctctctgagctcctcctcctggacattgaggatcttcagaagttcgtcaaacgtgaagctgttcactgcaaggacatccacaacccgctcagcgagcttgaggtcagcctcaatctttgactccgagaccccgaggagatcaaagaacttatcgagggttgtaacggcaaccctaggccttgctgaaccaagtctccgttgtacagggtaatcccaattaagaagatcgcaaagagtcttgaaattataaacatctagtctggtgtccgccctgatggcttcaagtagagacttcttgattatgacttcattacctctcacgacaaagtatggactaagctcatgctccagcacatagaagactctgtcttttggagttgtggaactgtccgcgtagcgggaataacggaaataagtctcatcaaagtgcctcctaagccatgtgacaaccttttccctcttctcatcatcaagctcctcgcggtagttatccaccagctcggcattctttagccactcagggatgtcaagcccggcatactcgtaaagcctcttcacaagtttctcggcaagatcttcccacggtaaggcaaggagttcaggctcctctttaatcacgttgaaaacaaagcgtccaatatcagcgaggtaatctaagtacgggacaatcgaagtctcaaagtagtgagcgatctctggaggtatcttatccaccttcgagaactcaacggtgaaaaagcgcctcctaatggcctcatccttaatccctggcatattagcgttgaaagcaagagttgcaagggcaggatacggcctcctgatgttcttcccaacactcttggttctgaaaaggtattgctcgggagcgtttttaatgaggttgaagaaattgtccccctcatctccaaagttcagggacttgaataggggcgccgcctcattgatgacaataacagaagctactgaagagattgtttcgccaaagttgtaaacgctccaagaagaaccaatagaggtcaccttaccaagcggcttccaaaggtatgaaattaccttggagatgacctgagtctttcctgtcagagattcgcctatgaacaagagataagggatccagcggcgcttctcgttgtaaactttatatgcataaccgaggcccgcaactaaggcccacttgaatatctttccaaacttgaccgaccaagactcataccatctcttatcaggattggctttaacgatcttatctaaaagcttcaacgcgtcataaatcctgacgcgagaaggcatttgtgtatcaaagccgtacgcctcaagttgcctagtcttggggttccagtaaattccgggggccagaggttcatgcacatgctcaacagcctcaaggaggcgagcaagggcaagaatagtatctatcgcttcctttgcgagagcctcactcagaaagagacctccaacctcattcaacttgtcgagaagctcaacctttaaggcaggtccaagctctcgtatgtaaatccctgagagagctctctcggcgatgacccaccgatacagggttggagcatccatgttggcctcctcagcggccagctcgatggtgaagtcgtggacttctcttattgcaacaggtacaaagttaaagacagtcctgtcgtgaacagcaaactcttcttcaacttcctcgccagtatcttcatctttatatttcctcttccggatcctgtaaagcgcaacgcgggggttcttgtagtcgaggacccaaaactccctccccttacgcttgaagaagattgtatacgggtcgggatcgtgaggccagcccctgaactctgcagggagaaactccatgtcgagttctcctgagtccttgctcgcttttgtaaggaggtctccgaattttatgacgatcggtgaaaactgaatgttgtcactgttccactcttcgtccattgaaactcacctcaggtttgctctacaagctcaggcatcacataggcgagaagcgcgcggagggtttcatcctccgtcactttctttccccgttccatgaacaatttgcctctgaacttctgaaacagttgataggtagactcccgaacatacacagcacgccacccttcagacggcatcgtcaccaccatgtatactgtttatcagtattatactgattttcaggatatataagctttgtgtggaccctttaagacagtattgctcaaaggtgagaatttacaaattcaaatagtaagggtgtcacagtctggccaggtgtgacgcaagtgtgacggatgtgacgggggtctaagggctttaaatcctgaaaaaaggaatctgcggggagtttagtgtcacacatgtcacaccccataaaaatgtgcctatattatttcacatagcaactcttcaatattcgttattatgacaatatactatggtttaaattatagaatatttgtcattatgacaaaataccgcgcaatctgaaattaatacctttatatatttttatagagtgtgacactgtgacattaaagaagacaggagaatggcttatttcaaaaataaagcgaaaaaaccctgcgtcacacccgtcacaccccgtcacagttggtggaactgtgacacccttactaatcattattgtaaatgcgctcaagtatcttgcgctcctgctgttcgtcaatggcttcaaattgactttttggggatagggttggccccatcttgttcgttatgagcgacttgacatggatgtaatccacaagcagaatctctacaaaatcgccgactttaagaccgaacctgtccctgacgggtttgggaattgtgaaaactccacgatcatacagctttgctaccgcaaaaacgcgaccgattattttgcgattttgatctggaatccttattattactataacaaagtctccatcctgcaaaccaaagtattctctgatataaataggaaccataaccctaccctgaggtcttactctgctctgaaacttggctagtggctcgactacctttgcctcttggtgatcctgctcggtcattggtctcagctccgttggttgtttatcccgtatctattccgtatttgttatggttctaataaactctatggtagaaaaggtttgcgaaattttctccgctatgggaagttccccaaggagtgttgagagaaaagataaagaattgggtctttacttggggaggccaaggtttcttttgagttgggtgtcaatttcctcgaggcatgcgtcacatatcctgtcctgttgttcttgtgggaagtcttttagggccttggccatggctttgttgtacatatcctctagtttcctaatcaaggcgaagatttgtagcaggtgtttgtagtcttggggttctatgtacagcgaataaatgatggaacactcttttttctggttttcacagtagtatttagtagcctttaggataaagtagaggctgttgccgaggcattggagttccattaggtaaaagatgtattttcctccagaggtgccgtcaggattgcgctcagtccctttgagttctatctttgctatttgggtggggaggagggttatgtagtcttcgtagggttcgtcgaattcccattctatgagttgttttaggtgttggactgtctcaatagtgtatgttgtggaggttgcaagctggctccatacttcgaatattttcctcactgtgctcacctcagtctcctggtttcttgaatctgattgcgagggtatcgctgattcggtgataatatattctgtcgaggaccagtccgcctttccaggccgcgttttctatttccctaaattcttggccagaaatgcctccatggatgtgaatctctatacctccatccgtgattcctacatgccccttggtggacactatacgagatacaatgtcttggagttcttttatagaatacatgggatcacctcaattctagaacaatgagtggtagctaataagacttttgggtttcattatatctcgtatcagatcaaaacagtattaaggagtaaatatcattaagagttttggtgaagttgtatggtgcgtgctgtatatgaaattgaaattggggggaagatctatacaatacctttcataaacggtggttctgcaggatatattgttgaagaagccgaagagaaaaacgaaccggccgcatacatagtcccattatcttctggtcttttggaagttatgattgatttaacaacgactgaatttgcactgactaaggagactcaggaggtacttaggaagctggtgcgagaacttcataaaaaagctctctcaaatgataatgagcatgtgcctagaaatgagttgtggtttgaggtcaacagtgattgggtgtccttttctatacctaacagccttgttgatgaagcggttgccaatgttgcaaaaatagcacttaatcctgagaattggagaaagataactgttctgaggtgccctgtgtgtggccgtagagttagggaaactgaaacagatttaatcggtatcttccctgatgatgagaatattcagattttattctgtcctgaatttgatcagcggtttaggggtcaacatgttgtggcgttcaagtgggatggagagtggaagcaaccaagttatttttaccataatcccgagcgggacggtttgattgaagtcaagaaaggtagttatgacaatgtgactctttacctcttgtacttggaggcaatttcaggagacaatgttaatttcaaacgtcctaaccttgagtggatgagggcaaagatcctctggaaaaatggggaacctgttgggtactatgcatactcggtggatgcccataagtatccgacacttcatcaaatattcgtgaggaagaagtttagaagacaggggcatgctacaatgatgctcaatgattttcttaactcgtttccgggaactgtgctgatagaagatcctaatgaagccactcaaaatcttcttgtaaagcttagccttgcaaggcgcgtggatagaggaattgaatcaaccggacgcattatgtttctccctggtggaatatagagtatatttcctatcttttcctctcaccgtggtctaacctggcatgaaacttggctagtggctcgatcactcgcgttccctgctcgtcttggccggtcattactcttcagctccttttgtcttttggtgtggttttgggtgtgaggaagatttttatgtattcgtcaatgtattttgttttgaatttgctttctaattcgcgtacggcttttccacaggtctctctaaacatgggtatctgttttttgtctatgatttttatcctccaggcgtgtttgtgtctgtgatttcttttgaggtacccttttaggggccctgttgagagtcttttcagtgaatcattaactcttttcttgattagatctctgtattctccgtgtaggaactggtagattgagtaggcgcttgaggtgtataactcgtgtgcaagctctcctgtagtaaattcgcgttcggttagggtgttcatatcaacttcaagatcgattagcataattaactcggctctcatttcgtctagggctttgccagctttcaggagtaggatgtcttctgagattctaatttcgtcttcctctacttcgtattttcctggagctatcttttcgagggtgtttaatagttgttcccatttttggtcttgctcgttgggatcatcgatgggcaattcgctctttttgattatttttccttttgggatgatgatatcatctttaaagaccatcccttttgttggcagttcttgtcctaatgttgcaaattctattagtttgtttatgatgtggatttgaaagatctcagcgtcgtcatttggatcaaaggggaagagtacataagaaggtttgtcttttagtctccattttattgggaatacttggtttaattcggggtttttgtattctccttttactaactctatttcttttacaacgggattggtggggtcttcggatttatctggtggatttatctcgatgattctaatgatttggatccgggtctcgttggaaagcgtttcgttgttatctatgtctttataagaaaagtatgagacgtccgctttgagttgagtgggacgttttttgaagggtattcttgcttggtcaattattatttctggatgctctatcaagtagagatatttttgtaactgttcatgatttgcttgaaagcttttacattcaaagactacaatgtgttctttctcataattcggaaggattatgtcgggagttacccctttcccattcaggtcttctttctctacattcctaaaatggatgtgtgcttctatgctgttttgtactattctataaccttttttatagagatcgttggggaatttgggtgttggggtagcaaggtttaggatgatattcatcaacttagtatgtgctttctggaattttgataactcttcaagagtacggattggggtaccttcatatttagatagtttaagatatttatctaatcctgatgccatattggggcacctcgagataagctttggcatcataagtctgttggatgtttgcaaggagccttagtgcagtgttcccgcaggagccctttgggagatataatctagcccaccagggagtaacttctaacgagaaattatctccattgtgaaggtcagttccgactataatatacatgtctttttctacttgttttgcaaagccccaaatcctgaatggctctttgggtgttgtaattgcttttgcaaagagatctaaatcagagatttcttttttgaactcatatacgagtgggattttcttttcccaatcccatgaggagtaatcaataagagagtcctctatgtatttcaagttgtttctatatgtgtgtacaacactatcgataaattccaaatgttcatcgaaggatgttccttttgctgtgaatttaccccaataatacagatcttctaagacgaatttgtcggggtactctttctcaacgagtttaatcccaatttttgttagtctggtcatgtatcggaacttctcatgctcttcaacgatctcaaggagatctttaaccaattcacctgagccatcaattcttagtttgctaactttgttctcctttttttcttcctcggtgctaaaagcagtctcgtcatgtttaatggagatgcttctaagataaacatctttaaaggatatatgcatgaatttctttagaagcttgtttgataaccatagtttatctaatctcgattttatttggctaacaaatttgttataagcactatcaacgtcttgggccttgtcgagagtgaatactctccagaatctcgaatctttggcatctaagaagaagtgaacttgaagttttttatccttatccgtgatatctattctgtatagtaggtaatcttcaagaggttctactttaattgaatcaaacaagcctctcaggacgtatttgaggaattttggtgagatattcgactcaatgacatacgttttaacaagattttggtctggttccaatttttgttcttccagtatctcagcataactgcgagccatgtttacctctaaccattcgtagagatctccacgagtcttaatgtcttgcacatgtgtttgctgtcctaatgtttgaggactcatacttcatcactctaaatctttgatgattcaaatcttaatttttttggttaatgttaatatgtccttgactccattctgcaacttcgctagtggctcgacgactctggcttcgctggtgtcctggtcgggcattggctcacccctctatgttctatcaaaatcagaatataatgtctccaaacatattaaaacgttttccagcgtttggcaacgtttaaaaattaaatcgcacaataaaagaggggagtaactagagagggggttagtgcatgctctcggatgataataattgggttagtggttttaatcctttcgatgagggtagcaaggaggtccagcgcgagatagaatatagcttcttcaaaaaggccgttgttgagttgctactgatccctctgctcgtgtggtctataatggtgctcactataactcctttcggagccgatcccaattttgagttgtcctttagaagtttccacgttaagggatctatgtttgtggtagggccgtttatagttatgctgttgttcctctgtagattcccaagtgtatggtatcagatgtatcagtttaaactcaagtatatggaaacgatattagaatctcttaagcgttctcaagagtagcgcaaagctgagtattcccacaggtactgtcttataaatattatctttcttggttctagttagggctgttgcagtcttgttcacccaccctgttattgtgaggtaccacgagcctttttcgagaatgtaatagtcccataatggaataaagaatggaatccattccgaatggagggctattccaattaaggagtatatggtaatagttatacccattaaaaggagggaaatcacgttaatcttgttatctacttcaccagcctctattttgttagtcacaaatttcgagattatgtgccagtttctgagcgtgaaggcagtataagccagtgcaaagcctgcaagggctgttcctatgtagctctggagaccgtaatagtagaggattattatagttggaagtgagctgaagagtgcaaaaaaccagttaaccatagcaaatacaaatattatctgtaaccattccatagagtctttccaggttactttataagtatctctttttgtgaaagttacctcgctcatacttctcccttcgcttggtactatatacgaactccttaataatttatctgtggtttaatcagtactatatcattgcctagcccaataatcgtggcgaaagtttaatatagcttctcgtaagaactctatcgcttaaactggttaaacagcggaggagggcccggaggatgagcgagggtaatattccttcggttagggatcttgctaagccaaagagagttcctacgatttatccggagggtgttcgtttctctaagaaattgcgattctttaagacagcatgggtgggtgttgcccttattattatagcgttctttgtgatggggtatgcggccgcaatgagccctaagtattattgggatcctgttgaccactggtctaaatcttggacaattgggcctggagaagtctggcacaatagttggacctttaaggagcctgcgaagaatgagctctttgaaattaatatttcagtagctggaggtaataatgacctcaaggtttatgtggacactcctaaaggtcggatagattacgggaagcttacttccccgattcacttgaagttgaatatcacaaagtatggctctggagagtatgtagtttattatgacaatagttttagtgtgattacttcaaagacagtccacgtagtccaaaccgcgtatgtcctcaaggaggacaccaccgataaggatggcctatactttttcgcaatcttctttctcatgataccaggactgatcttagttggcgcaggggtgaggaaggtggcgactttgacggttgatgatgatgttatcgaggccaagttagtcatgggcggtaagcttgagctgaaggtgaacaattacaagctggacgagcgcatagatcatgcagttaagttcaaggcaggaagggatgaaagtagaatagtggaaattaagccaatcagaattaagtggaacgcgcttgggtgggtattttatgtggatgaccaggaggttggcatgctgccgtgagaaacatttatatattacataatatataacccataatgagcccgtgagaatgatcgggcgatgagccgcactggcatgaagtcccgttggggacggagttggcgggccctttgagtggtggccccggcagacgctcatgaagccggggatgcaccgtgagagggttggcgtcccgagagggtgcgggcgatgagcgaccgtgcccgatgaagatgaaaagggacgccttcacggtccttttctcaagagttctaaaaactcaaggtcattctccaggtatgcgattcttgcaaagtacgcaatgttatccactaagagcattaggtgtttgtactgttttgccgttgtcttgctttctttttcttcgatcgtcttaaggtcgggatactttcgtttcaggattgagataatgtccttatctccaagtatgaatttgcagtcgggataaagctcttcaaagtcgtcatagaaacgctgtggaagatctctatcgcgaattttgccagtgaccgagattctataaacccttatgaagtgtaaatggctggtaaggttggtgcgctctcctttgagagcggcttttagcatgtccattttggccttcttcgcgcttccatatttctttgcgtgcttgagattgagttctctgaatatgatccttttgagatgtcctacttcagagtcccaaactccgactaatgctaaaacagtaaacccttttctagtctcatgctcagtgctcctgtcaattatcacgattaagttcttaaagcgcttcattcaaccaccagccagcgtggtctttttccctcgggaataagcttggccagttccctgagttcttctggagtgaggatgtaaacttcctctggaagttcagccttggacgggatgtagataagcctttgctcaacgttatagacttttcctcttttcttttgctttttgatctgctttcgaacctgaaccttaagcattctcctcaccattatacggtagaaggctttgccttataaacttttctaccgtagaaaagaaaaaggcggctgaggtgttattctttctccctgcagtccactcctattagttcacatgcaatactattcagtatcatcaattgttcaaggtcgtcgaggatctcattgatcaggatcctgtcctctttcttgggagcatcgaggtaaagaatgcggaggcgccggactattgcagtgattaactttttgttcagctcctttttaggcaaccttccgggcctgctgttgctacccttgtcttttctattttcttccggtttttgttcctcctcggagagtaggctgtcaagttcgtcgtttactactgtgtaggcctcagccaagttagaccctccagcgcttgaatgggttgtcttcgaaggccacttctatgccgccgaatttctcttcttttgttccctcatcagggttctgttgtttagtgctcatgtaggtctttattctcggattcatcttcatggcgtcttcgacgacttctggcacgcggtagcggaggatcgtaataaggtcccaaagcatgtcattttccttcttgagggctagatagagtttggcgtcagtttcatccagggcaagtgggattgcttcgtattcgtagtattcgttcatgatgaaggcactggctagaattgttatcgtctcgtcgccgaaataagcgattttcttggggacgcgaattatggccgttggcgggcttttacccacgatcctcaagaggctatggactagactgtcgagccagctcggaggtctgacttggtagaggattacatagtcattgaggtcctcgcgaaggccaatgggatagccgattactcggctctctttcccattgaaccaaataatgacgttctgctttggctcatagacttgggcgaacttatagttgagttctcggagctttctagcgtgctcttggatgcgtgcatctggaactattgggatggtatcaactctatcggggtaaacttttgtctgcgaggatttctccttctttttcccaaatccgaacattcttctcacctcacaagctttgtggcgggcggaagtagatccgctcggtgtacattttatcaaaggagaaccaacctcggccctttaaccagggcttcacgtccttatactcgcgaaagctcttcactttggggttcttgatgcggtggaagtccctgatgactttcctaagaagaagctcatcatcagcgctggctattcttccgatgatgccgatgtgtgccgccccgtagatcagaaacgctggcaggccgtacatgtattgggtcccgcttatgatgtttacccaattggagcggccctctctattcagcttatcgagggcttttctgccatcaggatgttcgagaaggttctgaacttcatcaatgacgaagaagacgggggtgttcctgaagcggacgaacttggtgacgatgtacatgactaaatgcttgaagatccatgcctcttctgctggtgttagctcggagtttgctgagaagtcaattacattgatgacatccgtagagagctccgaagtaaagtctttgttttttgagaagatcgtatcactcctcagcaaagcgcagacttcgaggatgctgaggagcgttgagcttggcacggttgagtttgggcggtattttttctcccactcgtagccgaacctttcaagctcatcaggatctcgttttttctctagatcccaagcctgtcggatgacgcggccataaatagtattcctgttgatctgtgcaagtctagctatgaaatcaaagtccacgtctttgtagcggattttcccttctctagcgatgcagttgttgtctttttctattgcttctaggtttctcaccggacggaagactatcctctttacggggaacgcctttggttttaggccatgccaactgaggatcgagtgtttatcacctggaaatgggggatataaggtgaaggggtagttgggccagccaaaggcgaagtcccctggctttccgtggagcactccatcgtttttaagaatgttgtaatactggagtaacggttgaaagttctctttcacgaagtcggggcctttcttcttcgttataatggtcaagaaatccattaggtcttttgccttgttcttatcgtatttctgctcgatgacgactactagtgctccagggatgttttggaagatctcttcagctatggctctcataactgtggtcttcccgctaccgcttggcccgaggaaagttatgtggttggcttcgttttcctttagctccacgtagcgtttttctttgtctgtgttcttcccaatatagattgatactcccatctaacccacacctctgtctgctttctatgattgcaggggtctgcgtgacatatcacgatttcacacttttgggcttcctctacccgtctttttcaagatgggggtttctcctcttgtgctttgaaaataaaactatgcaactctcccacaatgcttttttagaggccgccaagttcccacgaccttttcttcctgtacaggccatacccaatcaagcccacaacgataacgctgaacgctattgccttgatgatgacagagccgaccagcttctctttctttgccttctcgatgtagctctgctcgctcttctgcgaagcatcttcgagaagggtctgtatcatcttcctgtactcatcgttctgctgttcaagaaagtccgcttttgccttgactgcgttgtactggttcgtcaggttcgctaactgtgccttgagctcgcgattttccctcgtcaggttcagaatctttgcgttcagctcggctgtgttgggctggttcttgagcttgctctgaagctctgaaacctgctgcttgagctgttcgttttctttcgcgagcttgttgtatttggtcgtcaggttcgccagcttttctctcaactctgtgttctcgttcctcagctccgcggcctcgtctggagcactgaaactcactgcgaacggcttctcgctttcaacgtgaacgtagccctcatcgccgagcgccgcgaagagtatttccaggcccttagtggtgtagttctcgccgtcgccgagaatcgtttgaatctggctatcctgctcaatgacgaggacggtttcatttgtcttgatgttcttatcaacgagtaggctcaggtcgttgatgtaaacgcgctcgccgacactaaggctcccgctccagtcgtagagagtccctcctgacgcgaggctggcagtcagcaggaacaagataaaggcgaaaaccagccgcttcatatcactgtccctccgggttgtttacgatgaccgtcaacttttcaggactcagaatcgtgatgttggcgatgtagtacgtcgtgcccgtgaagtagccagtcccaattattgttatgttgttgatagtgacgttcatcggctcccaatagatcgtatccgggaatatgaagaagaacttgcccttgttggggtcgtagtcgggcctaattgtcaggttcagctcctggatcgtcaggtttccgccaacgtaaaccagctcctcgtacctgtgtatggtgagttccgaagttgggattgtggagtttgtgctgttagaggtgttaagtggtatcgtgtaggtctcgttgccaaagccgattatgattccaccatcaccccaaccaatgcaccctgcggtactcacaaccgccgcgaggactattatcatatataatatatgaatatatgacttcatacctatgaacttcattcttctcaccccaaaaggcctttcaccgagaccgctcccgtcttccggttcacccaaatgaagccagcaaagagcttagaaccaccagtatcgagcttcagctcgaaaacccaatacttctggccgtccttttccttctcagtgaggctctttttgtctggatagagcttgtagttgtacttctccagtttcttgttgtagctggctagatactgccgagcgatctcgtacgcctgctcggctgtgaccggatagtcctcaacataggccccctggactatcgtgaggtgtccgtcagcccaccgtattgtgttgttgctgaagatgaatccctcagtcggataaccaagctcatacagtctttcttttagtgggtcgtgctcggcaaacgtcgaatagctgaaataagccaaaaaaattaagctaaccaccgcgaagagccttagaatgacttttgaaaaagatggggtggagcggtgggcgtacatttcagcccacctcaactagagctctgctcggtcacaacaaccggccaggtagcggtcgcgttggcctgaatcacatatggggcggtctcgttgtagagcatggccttgttgccgctgatgtcctcaactacaaagtagaatgcatagtagtcattcgcagtgacgttggtgatagtgattggcagggccgtagcgttaacctcggtgaaggtcgtagtgttgctcacggtgttgctggtgcctagatcagcccaataaacgtagtacttggctatctggtcattgtcagtcgcgttgaagtcaatgctgaaggttccagccgtgctgttataatcgaggctaacacttgagagggtcggagcggtcgtgtcggtaacagtaatgctctgaacgtcgctttcaagggtcttgtcagtgtcataaacgaccttgaccttgtagtaaaccacgtcaccgaatttgcttggaatctcagccttgtatgtgccgttctcggctgtggcgttcagggcagtataggtcgcgttgttcggatccgcgacgttgagcgcgtaaagaacctgaacgctggatatgttgaagtgctcctcgttggccagttggaagctcacgagaacgtggccagtgctctggtcaactatagccaaaaggttgctgacggcgagttcataagtggtgttctcagtactgttgtcgctcagggcattggttatgtcaacaaagccgcctccgccgccgtgataggcccaccagccgatggcggcgaagagtagtatcaggccaacggttatgatctgtctctctttctttctcatttctcaaacacctccaaacgacttaacaagttctggaatctgtttcaggaaagaaaagaaagtgtcaactaagccgaatgactttaagagtgccagggccccgagagcgtagaacaccaagctcaccttgccttttgccaggacgccgatgaggatgaggattaggccgagcgcgaggtatgggtggcttcctgcaaggttgtggagctgatcaatgatgctgttcgcgtccatgtcaatccctcctgttctttgctgctaatcctgccagaacgccagctaagccgaagcccgtgactcccttaatgaattccagggccgttgctgttggatcgccggtaatcgccagcatgaagattccgccgaggataaggaatgccgccgcgtcccaaagtccccaactgtctaggtcgctgattctgtacactgcgagccctatgagggccgagggaatgaagagcgcccaaaagccactgaggccgaggaggttgcctgctgtaaccatgctgttctggaagtggaaaatgcaaaggaggtaagcgatgagagctgctgcaaccctgccgagcattgtcagtcacctcagatcagcccggggatgtgtggaagtattgaaatgaatgcaccttttgtggcgatcgttgcggcggtccagaaccaaagtatcagctcattgttgccagtctctggagcgaagatgtataggccgatcaatccggagacgaaaagatttgctggcccgacatcgccgatgttgagcgtcatggttcctgtgattgcccacatgacccctagcattccgagcgctgcgaagagcaaactgatgaggattgcacctactctgctcttctttttgcctattgagccgtagattcccgcgtagagcttgttgtagtagtcgttcttatctgcgagcttatcgaagagttcaacgagcactacgaatgccagcggcaccgatgccattgcttctgttgtctgctgtactgttatgctgtgttgtcctgcataccacaaaagtaaaccaagaaagcccgaggctagggccgtctttaaggcccattgcccggccttcagtttttttggttgttgttcctcccccatcttcaatcaccacctcaaagcagttttctccaaaccacgaaagcgccaactaacacgaacactattgcgagaagcgcccaaagtggaattccgagaatcttcttactcagcatgctctttgcagttgttaggatgtcaatgtgtggcttgtactcatcggcaagctgactcagctcatcacccttctgtgcgtcaagttcggcctgttcgtactcgccgtagagcgccttctcagccgcgctcatgtagaagtctccggcctgctcaagctttttggcaacgtttagccagttgaggtactcttggacagcatcggtctgtgtaattttgttgagagcctcaatggcatcctggtatgcctgtatcgctttctcagcgtagagggaagccttttcattgccctcggcgtctgccttcttcttgagatcctcggcggcagtgatcttctcctggagaccgttaatgaggctggctgcgatcgctttagtctgattgatctcactcgcttcgagcttgccatcgtcagtaaactgaacgagctggtctatctgattatccgccaacactgtccttgtgttcgggataacagagaccttcggattgacaacaagccagagcggtattgtgatattgtcatctctcgtgatcgtgaagtaagccagtccatagaccttataggttaacgtgctcaggtcttcagtgtagtgggctgtcaggagcttttgagttggagtgtccggactcatcgtgccgaggtttccaaatattgaatctgcaactgtccagcttagatccttgtactctctcactgctacgaacctgaagtcgtcattgaaggacggattaagaggctcaaaatagcctggattaggcacaatatagaacttgtagtctgctgttgaaccaatgacatgaactggagtcgcaaaggtcagtataatgaagtttgagagcgctccagcgtacttctcctgataaagcgcccatttcgttgaggcttcagtattgaggaacttaactggtagagatgcatagaaaccatctgcaagatcggcgatgtcgtgggccatgctcacgtgccgccaggcgctggtggtgtaagcagtatacttaatgtcatcattcctaacgaagacgtagcacgtagaggtgtttgagtcccacttatggttaggttgagcagtacaggatgactgatcagtgtactgcgggtcgttctgccagacctcacggtaagcgtcaaccttaacgaagatctcccacgttgaagtgttcgcgctgaatatctgttcgatcaagtctctagtgacctgaccggtttgaatagcgttctgcacctggtagacccaatcgtccggaaccttgagaattgttgaataaaccacactttggccgtttaggccctcgctaccagttccgtaatcccaaacgcgcttccagagcgggacgctactgttctccttctgaagatagatctcaacactgcgaaggtgtatgacgttaaatggtatgttgctctcttttgtgtagagtttagcctggacggggaaagctgaaaagccatagatctttgagggagcatagatctcaatccagaggtcgccagttgctccatcttccttagtgtcatacctcaccagatcagagcggagcttcgcggtaagctctgcaatcctttcatatgcctgctggttagcgtcgtctatgactttattgagttcatcgtcatcgtttttgacggtagttccatttgcttggcgctcgtaagttattgttgcaccactgtcactatctccaccccgagaccctccaaacgctagttctagcgctgaatatgtcaaacctgcggctgccattcccattgcaacgcatgcacctgtaccgaaacccatggtccctgccatgcatgctccgccaacgacaacacccactactgtcgagacgaccattttgccggtgttgctcgccctctctttgacaccattccaccagctgccgaagtcaaacgctagggctggctgtgcatagatgcttgtggtaaaaatgaggagtaacagtaaccctgacaggcgcttttttctattacaggttttcctttcctgctcttcttcctcgcctcctttctgctcaaaaagtgaaaagaagagcctcattacctcacctcctcctggcaagtccaactaaagcgagaagcccaagcccgccaacaccgagccagagccaggtgttcccacttgagccgccgaagagcgtgaaccctccagaatctccaatgctaacggcaaccttgtcctggaagaccgtcgcgttgccctgaagaacctgcacctggagctcgtaggcgtcgtaagtcaggtcttctggcacggcgaaggctatgctaacatccttctcggtgagcgggccgaccgaaatgctctggttgatctcgctcggcaggaagccgcccgagaccttgatcgtgtaatactgcacatcgctcgacgggttcttgaagtggaggacaatcgtgccctcgccacccttctcgactgtcagctgcttcgtggtgagcgtgattgcaggattcacggtgacgtcataggtcgcgacctggccgttccactggagttcgagcgtgtactggccctcactcggcacgttgacgctgaaggagtacgcctcgtaggggctgaaggcgtgggaatcactccaaacctcgttgccctggctgtccttcagaaccgccgtgatgaggtaactctggccactgctttccgagatgcgaagctcattctggccgacctgccattcagagggcatctgaaccgaaaacgggagcggctcgacggtgtaggtgacactctttgtcgtcgtgtaggtcttgctcattattgcgtcatgactctcaaagctcagagtgaacccgtgctggccgaccgcgcccgccttgaacttgatggaaatctgtgtcgggcctgaaatgtcgccgagatagtacttgcccgactcgggagagacggcctggccgtctttctggacttcgaggacgttggagaggccgctcaggctcaggtaagtgttgtaagccgcgtcggtgctgatcggcgagagagtgaaagtgagcgtgtaaatcgtgttctcgggaatgctgatgtcagacgggaagttttcaaacttgaaggcggcgctgtcagggtacatctcgacactgacagtcatgtcaccctggacgtctatcgtcttcgtgacgctccagtacccgcttttctcgaaagtgagtgtatgagtgcccttagttaaatctaaacttccaccatcgtccagcgtgccgataacgttaccgttctccttcaccgtaacgcccgtgaggggttgattactcagagcatccttgagcgagagctgaatatgatactcaacctcataaatctgtatattattaaactcgaccttcccctgccagcccaagttattaccaatgcctacagccggaacaccaaaaactaccttctcgattgacaacgggtcaatatgctgctgaacattcgtcagattatacaataagaaaccgtccttatataccagtaaatcccactccgtgcccctctgctgaaactcaattctaaaatgtacgtacttattcctaaagctcgtccctgcatcaatagaaccacctatagtgtcgctactcccatcatactgaggataattagcccctgagattttcctaacctcgattgaacccgtatcatactcaatgaaagttaagccaacccctgaactccctgacataaaagacacaccagataaaacgttatttgcgtacgcctgataatcaaactcgatagcctgaaactcagtaacattaagccaagccctgacgtactcagaccccgtagcatctaagaccaaccgaccgtccgatattgttacattagacgaagacccaaagatatacaccccgaaatctccactagacggaatataaacagccccaaccgtgcccgttgccagcgttccgaacagcaccaacagagcgagcaaaacaccgagtttcttcatctcttcatccctccactccgtagtcaacaccaatgccgccgagcaaggccagcagaagcgcgaggttctcaacagagtccttgagcgcgtcgagaagagctgcaccgttcgcctgccagagtgccgccaggaagctcaagagcatcatgtcatagaggagcacgcgccagcttgatgtaaagggctcgatgattactaaagccttgtttcccttgttcgtgagcgcccaatgcatgagcacgccgccaacagctccgaccgctagagcctcctttgtcatcatgggccaagcgatgtagtaccacgctcccgcgagcacaaagaagatgattagctggatgaggctctttgtcttcatactgccatcaccttgcgcgcctttttgagcttagaaacctctgcgaggagctgttgcttcttcctcgtgactcgcgcgagctccctctgcgctgcctcaatctgtctcctcaaacgctcagcgtaccgatcgagagtttcaatctcccgagaaatcccatctaggtcgtccatactaccgcctccggagggctttgccaatttgacgagaactgatttaagcggaggaaggcccaaaggcgccagagaaaagtcgcaggaggagtttaaaagcaaataagaacattttaagcttaaattaagcgtaaaaaagaagtcagccctcaagaatttcctccggccttgtgttacctagttccagccgatagagtttcagaaccgcctctctgaatacctggttgatgctcgttcccttggccttggcaagggcttttgcccttttctcaacctccgaatcaatatatattccacgaacaaacttagattgggccattcctccgctcacctcctacattttttcaaatagatcagcacgaacacgagggcaaccataacaagtgtcagcacgaaaaagaaagtcaatgtgagacaaatcgtgtagcaacttgcttgatagagggccttgtcgagggcaggcatgaggtcaatcactacctcatcctcctttcatttcttcatgactttgccatatttctcggcccatttgcgggcctcccgccactccataaaggcttcgtaggcaaatgcggagagcactaccgcgaagactccgccgaaagcaagccaaataacggagaggatggtcatttctcctcacctctcaacgagatgcccaatttggcgcgtttcgagcgccagccgccttctaaaacgagcttcaggtcgtcaacaaccgaggaataccactcatcggccaggatctcaaggttgaggtagtgtttttccagaactccgcgctcggccctgccctggatgaagttaatgacctcaaatgggcagcctttcctcgcgaggaacgttgcgaaccactcccttaccgcggccgcggagaactgaacgctcttctcagtgtttctaaccgagcggagcttgacgcgtagcctgttctttacatgttcatagtcaaggggaagttgctcaagctcagtgagggcaaagtcgcgcggtaagtaagcgtagaaggcttttttctggcccttctgtttgtgaattggatacttggcaatgtttgggtactctcttgggaggatcagtttctcaggatcaaactcattgaagagctcaattactgcctttagtctcaggccagagaagacgagggtcttgtagatcgtcgccagaatagggtctttttgttcgtagtactttagagcctccctaatctgcgcgtctggaacgttcacttttctcgggtgtgttggcttgacccaaataatctccttcagatcaaggtactggtcgcgagtgattatgccgcgattcctcaggaacttcgcaaagctcctcagggccttggttatgtgtcttttgtagcctgtctcggcaaggatctcctggaggtcttcatatgtcttgatagcgtatgtattgaaaaacttctcaagggttgaaatatagcggaatttcgtttcctcggtggagactctgagggagagccattttgcataggcatcttggagctgagaccacttttcgtttaggcttatatctggcgaggacgtccccttctgcctttcgagcccgcgccccgggttcaaatcccggccggggcaccagaattcttcaataggctttttctggcaagtttaaacttacggttgtcgtgtgcccttttatctgtgcccttttatctttaagagatgctaagaagagacaatattctctgcacaaaagaaaaagagcaaaaatcagccgtgtataactttcacgatttttccgtactctgtaacaacaacggctgtaacctgaagcttgaaccaacatcaaaaacttttcgagtaatcatctggtgggttaatattgcgaatatcctggatttatccacaattatgtccatgcaaagatttataaaacgtctccaggaaaacactccagtccgcgaatagcgataatcctgaggtgatgctcatgggaaggactactaaggtcggatccgctggaaggtttggccccaggtacggtctcaagataaggagaagagttgcggccgttgaggccaggatgaagcagaagcacgtctgcccggtctgcggaaggaaggcagtcaggaggataagcactggaatctggcagtgccagaagtgcggtgccaccttcgccggcggcgcctacctgccgaccaccccggcggggaaggtcgccaagcgcgttacggcctccaaggcctgatccttttttcatcttgaggtgatactatggcgaccgccgtttatcgctgtgcaaaatgcggtaaggaagtcgagcttgacctcgcgaccgcgagggaagtccgctgcccgtactgcggcagcaagatactttacaagcccaggccccgtgttgcccgcagggtcaaggccatctgaactatttttccctgcgaaaagcttttatcaaacattccaaacaagtgattgcaatgatgctgataacaacgtcccaccggccgaccaggaggacgaggagcttcggccacgatcttgagaaagtcttcccgaactcactttacctgactaggggtaagaagaccatccaggatcttctcatggaggcctacgataggggctacgagagactcctaataatcaacgtctggaagggcaacccgctcaagatgaccttcatcaaagttgatccagaggactggggatacatcggctacctctaccttcacgggataaagctccagcgcgagattggcttcaggaacatacccccgataagggaggagatgccctttgtggtgacgacggccaagagggtcgggatagatcacacggccttcgcccaggtcttcgccgaactaaccggcggaaagttcgtcccgaggggcaacaagagcctccagacgatagcggacaagaacaacacagacgttatcggcgtcatagagaactacccgcgcggaatggctgtgaacttctatcgctttgacataacccgggagcgcccggtcggtccgctcatcctcgtcaaaatatggataatggaagacggccggagatgggactacaaggaagcactcggcatcaagccgaaggagtagcccgaaaccgtttttaacattgagaacctaaacaatcctatgagccgcatgcatttctatctccgacagcgtcttgaagaagtccgaaagagggttctctacgagagctatgaggcccagaagctcccggcgtgggaacgggccggaatcacgtggctggccctctttgcattctggatcattataagcgggaagttctcgccatcgcacgtaattaccggggcactcgtgacgcttctgatagcgattataactagggactttcttaccgacgatataaggcggacgggacacctcctctcgaaggcggcctacatattcctattcctcgttccgcagtacctcttcatcatggcctttcgactgcttgagagcaacctgagggtcgtcaagaacgtcatcctcatggatataaaccctggaatagtgaaagtgaaggctgatcttcactcggacactggtttaaccgtccttgcgaactccataacgctcacacccggcactctaacgctcgacgtcaccaaaaagctcggcgaggcctacctctacgtccactggattgatgttgagacgctcgacggggagaaggccggaatgaagataaagggggagcttgaggaatggctcaagaaaattttctggtagttctgccctacgcggtggctttcctcgtgtttacagctaccttggtcagttacagagttatcttcggcccgacgctcgctgatagggcggttgccctgaacactgcgaccacaaaggcggtggtgataatagcgatgctctcgatcctctacgatgccccctacctgctcgacgtgagcatagtgctcctcatggtgaacgccgtaggaggacttatcatagcgaagtacctggaggtgagggcgtgatagagctcctattcctcctcttcggactgttcataatgttcttcggggccctcggtttgctccgctttcccgatgtttacacgaggctacacgcgactgcgaagtgcgatacgggaggggcgataaacatacttctggccctggccctcgcatcggactttcccctcacgggaaagctgaagtttctggtgatagcgttcacgatagccatgataaacccgatggtcagccacgcgatagcgagggccgcttacaagagcggaataaagccgaaagcggtggtggacatgtatgcttgggacaatccatgaagttctccttgcggcgataatactcctctctgtctcggtggtcgaagccgagaaactttcagccgcggtgctacgctacggcctcctcagcctggcctttgtaatagttttaatccagctcaaggcccccgatgttgccctctctgccgtcgtggttggggcgatagtcacggggctcttcctctacacgataaaggaggtgggggagtgaagcgcctcgtcggagccctcctcggttcagccctcctgctggagctcctcaggcttgactataccaaagtcccctgggggagctacgcttactacttagctaactggcgcgaggtgggaataccaaacctcgtgacggctatcctcgctgactggaggggctatgacagcctgggtgaggcgacgctcctgtttgcggcaaccaccggcttctacctgctccttggggggaagcggaagtgaagatgagcctcgttgtgaggacgactacaaagctcgttgccccgttcctggttacctatggggcctacctcaccatctacggctacgagagtcccggaggaggcttccaggcgggggttatatttgccgtgagcgttatcctgctcatgaccgcctacggctacaggaggacgagaaagcacttccccctcaggactgtccagcttgtggagtcttcagcggccctctttatagtggggacagcaatagccggccttgcctttggagccttcttctttaacttcctccggccctacatccccggaggcaccgtaatgaccttcaacataggcgtggccctcaaggtggggacttccttcgtcctcgtattctacatcctgtcgaggtgggttgaccgtgattaacaccgagacagctggaataatcgtgatgctcatcggcctctacggcctgatatcaaaggataacccgataaagcaggtgctctcaatcaacgtgatctcccttggcctggtacttttcttcataggcgctggctacgttgagggtggggactttccgataatgccgtctaactcggtcgatccgcttcctgccacgctgatgctaacgacgctcgtagttgacgttgccataaccgcgctggccctggcgatgatactgcgcatagggagggagtggacttgatagcggttctggtagcccttccgcttctcttcgcgttcctcactgcgctcacaatacccttaagaacggagaagtacgcgaggtactttttcctggcaggtgcgctgtttccatggttggtctaccttctcgtaggggaaagaagcgaggttgtgggtggctggccgaggatgggtggaatagaggtcgcgctcgatacctacaactccctgttagtactgggtgagttaatcctcttctccgccgttgccttgtactccattgactacttcaaaaaagacgtaaagccccttgtactgctcctcctagttcacgccggcctcctcggagctttcataagcagggatctcttcaacttctacattttcatggaaatagcatcggtctcggcttttgccctagtgggcttctctggaagaaaagacgcactcaaggcggcttacaagtacctcatgctctcgctccttgcctcatacttcttcgtgttctccatagggattatctacctcaaaacgggctacctgaatcttgaactgatttccaagtctcctctctcccccgaagtggaggctgccgtcgcagttgcgttcacttcgctcctcctcaaggccggaatcttcccgctccacctctggctccccgatgcccatgccaacgctccctctccagtttcggcgctcctctctggggcagttgtcaaggcccctgcttacggcatggtgctcctctcgcttcactttccgtttagcggggttctcaggacggttctactcggcacggccttcgcctccatgctctttggagtggccttagccctcatgcaaaaggacatcaagaggctcctcgcttaccataccgtcagccagatgggctacgtcctcctcgggatagccacgcttaacccattaggcgctgtctattacgccttcgcccacatgctcttcaagggtggcctcttcctctccgccggggccatggtggacaaagccggaacgagggagcttgataagctttcctacaggggcgaccccctcctgatgacctcagtccttatgctcagccttgcgataggcggaatatggccctttgtcggctctccggcgaaggctgcccttcttaagggactaccctatggcagggaactgttttacgcagctggtctgggaactctaacatcgttcacaaagctcaattactacctgatgaaggggaagggaggacagcacggctttacagtgcttccgtcgtttatgatggcgctcaccgcattcttcgcaggtatttcactcggaggctccccaaaggcaatggatgcctatctgctcctgggaggggtggcgctcttcatgttgctcaaaaagagcggcctgcttggagtaaagctcccaaggacggagataacgccgaaagagataaacgttggcgccgtcattttcgccatcttccttctcctgttactccacctctctcagggttagctccttgacttccttcagacccatgagggcccttttaagctcctcaagtgaaatcctgctcccgctgacgtccactatcgcgactatcgccgcgaggcccagctcggacagctcctcgctctcgttgaagaggatgtttatcccgtgctttccaaagagcccgctgatcttggccagaactccgggcctgtcctccactacaagctcgacctcaacgagcttctttcccggaagggctatcctctcaagatgggcctccttaaggtcagtgtcaatctcaacaaggaagtatgctcccctaacgagtccgagttcataggcaagctcaaggggaatctcaatttttccatcttccttgacttttacaagctcgtagtgcctcatatttgtccctcactttgtctcctaaaaaagtttggcatctcaaaatatttaaagggaggaagctaaagcttttggggatgcgtcgtggcattcgacgtcataggctacgtcttcataataatcgcagttgcaaggattttcgccgaggtctttgagagaataggctatcccggctttctcggcgagattacggcgggtttgatgctcggtgtcttcctccatgatcttcccagagaagacctcaccctaatggccgagttcggcgtgttctttctcatgatgtacgctgggctggagctgactcctgaagaagtccgcatcggcgggaagaaaagcctccccatctatgtgatcacgctcgtcgtcatgttctttctcaccctaccattcacgggttacaggataggaacggacaactttatcgtagcgtctattctagccgtcgcttcggcgccaatagtcatacgccttactaggttcttcggccaggagttcctccacatagccctctcctacgcagttataagcgaggtgggtacccttgtaatcctctacatcctcataaacttcgagctccaccacctcagctactttgagctcttccttgaactgcttaaggatgcggtcttcctgacgattgttctcggcctgaactacgtgatcgggataaaacagaggctcagaataatccgggccctccggaggctccagagcgacgaggccgtttttggcatggtgatgattttggcaacttccctggccctgatcagcgaggagctcgggctacacttcagcataggagcctttctggttggactcatgctccacagcgaccttcttggcaccaagcagtatgagagagtgcacacaataatatcgggcgtgacctacggcatctttgcccccatattcttcgcatggaggggaataaacttcgagaccgagttttcgcttgaggttgtgtacttcttcctagtgatctacctcgtgaggatactcctcacaaccgtcttggtctgggagaaggacttaaaggtttccctgacgagggctgcgggcatttctagcttcggcgtcctcggcctgctcgttggtgaggttggctattcctacggcgtgcttagtgagcacatgtatgctctggcctcgctcgccagcgttttgggcatattcgtgtccgcgagcatcggcctcatactttccaagctctcttcgagtgggtaggcggagattcgagcaacacttaaatagtttgtgagtgtacttatttcgccgggggcgcgctaaaatggactacactagcatcatagccgctggaatcgcaattggtgcatcggcctttgcagtttactattcccacgatacaagtgaaaaggtcaagaacaggctcttcgaacttaaaaaggaagcagactctctcggcgagaattttgagtcccttaagaaacagttacttgagaaaataaacgaacttgagagaaaatcaacgaccccgcaggccccttctgaagttgattacgataggatatcccgcctctcggagcgtgtatcaaagctggagtccctctttaaggagaagctcaaaagtctggaaaagaccaacgtccagcttgaatacgagttgggttctctcaagaagcgactggatgaagttgagagggaagttagtgaagtttcagaatctttcctgagttcaagggaggagattaaggaggagctcaagagggagcttttagccgaggttgaggaggagatcgagcggcttgaagagctgatagaacggagaaaggaggaggaagttgaggagttcctggacatgctgaaaacagcagtcacgatgaaccccgagaagataagcgcgggcctccttgaggcaaagagggcgcttctctcactgcgagacatagccaaggtctacgttctgaccggaaagggcagagacgagtttctggccctcaaggagaacctgcttggcctcctcaaaaacctgcgcaagctggttatagtttcggtccctgatgagaacatttactccaagttcagggacatcataattgaagtaaagcgcctagaccttcccatgaaggatgagaaaagtggtaaagagctgaatcccgagaggagcttcatagagatccacaagcttgtttatgcgctagcgggcggaatagacgagatagccagcatgataaacgagcccgtcccagtaactccagttgagaaggaattctatgagaagctccgctatcagttcgaagagttgagaaagctcgaaaagcaggtcgaaatgctcatggcaagactgggggaaaaacttccagaggcatcagcagaaaaagacgagagaagggaaatagaggatctcctgagagacttgggtgtgtgatcaccattcctccccgaggagcttgtccaggtcaaccattatcagcaatctttcgccgttgtttatcttcgctatgccctttatgaaccgggtgtccattctcgatgcgagagtctttggcgtcggctcgatctgatcctccgtgagcgtgacaacgtccgaaactgcatccacgattatgcctactatttctcccttgacctctgctatgatgatcttcttgttgcttagatcttcatcgtcgtagtagcctagtttcttcttgaggttcacgaccgtggttatctggccgcggaggttgataacgccctcgacgtagtcgggagcgttggggactcttgttatgggcatcatttcctttatttcccgaaccttggatatctcgaggcagaattcctcgttcccgaccctgaaggcaacgacctggatctcggacatttcaatcacctttacaccttaatattggacagcgtgcctataaggttacctatttttgagatgaggcttccgagaccgctctttagggatctgacattgtccatcactgtacttaattcctccacgactctctgggactgctcaacaacctcagagttctgggcggatatataatcgactgtgctgacgaggccctgtactgagctggcctgctgatcgattccgttggatatctcgttcatcatcgatgctatctcgttagccctcctcgctatgtcgtcgaaggcagcgattaactcctgtatcgattcggcaacttcctgggttgcttcggtattctcgtgtatcgagttcacgaccttgccaacgctttcctgcatctccttgatcaggtctcctatctgtttggccgagttccttgactgctcggccagctcacggacgctgtctgcaacgaccgcgaatccccttccctgctcccctgctctggcagcttcaatcgcagcgttaagggccagcagatttgtctgctctgctatgtccgttatgacgtcgactatctggcctatcttctccgagtagtcagacagtatggcaacggccttctccatttccttactgacgttgtttatcttctcaactttgagggctgcctcgtctgatatctccttgcctttctcagccgcgttagcagactcaacggtgaactcggcaacctgctgactctgcgtgcttatctcttctattgccgcggagagagcctgtatgtggtcgttgagttcggccattttgacactctgatcttcgaggcggtttataaggtccgttagcgtttcgtatatgttctctagttcctctagtgaatatgtgccatcctgtatctctttcattgcgtcttggagctcatgaagggttttctgtatttcgctcataagttccttccatttcgtcttaacgtccgagtacacctttaggaggccggaagtcgatggaactggagcacttagatcgccctgaaggactctgtttagatcctgtattagaatcgtcgtgtcttccccagcccggggcttaagcttgaggagataatccctaacgtcggccagttctggaggtatgcggacgtcttctcccctgctcattctcctgagaatctctttcagccgcatatacttgccagaagcgctggctcttgaatcaacgtaccatgctaccaatgctcctgccccgattcccccaatgagacccagtgccgtttggcctgagtatgcgagcgcccccgtaagtattggcggaatagtgatgagacccaacgttgtggctttcatccccaccaccatttttggatgttatccaatcagtgttctttcccgtacatgcccaactaacagcactgatcagcccgaagtgctactaacttattcaactttacgatataaaaggttttcgacctttatttcgtactaattgtttgaaatttttcccagtatcctcttggtaagagcatgcatatgcacctacataaacacatacacataataattttttaatggaagtgccataaactatgaataggattcaacgcgaaatacatttgttttaaattggggcccacctagagcaaaatcagaactgcaaaagcggtggtttgcgtgaacgaaattaaagatcggggatatcagctaataaagcaggaactgtttcggtatctgaatgccgacagtaacgcctacaaggactcatacctacttcggagaatacgcgccagaatgaggaagctcggcataacggacttcatggagtactacaggataataaagaaaaacaagcaggagcttgacgacctccttctaaccgttgcaataaacgttaccgagttcttcagagatccagtagtctggaagacccttgaaaggaaggttctcccagaattaattgaatacaagcgcaagcactacgataccacgataagaatatggagtgcggcatgctcaaccggccaggagccatactcaatagccatgctcttcagcgaattcctgggggatgatctcaaaagatacaggctcaaaatacttgccaccgacattgacagggaagcattaaacactgccatcaggggtgcttatcccaaagagatcgtcgagaaaagcgttccaaagccgctgataaagaaatacttcctccctatgggagatcactaccgcatttctcctcagatacggagatacgttgagttcagacatttcaacctcctctcagacagataccctacgggctttgacatgatattcattagaaacgttctcatatacatgaccaaggaggcccaagaggaagtcttcaaaaagctgtacaattcgcttgaggatcacggttatctcgtactcggtaaaaccgaaacgattctgggcagtgccgcccggctgtttaaactctatgacctggtcgctcgtatctatgtgaaaaggaaaaacgtggaggtgaagtgaatggcacgcgtgcttgttgttgacgatgccgcgtttatgcggatgctggttaagaagatactgactcaggccggccaccaggtggttggggaggcaagcaacggaaaggaggcggttgagaaatacaaacagctgaagcctgatctggtgactatggacatagtcatgcccgaaatggacggaattaccgcggtcaaagagatcatgaagatagatccgaacgccaagatcatcatgatcaccgccgtcggtcaggaggcaaaggtcatggaagccctcaagagtggagccaagggctacatcgttaaaccgttccaggctccgaaggtgatagaggaagtgaacagggttctctcctcttaactttcatttagggtggtactatgccgctcagcaaaaagatacgggtgatggtggtagatgattcggcgtttatgaggcggatacttagggatatcttggaatctgatcccgacatcgaggtctgctgtgaggctcgtgatggaatcgaggccattgagaaggtcaaaaccgagaaaccggatgtgataaccctcgatatcgaaatgcctaggatgaacggtctcgatgctctcaagttcataatgagcaagtatcccacaccggtaatcatggtgagcgccctcacgcaggagggtgccgaggcaacgataaaggcgctcgaatatggtgccatagacttcattcccaagccgtcatcatcgatctcgataaacatgcgtgaacttagggacgagattatcgccaaagtgaaagaagcggcaaaagtgcccagaaggtttctccagctccggcgcaggagagtattgtcggagcagctgaaaaaggcaaagaaggttggagaacccgccagaagggcggttgcgatagcggcttccacaggtggcccccagtcccttcttaaggtgtttgaaaagcttcccggcgagctcgacgccgcgatacttctcgttcagcacatgcccccaggttttaccagatccttcgctgctaggctcgacagaatttcaaaactgaacgtcaaagaggccgaagatggtgaggtggtgaacaaggactgggcctacgttgctcctggtgattatcacatggaggtaaccctgaggaacggaaagcccacgataaagctctacaagggcccaaaaattcacggcgtaagaccagcagccgatccgatgatgaagagcgttgcggaggtctttgggcgaagaacagtcggcgtcgttatgactggaatgggaagggacggtgcggagggaatagttgcaatcaagaggaaaggcggcatcacgatagcccaggacaaggagacgtcgataatctacggaatgcccaaggccgcggctgagaccggcatggtggactacattgtgccgcttgataaaatcgccgacaccatagtgatggccctcaggaagataccgaggtgaggatttatggaagacatgtcccaataccttgaggaattcctttcagatgcccgggataggatcgacagcatcagcaacgcagtcctccggcttgaagaggctgtaaaaaacggagacgaggaggcaaaacgagctagcatagaccagatattcagagacgcccacaccctcaagggaacggccgccacaatggggttcatgaagctcagcgaggccgcccacaaaatggagaacctcttcgacgccataaggaacggccttgttgaggcgacgccggatgtcgttgacctcgtccttgagttcatcgaggcaatcgaagaaatgataaacaacattgaagagacgggaaaagagggagacgttgatgttgatgagctctttgaaaaggccaacgccctgctgaaggggtacaccagggagaaaggggcaaagaaggccgaggaagaaaaaccaaaggtaccttctactgaagagggtccccctcagagccaggaagcgactccaacggaagtttctggaaacgtttaccacgtaaaagctatcttctatccagatgcacagctgagaggtgtcagggcttttctgatcctccgcgatctggaggagataggtgaagttctcgagacaaagccagagagatcgatcatagaggacggctccgccgacgttgatgaactggagtttaaggtagccacaaaggcttctcctgaggagataaagaagctcgttggcagacatcccgagataaaggacgttatagtgacgctcctagaggagggaacaccaaagcccgtcaagaccgaagaggggactaagacagccgaggagcagccttccgagggtggaggcataactttgaggatactcctagagaaggacgctcctctgaaaggaattaggagctttttagttctccaggagatagagaagagggccaaagtcctctcaaccaatccatctaggcttgacatacagaacggggaccttatagacggccactactttgaggtaacgctcgctcccgatgctaacttggacgagataaaggaagccgttctaaagcatccagatgtggcgggtgttgaagtcgttgaacccggctcgaaaccaccggagaaaccctctgaggctcagggaacacaggcagaagccaaaaaacccgaggtgcagccaaaaccagaagttaaaaagcagcctcccgcccccagggaaaagatcaagatgtcgaagctgatcaaagtagacgtttctcacctagacaagctgatgaacctcgtcggtgagctggtcatcaacaagggaagacttgagcagatagccgagcgcctgggcgacagggagctcatcgagaccctctcaacgacttcaagactgatggcggagctccaggacgagataatgcagatgcgcctcactccagttgctgaggtcttcaacaagttcccgcgcatggtcaggagtttggccagaaaggagggcaaggaagtcgagttcatcatggagggtaccgagatagaggttgacaggactatcctggacaagctcggcgacgttcttgtgcacctcttaagaaacgccatagaccacgggatagagccgccagaggagagagagagaagcttggaaaaccgcgcaagggcagacttgagctgatagcaaggcgtgagaggagccatgttgtaatcatagtgagggacgacggcaggggcattgacccagagaaggtaaagagaaaggccattgagaaggggttaatctcacctgagcaggcagcggagctcagcgacgaggaggcaataaacctgatcttcctaccagggttcagcacggctgagaaagttacggacgtttctggaaggggcgttggtatggacgtcgttcaggatgtcataaaggcccttaacggcagtataagcgtcaagaccgaagtcggcaagggaacgaccttcatactcaagctcccgataagcatggccatcatacaggccctcctcatcaaggtcatggacgaaatctatgccgtgccgataaacaacatcctcgagactatagaggtcaagaggagtgacctgaagtccataggtggcagggaggtcatagtcctgaggggggagataatcccaatagtctcgctccacgagctcttcggtcttcccgattcggagtccgaggagttcccggccattatagttgacctcggcgcccagaagcttgccataaaggtggacgagctcctccacaagaaggacatagtcatcaagtccctcgggaaggcattatctagtgttaagggatttgctggagctaccatacttggtgatggtagcgtgattctgattattgacataaacagcctgctgggaggtatcggcggtggactatgaggagtacataaagaatatggacgaattcaccaagagcgctctccttgagacgttcaacataggagcatccagggcagcggacgctttgagcgagatgctggggcatccagtcacgatcgaagtgccccagcttgagataacgtcgctgaagaaccttccagagaaggttggagaagacgttaaggtcgctgtttacgtcggactcggaaacgagttcagcgggcacgcgttcttcataatggacttcgacgacgcgactaggctcttcgacctcatgatgatgcaggagcccggaactactaccgagatagacgagatggtccagtccgcgataatggagatgggcaacatcctgatctcggcctatgcaaatgccctcagcgagttccttggcctcacgatagaacagactcccccagagatcgccattgacttcctccccgcgatactcgacttcgccctggccgacataggacagtactgcgactacacgatgctccttggaacggtgataaaggttgaaggtattgagtttaacgagcacttcttcattcttccgaagcccgaagacatggttaaggtccttgaaaagctcacggggggaatgttatgaagattagcgagtggtacaaggacatattccgagaggcctctaacatcgcgatgtcccacgccctaacatcgctctccgagatggttggcggaccaatagagatggagcctcctgaggttgaggtgctctccagggtggagttcctgaagagactcacccagaacggcatctcaaacagcttcgtggtggcgtttgatataaccgagggacttggcggtctaacggttctccagttcccgacgaagagtgcaataaacctttccgcggccctgatgggaatggatccgtccggaatgaaagaactggacgagatgggcaagtcagccataaccgaggtgggcaacattctgatatcagtctacaccgatattctcgctaagctggttggggaaccagtatcgctgagtccaccaaagccaataaattccctctacgacatcgagaaagaacttaacagaccggatttaaggaacgtcgacaagatcatgctcttcaaaacgcgcttttacgaggagaacatcggatttgagagctttttctatttggtgcctgacgaggagtcctttgaaaagctcgtgaagaggttggaggcccaggtgaaggaggaaggtggtgagtgatatggagttcaagaagaagatcatatccatcgttgttttgggttttgttatcgtggcagtgctgacgagcgggatgttgctctatagcgaaaataacatggcaaacgagatcgagacccagctaacgcccctgatgcagcagtgggcagaacagaccgtaagcgccaagtcggaggccttagcaaaggagttccaggccttctttgatgaggttgaggccctcggaaccactaccgaaaagttagcggtaatcggaatccaggaacttgagagtgagggctacaagtttggcgaaggggactatgtagagcccctcaacgagattctcatggagcacttcgagacggtggcggccgccgacagcaggataagctccgtgtacttcggtgacaaatacggcaacatgttcatctacccagagcaggagcttcccgaaggatacgacccgcgtgtgaggccctggtaccaggaggcagttaaagcaggcaaaggagtgtggagcgacccctaccaggacgcttcaagtggtaaatgggtggtaacctacgcagtgcccatctaccgcaacggcgagctgataggcgtcataggcctcgacgtgttcatagacactctcgttaacgagataaagagcgttaaggtgggagaaaccggctacgcctacgtcgtcaacgaggatggcctcataatagctcacccaaacgagcagtacgtcatgaagctcaacgtctttgagcaggagagtctcaagccaatagcagacatagtcaggagcggaaaggacagtggggttgtgacgtacgagtggcagggggttaaggccaccgctgccggttacaagatacccagtacgggctggtacgtcttcactaaggtcccaaccgcagaagttactgagggtgtcatggccgtcatcagaactgtgcaggacaatactcagaaaacaacgtacatgatgatagtccttctcctcgcgatatcaacggtgatagttctggctgcctacagacttatcagcacctctctcatgccgctcgtcgcgctcggtgccgcggcccaggctctcgctgaaggtaagctcagcgaggtcaaggagaagctcaggggaatacagtatcttgaggaagatgagattggaatgctcatcaaagcgttcgagtccgtatccaaggacatggttggaacactgcagggaatagcggagaagcttgagcgtcttgccgaaggtgatctgagcaacggcctcagcgtcgaggcaaaaggtgagctgagggagatcatagaggacgtaaaggacatgagcaccaagatgagggagcttctcggcaacatcgtcggcctcaccgagaagcttgagaagcacgcaaacatgcttgcccaggttgcgaatgatgttactgaggcgattaatcaggtgaatgaggcggtacagcaggttagtattgaggcgcagaggcagcaggagaacattaacgagattactgagggcatgcggcttgttgctgatatgagtgaggagagcgttagggccatggaggagttcgagggtgctgtcaacgaggttgttcacattgctgacgaaggcaggcagaagggtgaggtttcggcacagcagattcagagcattcaggagatgatgggtaacatagaggccgcagtcaacagggttaatgagatgagcaggagtattgaggagattacgaatgttattactggtatcgccgagcagactaatctcttagccttgaacgcggctattgaagcagcaagagcgggagaggctggtaggggctttgcagttgtcgcgcaagagatcaggaatttggccgaggagagcaagaaggctgcggataatattaaggagattattggcaggatgactgatgagatcaaagatgctgttaacgccacgcagaggggtgtgagtgttgttagtgagtcgtcggagactcttagagaaaccacggagtacttgacgaacattgccgagttgattagtgatactggtgctaggttgggtcacgtgaaggagcagattcttaggacgcaggaagaggttgataaggctctgaaagccttggagaatttggctgcttcggctgaggagacaactgcttcggcagaagaagtcagctccgccgtcgaagaacagacggcagccattgaggagcttaagagggcagccgacgaactcaagaagatcgttgacgagctccgtaggcagacgagcaactttaggctctgagatctcccttcatccttttattgtttgaacggtggtgacaagagtggaggtcaaggtcggcatcggggactacgcagtggctaagaagaccgggataataagcacgtacgggctaggttcctgcgtgggcatcaccctatacgaccgtctgaacagggtaggcggcctgcttcacgcgctcctccctgagagcgcccgctacggtggcagaggaaacccagcaaagtacgtggacaccgggctggagctcctgataaaggatatgatgaagctgggtgcatcgccgagaaggcttgaggcaaagctcttcgggggggcgcacatgttcaccaacgtcagcaacgagaacctaatggtagggaagaagaacgttgaagttgcaaagagggagctcaaaaaacgcggtataaggctggtcgctgaagacactggtggaaagggtggaagaaccatatacctggacgtcagcactgggaaggttaggatgaggaaagtctcaaacggtaaggttatcgaggccgtgttttagggggtggtatcttggacgtgataacactggtggtgctcctaataggcatcgtcgttgcagttggtatctcggcgttcctggtaagccggatgatgcagtcttacaccagggaaatctaccaggttcttgagagcaccattgcggagtccagaagtgtggcaccagttcaaacggctcccgaggtgacggagggggcaaacgagagcgaacttaaactcaaaaccccacagaagaccaaggtcaccaaaaatgaggaagaactacttgaacagcttaggagcatcataaacgagaggatggggaagatactcgacgaggcgaaggaaaagaagaagcgcatactcactctgctggactttgcgaggggttatgccctcggatacgtcacggaggacgactacaacgcttttctcgtcaaagtgctcaacgagcttgaggagttcaagaggctctggctcatgaagtttccggccaagaaggacaaagaacagcttgagcttatgatcacatacgtctcaaagacaaagcttccgctggctataaagaccaaggacaagggtactattgtcctgaagcacgaagaagcgttgataaagatgactgagtacataaacagcgccgtcagcatcctcgacgacctgatcgaaaagcgcggcggagacccggcggttactccactggagataagactgagcaacgaggtacggaaacttcaggagaaagttaaaaaacttgaggcccgtcttgaggagttgagtgctatatgaaactgaaagaggatgagagctatgacaatcgcccaggttagggtcaaggctaccatacagtcaacttggaagggatcgacctcaataaagtggagggacgcgatggcctacttggaaaacgacaggattactctgaggtaccttagaatgggccaggtagttggtgaggacgtgtttccattttcttcattaatagacatcggtattaaaataccggatgagcttaagctcgatccccagctcccgcattttgggatgaagttctacgttcctggctccggggagaagaccctcgttctgaccatcgggagtaaccttctgatttatgatgagaaggcctttaagactttcattcacagagtgtttgaggttctgatcaacggggttaaagttaagctccttctcgcgaggatgcgcggcggtgcgctcaacatggacgccaagtgggaggatggtacactccgtattgtaaccgtgagatcagttaggaagaacaggcgcgagaggaacatcatagtcctgacttccgaagggaagcccgtgcccctcttttccgatatggaagacctagacatagaagagatagagatggacaacaaaaaggtcgaggcctggaaaataaagcacttctatgagaaagagagcgtcgtttcatacctctttgttgaggacaagaaggtccgcctttacattctgaggtaccttctcacatacaggaaggattacgttgagcttttaataaaggcctctgaagagttcccaacgatcaaggcagagttccaagaggagcttgagagggagctcaaggaactcggtggactcgatgaaatggagcagcaggtcctcatggccctctactctggaatggatcccctcaccctccacgagatgtttggaataagtgagaaagagatagaggacatctatgaccgtctaatagacaaggggctcctcaagctggtcatgataaggaaggtagttgacctgaccagagacggaagaaagctcgtcaacaagcttatgaagtacaacatgggtgtcatgtgaggggagtcatgatgaagagcccaatagaggctgtaattgaactggagttccccaatgaggaagttgccagggtggtttacgagagcgtcaggatagagcacgataccgttccatacaggaggacgaaaggtgagttcgttctcgacggaaggaagataaggctcaagttcatcgcggaagacaactccgccctgcgggggactctcaactcctacctgcggtggataaaggtcgctatggactccattgaagtctgagtttccccaccgaaactatttaaagcccctcccttattctcatagggattacgattacggaggtgttggtatgcagaacattccgccgcaggttcaggcgatgttgggccagcttgagagctaccagcagcagctccagctcgtcgttcagcagaagcagaaggtacagcttgagctcaccgaggccaagaaggccctcgatgagatagagagccttcccgatgatgccgtcgtttacaagaccgtcggcacactcatcgtcaagaccaccaaggataaggccgttgcggagctgaaggagaagatagagacccttgaggttcgcctgaacgcccttgagaggcaggagaagaagctcaacgagaagctcaaggagcttaccgctcagatacagtcggccctgaggccgccgactgccggctgatcctcttctttcttacagattatttccgtcagcggtgatgaccatggaaagcgagggaaggagagtagtccacataggcctgccggagcttaccgaggagcagataatcgaggtaggtgagctcgcacagagagtcgtgataaagcacgtctttgatgccctcaacaggagcgacgtgaaggacatagaggtaacgacgagaataaacaggggcgaaaccctcgaccttgagcttgaggtgtaccttgaggttccggttttcgtgaaagttgacgtggagaggctgattgacgaggcggttgagaaggcctacgcggccgttgagaaaaagctgagggagatcgcaaatgaagggcaagataaagcttagacgcttccttgagacagctggggacaagtcatttctccttctctgccaccataacgccgatcccgattccctcggctctgcaatagcgtttgcccgttttctaaaggcgaggggagttgaaagggttagaattggcgttgcccagagcgtttcctcctacgcgaagaggcttctcacgctttctcccgtcccggttgagaaaaacccttccgttgatgaagacgtcgttgtgatattcgacacatcttccctcgaacagcttgagccgattgatattccaaaggataagtttacaatcctaatagaccaccacgtcgagaagaagaacccgataacagcagatatttctgtcgttgattcaacgcgaacatccacggctgagatcgtgtgggagctctttaagtaccttgggtttgccgatggtccctccgttaaagccctccttgccgggatagtgaccgatactgccaacttcaggttcgcgaactcgaaaacgttcaagtccgtatccgagatgcttgaggcttttccggttcagatgggagagattttccagctggttgccccggtgaacgacgagaacattgaccaggcgaagaggatggccgtgctgaaggcctgccagaggatggagataaggaagttcaggaagtacataatagccgtctcaaaggtctcggcctacgaatcccttgcctgcaaggtcttcctccagcttggggcggatatagccatcgttgggagcgagaagaacggcgtcaggatttccgcaagggccagggaaagcctcgtcaggaagggtctccacctcgggaagataatggaaaaagtagggccaatcattgacggctcgggtggggggcacgcaggagccgctggggcaaatggcaagaagaaccttgatgatgcaatcaagctgatacttaaggagattgagaagtttttgagggaggtgggttgagtggccaggtgtcctctctgtggaaaggccctcgactgggccgagctgataaaccagatgctcgaaaagggtgttggtgaggacgttttcaaagacagggataagttcatggagaccttcaacgacttcgttttcaaatgccctcactgcggtgaggagttctacggaagaaaccttccagcttcggaaaccgaaaaggtgttcgagctgttgaacgacttcaaaggctcaatagattgggacaacaaaagggtacgcctcaggctcaacagccttctggcgctcgattcaatgctcgagaactgggacaggaagatgtcgcagaagaggtcttagccgacctctgagttctaaatctttggaactacacgcacatttcgagaggatgattaccactagacgctgtgacacaccgaaaacttaatatagaattccatgaatattttggtcggtggtaccatgaaaagagtaatccctgcaatgcttctggtgggtttgatttttttctggatttttcgtaacggcgagtgatatacagctgccgtatttcaggaacctggcaagtgtgaacatccagaatgctggagaagcgcgcgtcttcgtttcagccctttatcccgaagggttcagacagattgccgaatacgacatcaagaacaatagacagattatcctgaacctcggcgacctcagaaaggcctgggaagacgagtacaggaaaaacaaaaggctgtcacagccgctgattcttctcacgatagtcacaaaagacggcaacgtctccatcgaaagcgtcagcttcgattggaaggaactgccccaatcaagaggtgtagttcccaagtttaggccattaaagaacgccgtgaagacgtcctccgagcagacaaacgacgtgcagcccctctactattacagccgcacgctggtggactcctacgagtggacagcaccaaccgtagtggcccaggtaatcccggacagttcaactaaggggtacatctcgtacacctactccatcaacaagaaagttgggttcagcatcaacgcgtttgtggacaaagactggacccggctggcttcgtacaacatcgttcaaaaagacgaaactggttctcattacgccaattttccccagggtagtccctactacatctggatgaacgtcaaataccgttacgagagatggagggtttacagtgcaggctgggtgtggtacgaagagtacgtctacgttaaggacttttaccccagcacaataacaggggggacgtcaaaaccatcggatgcccaagttccgccaattgataggtggatagatgaaggagttcatgagtccacaggggatatagggtactatgcgttccatatatgggacctcaacacgagcgattttgcagtggatgttctaaagttcatcgatattctcgaggccgtggggaagataagcgaaaccgccgccgagaaggccagtctcgtcgggctctttatcgacgtgggttttgaatacgacaacatgaaagcgttcgactttgacctttctttagactcggatgtgcaaacaaggcaccacgtctggaggggagagagcacggacatatccacggttcctgttctgtgtttcaaagttgattaatatctcctttcaaatttttcgttttcatgttggagaaggcagtacacgattgagccaggagtccaacccatagccgaagggttaggcttttaggctctatgcatattttcttcttggtggtttctgtggaagcggtaaagaggtacctctcacgaaaagatttcaaaagcgcctttaattctgcacttaaaattgaggatagctttgagcgtcttcttgcactcctgagaatctttgatgagttcccgagagaggaggttctctccgagatgctccaagcccttgagggcatcgaggacaagagggaaaaagcgctcgcctattccatagtggggagagccttctatcagctcggacgcgagagcgcaggggagaggtacatgatactggcggtttccctcgccagggagttctcctcccccaggattagaggagagcttctggcgggcattgccagaaaccttgccatctcagacaggtatagagacgcttatctgctcttctgggaggccgttgagaccctccagtctgcgaggggcctgtcttcagcagtcctgtcatcccttctcagcgtcgccaggctgattgaaaaaaccgccgatgagataaacgcccccatcgccctcgactactatcgcctggcaaaggaagtatatgagtccctattcttcaacctccaggcaaaagagctttccgagaaaatagagcttatagaagaggttctccgcaggggaaaaaccgttgttgattccctcgtggagaagggagacgttgaaaaggcagtagacttaatccgattcttagacctcagggagagggcctcggaaatgctgaagctcagctactggctcttcctccacgagaggccggacctcggaaggagagtctttgaagacgccatgaacctcatactcgttggaaagttcagaccctccgacgaggagcttttcaaaatagcaaagagaatgctccgcatcggcctcgtcgaagagccgcttgtcctcgcgggcatcattgatgactcccacctagcctctgagcttttaggagaagtggccatcgcctacaggcggatgggagagctctcaaaggcccgctcgatagcggagggaattcccgacgaaagtgttaagaaccgcgttttaaaggcactggaaggtggtgaagatgtgggacacgagcaaggattaccgcttactggtcgcggagaagagcgtggagctgttcctgaagacgatagagggagcgaagttcaaggggaagtgggacaagaagaggacaatccagctggcgaaggagatgattcctgagatacaggccatgcgctacagctacattgatccaaaagagctagtcgatacacctcagatgaaggccctgaaggaaaaggccctcgggataatcgaagctcttggcggggaggactggcaccacaagtttctcagcttagcggacaagagcgagcgcgagaaggtagaggaagccgttgcgaaagttcgcttcttcctgaatacgatccttggccttgacaggagactggccttagggaagataaacgaccccgtcatagcggtggacatcaaggtcggagaagtcatgagcgtcgcaaagcacccgaacgctgaccgcttgctggttacgaacgtcaacatcggcgacagggcgataacagtcgttacaaacgacctcaccgttaaggaaggcaaccgcgttgccgttgcgctgctaccgccagcaaacttccgcggaatagtgagcgagggcatgttcctcggtgcaggagagggcgttttgaaggacgtcaatggtgaaatcggcggccttccgaagggaatcccgcttgaagccctcaacgagacgaggaacatcgtcgaggcgtttttgaaggggtgaaaccttttctttctttttattaggagatttagttttggttgttctcagatcactcaaaaaggaagggtttaagagggttgaagtctataatgagattgaactactgcttgttgatggatggggtgataaatatggttccgcctgagctggaagaggggcttcccctcgaaaagatgaaggacttctcccttgaggagcttcttgggatggccatcaaggccgaaataggcgcgaggaagttctacgagagccttgccgagaggattgacatccaggagcttaaggaaaagatagagtggctcgccggagaggagaagaagcacgaggagcttttgagaaagatctacgccaatatgttccctgggaaggaggttgtctttcccaaggagcacataggaccggagctccagcccgtcgcgaggaagcttaacggcgtgcaggacatcatagatctcatccgctgggccatgaaggccgaggagatagcggcgcagttctatgcgaagcttgaggagatggttgacaccgaggagaagaagaggctcatgcgctacctcagcgatatggagtggggccactactacaacctgaaggccgagtacgagctcctccttgactgggagatgtacggccagatgatgcacgtcgggccttgagccatttatattttaactttccagcgggatataaagtccctctactcatccagaccaatccagcagggatttaaggtctatcctgtgcccgttggatttgacggccgcttctatgacggcgagatccttcagagcctcaaggggacttccgaggacgttttccctttctcccatcaccaccctgtagaagtcttcaaactcaagcttgtagctgttctccgggttgacgccaatttcctccccgttgaggagtattctgtcccactccacgagcatccttccatcggtccccactatctcgaacctgtccttacctttaatcgagtacccagctgtgtaggttccaacaactccgctctcgaactcgaggagagacgacatgaagtcgagccccccaaggagcggggagaggtcgcgcacggcagcggaaatccatgcgacatcaccgaagatgagcctcatagcggctacatggtgcacccctccgtccgagagaaagcccccaacatgcttcggactcttcctccacccggtgtgcacgtaggggttgccctcgtccatgccgacccacacgtgccagctcgtgaagacgggctcccctattttccccgcatcaatcagctcctttgccttccagaaagcgggaacgtgcctgaagttctcggcgatgtaaacaacgacatccgagccgttggcgatttttactatctcttttccggtctttacatcggtcgaaatcggtttttcgcatataacgtgaaccccgttttcgactgccttctttatgaacggaaggttcagttcaacgggaagcgccaggtcaaccgcgtcaacctctcccgaccggagaagctcttcatagctctcaaaaacttccgctccgccaacgagctcggcgcactccacggcgtgctcctttgtcctgctcgtgactgcagccacctcaaaaatgtcggaaagctcctttaaggccggaatgtggagggtctttgctgcaatcccgcaaccaactatccccagcctgattttccgcatgtttttgccccccttaaagagtcaatatccaaaaattctcggcggcattgaatataacatttttccgtgatagcgcgaccggcccaaaagctttttaattccaaagcccaatgtttttaggtgagcctaataatgctggaaggattcatagcgaacctctcatcgtggctgctgagcatctcaggcggcagcctgataatggtggccttctacgcgggcctgttcgttgccttaatgaccaccctcggcgcccttcttgccatcttcgccaacagaatgccgggctggggcgtggatgtgagcctctctttcgccgctggagtcatgatagtggcaagttttacaagcctgatactcccggccatagaatcaacgggtactttcacaccagcgggcgttggaatcctgcttggggttatactcatttaccttatagaccgattcattccccacgaacacctcgtcaagggctacgaggggccgagagagttcaaggagcgcctcagggttgtgtggctcatcgttttagccgtcatcatccacaacctccctgaggggatggcagttgggacttcgcttgtctacgacctcgagaggggcctcataacggcgatagccattggaatccaggattttccggagggaaccgtcgtttctctcccgctggcgaccctccagaaaaagcgcctcatgcccatagtgatgggtgcacttagcggcgtggcagagatggtgatggtcatcctcggtgcgttcctcttcactgtcttccactcgctattgccctacggacttggaatggccggcggggcgatgctctacgttacagtgaaggaaatgatacccgagatatacaagagggaggagaacgagacgctggtcactctcggcttcttcctggggttctacgtgatgctgttcctcgactcgatgctcggctgagtaagtgcatttgtttttttctcttctcctgagccttacagcaaaatctgagaagttggatgatagaaaagagcggaataattttcaggggctaaaagactaaaaatcagtcctccccgaaaatcctctccacgaaccacttctcatcaaagggtctgaggtcttcgtagccctgtccaacgccgacgaagagtatgggcgcgccgattgcatggcttatgctcaaggctgcccctcccctcgcgtctgcatcgagcttggtgagtataactccgtctatcctcacggcctcgttgaactgcttggcctgttcgacaacggcgttgcctccgagcgagtccccaacgaatatcaccagatcgggcttggtgacccttgctatcttcttcatctcgtccatgaggttcctgttcagttcgtttcttccagccgtatctatcaggacgacatcaattcccctcgcctttgcgtgctggatggcgtcgtaggcaaccgcggcagggtctgcgccgtagtcgtgctttatgaccttgacgccaaccctcttcgcgtgctcttcaagctgttctatagcacccgccctgaaggtgtcgctggcagctattacaacgctgaacccgttcttcttgagccagtgggcgagcttcgctatggtggttgtttttccagagccgttgaagccgacgaaggctatgacgaagggcttatcctctttcgattttatcatctggagcaagtcgattttcttttcgggagtcaagatttcgagaatagcctctttcagggcttcctctataatcttgcccttgttggtgcctatcctgacctttcttccaacgagcttttcctttatcttctcgcggagggcttcgacggtctcaagggcaacatcggcctcaaggagttcaatttcaagctcgtcgagggcatcttcgatgtccttctcctttatctccacctggaggagtcttccaaggaatccgggtttttctccctctgtctctgtggactcctgaacagccttctgtatttcttccccagccattggagcctcaacggccttttcttcctcttctattttctcctcaacctgctttgtgaactttttgagcttctcccttagctttccgaacatcttcaccaccggttggaaagggtgtatatcattatatatgactatcggggtctgtccgtcgtgagttttagggaggaacgtgagtgaacctccctccatttaaatcaaccctcacgacggacttgggcttcatcacgttcagttcccctctgggttcattggggagcaaatcatcaagctcagccccgctcagggcgaccccaagtccccgcacgaaaacgttgaacgaaccaacaaactgcctgtcagcctcaaaaccacagttatgacaaaccacccgcccgtttcgggactccaaccaactcccacacaccgggcaggtggacgaagtgtaagcaggattaacaaactcgacaggaacacgataggaaagctttccaacgattttcttccaagtagcacgggagagcttcctgttgaacttcctcgaaccgttctggagcattttgaacttgtttaaatcctcgaagacaaaaactgcatcagggaactctcttgaaagctggactgcaagcttgttcaaataatcctcaatcctgttccttctcctcgtccagtattttttaaggagaactccaatcctctttggagctttccgctgaacgctcttcagcccgtcaataatcctgtcataagtctcggcaatcctgtgtagctcgctcaagtccactctaatccagcctttttcagggtgaaaaatatcgaggctcgttaagttactatcaataccgattttgattcttccagagaactcgacttcttttgagaacgttagtagaacgtcgttctccctgattattagttcaccgaccttccagtccttaaccctttcatagaaccactcctttgagaagtccagctcgaggtattcctcacgaggcttaactgtgattcgtatccttgagccttcaaccttcattagagttgttttcaccctcacgaactttctcttaacgactggcttcgctctttttctcttccctttgaggtagttccctctccagcttttgaggattgaataagcggtctttatagcagaatcaatgtagtgcttggcgaaaggccagtccttgaggagtttgttccttaattctcgcttaaactcattcgactgtggaaaatacgggattaggcgggtcgtctcatagtagtgataattcctgcttccaacggaatacctgtgcgtgactttcttctctctccaagtcgtgttctccgatatttcatcaattgccctctggagaagtctttggtattcttttaggaacgaattaacgttccagttgtgcgacattctgtatgtgagaacaagtttagtcattctcgacctcctcgattagttttttcatgcccttcttgagctttttgtatttgtgagaacgcattccgtagagctttccagcgaagtgcgagattatggttatcaagtcttcaatgagttcttctcgtgggggtttttctttctcgttgattacgattatctctgaaccgttttccttgaagaagaattcgagagttttgaagccaaagcgggtgagcctatctggatgtgtgatgatgacttttgagacttctccttttgcgacgagttcgaggagcttgcgataatttttcctcttctcgttcaatcctgaaccgatgtctttgagtatttggacttgccagcctcgttcttttgcgtattgcttgatagcttcaacctgtctttccaagtcgtctttttgtgtgtggcttgagactctcgcatagccaatgattaggcctttttcttcgcttatgccgagaagtctttttatttcgctttctggtattctccttcgcccgccgggtgttctaatggttttgattttcccttccttatcccatttttggattgtttttggatgaactccgaggatttcgctcgcctgcttaaccgtgtaaagcttctctttcactaccatatactcacaattaatcacaaaaacatttaaagtttttggttaagagaaacagttaaagaaggcctcagcgatagctggtgtcctcaccgctcggacccgaagccactcatcacgggcctcttctccggatgaactccctggactcaaccactctgccattttcaatgcggtacagctttataacctctgccccaagggtctccctgcggtaggcgaggaggtagtctatgaagttccgtatctgatagcgggttattgagtccccgacgtatttgggctcatagagaagaatgagcttgtcccgattttcttccagccaaccgtaaagctttttccgttcttctttcgagcgagagagcgggtttaatattagatacgcatcaaagcctggattctcaagggggtcgccgatgaagacatctccatcaacaacgaacggaagtccttccgccagaattttgtatccctctctagcccactcattgatgaatatcctcgctattctccgagggcttcccgtcatcaggattctccccgatttaagataaacgagatcactcagcttcattccaatcgggagttactccttgaacatagttaaaaaggttttctagcacataaaatatattctaaaaacgcttcaagttattggaaaatcgtcaagaatctttcagaataccttaacagaccacaaactatatatttccccctagacccacaccataatgacaaacctttcaggggtgttcccatgaagaaagctgtctttgccctgttgttgatagggcttgtgggattcagcgtagtggccagcggctgtatcggcggtggcggaggcggatccgagaagataaagattctgtacacgtacacggggtcctttggagacgcggccaagggtaagcaagcgactcaagcacagctccagcagggggcctgggtgatctaccaggttgctggaggaacgggtctgggcgtttttgaagccattaacgattatctcaaggctaacaacaagaagatgggtcccccgttcgctattggtgttgattcagcccaggattggatcaaacccggtgcaataatagcaagcatgatgaagcgcgttgatgtcggtgtttacaacgccgtcaaacaggcagaagaaaacaagttcgagggtggcgtcgttgagctcggtctcaaggagggtggcgttaagctctccacaatagacgatgtaaaggccatgttcaatgccctccccgaagacaccaagaagaagaagctccaggaacttggcttcaacagcgaagatgagctcttccagttccttgaggagacgagaaaccaagttcccgactggatatggcaggccgttgatgagcttcagaacaagataataaacggggagatagttgtccccaaggccacaagtaaggaccagatagagcagctcaggaacgccgaggactgggcggctatggagaacctcgccaaggaatgggcaaagaacgagcccaaggcacagacctacttcaacgagaccctcaaccagagggagaacaccaagaagatagcgatcgtttatgatgttggtggcaggggtgacctgagctttaacgacatggcctacctgggcgcctcaagggccgcaaaggacttcggacttcagattactgagctccagagcaacagcgagaacgactacctccccaacctcaggagccttgccaagagcggtgagtacgacataatcatcgcagtcggcttcatgatgaccaacgccgtaaagcaggtcgctcaggagtacccgaaccagaggttcgtcattatagacggctacgatccagaaatgccacacaacgtccagatggttctgtttaaggagaacgagggatctgcccttgcgggggctctggcttcgctcatagccctcaacgacggcaaagataccatcggaatagtcctcggcatggagattccggtcctctacaagttcgagggaggctaccgcttcggtgcttactggggacttgactactacgagaaccacaagaagtgaacccttttctttttctctttccttggtgggggtgatagcatggaagaaaaaacgccgatacttgagatgagggacatcgtcaaggtttatcccgacggcactaaagcccttcacggggttaccgttcaggtttatgagggcgagatacttggtctcctcggtgagaacggtgctggaaaaacgactcttatgaagatcctctttggaatgctcaaaccaacaaatggtaaaatctttctcagggggaaagaggttcggtttaaaagccccgccgacgccatagcgaacggtatcggcatggttcaccagcatttcacgctcgttgatgtttttacggccctagagaacattatcctaggtatggagggtcacggcttattctccaagatagacctagaaaaagcgcgtggagagatcaaggccctcatggacgagctgaactttcaggtccccctcgatgtcccagtggagaacctccccgtcggcgttcagcagagggtcgagatactgaagatgctctaccgaaacgtggacatactgatcctcgacgagcccacggctgttctaacgccaatagaggtcaaggagctcttcgctgttctaaggaagctaaaggcccagggcaagactataatcttcatcagccacaagctcaatgaggtcatggagataacggaccgcgtcacagttataagaaagggcaaggtgatcgggactgttaagacgagcgaggcaactcctcagcttctagcgagaatgatggtcggcagggacgtagtccttagaatacaaaagcctccaaaggagcctggaaacacggttcttaaagttgagaacctgtgggtcaagggcgatcgcggagaggaagccgtaaggggagtttcctttgaggtcagagcgggggagatatttggaatagcgggtgttgaaggcaacggtcagagcgaactgatagaggccatatctggccttaggagagtcgaaaagggtaggatatacctcaatggagtcgacataaccggcaaaagtcccagggatctctacgacatgggttttgcacacataccggaggatagaacccacatggggctcgtaatcgagatgagcgtaatggagaactcgattctcggaatgcactggagaaaggagttctcacgtggctttgggcttatagactggggcagggtcaagaaacacgctagtgagcttatagaggagtttgagataagtgcccctggtgtgaatgcaccagcgaagagcttaagcggtggaaaccagcagaaactcatcgttgccagagaagtcagcaaaaagccagagtttataatcgcggcacagcctacaagaggcgttgatgtggcttcaaccgagtacatcaggaactacctcgtgaagctcagaaacgagaacaaggcggttctcctcgtctcggctgatctcgacgaggttctccagctgagcgacaggatggcaatcatgtacgaggggcaatttatgggggttgttaagcccgaggaagttaccgaggagcagatcggccttatgatgggaggtgtgaaagcatgaacgtcaaagggtactggaagcccctggcagagagtatcctggcaatcctgataggggcagtgataggggccatagtcctctggctaagcggatacagcgccagttctgcgtactactggcttatagttggctccctcggttctctcgacggcatagccgaaaccctggcaaagtccgccccgataatgctcacggccataacgttcgcgctgggcgcaagaacgggtcttttcaacatcggtgcagagggatccgtttactttggggcaatcgctgcgataataacaacgcagtacattcccaacccactcattgggctcctggcgggtctgatagtcggcgcgctctggctcctccctgccgcgatcctcaaggtttatcggggggtccacgaggtcatatcgacaataatgctcaactggatagccctctatctcgtcagctggctggctgtaagcgtctactacaatccgagggatccgaacagtaccctctcgattcccccgagcgctaggctcccgctcttaatggagggcacgagcctttccctcgccttcataatagccgtattcaccgctatcattgtgtatgtgataatgtggcacatgaagctgggctacgaactcagggtaagcggacagaacccgagggccgccgaatacggcggaatcagtccaaagaaggctacgatatggtctttcctgctcgggggtatgaccgcgggtctggcaggggccgggattgtgatgggaacacctccgagctacgctataacccagggattggccaacatccagaactacggctttgatggaataggcgtggccctcgtgggcaggaatcatccacttgggataatattctctggaatcctcttcggtgcattgagcgccggagcgaccgcaatgcagcagcatgcccacgttccactcgagatgatcaaggtcattgagggaataatcatcattgccgtggcggttcctggtctctacgacctgacaaccaggtggttccggagggagagggcatgaacgagacgatgataataagcctcgtccttggttccctctcagcaatggttccaatagcactggtcagcataggggcgacgataagcgagagggctggcgtggtcaacatcggatacgagggaatcctgatgttctcggccttctttggaacgatgatagccgagtgggccggcaatggatgggttggactcctgggaggagcgctggttggactcctcctcggtgcactacatggtttcctgacggtctaccttaagggtgaccatgtcattcctggaatcggcctgaacctcttaggctacggtagcgtggccttcggaataatggcctattggggaacggcaggacagcatcaagttcccgacacagtcaaggtcgagccgctctggagggacgcattcggcaactcactgagcccaatggtggtgataaccatagcaatagccatcgtctcctggtgggttctgtttaagaccccctttgggttgaggatccgctccgttggagagaatcccgaagccgccgacgccctgggaataaacgttgagctgtacaggttcacagcggttttaatagcctccgccttagcgggagtggggggagcctacctcagcgtggactggctcgggacggttaccaagagcatagcagccggaaggggattcataggactggcgaacatggtgttcagcaactggaacccgctggtagcccttggtggggcgttcctgttcggtttctttgacaacctgtcattctacatccagaacaatccctggcttgctggaacgataccgtggcagttcatagcgacactcccctacgtggttactctcctggtggtcgcgggaataataggaaaggcaaaaccgccgaaggcggacggaaaaccgtacaagagggagtgatgtcctctactttttcattattaccccaagggcagttccgagcactatccccgtgagcagcgaaagcaggatgtaccgttcggtgtttgttcccgtttcttttctggtttcctggggtgtttctctgaggctttcacctttgagtgcctctatgatggcagctgtattcttcaccagccactccgtgtagttgcccgagctccagaagaccgttattcctgcaagcggtttctcgctcttctcggccagctccatcatggccttcttcatttgatccggactgtcgaggccgtacacgagaatgtccgcttccttggctttctcaacgagcgtgtcaacgcccttggccgggacttcctcctcaggcttcagggcctcaacagccttaattccaagccactcaagggcgtactggtcgggcggcatctgaatgactgcggtggcgtttgagttgatgagggccctgtacgcctcaactatccccaggactcttgctttaaacgcctcaaactggagcctgtactcgttttcccttgcagggtcgctttgaatcagcgcttcctctgttgcctccgctatcgcgatggcgttgtatgggtcgagccagacgccgtgtgggttgtccttctcgttgtaccagtgctccttgaggtatctgaagccgtattttttgtagtcgtccacgaggagtatctttccggcaatctcgccgttctccttgagttccaccatccgcttctcgaccggaaggtggccaccggtggtcactatcacactggccctctggacgagttcaacctgctccgctgtcatctggtagtcgtgggggtcgacgccggggggtattaggaccactacgtcaaccccagggaaggcctccctgactatcgagccaagcggccctatcgtggccactaccagtggcttctctccgctggccgttgctgggggaaagaagagcccgcttagagcgattacaacggctacaattaacagtgccctgcgcatgttagatcaccctaatccaccatagcgcccccccctttaaaagccttccacaaaaaacataaaaacttcagtttttcaatttatactcggtgataacatgaagaaagtatttgccgcaataataattctggcaatactgggaattaatgcaacccttgccgcgcccgttgagaacggcactgtgtacataagcgagaacgtaaaggtccagatacacccgaacgaggaacttcttggaatagtctactacctggccttcggcaacgacacctttgttatagacaggggggactatatagacgaagtggaagcccatttcgggaaatacaggaactcaacggctgtgattctccttagggactacctctcacgttctaatagatttacatggaaggacacgtacttagcccgaattgagatgctgctcgtacgctgttcagagcccccggagcttaagatacccgaatatttagaagagtattattctgaagagggtgtaccagagtattaccgcgagtatttcaactggtttaagaacgaattcctgccggccctgagagagtttgccaacgaaaccgacttcatggagttttacaggactcatcaggattactacatggaagacctaaggctctacggaggagctctttcactcattccgcccgacgagtttatggaggagcacgccggtgtctccaacgtcacgtacgtcttcttccacccgtatctggttgccatccatggccacagcctgacaaccacggaaaacaacaggacggcatggggggctgcgggattccttccgctcgtgaggagggaccctcagaggacggtgtggagctacaaaaccgcccgcgacaccatgatgggactccccctcaacagggacctcataaacagcaccggcctcgacgaactgctctatctgaacttcatctaccacgagctgggacacgacgtcactattcctgtactgaacaccctggacctgtatacctactcttacgtgatagacgccgcgagggacgatatgccttacctcaccacctacgacggtcactatgtcggccttactatgatctacgagggctttgcggatgcttgggcagattacgccataagccacgtcaaccacaactacaccctccttgcgatgcagatgcagaaggcgtggggagagttctgggtcgaatggctttacaacgagattcagagctgtgctctcgacgttaaaagcggggagctcaaaaacatctccctctgcgttccccgcgcgctggagtcccttgagaagttcgcgtcccccgaaaacgtcaccaaggtatacaaccttgaggtgccggttacccccgtaagggccctcgataaaggatggtttggtaacagagtcgttgtaatctatggaacggccaacctaagcccaactgaaagtagaaacatcaaaagcttcgccgatgaggttgcagaaatcctgaggaaattctacagaagaaacggcggaatagacgacgttgtagtcaaagccgacgtgaacgttaccccttcggatttaagttcccaccttgtactaatcggaaccccctcgaccaacaggatcgttgacatcttcgacgactacttcccgattcggcttgagagggccggcgagggatggagagtaatccgcgagaacaacgtcaccagtttcctcctccttgacgaggaaagccccctcagggcagtctacggcaatacctccgtcgcggctggtgggttccagacggtcgacaaagcggcccttttgatggcgtccgtaaacccatacaacacgtactattacgtggtctggatcgcgggaacggacgaaaacatgactaagttgttcaaaaaccccacctactacctgagcagctacgagatatggacgcccggggccattgaggtcgggttctacaacaaacccctcgcggagaggctcagcgagtcgttcaacgcaacccttctattaagcccgcagacgaccacaacgaccacaacaaccgtcaggactgacactaccacagtgcccgaaacaaccactacgtccgtcgattcctcaaccacaacaactcccacgacctcgccatctaaaagtcaaacaacgagcccggtagagacttcaagaactaccgcgacggacaaaaacatgtgcggaccagcggctctcgttggcctagcaataataccgcttctcatcagaaggagaaggtaaagaagtggaaaagttcattccttctctttttttccgtttccgttgctcttgatgtgcggcttgccgatggctatcgtgaatcccttgaagctgtcgtccttcctgtggaactctatcgccaggggaaggtcgttgtcctcgttgaagactatcctcacgatcctagcgcgggagtggtcgttgaggtaggtctccttgagctcctcgtagttctctattacctcgtcgatgctctcgctgtgcatttcgtatatctcgcgggagtagacgctgtggttcttgatctcctcaaccttcttctccctgtccaagctaccactccctcaggctttgagccacttcccttccctgaacttaaaaaccttcctcatttcagccatcctgagggcctcttcgagcttgcccttcgggacttcgagaccgtggagctccttgaagagctcgattatctcgtcggtgcttaccgcttccttttcctcaagaatgttgctcacgaggtttatcatatcctcgacgaagttccacgggaagactatccaggcccagtctatctcctctccgtagtactcgggcttgaagcgggagcctctgatcgtcaggagtgttgcagtcctgacttccgcagggctcttgctctcgacgtagtttttggccagcgtcaggctctcaccagtatcgctgatgtcgtcgacgatgagaacctttttcccgctgaggtcgtagttcgtgccgtacttgagcttggccttgccgtccggagtagcggttactccccagtgctccaccttgaggcttacaaggtctttgattcccaggtagtcgcagtagagtctcgccgcgacccagccgcccctggcgagaccaaccaccacatctggcttccagccttcttccagaatcttccaggcgccttccttcgcccacctttcaatgtcttcccaagaagcgagccttgcaggaaacttcttcattggatttcccttaacggggcgaggtgaatgttatatttaaggtttttggataacgtgaattgccatggatgtgactattgtgttctggggctctaatggagggtgttgtttggctgggttttgaacagtcgccgattttcctatcgtcaaaacgagaagagaaacgttttaactgcttttacagacgtaaaactgtgaatgtcatcagaggtgataaaaatggctgaccccaagatagaggcactgttcaggcccaagagcgtagcagttataggcgcttctggaaagcctgggaagataggatacgcaattatgaagaacctcgtcgattacggatacgaaggaaagatatacgccgtcaacgttaagggcggcgaaattgagatcagcggaaggaagttcccggtctacaagagcattctcgatgttcccgacgaggttgatatggccgtcatcgttgtccctgccaagttcgttccgcaggtcgttgaggagtgcggccagaagggcgttaaagttctcccgatcataagttcgggcttcggtgagctcggtgaggagggcaagaaggttgagcagcagctcgtcgaaactgcccacaagtacggcatgagaattctcggcccgaacatcttcggtgtcgtttacacccccgagaagctcaacgcaaccttcggtccgaccgacgttctcccaggcccgcttgccctcatcagccagagcggtgcccttggaatagcccttatgggctggacaatccttgagaaagtcggtctctccgctgtagttagcgttggaaacaagagcgacatcgacgacgctgacctcctcgagtacttcaaggaggatgagaacacaagggcaatcctcatctacatggagggcgttaaggacggaaggcgcttcatggaagtggccaaggacgtcagcatggtcaagccaatagtcgtcatcaaggcaggaaggagcgagcgcggtgctaaagcagccgcttcccacactggttcactcgccggtagcgataaggtctttgacgccgccttcaagcagagcggagtcataagagcctacaccatcggcgaggccttcgactacgcgagaaccctcagcaacctgcccgagcccgagggagagaacctcgtcatcctcaccaacggcggtggaataggcgttatggctaccgacgcggcagaggaagccggtctgcacctctacgacaacctcgaggacctcaaggtcttcgccaaccacatgccgccgttcggctcctacaagaacccggttgacctcacaggtatggccggtgccgagagctacgaaggtgctataagggacgccctcgccaacccgaacatgcacagcatagcggttctctactgccagaccgccgtcctcgacccgagggatctggctgacatagtcatccgcgagtacaacgagagcggcaggaagaagccgctcgtggttgccatcgtcggcggtatagaggccaaggaagccatcgacaggctcaacgaggaaggaataccggcctacccagagccggagagggcaataaaggccctcgcagcgctctaccgctggagcaggtggaagaagaagcagaagaaggagtgatctccttcccattcattttttggtcttgagacaccacacgtatcactcgtagacgagttttagatttttggttgtgttcagtaactcatcagcaagttcctccgggatatctcgcggatcaccgtatttcccaatctttcttgctatgcgagaaatctccctaaaggtttcaatattcgtccggatagtctcggtcctattgactcccctcttggagcgtatgtcaataaagaatctttcaaggttcccgaaggcccttccaatcttgtaatacttgaaatacccctcgtataactcatagcttaagaagatgaaaaccctctcaacatgcctagccataaggtaataagcacccgcgtattcgactatctcatcttccgaagcatttttctcaaggagatcctcaaaggctctatccatgtaaccaaactcaaagatatcctcggctactgtcaagtacaccctaccccagctctcctcacgaaccgttctggagagtttcaggtcttcctcagctttgtgccacgagtacgtggtgaagagggcaaccaaaaccaacgcaccaattgccagagcacatagtctcttcaatgaactcacctaataacatataggctcaaatgcttattaatgtttcagacattgtggtatggtcatgttcccagatccccaaagatttcagaggcttcaaaattcatacaactatggctatacacggaggaaacgaaacctatgaaccatacgggaaacattcgacgggaagagcttgtgttcagcataatcccgctctggatgttcgtttacggcctcatcaatgcaccactctagttgtaatagctccacttccatggtctcgagataacatataaattccaatagcatcacttaaaacggtgataccatgctcatcgccctaatctcagacatccactccaactgggaggcccttcaggcggtgtggaaagaggtaaagcacgctgatacgatactctgtatgggggatctcgtcggctatggggcgagtccaaacgaggtcgttgagttcgtcagaaagcagatggggaagaggacttttctctgcgtccggggcaaccacgacaacgcggtggcatttggggcggactgggggttcaatccctacgcgagggaagcggttagatggcaccagtgggttatgaagagcgagaacatagagttcctcagaagacttccagtgaggcagctttttaccgacgatgctggcaggacttatctactcattcacggctccccgagggcacctctggatgagtacctcttcccatggcttccagagagcgagttcagggctgttcttacctacatcaggcaggacgaccttctggtgggtcacactcacattccgatgctcaaagtcatagaaggacgaagaataattaacccaggctccgtaggccagccgagggacggggactggcgggcaagctacgccatcatagacacaagcgaagaacccccagagaacgtggagttccacagggtggaatacgatgtggaagaagcggcaagaaaaataatcgaagagggccttccaaggttcctggcaaataggctgtttgagggcctttaaccctttctttgaaggccgccgccaagcctcttctcccgtgcagttgcagtcacgcttggaaggtgcttgagctttgacttaacggccagtttgctggagtctattattatgacttcaccaatgctcttcactgcactgattgggatcagaaggagtccttcctggtccgtgacaaactcgctgacgtcgagatcctcgtcgggctctgcaacgatgacgagtatttcccctgtctcctcatcgaagctcaggtcgtagacccatccaagccttattcccgtgtcggttatcagctcaacgtccctaagttttgatgccattatctttaccattatcagccacctctggagttgttcccaccgttattgggcatcggtgtataaaaccttttccaaaaataaagtggggtgtcagaaggtatagtagtcggggcctcctctttccttccctgcctgcttctttctgttctcctcaaagctcctgtagtactccatcatgtacggcgtgacgctcggtttgaccttcttcatggccatctcgaagtccttcttcgacaccttcagcctctcaaggaactcctcggactcgctttcaactacctcacgcgggagctctctcattatcctgcgcatcgctattagggccgcctccctgacgagcgcggctatgtccgcacccgtgtagccttcggtcttcttggcgagctccctaaggtcaacatcacctgcaagcggtactcttctggtgtggactttgaatatttcgagtctggccttctcgtctggagctggaacgagtatcagcctgtcgaaccttcctggcctgaggagtgctggatcgataatgtccggcctgttggtggcaccaatgacgaccacgccgctgttctcctgaataccgtccatctcggtgagcagctggttgatcagcctgtcagtgaccctgtccccctcggatcccctggccggtgctattgcatcgatctcgtctatgaacaccaccgtcggagcagcctggcgagccttcctgaagatttccctaatcctcttctcggtctcaccgacccactttgagagaacctctggcccccttatcgctatgaagttggcctggctctcgttggctactgccttggcgaggagagtcttacccgttcctggcgggccgtagaggagtattcccttcggcggctcaatgccgagcctctcaaaggccttggggtacttgagcggccattctactgcttctctgagctcctgcttgacatcttcaaggcccccgatgtcctcccagcggacgttcgggacttcgatgagtacctccctgagggcacttggctcaaccatcttgagggcctcgtaaaagtcgtctcttctaacgcggagctcctggagaacctctggtgggattctctcctgttcggggcttatcttgccctctttgatgagcctcctgagaacgaccatggccgcttctcttgcaagggcagctaaatcagcaccgacgaagccgtgcgtaacttcagccagctcgtcgagcattttgtctatcagcctgttcctgacctcggagtatatttcggcgtcctttttgagggcctccttgacttcgctctcgttctttgcgttctcaacttcggcaatgattttgtctactctttcagcatcaaagttgcccttttcccttatctcgcggagcaccctaaggacggcctctttgtcgtagtccggttcgaggggcattcctctggtgtggatctggagtatctccttcctgccctgcttgtcgggaacgccgacctcaatctctctgtcgaaccttccaggcctcctcagggccgggtcgagtgcatcaggtctgttggtagcggcaatgactatgaccttcccacggctcttgagaccgtccatcagggtaagcagctggctgacaaccctcttctcgacctccccaacgacctcttctctcttgggggctatcgcgtctatctcatcaatgaagattatgctcggggcgttctcctcggcttctttgaatatctccctcagcctctcctcgctctcgccgtagaacttgctcattatctctgggccgttgatggctatgaagtgggcgtttgcctcgttggcgacggccttcgccaggagagtcttacccgttcctggcggcccgtagaggagaactcccttcggcggttcaatcccaagcctctcgaagagctccgggtgcttgagcgggagctcgaccatctcacggattttttgaatggcgtcgctgaggccgcctatgtcttcgtaggtgacctcagggatgctctcctccttgacttcgacggcctgcgggagcacctcgacctcggtgttgtaggttatctggacgatgccttttggaactgtgtttaccacaacgaacttcagctcaccgaagccgatcggcatagcctcgaagaaccctctgagcagctcatcaaagggcgagtaaaccgcctcgttctgtccaccggccactacgaggtcgcccttgacgacgggccttccgaggaggttctgctttacaatctccccaggaatctggatgaagactcccttctgggcaggggccagaacgaccttcttggcctcctggacttccgccctggagaccgtgacgtagtcccctatgctcactcccgcgtttctcctgatgtagccgtccatcctgattatgtcaagtcccctgtcgtctgggtgggcgtttgcaactatcgccgccgtaaccctctctcccttgagcgcaactatgtcacctggctcaacgccgagctttctctggtactttctgtcaaacctgactattccccttccaacgtcccttttcagggcctccgcgacgcggagcttaatctcgtcaaccttttcatcttctttaccgaatatcatcttgaacgccccctcctgtgaatttctatcgcctcctcaagcgtgaggttcccgagcgcaacctccctggccagcctggaggaaatcgtaatgtttccgctcagctcgcggctccttctttttatatgctctatctcctttttcgtgggttcttttacctccagaacgtcgcctatggtggtctccctgccttccctgagtccgatgtttatggatgcaacgatatcaaccactgaggagctttcaaccccgccgaccttaggcgttgttctggactcgttcacaatgattattgggtagtcatacccgagtacttccccgagggctttcagcatcattgtcctctgccttttggccccattgccgaccttcagcttggcggtcgggtatttctcaagcagtcccactacgggttcgacgtctttggggcttttaagcctgtggacctctataacccttccgtcggcgacgacgctcattcccggcctgtcccccgggtctatggctatgaagacgttctggaagcgctttctcccctccagcctggcgagaaggtcgtctatgaagttttcatccctcacgataaccttaacagggaactcaaccttatctttctcacccgtgagcacgacctcaacatcgtagggaatcttctcgccaaccctaaggctcagaaagggtatcccatactcctttaacaccttggtggcgaggtagtagaccctcacgtcgcctgtcatgatcgctactctcatggtcgaaagttagcagggacgttaaaaaaccttttctgagctgtggttgttgggcagatggtaaagaagaaggagttctcagggggctttcatcaccttccacaccagcagggggaagactagcgttgcatccgcccatatctcgacgtaatcagcctttgcccttatcttgccccagctgaccccttcactcggaggcgcgccgctcagcgaaccgtcccaggggacggccgttgtgatgtagatcgcatagtcagtccctcccctgaagaggtttgcgtttattatggcgtgctttggaagtgagccgccgaggattatcgaggcggtctcctttgctgtaaccgccagattgttgagcttcacgatgtcgttggcgatgtctatgatgagttctctatctcctcgctcctccttgaaaaagtagagcatatcccctatcgagccgtctgttattgccgggcagaagatcggcacgttcctcttgtaggcccagtaaattaccgagcgctccttctcttttccaagcttttcatccatgtatcttccgagctcgtagatgaactcgctggcagtcagcggctttccgcgctccttctctatctcaagaacgcgctcgaagaagggtatcatgtacttctcgaactcgatgtagcggtcgttgggcacgaagatgttacctatcctgttgattcccttctcacgcatcagggcgtcgttcacgtgccagtctccgaggatgaagggcttcagagcctttataaagtcctcttcgattcccccggcggtcgttacaatgacgtcaatcttaccctccttcacgagccacgcgaccagctcgcgcaggccggaagagattatgtttgaagtgtagccgaggaaaaccctaacctctttcccttcggcgcgcctcttctctacctttttccagatttcgatggcctttccgaggtgggtcgcctggaagcctatccgttcatagtagtcgagaacttcctcaaggcttgaaacgtcgtccagccacggcccctctattgggattccctctacctcttcgctctctttgaggacgatatctttcggctcggtcatggaatggggttggggagagagtgtttaaagctttcgtcagcacttcccgttcgcgacttcgctgataagcctggcagcaacggggactgggaagaccttcttgggggctttctttagaagccactcttcaatctcttttgccctctcctttccttccctcatagctgtcccaatgttcctcggagccacaacatcgcccgcgaagaagatgcctgcttcctttagaatttcctcgttggcgcagaccacctcccttatcgggctggtcggtagctggccaatggcgtaggcaacgatgtcggcatcgagtataaagcgctcgtcagtggttatgacgcttccctcttcgattctagtctttgcgaactcgactccctgaaccctttcgtctccgattatcctcacgggagttgcgaactctatgaactcaacgccctcttcaatgagttttctgatctcggtcttcgcgtagctgtgctccagccccctcctgtagaccatcgttatcttctccgctccgagaagcctgccctcgatggcaacgtcaaccgccgtgtagcctgctcctataaccacaatgtgcttgcccttgaggtcgggtatcccctcccaggagtagtagcctatcctcgccatctttatgtggtggagcaggctgagggcgtcgtaaacgccgggaaggtcagcacctggcactttcaatttcctcggcctccaggcaccggttgctatcagaatcgcgtcaaactcccctaaaagtctctcaagcgagacgaagtgttccgcccactcgtcgcccagctccctgggagaatcgtagaccaccttcgtcctgaagtggaagttcactccaagcctctcaagatctctaacccctcctctaaccgtccttattggtattctggtctctgggattccaaaggccaccattcctcctccttcgggcatcttctcgtaaacgtggacttcgtagcctctacaggccagataaccagccgccgacaatcccgccggtcctgcgccgatgatcgctatcctgaaaggctttggttctcccttttccctgcagatgtagaacctcactcaatcacccccaatatttttttagaacctttggtttttaacaaaaagttttcaactttaaggcatttttcatgaaaagtttgtacaaatgacgaaaactttccaaattcgggaaacctaattcgtcggatagacggacaaggttattaactacttccgccaagtgatttccatgagcgtggagatagacctgaggggaatgcgggtcatcgtcactgcatcatcaaggggtatcggcttcaacgtcgcgcgcgaactcctgaagagaaacgcaagggtcgtcatcagctccaggaattccgaacatctcaagatggccgaaaaagagctggcggagttcggagaagtccaaactgttaaggcaaacctatacgaccagcgggagctggagaaccttgtaaaaacttcctgggaacttctcgacggaattgatgccctaatctggaatgccggcaacgtgaggtgcgagccctgcttcctccacgaggccacctatatggactggcttgaggcggccgcactccattccgtcgcgccaggctacctcacgacgctcctagtccagacctggctggaaaagaagatgaagggaacgctcgtttatcttaactcggtctcggtgaaggagccaatgcctccgctggttctggcggacgtgacgagagctggactaatccagctggcgaagagcgtttcgagaacctacgggaagtacggcatcagggcctactcggtgcttttgggaagcttcgacacccccggtgcgagggaaaacctgagaaaactggccgaggaaaggggagaaccctttgaggagacctgggagagggaagtcctctcgaggacaccgctccacagaacgggcaggtgggaagagctcggctcgctggtggccttcctgctgagcgaggaagctgagtacatgctcggctctacggtcgttatagacggggcgatgacgagggcggtggacatttgacgaaaggcttattttgatcagttccaactttcagaggtgggggaaagtggtcagtatggaggagctccgcagggacttcagggagttcaaagacctctgcatggggattcttctctacggctcccacgtcaagggagaggcaaccgggcagagcgatgttgatgtgtgccttgtgaaaccgaagccagggacgtacgagaaggttctggaaaggctcggcggaaagtacgacgtcaaggttttcgaggagctgcccctctacattcagatcgatgtaatcaagaaccaccgggtaatctatggagacgagctcgagctttcagagtacttttacaggttcagaaagctctggaatgacatggagcaccgaatacgggagaacaggtttgaaagcgtgagggaaaaagtcagactgaggaggcgagcccgtgagaaggcaaaggtacttggaaaggcttgagaaattgtaggtgctctaaagaaatttaaatttggttttcgtagagatgtagagaaacctaagacaccttaaagaggttttagagtgaattcttctttataatttctttcttaggagattaaatggaacatctaaaggggaaaccttaagatcactaatcacatcttagttcagattttgttttctatcagataaaatgaatcatatttttaggtttaaaacctgaggttaataacataaggttctcaaaaatattttaatttaagatggataattgtaattgctgaggcatgggcctgtgaagcatgatgaacctgcaaggtggtgaacatgaagagtctagatttgaaggcaataattccgcctgtggctccgagtgctgggggctcgggcaactactgctgctgtaacaaagtcaacacaaactgaagccttagaactttatttttattttttaattaatcaacacggcgtactcatcacacatggaggtgttataatgtctatgaaagttcacatactatcaaaacagattaacgaaaatgaatatgttgcattcgatccaatgagtaaaactgtcctaatactaaataggcaagaaaaaaatataatagaaaagttccaaagaagtattccgctgtctatatctgaaaaatacatccttaaagacatacttgatttcctaaatgagaaacgtgaaaatgcccccaaacagcaatttccattagatggatcccccaatatgatggtattaatggtatctcaactttgcaatatgaaatgcaaatattgctatgctcattccggtacatataacactcctggagttatgaaagaaagcataggaaaacgggctcttgatattgcaaacgatttaggagtaacaaatatacaattctacggaggagaacctctaatcaattttgaattaatatccaagcttgttaagtatgcagagaaacaggggtataactttaaatatggaataatcacgaatggaacattgataggtaaagagataggctattttctaaaacaacatgattttgaggtcacaataagtattgatggaccaagggagataaatgacttaaacagagtatactccacaggtaagggaacacatgatgatatcataaaagccgtgaacttattgaatgatctagaagttcctttagccttagagatcacatacgcccgtaattatatcggcaaatataccatatcagagattttggattaccttagcaattattcgaagactttcatagtaggatatgttctgcccacagtggatggacatcgacaagtatacgaaccaaccgaacaagaagttgaaaacatgatgacagaacttgtaaattacctctttacaaaatgggaaaatggaattcaaatacgagaaatgggaatctgcatggtacttcgtgagcttttagacccagtctatcatgttaaaaaatgcatatgccctgaattcccaactagaatcactgtatttcacgatggtagtgtatacccctgccaccaagtgtatctagacaaacgtttctatctaggacatataatggacagggagtttaaggatacattacagagacaattcaaaaacgcagtggataattttgcgatgtctaatcttcatacaaataataacgaacaatggatatttagtgtctgtagcttttgtaaagcccatctaatggaagttagtggtacttactatttaagatatccaaatgcttatcaaaaagtactagaacatatcatgtataacatggtcactagaaacatgagatcagtcatacatacactagggggcactataattgagtaaagcactccgcagagttctccagattggactggctcacaagaaatacgtgttcctcctcataactttgggggcagtatcaactctcctatctgcagccgtgcctttttacattcaaagcctcattgaaaacctcggcaagatgaataccgatgacatcctgaagaatattggaattatactcctcctgtacaccgcatcaacgatcgtctacttatactcgggctttgttagcaacttcgcagaaacgaaagctgccgcatggcttaaaagaaaactgttcatctcaactctgctctcagagaacatcaacccgggtgatgccctctcccgaattcaatcggacacggaaatcgtcggtagaatgggaatgtctctaatccctgccatcattatagaggcattttctctaatcattggagtgacggttatctttagactaaacccatatctaggtgccgttaccctcctaacacttccggtctacggtctctccctcagggcgttcattcatggacttaagctggcctcttcagaagaaagaaagagatactcagagagcgttaccgcatttaaagagggaatagacggtaggcttgatataaagacccttgatgcgttcgactatcttatcaaaagggtctcagaaaggcttgaccgttgggtcaatgcatcaaaaagagttgctttttacagcacagccagctatggccttcagtcatatctatcaacgatcctaccacttcttgtcctcctaagtggtatagtttttgttaagaatggaatggccaccctttcgtcggtgatcgccacgtttacatacctcggcagagtctattacccagttgagcgatttgcattcttctggagcagttatcacagagccgttcccataattgaaagaatatgggagttcattgaaatcgaaccattccttgaaagatcaacgtgtactccagaagattgggatattgaattgcagggtgtatccctatcccgcgaaggaagtcaggttctaaaggaaatctccgagagaattgcctttggcaaaaacctcggcatagtgggtccttcgggagttggaaaaacaacgctagccttgataatctcgggaataattaggcccaccaagggcaaagttaagatcggaaagtgtccacccgagtcccttcttggcagggaacttatctatgttccgtcacagccgtatctctttgagggaacggttagggaaaacattgccctcggaaaaaatctcacagacagcgaaattgtggagattctaaaaaccgttgaacttgaggaactaaatcccgatttacctattgaagagggcggtaaaaatctatcgttaggccagagacagaggatagccttagcgagagctctagctagaaatcccaggatcatgatactggatgaagccacttcgggcatggattctgagagggaggcaaggatcctccaaagattgagaaaaatggagatgacccttatcatcatatcacaccggctatcaacggtcagggacatggaagagatatgggttctcgatgatggtagaatactatgcagaggtagacatgaagagctgttcaggagttgcgagaagtatcgtgagttattcaaagagcaggagaaaggcaaagatggtctttaatcaatttatgccctaaccggtagcaagtaattcgaaagggtaaaagaacaaaatcagaagtaaatccccatctcctccgctatcttcctgagcctctctattctcgcctcggtcggcgggtgggttgagaagaggttcgctatgctcatgcccctgaacgggttcacgatgaacatgtgggccgttgctgggttgccttccctcatcgggcggtagttaactgcctgctctatcttcatcagcgcgctggcgagggcgtgcggcttgccgcttatccttgctccaccctcatccgctaagaactcccttgacctgcttatcgcagcctggatgagcattgccgctattggggccaggatagccacgagtatagccccaatgatgtctccgccatcgtccctgtcccggttaaatcctccgaatatggctatccacctggcccagtaggcgagctgcattattgcacctgccattgcggcagcgaccgtccctattagtatgtccctgttctttatgtgggtcagctcgtgccctatgactccctcaagctcgtccctgttgagtatcctgaggagtccctgggttacggccactacggcgtgcttgggatcccttccagtcgcgaaggcgttgggagtctcgctcgggattatcgccacactgggcgttggaaggccggccctctgggcgagatccctcactatcgcgtacagctctggagcttcgtactcatcaactatcctcgcgttgtaccagctcagcactatcctgtcgctgtaccagtatgttatgaagttgaagaacattgagaacaggaacattatgaacgccacattcggcccgccgaagaggtagcctatccccattagcaggccagttaggatcgccatgagcactccggttctcagccacatcacgagtcccatgctctctcacccccagactaaaataacaatcgggtattaaaagctttggtctggtaccaattgccagcctctatgcagaagttctttctttgggtttataattcctgctggaaggaaaagagaagtgaaaggggcatcacatgcccatgtccattccgcccattccgccgggcattccgccgccctggccgccttcgggcttggtggcctttgcagctatgacgtcgtcgatcctgaggatcattatagctgcttcgctggcgctcttgatggcctgcttcttgacgcggagcggctcgatgatgcccttctcgagcatgtcagccggcttgccctcgaatacgtcaataccgatgccaaggcccctgttcttgtgctcgctgatgactttgacgagcatctcgacggtgtcaaggccagcgttttcagcgagggtcttcgggattatcttgagggcatcggcgaagttctctatggcgagagcttccttgccgccgacctgcttggcgtactcgtcgagcctgatggcgagctcgatctcaggagcaccgccagctggaagaacggcgccgtcctccatgacgtccttgactaccttaactgcatcctcgagggccctctcgacctcgtcaatgacgtgctcggttccaccgcggatgaggatggtgacggccttcgggttcttgcagccctcaacgaagatcatgttctcgcccgcgagcttcctctcctcaacgacctcagcgtagccaaggtcttctggggtgagatccttaacgttggtgacgatcttggcgccggtggccttggcgagcttctccatgtcgctcttcttgacccttctaacggccattatgccgtacttggcgaggtagtgctgggcgaggtcgtcaatacccttctgaacgaagacgacgtttgcaccggtctgggcaatgtggtcaaccatgtccttgagcatcttctcctcctgctcaaggaagctcatgagctggtccgggctggttatgttgatcttcgcatcggtctcggtcttcttgacctcaagggcctcattgatgagggcaatcttggcgttctcgaccctcttgggcatcctcgggtggacaacttccttgtcgatgacgacaccgcggacgagctcgctctcctcgacaccttcaccggccttcttctcgaacttgatgttgtcgaggtcaacgacgtactttccgtccttcttctcggcgacctgcttgacggcctcaacggcgagctttgcgaggagctccttgtggctctcggcgttctttcctgtgattgaggtggcggctatcttgagaagggtctcctcgtcgtccgggtcaacccttatggctatctcgtcaagtatttcttgggccttctcggcggcgagggcgtaacccttgatgattatgctcgggtgaatgttctggtcgagaagctcctcagccttcctgaggagttctccagcgatgacgacggcagtggtagtaccatcaccggcctccttgtcctgagtcttagcaacctcaaccatcatcttagcagccgggtgctggaggtcgatcttgtcgagtatcgtagcgccatcgttcgtgacgactatgtcgccaaggctgtctacgagcatcttgtccattccctttggaccaagggtggttctaacagtctcggctatgatcctggcagcgagaatgttgagcctctgggcgtctcttccaacgtacctctgggttccctcaggcagaataacaaccggctgtccactaagctgtgccatttaacattcctcctatcgaattgctttttgcagaaacgcttcgttagtgctctataaaagcttttgggtcaaaaagttcataaaaatcgtctaaaattgaacaaatgacaaataaattccaaaaagcagaggaaagaactaaaacgttgaaggcccattaacagtgggtgaaaaccgtgaagccacgggtctatgagctctctcctgaggaagtgaggcaggttttgggagtaattgaaagctacggcgtaaatgaggttgaggtggagaatctcgcctcttttctggacgacatgatagagtctcccaaagaacggctggagtacgcgcgcaggcttcttaacgagggcaacgttgataaggccgtccttgtggttggagatggaactggcacgctcatcgttaaaattgaaaacgttgccgagataagagttttcgtcagggaatacgagaagttgatgagggcattgggattgcggggtgatagggtgaagctaatagcccagggggccgaggcgaagatatacgaggcggactttgaggaggtctttggtgttcctctgctcaaagagagggtcatcgtaaagcacaggattccaaagaggtacaggatcaaggagatagacgtgaagctgaggaaggagagaaccgtaagggaagcgagaattctccacagggcaaaggagttcggcgtcaactgtccccacgtttatgaggttgacctgagggacatgaagctcgtgatggagtacatagagggacagaggctcaaggagctccttgagagcgtcccgatggaagagaggcttgagctgtgccgcgaggtcgggagacagattggaaagctacacaaggctgggatagtccacggggatttaacgacctcgaacatgatattcagggacggcaaggtctacctgatagactttggcttggccgacttcgactcgacgcttgaagcaaggggcgttgacctgcacctcctcaggagggcgatggagagcacccactacacctggttcgagaggggcttcgaggccgtccttgaaggctatgctgaagttctcggcgaagaagcgaggaaagaagtcgaggagaagatgagggagatagagagcaggggcaggtacagggagaggagctggcttagttagtagttctgcgttttctcttgtttttaagaatctcttccaatattgggaagccgtataaagtactcgcaaggcctacataatggacaaagatatttacaagcccagacctccagacaataaccgaagggaatagtccaataatccccccgaccattattataattattgccaaaacaaagttccagacagcttttttctgatggggatcttggacatttgagtccctaagagcttgggaaatcaaataaatgagaaatagtcctcctccgataatcaggagaactgctggccaaatgatggaatatataagggctatcaggccacctaagagcaatgtaaatgcatatgagaacattgtaggggaaactttgagtctaaacctttcttgaagcgcaagggaagaaaaatacggaagtgcgccaagcagagctgagtctatcccagaaaaccccataccgtatcttaggttgtaccgcctcatgaccagtagatcaagaataccaattatcggtgggataacaagaaacaggaagactgtgaagcgtttaaaagcatctgtactccttccaacttctgagaggaagtacaaaatggggaatagcaagataaacgtgagcaggttgccagctagatgccaaaactccatgtggacaaagtggagggtataaagcctgatccagtcgtggggatttgaaaatgagaattcttgatagttcattaccagttgctccttaatcgatgcaggtgcaagataaagtagtaatagtacggaagctgtccctacacacaccgaggcaaagagaactctttcttttgtggtgttcataatttacatttagactgcaaaaggttttaagagtgtttgtgggtttaattgtttgattactatgagatgggttcaagaaagaattagacagacaataaataggtggaaaaaagagccttctaatgatatgggtttgttggttactcttataacttcaattatattactgttcgttcaagtgataattgacgaaaatttccaaaaatctttatttgtgtataacctcttgtcaatgtatatgatcctcaccatgatatttctgattattgcgtggttcttgatcagtgattctgcaatacttgagactgctagggatgtaagttttgtgttgatgattctcttattaacaatcacgttgatctctggaatagttataatccccgataatgaaaaaacccctggattttccccaaatgagctctcaactagtagttctctaggcacaaataatcttaacatcaggatattggtattttctttgattgggattgaattggcagtattaactatactttggtatgcttcctttgagagtctcagcagacctatcaagcttcccaatcttacactcaaaacacaacgtatagggtttgtatcgggattctttcttagtttagtgatatttgggtttggattagtagactcagaatggggcaaaattgtaaaccttattttaacagtgctcttaatggtgtttgttcttttgggattagtttttgtctggaagctcactaaaattaaatccactttttctgaactccttctcattgctgtctctggtggagttgttggtatattgagcatattggttggcaaggctttaaataacctttatacaaatacaagttcagaacaaaaactggcccatgaattttttgtattttctctgttctctattatatatcttgcttttttccgccattacctctacctaaacgctcaaaagcacaaacagcaaaaacgtgaacaaagactaaaacgggagctactaagacgctatcacaattaatctcagctctccctgaacttcctcagaaccctctcgtatatctctttttccgcccctctggcctttctcgcgagcctctcgacgatcagctcgggcgtgctccttccgagccttccaaagacaggctgtctgtccactatgaggttcaggttttcgtcaaggcccttggcctcgatcccgtcaaccctcgcgaagggcagttctttcttgaggtcttcgcccaggtgggagactataaccacgtggaagcccttctcgtgggcaaccttcaacagctcgccgattatcttgacagcagctccaggctcggtgattgcttcaaactcgtctatgaggataagtttgtttcctttcccacggagagacctcacaaacgacctgagggcagtctcgaaggcaccggcgccgtagacgctcctcttccgcctgaagaagaacagctcgtcgaggactccaacgcgggccctctcggcaggaacaggaaagcccatgtgggcgagaatggaaacctgggttatcagctcgagcaggctcgtctttccaccgctgttggctcctgttaggataacgacgttctctcccctcacgttctccgcaccggggacgtcgaaccactctggcttttccccgacgacgtagctaaccggctgcgggttctctatgaagaggtgccgcccgttcaggaaggctatcccgctttcggctatctctggaaaagtgaagccctccgtgaatgccttcaccgcctgaagaaagtcgagctccctgatttttgaaagctcctctctgagctttggaaggagcggtctgaccttctcagctatctccctcgccttcatgtaaacttcaaccttcagctcccgctcaagctcggttctcaggccctcaacgacctctggcgggattctcactggataaagctcctcgcgcgagaaaagctccacgtgaaggcccagaacctttgaaagctcgctctcggcctcgtttatcatgtcgaggatttccccttcaatttcacggaagtgggagaaaatggcctcgtagttgccctccctcagctcgttcaggaacttcacgaggtctctgccggtgagagtgaggctgaacttctcaagcttctcctctattctctcgttcagctccctctccttctcggctatgagctcatccagagaccccagaagcttttccttctcaacgacctccccgaagggtgacaggtgttcgagaatctcgccggcaacgctgccctcgccggtcagcttccctatctcctcaagggctttgagcgtctccctgttctcccagagcgggagaacgtagagctctggagcgacctgcgatggcagtagctcgacgtcgatgccgtagccgatcgtactcaggacgagcgggtagccttcagcctcttccgggttcgtcgtcacatcgcagaggccgagctttatggccgtttccacttcggattcgtcaacgatgagaaccctgtcgtgcaggtagtctcgggtgaatcgtatgaacctgaccctctttattaactccttaagccccggtttaactctcctgagggcctctctcaggtattcctgcctcttcaatatctccccgcggtcgttagttggagaaaagttctcaaggtagtcggagctctctttgaggactaacctggacttgatttgagaggttatatccctgtaaactgccctggcttccgggttgagcttcagcgccataccgaagaaggtgagcatcagtccttataaaactgacctggccggtcggatggtcaatgtaagaaaggggcaaagggttcagaagccgggttttctaaccttcacgacttccttattcacgagggtcggaggtacttcaccgttcttgaacgctatgaggttcctcgcgaccagctctgccatgccctccctcgccccgtaggtcgcgctccctatgtgcggcgctagaacgacgttcttcaggctgaacagctcctcgttgtagtacggctcttcctcgtagacgtcgagaccggcccctgcaatccagccctctttcagggccttcatgagggcttttgtatccacgaccttgcctcgtgctatgttcaccagtatggcagtcttcttcatgagcctcagcctttcctcgtttatcatgtactgggtttccttagtcagcggcaccgccaggacaacgaagtcgctctccctcaacaggtcctcaagcgacctgaattcagccccaagctccttttcagcctctggcttcctgctcctggagtagtataggattctcatgccaaacccccttgcgcgcctggcaactgcctgtcctatccttccgaagccgactattccgatcgtcttcccgtaaacgtcgtagccgaggaaccagcgcggatgccaggcgattcctctcctcttccactctccggagcgggtgaagtggtcggcctctatcagcctcctggccgttgctagaaggagcgtccaggcaaagtcagcagtggcgtcggtcaggacgtcgggcgtgttggtgacgtagatgcccctcctcgtggcctcttcgacgtctatgttgtcgtagccgactgcgtaatttgccactatcctcagcctcggagcggcgtcgaagacctcactgtcaatcctctcgctcagcattgttactagagcatcgacgtccctgaccttcttgagtagaacctccctgggtatctcgcgctcttcgggccatacctcaacctcaaagtgctccttcagcatctcgatgccgttctcgggaatggcacgggttatgaaaaccttaggcctcatgtccaccaccgtttaacagtttgaaaaagggaataaaaacgaagcgctcactttctgtgttttatcctgtatgccagccacatgaggattgggagcactatgaaggctatcatgtcacccgtgtcccccgcgagggcaagaacatcggcgaagttcctgacacctgcgaagtagacgatggccgggggtattacagtcagagcccacgcaacgggtctcttgagcttaacaaactcctcgttgttgctctgctgggccagcgcgatgccgatgtagctggtcgttatggcaaggagcggtatcaggtttccaatgagccaccccagctttccgtagaggagttccagcccctgggtcgccatctgtggtgtatcccttccgaagacgagcaggaaggttgccatgaatatcgcgtagatgaccgtcgggattatgaaggcccacaccactacctttttggtctcctcgtagcttccaagtcccttgtaaacgtcgggaatgaccgtgtggcagccgagggcgaagattgcaacaccagtaatgctccaaaggcccgagaggtcaacgtagagacccttctcaagctctgcatggggcagtatcattgccgtgaccgctatgaagaggaagagcatgacgaagctcatggccagttcggtctttccgctcgcctcaaggcctttgtagacgactattgaggccagaacccagaataccgccgctcccaccgtatcgctcactccaaacaggctcgaaattacgttccccatacccactatgtaggcaagcaccgcaccgaagctcattagggatatgctgaggtacatgagccagccgccggcccttccgaggatcctctgggccgctgtgctcatctgcgccccgcccatctcggcggagaacctcaggacgatcatagccgtccagagcatcaggaacatgactccaattaggactccgagggcaggtatgaggccgaccttgctggcggcgtagggcagtcctaggactccagcccctatctgcgttccaacgagtattgccagcgcttctcccttcgttatgtgggctttctcaacccttatcgggctcgttctaagtccgtgggttccctttttccttctgaggccctgaatgagcatgaccttcttcctgcgctgtgcggctatcctcattgaataatagcgcccgcttgaagtgggaaccttctttctctcaataccgtctgaaatcggcaacctctcacctccaggatgaacggatggatacattatataaagccacgctcggaatggtgaaatctctttctaatataattcgacacggccatgaatacatcggctcccttgagaggaactttttaaaaggtcgaatccaacactcgaccatgctgggacacgcggccaagctccttgcaagggcgaggtttgccatagcatttacgggagctggtatcagcgctgaaagcggcattcccacgttccgcggcaggaacggcctctggaagacgtatcgggctgaagaactcgccacacctgaggcttttaagagggatccgcacctcgtctgggagttctacaaatggagaatgagaaagattctgaaggcggagccaaaccccgcccataaggcccttgcagagcttgaaaatatgggcgttctcaaagcggtgataactcagaacgttgacgacctacacagggaagccgggagcagaaaggtagtcgagctacacggcaacatcttccgcgtcaggtgtgtttcatgctcctatcgggagaacctcaaagagagcggcagggtcttcgagttcgtccgcgaaaaagagctgcccaaatgtcccaagtgcggctccctcttaaggcccgatgtcgtgtggttcggcgagcctctgccgagggaagcgcttgaggaggctttctccctggcggagcgtgccgacgtcgttctcgtggtagggacgagcggcgtcgtttatcccgcggcgtacgttccctacatcgtgaaggagcgcggtgggaaggtcatcgaggtcaacgttgaaaggagcgggataaccccaatagcggatgttttcatcaggggaaaggccggcgaggtcatgcccgagctcctgaggcgggtcaaggatattatggcagagaggaatcactacggttaaatacccgtgtcccgtagagaacgtgaggggagcggttatgatcaaggctgtcctctttgatcttgacgatacccttgtggatacaacaaaactcgccgagctcgcgagaaggaacgccgttgagaacatggtgaggcacgggcttcccgttgattttgataccgcttacaacgagctccttgagcttataaacgagtacgggagcaacttcggcaggcactttgactacctgcttagaaggctcgaccttccccagaacccgaagtggatagctgcaggcgtgatagcctatcacaacactaagtttgcctacctaaggagcgtgaagaacgccaggagggttctgctcgagcttaaacgtgagggctataaggtggcggtcgtgaccgatggagacccgataaaacagtgggagaagatactccggcttgagctggatgagtacttcgacgatgtcttcatctccgactacctcggggttaagaaaccccacccgaagatattcctgaaggccctcagaaagctcgatgtaaagcctgaagaagccgttatggttggagaccgtctctactcggacatttacggtgccaaaaacgtcgggatgacgactgtatggttcaggtacggtaaatacagagacagggagatggagtacgtcgagtacgccgatttcacaatcgagaggcttgaagatctgctcaagataatcagggggttaaacaatgaggagaaagcccgttcagatacggaagttcatgctgattgactcggcctataaatcccgcatactgcggggcgataaggtcaccacgatccgctacggcgactacgaggcgaagccggggagcgaggtctacctggtcataacgccgagcgacaccgccgttgccaaggtcaggataaccaaagtggaaaagaagaaagtcagggagctcacgaacgaagacgccaaactggacggtttttcggacgttaaagagctcctccgtgagctttcaaaaatatacggagagcttcacggtgacgatgaagttaccataataggctttgaggtggttaagcgcttcgaggacggaatcccgctcaagtggcttaaggggttaaactaccgcgaacctgaggagatagcgcgcctctacctcgaaaaccaggaaaagctgaacctcaacagggagactgacttcatactgcgcaggatttacaacgaggggcttggaagggctgtgaggactttcggaccgaagagggttcagggggcgctcctgaaggcctatcaccagctctacgcagagggcttgatttaggttggtggctggtatggaaaatagagaattgctattctacgtactcagcggactcctcttgatgattttctttctacaggtcgcgggatacatggatgaaataaacacccgcgtagattctactcttccacatacaagcagctttccaattgttctcctaacggaaacagcgggaatggcggctttcctgattgtagtcctgttctttgccgcgttagatgttaggaaaaccgggcatttaagttatcctacggttaggttagttctatccggcatcattacccttggtatagttgccattttaaagtcgacgtttcaaactccgagaccaaacgaggctgaggtctcgttgcctttcctcatggcactcaaaaacgttgactacttcgccttcccctctggccataccgcgagggcctcagttctcgcttcctatcttcaggaacgctctccgaggtatgccccgctctggtgggcctacgccgttggaatcgcccttacgaggcttctgctccacgtccactggcttggggatgtcctgttcagccttctgctgggttcctgggcatatctcctcgtggacttaaccagagattcatggcttccagtatatcaaaaaaccgttaaactgcttggactggaggtgtttgacgttgaactggttcgctgaggtcttcctgctctcgctgattccgacttttgagggacgctacgccatagtctacggcattgggaggggataccccctatggggaactctcctggcggctgcccttggagttctgcttctctcaattctcctccctgctgtcctgcccttaatagacaggcttatgctctggcttgagagaactccattgaggaagcttgctcgcctctacatctattacgtcgagcgggtaaggaagaaggcccacccctacgttgagaagtggggtttcataggtctcactgttttcgttgcagtccccttgcctggaacaggtgtgtggacaggggccctagcggcttatctgttcggcatcgagaaaaagcgaacagttccggcccttatactgggtggccttctgagcatggggataacgattgggcctgcactgggggtgtttggataatgccgttcagcgtctgcatgagagactgctacgatacctgctcgatattgagcgaattcaaggatggaaaactgtcagtgaggggaaaccccgagcacctgataacggccggcttcctctgtcctaagggcgctctcctgccgaagtggttccactcgcccgacaggctgaaggctcccctgatacgcacaggggagagggggagcggggagttcagagaagcaagctgggacgaggcaataaacttcgtagctaacaagctcaaggaaacgatagaggagtatggaagcgagagcgttctcgtctaccagtacgccggcgacaggggcgttgtaaactacgcctttccactgagactctttcactacctcaacactgcaatgctcgactacggcatatgcgaccgggccgggcaggaagctttgaaggacgtttacggaaccgcgataggtcttgaccctgaagagctgaagaagcagaggctaatagtttactggggcgtcaacccattctggacgaacctccacggcttcatgcttgcaaagcgctacggccttgagacttggacggttgacgtggtgagaaccgaaaccgccaagcgctcccacaggttcttccaaataaggcccgaaaccgatgtcctcttcgctctgggcgttgcgaagctgataatcgagaacgaactctatgacagagactttgtgagggagaacgtctacggctttgaagaattcaagaattatgtaaaaacgttatcgcttgattatgtagttaaagagacggggctctcacgtgaggagattgaggactttgccttcggtttctccgagaagaggggagtaatccacatgggctacggcttccagcgctccctctcgggcggtgaagctgtaagggcgatagccatccttcccgcgctcgtcggccacccctttggcttcatctacgacatgaagacgatagacaagtcctacgctgagggtgctttcctaaggactaaacccgccaaaaggattgcccaggtgaagctggctgagtatatcgagaagggcgagataaagttcctctacatctacaactcgaatcccctcgcgagcctgccaaaccagaggaggctcaggaaggcccttaaggaaagcgacgtttttgtggttacccacgacatcttcctcacggacacagccctatactccgatgttgttttacctgccaacacgtttttcgagcggcttgacatagccgacagctactaccaccgctacgttgccctgaacgagccggttgcgaggctctacggaaagtccaacagtgaggttacgaggcttctcgcgaaggccctcggcatccaaaacccccacctacacgagagcgatgaggaagtgataagaaaaatcctcgaactaaacggcctgagctggggggagctgaagagaaagggtttcattagagttcctgaaaagccgcgcagatggaaaacgccgagcggaaagatagagttctactcccagcgagccgtcgagcgcggtctctctccgttccccgagtacagaaagcgggaaggcaagtatccgctgaagctcctaacgcctacctaccgcatgacgataacgagccagtaccacaacacccacgggatgattgaccccaatctctacatgaacccggccgacgcggagaagaggggaataaaggacggcgatgatgttgaggtcttcaacgacagggggaggataaagaccaccgtgaagctcacagaggatctgccgaggggtgtcgtcctcctctacaaggccttctgggttaggctcctcgggtggaatgcaaacttccttactacggacgagacggccgaggaatacgggaacgcttcagcataccattcgacgtgggtggaagtgagaaaaagagctcagaactcgaactcttcaaactccctctgaattattttcagctgcttctccgagaacgcccgtggttctaacaacagcacgagagttccaccctgggatatagcgaagtccttaagcgagaggaggaacttcagggtgctctcaaagccgttctctaggacgagatactcgaagccgtcgagcacaacaagcgagtggccgctatctaagtatttcttcactatatcaactaggattccaatatccgttggagaaacggctatgatgttatcggacacctgacctttggctgccttcgtgacccaaaagacctgaaacaaaggcctgagatcttttggagggtctctggttattaaaacaccgtttcctgtttcctgcatagttctaataaggcgttctacggtatctttgctggtcgtgtaaaaagctccccgcggaattttgattatcggcatttctggtggatttatcgtgaggaaagagtacgttgttattccaacgagcatcataaacctggcaagggcaccggcaccgtagaggtagccggaaaccgtcttgatttcgtgtgtgactggaaaggttacgtttataacccccaataaaatcgccccggcaggaaagagaactgcagtgctctccttccagatgctctccttgaaaagtacatagcctaggaatatgagcgacacaccaagaagcactaggggataagccattatgtaaaaatccccaagtccagcgagggtagcgagcacgacgtaagttatgccactcgtggagactagaagaagaatgagttgtccaaaaaatttcctcaggacaccaagaaacgacagcgaagccaataagaaaaacatcccctctacgacggccatgagtgacattacaacgggcagggcttcgattttgggaacccatccaagagcctcaagaatgcgcttctgacttattgcccccaagaagtcgaaccacagggctatgctcaggaacagcatctcggatttcttgttcctggcccacttatacgtggccagtccccacgttgcgagccgtgtaattaagtttacaacctctatcacgaatgctcactccgtattttattatctattctgaaagagataaaagtttcgcaagttcatgcagtcagtttgaagttcatggggaaataataccctcaaagcacccttctcctgaacagcaacaccaggggtaccagccatgccagatggacggcgagggctattggaaagtcgctgtagtcgttggtaggtattccctcgaagactttgtagagccagtaagttggaaggaacgccgtgaacctgctccagtccgttgagaggttccgccacacgacgacgagctttatcaccggcggaagcattaggagccagccgaggactttgctcaccgtcaaagcctgcatcctcgattccgagaacaccgtaattaacagcccgtaaatccagacttcgagcaggaagagtgcaatcaaagctagaatacctttttgaggaatctcaatgtcgaggatgtatggtgcagcggcagtcaggagggcagttactatcgaggcccaggtcagcctgtatgccaggaaggcctcgctggatattggaatcaccttaagtgcctgtatcgtcttgtcctccttctcgtcggccatcataaaacctggcaacatgccgaatatcattggtatgaatatcaggcccaggagggccaggagggaataatagaccccgatgcggtctttgaagtagcggacgatgaggaggaggacgagcgtcatggcaacgctgtacagaagcatcgggtccctcctcaggagcttgaggtcggttctgtaaattgtcccaaacttcctcacaaagctcatctcaacccctccacggcgtacttgtaaaactggattttagccgcgtaataggccacagccgaccagagaagcagagccactcccgaaagcgctaaggtgtcacttgaaacctccacgaacggcgccttgaagaagtagagcgccgggtagcttggtacaaggtagaggactttccagagcgggtgcgtcaggtagccgtggtagtgggcgaagggcaggagcgagaccaccagaactgccattatcgggatgaagtagtcgtccaggtcgcggtattttgcagatatagctatcccgagaagggtgtaaaccgcggagcacaggaagacccccgcgatgacgtagggaagcccgtcgagggagcgcgttcccacggccattatgagaatggcaccaatcaccgagagaacgctcattatgatcgtttttgccagaatgtagctcctccactctatcggcgtcactgccagggcgcttattgccccgtctttcttctcagcgaatatctccgttccaacgaacatgaagcccactaagcccggctcgaatagtaagaatataggcaccatcgtcgggaggtactgctctggaaacgccaagagcatcaggccgtaggccaaacctatcagcatgtatatcgggtagacgaagctcctgaacccgacgattacgcttgtcttcagcaggttcttcatcatacgagccgcctccccgtcaccttgaggaatatctcctccaaggtcggctcctccgtgttgatccgccttatctcgtggttcctcaggatattcaggaactcctcgttctggccgatgccctcaagcgggaactccgcggtcttaacgctcccgttctcaacgtactcgaccttcacgagcctcttccccatcttgaccttgagctcgcctgggttatcaaccagccttacggagccgtcgacgatgaaggcaaccctgtcgcaaagctcatcggccacgtacatgttgtgggtggtgagaaaaatcgtcttcccgctttccctcatctcgaggaataggtctttgaactttctcgcactcgctgggtcgaggccctcaagcggctcgtcgaggaagagtatgtcggggtcggggagaagggccctcgcgatgtcgagtttcttcctcatgcccttcgagaagccagcaacgagctgatcagcctccttgtcgagcccgaccattttgaggacttccatcgggtcgaggtgcttcttgtagaagctcgcgaagaactcgaggttttcgagggcagtcaagcgggagtaaaccgctggaaactcgaatgagacaccgattctgttgtagtagtccttgccccactcgcgcaggtcttttccgagaactttggccgttccttcatagtccctgattatcttgacgaggattttgacggtggtcgtctttccagccccgttcggaccgagaaagccgtagatttcgccctcctcgacctcgaagcttaagttttccacacccctaacatcgccgtagtactttctaatattcttaacctcaattacaggcatgctttcaccaattcaaaatagggctttgaagtagttatagttacccccgcacatgtgtgggatgaccaaaagggcaatttttaaatacatttgtattccatttgtagttggtgaagaaaatgggagagactgggacagaccacccaatctccgtgaggcttcccggatatgttgtcgaaaagattgatgagctcgtgagggagaaagagttcagaagccgctctgacttcataaagttcgccgtcacgatggcactgggacagataatgatggaaaaagcgcggaaaagggcaaagaagctcactctagaagatcttaaaagagaagcggaagaggcatgggagaagcttaaacgtggggagttcgaggaagaggggtccgaagtcctaaaggctctcagggagataaatgaggagaccaagaggcttacgggtgcagagggatgaaagtcgtcctcgacacgaacgtcgtgctggcggccctgataaagcccgagggtttatcggcacttctaatcaaggccctggatggagagcggctcatcaacttcacgagtgaggatgctctcgacgagcttaccctaaaaattggacttttagccgaaaaaggaaagatttctccaggctgggaagagactttagcccacttcttgaggggctccgaaattgtctctccatccactagctttaacctctgcagggatccggacgacaataagtggctggagatatcttatgaagcgggagcaggttacatccttacctgggatgacgacctcctgagccttcgaaatgaagaaaaggctgtaaaactcgggaatcacgaggttaaaatcctcaaacccctggaattctatagagagattctgaaatcaaaatgttgactagacaggcaaattacaacctgcctaaacaatctccctaactccaactgcccccagaataagcccctttcataggctcccgcctactcaataaccccttccagaaccttcttcaaacccttcctaaggtgctccttcacggttgatggacttaggccgagcatctgggagaggtccctaagcgtcacgcgcttaggactatcaaagtagccgcttttgtatgccaccagaagggtctttagttgtttttctgtgagctttgagaatatgctctcatttggcgtgtaatcttctatgctagcgacctccgcattgtaggttctcttaatggccgatataacttcagggaccaggttctcctcacacacgacgtagagaaagctctcctcgcgagtcatcgtgcccttctcaaatattaaaaagcctcttttctggaggtcaagtatgtcgaaggcttcttctgcgttagggtgtcttgggagctttgcacgtgtgtacaggtagtaatggccgttttttaggggtatcagcttgacgtcctctacataaggaaggttcctcattcgatttatgacatcttgggggttaacttcttctttgaacttcaattccacgagctttatgatttcgtcaccgaccatgaagtgcgtgtccccgtatgcccactcaattgcctctataaaccatttaaagtccgaaaacacatccgaagaattgagaaacctgaactttatccgcttcatgggtcatcacttgagacacgctgttcttgcgattttaagtcttaccgaaaaacaaagaaaaatgaaaagcctcacttcgtcgccctcgttatgcccacatccttgacgagcacgtagggcgtcgatactggcgtgtttacctcccaccagtggatgtggtagagctcttttccgagggctacgatgttttcgaggatcctctggaggttatcgcttacgcgaatgttccttatcggcttcagctcgccgttctcaacgagaaagatgccgtctctcgggatcgttgagaagtcgccagcaacgtagttctggaagcgcgtgtaccagacgttggtgatgtagatgcccttcttcacctcgctgaagagctcctcttttgagtagtctccaggttcgaggacgatgttccaggcgtgcggcatcaccaggccggcgttggcggttgtttcagtcccgtacttcctggcgaggctcgtgttgaggaggaacgtcctgaaggttccgttctcgattatggtcgtttccctcgttggaacaccctcgtcgtcgaacttcctcgtgccgtagccgttgggcaggttcccgatgtccttgatggttactccgtcagcggcgaccttctgcccgagcttgttgacgaggaaggaaaagccagcttcggcggcataggcggaggtcatgaagctcatgtagctgagcaggttggcgaaggccagcgggtcgaatatgacgtcgaacttcccttccggcccctgctccgggtttctggccaaccttgctatctctcccgccttccttccggcgctctcggggtcgaacttcttgagcaccctcacggagttcgtcccgtggccgctctcgaggtcgcctatgaaggccctgacgcttatttctatccccgttccctcgtcgaaagcttccactccgttgctcgtggtcaggtagagcttgttgtggtctgtgtagaggactccagcaactctcttcgccccttcctcaagggccgcgtttattgccctctcaacgtactcgttcggttcatcgagctcgactatcgccctgtcaaaggtctctggaatatccttgtactcgaagggcccctcggctatgccgtagtagtcctcctttggagacatgccccttatgtttgaaaggagcgttttcagaatcctctctatgttctcattgctcaggtcggttatggtagtgctcgctaccctcttctccttttcgacgaagagctcgatcttcctctcgtgccagttcttcgcgacggttatctcattgttggcaaagcgaacctgtctcctgttggtctcgtagctcaggacaacgacgtcgccgaagccgagctccttcgccctcttaaggatgaactcgttaacgtcgaacatcttcaccacctcacggcctcctcaacggaatatcccgcagtctcgcgtgcgctccgcccatccagacgggaactccctgtccgggctcgcccttgccgcaggttcccgggtagaactcaacttcctttcctacggcgtcaacgctgctccacagtgccctcgtcgttatctcaaggatgggtctcctgaccgggtgctttatctcaccgttctcgatgaggtaggcctcccttccgatgtacctctgctggtagcgcctgtcgtctatgttccactcgttgaagctcaccatgtaaacaccgagcttgatgtcttcaatcagctcctcgaaggagtgatcgcccggagccaggtaggtgttcgccatcctaactatcggctcgcggttgtagttgatcgccctggctgaggcgtttgagcgctggccgagcttgtaggcgtactccctgttggtgaggaactcgtttatgattccgttccttatgaggtacctcgggcgggccttaacgccctcgtcgtcgtagaggtagaatccccagctgttcgggatagttgggtcttctatgactgtaacgacgtcgctgccgattctctccccgagcatgtctggtttaacgaagctctcccccgcctgcgccgcttcccttccgaaaatcctatctgcttcgtagggatgtccaacgctctcgtggactgctatgccagccacctcggggcttatcacgaggtcaaccttcccctcgggcggcttctgtccctcgtaaatgagcctcttaagggccattacgtccttaacggcccacttccagggttcgtccttctctaagagctcaagaccgccggagaaagccctctgaacgaagggcgcctgctccatctggccgttctcaaagaccacgaggttgtaggtgagagacactctcgggatgtagctctcaacgaaaccaccgtcgctgtgggctattatcttgtgccacatccagtcggagtagcgaaggaagcgcatcggcacgttcacacccgttccctttacctcctcctcgaccttcttgaggagttcaagcttctcctccggcggtatgtcccggaagtccttcctcatcttgacttcgtaatagacctcgtggaagtcctcctcggagaagcgtataggttcgttcctcaccttcgaggcggcttttgccagcttcacggcctttttcacggcctctgcaacgctctccttcgtcaggacgttggttgatgcaaagcccatgccgccgtcaacgagaacccttatccctatgcccctgtccgcgagaatcccgaggccctccgcgttaccgttcttcattactagctcagtaccattcttttcttcaaaacgcgcttcggcgtagtccgcccccagttcgagggccttttcaacggcgaactctacaagttcatgcatgcacatcaccccggtttactgcatagaatagtgccctccgaagtataaaaatctttccgcttcgatttgtgtcgaaatgttgcacccgtttggtttttaaggccgctgatgagatgccgccaggtggtgaagatggagatacgcgagttccaggggatgatacgcgatatctactttcacaaggactcgaagagaggcattgagaggactttcctctggttcgttgaagaagtcggtgagctgagcgaggcgataaggaagagagacaaggaagcaatggaagaggagtttgcagacgttctcgcctggctcgccagcctcgccaacctgcttgggatagatctcgaagaggccgcgaagaagaaatatcctggagtctgtccatactgcggcaagaacccatgcgaatgcgaggagaagttctgaactaccgggtaaaaagagggaagcggaagtattcagccgaggatttccctctttataacctcggcaatctcaactatggcctttgaagccttggcctctgggaaggcctcgacaacgggcttcagcatgctcatgctctctggaacggctctgtcgtagggtattcttcccagtatcggtattccttctttctcagcccactcctcaaggccagtgaagccggggttgatgtcggctttgttgatgatgaggtaggccggctccctgaagtgctggacgaccttgtaggccctctgaacgtcgctgagcgaagccggggtaggctctgctatgagtatggcaacgtctgccccaccgaggctcgctatcacctgacagcctattccagcggccgaatcaactatcatgtgctcgaggttgagctccttcatcagcttcgcggcccactccttctcctccgtgacgagctttccgctctcgggccttccgacgtcgagctgggccgagatgagcgggaagccgtacttggttgtcgccttcctgattacccctgagcggacttcctcaagggttatggttccggccaccgggcagaccaggccacagacgttgcagccctcgcaggtgagctcgttcacgacgtagttgccttcgtcatcgatgtagatgcacccgtagggacagcgctcgtagcagattccgcaccttacgcagctctctgtgtttatcctggctatcttggcacctatatgctccctctcctcttcccactcggtcacgccgaggagcaaaccaaggttcggggcctcagcgtcggcgtcaactgccacaaacgagtaatcgtccttcagaaggtagaggagcgaggccgttatcgtgctctttccaacgccgcccttaccgctcgctatcgccacctgcatcacgcaccacctccaaggaactcggcaaccctttcggcgaggcctttgaatatctctgcctcgggatagtccgtcagggctatgggttttccctcgacgtaacttttgactatgttctcgctgtaggggatctcagccacgatttcggcgccgtacttctccgccagctccctgaccttaccaacgtctccgaggtcagacctgttcaccacaacccaagtcgggatcttcatcagcttcccgagctgtaggataagctccgtgtcgtgtatgccgaggggagtgggttctgttaccgctatgaggagctttgagccttcgactgcttttgagaccgtgtttccagttccagcggccgtgtccaccatgaggagaccttccctgacctcttcggccctcttcttcgccgcaaccacgagcggcattgacctctcctctccctccctgagcttccccgtgacgagcgtgaagccgtagggtgttggggtaacgtacgtgtggcctataactctgaaggcctcttgaatggcccctggtacaggacagactatctcacaggccctgcagccggaacagagggtcggcatgagaaagggcgtcccgtccttcagcgtcactatcgcgtgctcctcacacacctcggcgcacttcctgcacttggtgcacttcgagtagtcgaagcgcggcatgaactggttcacgggttcttcgttggcaagctcaactcccagaagtatgtggtcgttcggtgcctcgacgtcaagatccgccagagtcagcctgaccccaatcttcctgagcgccaccgcgaggtttgtcgcgaccgttgattttccggttccgccttttccaccgctcaccgctatctgcaagctctcacctccggaaattagggtagccgaattggttataagctttgtgcatacgctcattactccctgctcttcagcctcctcatgtagaacctcttcccgttgtactcaagctctatcaacttcccctctttcaggagcttctcaacaatgctccagtctgcgtttgccttctccagaaactccgcaacggcgtcctcgcgcattggatggactgaggttatgctcagcagatcctcctcaacgttacccgtaaaggcgaaggcgttcccctcgtagccgatcaggtattccacgcgctcgtccccaaggatttcgctgaagacctgatatgcgtggttgatgacatcttccttcgcaggtttcacccacggttccgccggcggtctcgttggaacggctatgtaggctttatccggtttcagctccctcagaaattccgctatcttctcgaactcgttgccatagtctatcccgtctatcagcatcgtctcggtgactatctttcccttgaactccttcctgaactccagcatgccctcaaggatcttctcaaggctcaggctcttgtggggcctgtcaattctcctccagagcggctcactgacagcatcaactttcagcgagacgaagtcaaacttcagaaggtcttccctgacatcttctctccagatgagcgaggagttagtgaggatagccggggggatttcaagggatttcaaaagctccgcctccttcccgaggtttatgtcgagcgtgggctctccatctggaacgaaggtgatgtagtctatcctctcgctcctcgcgagtgcctcctcgactttctccttgacttctctgaagatcagttcgggctcgtagaagggcctcctcttgatttccattctgagagttttccctatctgacagtaaacgcaggcgtaggtgcataccttgtcggggatgttgttcacgccgaggctcctgccgagcctcctcgaggggacaggtccaaaggctatcataccaccaccggagttaggttagcctaaaggcgtataaatcttgtgaagaacaaaagcaataaacgggaagcacgaacaaagggcgggatggtctatgccaaagatagagccctttgagaaacaccgcgacaggtacgagaactggttcgagagaaaccgctacgcttacctttcggagcttgaggccgttaagaaacttctacccaagaaaggaaagggagctgagataggcgtcggaaccggaaggttcgcggctcctctcggcataaagctcggcgtcgaaccttcaaaagcgatggccgagatagcaaggacgagaggaattgaggtcatcgagggaacggctgaaaatcttcccttcgaggaggacagcatggactaccttctgatggtcacgactatctgcttcgtcgacgaccctgagaaagctttgaaggaagcctaccgcgtcctgaagccgggtggggcattgataatcggcttcgttgatagaaacagcccgatagggaggttctacgaggagcacaagaacgaaagcgtcttttacaaggaggcgaggttcttctcgactgaggaactgttggaactcctcaaaaaggtcggcttcagggagttcgagatagtgcagaccctcttccacaggctcaatgagattaagtccgtcgagccggtaaagccgggctatggtgagggtagcttcgtcgtgataaaggcggtgaagtgagggaaagagaatatttgcgtaggaacggattcaatttttatattactcgatttacttcgatttactcaatacaacagccctatccggcgcacagaccaagagtgccgattgggtgataccgcggtgccttctccacaatgctaacgtgaccacccgctcagaaaaggacgtcgtaaggacaagtacaccgttattctctaccaggcaaccgtacgaactattcaaagttcaccctttgaagaaaggcaaacatttttgtttaacaaaaacacttttgttagcgcaaactatttaaacaaccgttgtatatcacagatggtgatatatatggttgagcccttcgtccccgagggggaaatattcgaaggaatcttccggcagaacgagggtatacccgaattcgcaacgtacgtaaacggggagtgggtgtttaccgggaagacagcggaggtaagaagcccgatagacggctcgctgatagctagggtaagcctgagcgatatggccctttcgaaccgggcggtggcggcggcatattccgctgggaggcatgagataagggacacgccgggtgaaaagaggttggaggcttttttaaaggtggcggagcttattagggactcattcgacgatttcgtcaccgccctggtgctcgacgccggcaagccgctttcaaacgcccgcggtgaggttaccgccacaatcgagagacttgagaagacgacgatggagttcggcaggttgataggggactacattcccggcgactggagcgcagaaagccttggaagcgaggggatagtcaagagggagccctacggggttgtgctcgcaataagtccctacaactacccgctgtttatctccaccgccaagatcgttccggccctacttgccggaaacgccgtgcttctgaagccatcttcccaggatcccctcgctcccctactcctgtcaagggttcttcagcttgcgggaattcctgaaagcgcctatcaccttctaactgtcccaggagcgctgatggactccatactggccgacagaagaataagggcggtcacgtttacgggcagcaccgaggtcggcgagcacatcctatccatgggaggtataaagttctaccacatggaactcggtggtaaggacccagcggtggttctggacgacgctccgctcgaagaaaccgtggaaaagcttgtcaaaggtatggtgagctactccggccagaggtgcgatgcgataaggctaatcatcgccgaggaggggatatacgagcagcttaagagagaactcgtggctgccctctcaaaaatagagcccgagaacccgcttgaagacgaggacgccattatggggccactgataaacgagcggagcgctgaaaaaatagaagaggtttacagggatgccctggagaagggagcggtgcccctaacggggttcaagaggaaaggagcgtacgtatggcctgttctcctggaggccagcagggaagttctgcctggactcagggcgttccaggaggatgttttcggtccgctcacaatcctggttaaggtttcgaacgaggacgaggccgttgagcttgccaactcatcgaggtttggcctggacgccgcagttttcagtggggacgattccagggcgaggaaagtcgcgaggaggcttgaagtcggggccgtcttcataaacgagtttccacggcacgggatcggttattaccccttcgggggcatgaaagacagcggcatcggaagggagggcataggctattccatcgagaccctcactacgactaagacgatcgtcaggaactatcggggaaggggtgtctgggactacatctgatttgttttaaatgtttttatttaacaaaaacacttttgtttactcaaaatatttaaaaaataggttcccatctttgtccggtggctgtaatgaagagggcagtttcagttctcatcctcagccttctccttttcggggtgatggccagcgggtgcatagggacgaaaacaacatcgaacacctcaacaacctcaagcggagcaacagccacttctccgacagcctcaagccagttatccacctctactgcatcctccaacgttgtcccgcttaccctcgttgggcccgatggctctgttaaaacgctaaccctttcagacctcaagagcctcccgcagacggttggaaagggcggcctgaaaacaaagaaggggagcatcaagaggattggaacttacaagggcgtttctttgaaggatttgctctcaaagttcggctggttatcaaagaactaccgttacgtaataactgccgccgatgggtattcaataaccgctgactacggcttcatatttggaaagggattggacacctacgacgaaaaggggaacccgatcaacggctccgtgattcccatcctcgcctacgagtacaacggggaaccgatagaattcaccttggacggtaaggtgtatcccctcaagctcgtcctcgtcggggacgagacgatagtaacccctgggaaccgctgggtcaaggccgttgtgaaaatagaggttgtgaaggccgaaacaccgggagaaagcgagaacactggctatggggaagtgaaagattttgccaacagaaccgttaaggtgaagagcccgccggcgaggatagtctcactctacggactggtcacgcaaatgatatactttctcggagttgaggacggcaagaaagtcgtgggaagcactccgctggcaataaacgacgcttttatcgggcttctggatcctggcgttaagaacaggatggtcttcgtcggaaacccgaggaatgcgaacgttgaaaccgtcaagtccctgaacccggacgtcgttttcactgcctactgggggagcgaaaagataaacgaggaaatagagagccttggcattccagttatagccctgaaccttgagacggtcgatggatacctcaaggggctcctgacagtgggcaaagttcttggaaaggaggaaaaagcagagaaggcaatttcgtattatcgctccgctgttgacttcgtcacaaacaggacatcaaagcttaaagagaggcccagggttcttctcgttcagtacagcatgaaggataaggcgttcaaagctccaggcaaggagtacttccagaacagattaatagagatggcaggtggggaaagcgtttcctcgaaccttccaggtggctggaacgtagtgaacgtcgagcaggtcgcgaagtggaacccagatgtgataatcgtcgtcagctactcccccaagaaaccatcggctaaggttaaggaagaaatactaaacgaccccgcgtggaagggcataaaggccgttaaggagggcagggtctacgcgatgccgaacgatggcgaaagctgggattaccccgctccaaagtgggttctcggcctctactggctcgccaaggttctccacccggagctcttcggcgacctcgatgtcagagccaaagccgacgacttctatcagaagtggtacgggatagacccaaataaggtggagataaccggtgatatgccgtgagggggcttaaaggcatctttctttttttcatggttatcattctgatatcgcccttcgtgggtagaatgctcttcaatccgctctcgatgagcgatctcgataaaaccatcctcctccaggtcagactcccgagggtggttacttccctccttgtcggggcttccctttcgcttgcaggtttaaccttccagaacgtcttcaggaaccccctggccgggccgaacctccttggggtcacgagcggctcggccttcggggcggttctggcgatactcctctctgcggatccttacgtcatacagatatcggccttcctcctcggcctgcttgccgttggggtggtgtggcggctttcccgcctcgttgggaacggaatcctcggcttaattctggccggaatagcggtctcggctttcttctccgccctcgtgggaatggcgaagtatctggccgatccgtacgacaaactgcccgcgatagttttctggctcctgggaagcttcgcaggcttgcggtgggatgacgtgaggattatgctggtgccactcgttgtgagcatagttgggataacgctcctccgctggcccctgaacgtcatcagccttagtgaagaggaggctagggggctcggagtgaacgtgaggctctacagggggattttcatagccctcgccgccctcggtgtttcggcatcgacggcgatggctgggatgataagctgggttggactcgtgagcccccacgtagcccggctgagtgttggacacgacacgagaacgctcgtcccggcaagcgccctcgttggggcgtctcttctcctagtttgtgacgacgttgcgaggagcgtaactacctttgaggttcccctgggagtcgttactgccctgataggcgccccgaccctcataataatcctgcggagggggatctatgctaagggttgaggggctgggcttttcatacggcagtagggaagtcctcaggaacgttacctttgagcttaaaaagggcgttggctgtctccttgggccaaacggcgccggaaaaagcaccctccttaagtgcatagccggaatcctcaatgggaacggtaggataacgctcaacggtactgagctttccaggttgagattgagggagcgtacgaggctcgtaagctactccccccaggaattctcgctgacgtttccgtacacggtctttcaaaccgtgctgatgggcaggaacccccacatcgaccccctgagcgggccgggaaaggtggacgaagagatggcgatgaaggccctccgcaccctcggacttgagaacctcgcggagagacccttcggcgagctcagtggaggccagaaaaggctcgtaatgatagccagaacgctcgcgcagggtggagagcttttcctctttgacgagcccacttcgttcctcgacttcaggaaccagcacctcgttctcagcgttatcaggaagctctcaaaggagagaacagtgctggtctcactccacgatcccaaccaggccctgaccttctgcgatacggttttcctcctgaaagacggggggataatagcgagcggagaaccggctgaagttctcaacgaggagaatctgatggagttatacaggatgaaagtgaagcggtttaaggccgacggcggctttttcatataccccctggaggtggttggatgaaaaaagtcctctcccttctgctcgtcctcatggcatgcgggtgcatcggggcttccgaaaaacagacgcccagcaatgtttcaacaccaagttattcaaaaatttcaacctatcccttgggaaatcctccaaactggtcaaactggacactagctgttctgaatgacaacagaacctacacgtgggaagaactctcaaaactatcgaacgacacgatgagaataccggatttgaacctcggaagaaccgtcgagtggaggggagttagacctcagagacttggaaggggagacttcgttacggtaataaatgaaaacggggaagtggtgagcataccctataacgtctcaatgcttctggccatctacatggacgggaagccgatgtcaaccccgataaggctcgtggcgagtctctcctacggctgccggtgcaactggcttcctggaataaggttagtggacttcgtgaaccgctccaaggccttgggggtctacggcgaggtgaacaacgaactctggctgtccccaaggagctttgccgcccttggaaacggctcggtgcacctgaacgaactgctcgataaagctgacgttaggccaatcgccaggagggtgatcttcattacacccaacggggagcttccatacagcctcgccaagataaagaagctgaacccgttggttgtttttgaggggaagtttaaagtgccctcactgggtatagaagacctaagaggaataaggcttgaggggtgattgaatgctgctttcggagatcaagaaaaaggctttgaatcttgcaaacgggcttgagcttttagatttcggctttgccctgccctacacgtgggtcttaattgaaggtcctgaaggaaaatccctaggcgttgcaatgaccctcccggaggaggttcagaggtacaccaactccataagtgagccttccatcgaggccttcattgaaaggatcgacagcctgaacgtcatcgagagaaccctcgggatagcggcggtaaacgcggtctcccagtaccacctcgacgtctcagaccttccagatgttgacgtggttgagcttgttgaaggcttcagtgaggtagcagtgataggcaacatgccacccgttgtcagggcactccgcgagaaaggagttaagaccctcgttttcgagcggaatccaaagctctgggacagggagacgctcagcgacgctctggaatacattctcctccccgaggttgaagcggtcattgtcagcggctcagcactggttaacggaacgcttgagatgatcctcgaccgggcgaaaaaggcggaactggtaatcctgaccggcccaactgcccagatacaccaggagctcgttaaaggaactgggattactcacctcgcggcgatgaaagtgatagaccttgaaagggcgctcctcggcctcaagctcggctccttcaggggctttgagaaggggaacaggaagtacgtggtggaggttccgtagttattttgcgaacctcccatcatcttttgcctctgggagcttgtgaacgttttcttcaagccagcctgttctcactccctctctgtagtcaaattctggcacgtagggctttatatccaggaggggagttccatctaggacatcaacatcctcaactatcaggacgtttccgcgcctttcaacgagtctcactatcgagatgccgatgggattcgggcgcgcgggtgccctcgtggcgaacacgccatggtagttctcgtccatgtatggccttactaggagactcttgaacctcgccctgtggaagtggtagatcaaaattacgtgggagaatccctcaatgtccttcagtccttcctcaaactcgggaaacacatcaacggttcctctgattcccctcgccgcagaggcctgtatggggacgtcttttggctccttgaaggggctgtgaataactccaatcgggcgatagcatatttcttccaaaggatagcttttggccttgctcattttatccccccatcaaaacctgggacgaaggctttaagtctaacccacagcaaaaaagatttagaagctattttgaactcccaaccatgaggctgataatcttaaacgacaacgttccagctgagggtttgctaaacgactggggatggagcgtcctcgttgagggtagaaaccgctttatcttcgacgcagacacgaaccctctcgtcctagcccacaactcaaaggctcttggtgtttccctcaacgaccttgactttgctttcctgagccactggcactacgaccactacggtggccttccttacgtgggggagctgaaccctgggcttaggctctacgctccacctgggaacagggcgatggcccttagatggggcttcgatgtgatggaggtcttcactgctggagaaatcgccaagggcatctggacttcggggcctctggatgacttcgagcaggcccttggggtggagacatcatcgggcctcgtcgtcatcgtcggctgttcccatccgggcgttgataggctcacgaaggccctcctggatgtttcaggctatgagaaggctcacctagtcatcgggggttaccacgggccgtctaggagaacacttgacagattagcagagatggcagagttcatagcgcctgcccactgctccggagatttcgcaaaagcctacgtgaggaaaacctatcccgagaagtacgtgggagtgatgacggggagtatcatcgaggtctgagaacgttcttaaaaagaagaaaaagaaagcggtgatgccccatggcgtggaaggctatgctctcaccttaatcggattctttgaaacatccttaacaggcaggtaggctattactgaaagcaccccaaggacgaggtaagtggtcacgtcatcaagtgggctccagccagcgaagtcttcgttgtgaagcaggtacgcctctattgcatctgaccccatgacgagcaccgcaatgagtgcaaggccaatgctcagcagtgcacccacgtagaggtaggagacgctcctaaggtcgccctcaacggccctcttgagacctgttagatagaccgcgcttatcgtgaagagggcgaaggcagcgaagaggtctccagttggaactccaatgaccttgatctcctttccgaagtaggcgagcacctcgattatcccaccgatgaggtagaggaggccgaagatcccagtcagccatttcacctgtccaaggtttattctgctcataggaacacaccccccaccgcgactatgagcagggccactatgtacgccaagatcagctcgtaggccaccgcaaagagtgcccacttccagccagcttcctgctttatgacggctatagtggcaagacacggcacgtatatcagcgagaatgccatgaacgcgtaggctgttgcagggttaaacgctccgctcgccgccattgcctgtgagatcgcctgttcattatccccaacgccgtagagtactccaagtgtcccgaccacgatctccttggctatgaagccgaagaacagcgccaccgcggccttccagtcccagcccatcggcgcgaagagcggctgtagggcgtgcccaagcgaagccacccaggactttgcgagcagttctccgttctcaagggcctctgagccgaggtatccactgggtccagtcactgagagcagccagaccacgatgacgcctgcgaagataacggttccagccttcctgaggaacttctccgtcctcgtccaggcagtgccaaagatggttccccagttgggcctgttgtatggtgggagctccatcacgaagtaggagggctcgcccttgaatatgagcttcctgaagagccaggctatgatgagggcgaacgctatgccgaggaggtacatgctggtgattaccgttccttccctcccggcgaagaacgctccggcgaagacggcgtatatcggcagcctcgctggacaagacatcagcgggttcacgagtatcgttagaattctgtccttctcgtcttcaagggttctcgttgccattattgccgggacgttgcatccaaagcccattatcatcgggatcacggactttccatggaggccgaagtggtgcattaccctgtccatgacaaaggcggccctcgccatgtacccgctgtcctccagccacgagaacgctaagaacaggaacgctatcggcggcaggaacaccaggacgctcccgaggccgcctatgatgccgtccctgaggagagaggctagagcgtcgttcgcaacgtgtgccccgacttcatccccgagccagctgaagaaccagtctataatatcgctgaagggcgccgaaacgtcgaaggtgaacttgaagacggcccacataaggctgatgaagattgggactccgaggtatttgtgggtgagaacctcgtccagcatgtcgctgaaggttatcctatcctctttcttcacgatggcccgcttggctatctcctctatcaggccgtagcgctcatccgccagtgcgagctcaacgtccccgtatttcttgtggagctctcccgagacgtttataagctccctcaggatatcgtcccttaatctgcttttctcgactatccccctggcctcgtcatcgccttcgaggagttttatggcgagccacctcgggttataattccttaccagctcgtcgtcccgttcgatgaccctcatgatgcgctcgatataggcttcaaagttcgggtactcgatggggcgcggctttcccttgatggcttcgactatttttgccttgagctcctcgattccctttccttcagaggcgaccatcggaactactggaaccccaagggcctcctccagcttcttcgggtctattttgtagcccttctcttccgcgaggtccatcttgttcagggccaccacgacgttggctccaatctcgaggagctggagcgtgaggtagaggttgcgctcaaggttggatgcatcgacgatgtcaacgaccactctgggcttctccttcactatgaagtccctcgctatcttctcatcaatggaataggcggttaggccgtatacacccggaagatcaacgaccctgaacttcatctccttgtattcaaactctccctccttcttctcgacggtaacgcccggccagttgcccacgtgctgtctaaggccggttaatgcgttgaagagggtagttttacccgcgtttgggtttcctatcagggcgatcacgacttcactcatcctatcacctccacctgaatcttcatcgccagcccccttccgagggcgagctgtgttcccctaacggttaccatcatcggaccggccatttggttcctgaccacgactacctcagtgccgggcgacagtccgagctccgccagcctgtggattactccccttcccccggcgattccccttatgacagcccttctgccctcttccacgaatgccaggggcatcattcactccacctctacgtagtccgcctcttccttccgaagtgagagcttgtagccgcgaacctcgacctctatcgggtcgccgagcggtgccctcttcacgacctttactacagctcctggagtcacgcccatagtcagaagacgggcctttgggccgcccctaatgcccacgacccttacggttcttccgggttcaacttcgctgagcctcattctaccacccccatgcacaattgcgtatatcgtgcttaggtatccctaacaacttcagagtaggctaacctaacattcccttaaataactttctgtttgtaaagaaatacttggatgtttgaaaacccaagaattaggttagcctaatctaactaaaatgctccaaaataggtagcataggtcagttgaaaccaaaaatggatgggtttgaaaaagaactaaaagagtttgaaatcacgaacaaggccacagatttgttccttttttcgatttccgtgcatatgcacgaattagggcttaaaagctttttcttgtatcttctctattttcaactccaaaactctgaggccttggtaaacacttccacttactataaacatttttgtttatccaaaatgtttaaattccaaatccaaaacttcttcggtggttcgatgagaggcgttaaaatcctactactcgtcggggttttggctggtatcctcctcgttgcaggatgcatcggttctgaaaacgcccccgggagttcggagaaaaagccctttgcgggccaaacggtcgtcgtctgctccggggccggcctcatgaagccaatggaggagctgatagggatgttcgagaacgagaccggcgccaaggttgaggtccactacggcgggagcagcgagatcttcggaattcttcaaacgacctgcggctgcgacgtcttcgttccaggggcgtggtactacacccagcaggcggccgagaggggctacatcctcaacggcaccgtgaagaacgtcacctaccacatccctgtcatagcggttccaaagggcaacccgaagggcattcactccctcgaagacctcgcgaagccaggagtcagggttgtcctcggcgacccgaaggcggccgccatagggaaggtgtcccggaaagtcctcgaaaagaatggcctgtgggaggaagtgaagccgaacgtcgtgactttcacgccgacggtgaaccagctgctcatctacatagcgactggtcaggcggatgcggcaataatctgggaggacatgacgacctgggcgcagtcaaagggcaagatcgaggtcgttgagataccttcggagcagaacatcatcaagactattcccacggcggtaacggtctgcgcggagaaggacggccaccttgaggttgctaaagccttcaacgggttcatagcaaaccacaccgagatctgggagaagtgggggttcaggccatggcggggctgaacttcaggagcttgacgatttcggtggccttcatcttcacgttcctccttttcgcggcgatagcgacactcttcctcctgccgaagcccagcgatgtgcttgaggccctgaaatcggaggagatgctctactcgctcaaactgtccctgatcacggcctcgctctcgaccgttctcgtaatcctcatgggggtaccgataggatacgcactctcacgcttcaacttccctggaaagagcgccgtcaaatccatcttagacctcccgatggccttcccggagctcgtcctcggtttagctttgctcctcctcttcggcagaactcctgttggtgaggccctgagcgacctcggggtgagggtcgtcttcaccaagctcggcatagtggtcgcccagttcttcacggccctgccctacgccgtcagggtcatctacacgacgtttgaggggataagcccgcgctacgagctcgtcgcgaggagcctcggctactccgagttcgagaccttcagaaaggtaacgctcccgatggcgaagaacggactcctcgcctcgacagtcatctccttcgcgcgttccatgggtgccttcggcgcggtgctgatcctcgcgggcgggagctacatgaacactgagatactgccagttacgctctacctgaatatctcctacggcaacatcggaatggcaataacgagcggaatcgtcctcgtcgtcgtgtcgttcatcgcgatactcctcactgagaggctggagggtggtggaagtgcctctgttagaggttgagaacctcagtattgaccttggggacttccatctcagggacgtttcgctctccgttgaagagaacgactatctgactataatagggccaacgggggctggaaagtccgtccttcttgaggccatagcgggcttttatccgcttctaaagggaagggtcatacttgagggcaaggatataacgagggagccgcctgagaggagaggaatgagcatcgtctatcaggactacgttctcttcccacacatgacggttttcgagaacatagccttcggcctcaggaagaagggcctcgtaagggctgagatcgagagggaagtaaggcacatagcggaggagctccacatagaccacctgctccacaggaagccggggacgcttagcggcggggagcaacagaggacggccctcgcgagggcgctcgtcgtcagaccaagagttctcctcatggacgaacctttttctgccctcgactccaaaacgcgcgaaaagctccgctccctcgttaggaatgtgatagacgagtacggaacgacggtcctccacgtcacccacgacttcgaggacgtctttgccctggccaagcacgtggctgtcatgagggacggaaggatagttcagttcggcactcccgaggaagtcttctcaaggcccgcagacgagttcatcgctgacttcgtgagaaccaacctgctccgcggggaggtcgttgggaaggagggagaactcaccgccgtcagggttggaaacgtcattctttataccgccgacgatgccgaaggaaaagtgactctctccattaggccagaggatataatactagcgagggaaccaggggaatgctccgcccagaacgtcgtgccagtcctcatcgagtcactggagaagcgcggccacctcgtctggcttagcctatcctcagagggagttcccctcagtgccgttgtaacgccgaacgccgcagagctgctcggcataaagcccggcgagaagttctacgccatgttcaaggcaagtgccctgagggtgataaaatgaacccggggagactgtttgaaatctacctcgggaggactgtccatacttcgacgagacgagcgagttcctgagaatcgagggaaaaggcacaatggagatagtctccaggaaggagggaatagcagccttcacggaggggctatcctcctttctcttctccctcagcttaaacgttcggtttctcccaagcgggagcgaatttaaagcgggttcaacgctactccacgcggaaggtgatttggaaacactcttcaaggtctggcgggtttcccagacctttctctcgataacctgcgcgatagtcaccgaaactagaaggctcgttgaaagggccaggaaagcgaacccggacgttgtcatagcaacgactcggaaagcctaccctgagaagttcgtggaagtgagggagtatcatcgagctctgatttcaaggaactcaacgaggaggttaaagaaccgcgtggttctccccaagggagttataaagcggtagaccagcagttcctcccggatttcttctctctggaactcctttggtaggccatcaaactttccgcttcttgagagctcttttacaaccctccagccatcggaaaagagcgcgttgaagtactccttcagccacttctcgtcgattctccttacgaagagctccccctcccttgacaagcggtagtaggtgtggtgcttgtggacttcgaaggccttcttgaacctcgccttacttctctttatcgcacttccagagtctcgctccaccagtccagcttccatcagatctcttattgcatcttcgatgagagaaaggggtagctcgctcattttcaccatcatcttggcgtaatccactccggctttcttaaggtgggccaggacgtagaggtgaaccggaaggagttcaaggcctcggtacgaacctgggcgttctttctgcgtattccctccatccatcgccgaacatctcctcgagggctttctcctcctcgcctatgaacccgagcacgcccgcccagtaaacgagaggaagtaagagcatgaagccaccgaagaggagagagaatcccggaatcacgagaaagccccagatggagtatatcggatgcctcacccttgagtagcagccctccgtgagcagtttccccttcgagtaagcccttgagacctgaaggtagcagagaaaccagagggagaggccgaggaataccatcaggaacccaaggactggaaacgcgagaaagctaaccccaagcctctcgtctaggtaaaacgccagaaccgcatagatggaagaaaggagggcaacctttggaaagatgccccagaacttcatgttcactcctctatcggcggtttttcggtcttctttttctgcacctgctcccagaggtcgtcgaagttctccacgacccgctggagtgcaaggtttagatccctcgtcctcgtgaagaatgccaccttgttggtcttgtcccggattctcaggaagttcgggcccatcctgaaagctgctaaaacgtcaacgtcgaggagctggctgacgactgccttgaacttcctcgggtcgccgtgcccctcgtcgtgttcttcctctatgtctttagccttgttgtgcctcttttcgaggagttttatgcttccatcctcgcagatttcgtagatcgcgaagaactctgaatcaccgtagtgtgcatctatgaggtgttcatcatcttccattccgaacgcgactttgaggcatctcttctcagccatgagcatcacctgaaattccttcggtaggggttttataaggattaggctcaccgaaaactttaaatgctgtgcatatgcacaaaataatagacgaaagaatggaggtggttggcatgaggatcgctgtcccgactaacggtggaggtagagaagacacggtcgccccggtcttcgcgagggcaccggcattttacatagcggacgttgacgagaacgggaacatcgtcagcgagaaggtcattcagaacagcgccgcaatggccggcggaggggccggaccaatggcagtccagaccctcatcaacgagggcgttgaggcaataatagctcctcaggtcggcccgaacgcactcggtgccatacaggccgctggtatcaggctctaccaggtcgctccagggacaccagtggaggaggccataaagagcgtcgtgagcggtgaagcggcccagttcacggcacccgctccgcaggctcccgtcgctccagcggcccctgcaactccggtagcaccggtgccgccagcgtacggcccagcctacccggcttatcctgcctacggctacggtttcggccctggttggggcagaggctggggccgcggatggggtagaggacgcggcttcggcagaggttggggcagaggaggaagaggctggggagcgaggctcggctactgcccgtggacaggaatgcccagcaggagaaccctccgccggtattacggctggtggtgaggcctttccctttaactttttgaggtgcccaaaatgccgcgcggttacggaaggggtatgggcaggggtggaagattcggcccgtatccaccctattatggaggcttcttcggccgttttggactctacggaataatagacctaatcttcctgctcctgatcctctacctgctcttcaagctcttcctagtggctgcgacctatgttatagccctcgtggtgctctacatgctctggggcttcataagtccgaggagaggccgctggttctggccttagctctcttttccatgcttctttttcaggccgttcagtacaggtttttgagccgctctatcgagaggtatgtgaacagcagtgttaggaatatcaagatcagtgcggagtaaacgggatggacgacttctgtgtacttcaacatcgagaagcggagcccctccacgagataagtcatcggtgtcaggtagcctgctatcaaaaaccagcgtggaaagaggaggagggaagctatggcaccgctcgtgaacatcatggggagtctaaggaggttcagccaggtcatggcgcttatcgggttctcgacgacgagcgatatgtagagggccaatccagaaaaggccagcccgccgaggaaggcgtagccaacaaccataggcacgttccagactggatagaccatgaagtgtgacaccagagcgaggcttactagagccacaaagaggccgaagagggagccgactaagagcttggcaaggattatctcgatgtagctcacaggagcaacgaggaggcgttcaaacgttctgagcctcctctcgaagattatggacgaggccacaaatgaagtcgtaccgaagactatcgagatcgagacgagacccggggcgaggtggtctatgtcgccgaagcggactatgaacgctaacgtgaagacgatcgggaacacaacgccccagcttattgagcccggcttgaggacgtactccttgagttccttcctcgctatcgtgagaaccttcaaagaggacaccccccgcagccgcacgctccgccttttggaacctctgtcgtcagctctatgaagacttcctctatgctcggcgcctctgtcgagaccttcaggactttaaagccgagctcttctctgagcttgcacagctctgccatgaaggcgtcggcatctggaaccgttatcacgatatctccctcatcgaaggtcgggccataagctgagagggcatcgaggagcttgttggagagcggctcgacctgaagcctgatcctcgtccccttcccaatgagcttcggaagctccgtccgcgtcccctcggcgattatctttcctttgttcattatagcgactctctgcggtatcgtctcagcttcaaccatattgtgggttgtgaggaaaatagtcatgcccctcttgttcagctcccttatgagcgccctcagggccttggcggagtggacgtcgaggccgtttgtaggctcatcaagaaagagtatctcgggttcgtgaaccagcgctgccgctatcgttaccctcctcttgaagcccgagctgagctttccgaacttcctctttgccgggaggttgaactccttaatgagtctggccacgttctcctttggagcgtcgtagaggtttgcggtgaacttcaggttctcctcgacggtaagttcctcgtaaaggttggatatgtcggggacaaggcctatcgagcgcctaaccattaggccttccttcttcacgtcgtagccgttcacgtaggcctctccagaggttatcctggtgagagtcgtgagcattctcactgtcgttgtctttccggccccgttcgggccgagaagtgcaaaggcctccccgcgcttaaccgtgaagcttatccccctaacggcctcaaagtcgccgtatctcttcacgaggtttttcgctattattgcttcctccgcagccatatcagcaccccgaggagggctatcccgaccaggattccaccagcgatgagggggctgtagccgggttttactgagcttttctctcccgcggtttccgactggccctgggcggttggagcaactgagtaggccactatgacgctgtagcagttgtctatctcgtgggagccgtagtcaacgacgaagtagcccgtgggagagaagccgacgtggtaaacagtcccgttgaagctctcgaaccactcgaccgtcccgttgggggctataagctcgacgttctttccgtaggccaccacagtgtagcctttaaacgttgcaacgtcgttggcataactcaggaggggcgttgaatagaggagctttccggcagagtcaaggagcgtcacgttccccgtcattcctgcggccgctatgtactccccgtcggttgaaatcgagcggacgtagccgttgaagtgccttttccagatgactgagccgctatccgagagaaaaatcaactcgctccagctctcgtcctgcggaactacaagaactgctatgccgtttttgagaggtacaatcttcctaacggctccattaaatgctttcttccacaggagtgttccatcgagcttgaatacatgtattccagcattgctacctgcgagaactctttcacctgaaaggacaacgctccagacgtatttcccaatgttcctctcccacttcagctccccgtcctggaaaaggtaaacgtagccagcggcatcccccgcgacggcgactttcccatcggccgatatggagacgctcacaacagcttcccttagcttcctttcccagagcagttttttgggctccgaaaacgcctgaacccagcttccttccgtccctatcaggaggacgttgttgtcagaaagggccgaagaatatgcgatgccccttgttggagctttgaggaggagctttccctcgggagagagcagctcagcgtcatagccaaaggctagcccaacgtagcctttcgagttgaaagagaccgaaaacgccgcgcactgatcggtgtatctccacatttgaaccggctcggcgagagccagcgggagggtgagcgttaggatcagcataaaggccgctggaagtcccaactccatctctcacaccatctttgatttcaaaaccccaaaaataaaccttccgcatgggatccgaactccgctcgggcttagtccttatcgttctttgccactatgagcctgaccacgccgctgtagtaggcttcctctttctccactttgaagtgcttcctcacgagcttgtgggtgtccctcagcgggtcgtcgtcgaggagaggcttgagaatgagcttcatcggcaggaggaagaggtaattcaccagctcgctctcactcttggtgtgttcaaggaaaatcgccattccatcgggcttgaggactcgttttatttcttctatggccctttccggctctggaacggtgcagaagacgaaggaagagacaacggtgtcgaagaagtcatcaggaaagggaaggctctctgcctcggcaaccttgaactttacatccattccaagttctttcgcccttttcttggccatctcgagcattttctctgagccgtcaatggcgtagagctccacgtcctgggggtagtacctgagggtcttcccagttccaacgcctatttcgagcgttttgccttccgcgagagaaaccgcactctccctgagtggattgaagaacctatcaagcggcctttcaagtagctcgtaaaagcccgctatcctgtcgtacttctcgcggtacataaaagacaccgaaagggggctcacatgcccccgcttacagcaagctcgattatcttccttatctcaacgaggaactccatcgggatgtccttgagcatcggatcgaggaagcctttgactatgagctgggttgccttctcctcgtccagtccgcggctcataaggtagaagagctcctcttcccttatcttgcctatcgccgcctcgtggctgagttcggcatcgtcaaccctgcttataagccccggataggtctccataaccgccttgtcgctcatgaggagtgcgtcacagcttatgtgtcccttcgtcttcggagcgtccgcctcgatgattcccctcgtcacgacggtgctctcgtccattatgactgccttgctagcgttgattccgctcgctcccggcccctggaggaacatcctgccgccgaggtcaacgtaaaagtccttctggccgaggattatgccgttcagctcgacgtggccgccctcctcgacccagtagtgtggatctcctatgttgctctttccagagccgagggttaccgtcgtgttgatgaagcgcgcgcccctccctacctttgctctcgtcatgggcctcgtgtggacgtactccggccagttctggaggactgtgagctgggccttcgccccctcgtggaagtaggcctcagtcatgtcgagatgtagggagtgcttgaggagtatcggagcggtacagccctcgatgaggtggaactcggtgttcctctcggctatgatgattatgtgtggcgcctgggccagcgcactctcctggatgaggaagaacaggtgcagcgggaagggaaccttcaagccttccttcacgtagaggaatattccgccgttccatactgccgtatgataggcagtaagcttgctctcgtctgcgcggaagagcttgaggaagtgctgcttgactatgtcggggtattttctaacggcctcctccgtcgggaggactatgaggcccttcttggcccagtcctgcaggaactggttgtatatgacgcccgtgtccgtctgaaccgcaagcccggctatgtacttctgctccacctcgcttatgcccagcctgtcgaggagggccttcatctctggcgggaggtcgtcgaggctctctatatggtcgggaaggccttttacctctggtttggctatgaagtgaaggagctgctcctcgcttatgacagggtctttgtgaggtgccctctcaaaggcttccagcgccttgtaccttatctttgtcatccactccggctctttgttcctccttgcgagctcttcaatctggttctcgatgatggcctttgcatcggccattgttatagtttcagtcatgctcccacctcctcgaatatcctggcaaacccttcgcggtctatctggtcaacgagctcgccggagccggtcttgacgatcctgccgtccttcatgacgtgaaccgtgagcttctccctgtcgaggtggccgaggattctgccgtagtgtgtgatgaggagtatcgccgtcccgcgctggtggagctcctctatcttcctgctgattatgctgagggaatccacatcaacgccactgtccggctcatccaaaatgagaagcttcggctcgatgagaagtgcctgaagtagctcaagcctcttcctctcaccaccggagaagccaacgttcacgtagcggtgaaggtcttcctccttgaaccagagctccttggccttttcaactacgagatcgtaggcctcagcggggtccattcccttcagctccacgagcacctgctggaggaactctatgaccttaactccttcgacctcgggtggaacctgaaacgcgagcagaatccccctcttcgccctctcgtcgggaccgagttcggtgatgtcttccccctcgaagaggatttttccatcggtaactctgtacttgggatgacccgctatcgtcagggccagcgttgactttcctgagccgttcggccccatgattacatgaaactcacccgggttaacttcaagatctacgccccttagaatctccttgtcctcaactgagacgtgaaggttctcaactttgagcattcgctcacctccgtgggtaacgttgatgggacgttttttaagcattttggaacagacttgtgtaatgagcatatgcacaaggcttttaacttaggctttcctaactccgatggaggtgaaggacatgaggataatcgtatcaaccgttaccggagggctcgacgacagggtgaacccggcctttggaagaacgccgacgttcacgatcgtggacgttgagaacggagagatagtgaacgttcaggtggtaccgaaccccggctactcacagccgaggggagcgggggttacggcggcgcagttcgtcatagaccagggcgccgacgttgtcattgctggccagttcggccccaactcctcgggagttctccaggccgcgggcataaagatggtctcggccccggccaccatgaccgtcagggaggccgttgaggcattcctcaggggagagctgaccactgcggtcttcggtcccgagggcggaatgggaccaggcatgggacgcggtatgggcggcatgggtagaggaatgggccgtggtagaggcggtggaatgggaggcggcagaggaggcggatggggctggtgaggcccttcactaactacttctacttttctttctgacaaaactttaaatctcttcacgaccaaaaaaacaacggtgaacaatgatggagattattgaggccgtttacgagaacggcgtcctgatacccctgaaaaaacccaaacttaaggagcactcaaaagtcattatcaagataatagatgaggaagaacttgataagcttctagactcactcatcattgagaaggttgagaacatagactacaaaaggcttaaggaggcctattatgagtcgctctgaggtcttcgtggactcttctgtcctcgttgggctgaatctaggagacgaaaaagcgaagaagctcgtgaagtccctcatcgaggagggccatgcccttgttataaacccaatagtattttccgaaacagcttacaaggttatgttcactctcgctatcagagatgggctgaaaggtgtctacgacctcaagaaacacttggatgagtacacgtgggtttatgaaaaggtcagggactcaattgagaagctcgtgaagagcggatttttgagggttcttgaaattgattggcaaatctcaaggctctctgccgagctcggggagaaatatggtttgctgaccaacgatgccatgatagtagccacctgcaagtcctatggaatagagaagatagcaacttttgacagcgactttgagaaggttgatttcctggaagttatctctcctttaatctcagaacaagatggataacgaaactgtttggtgagcagtatgaaggtcacaatcctatttgaaaaccacgccggctggaggaagggcctgatcggctaccacggcttttctgccctcgttgagcacaacggccacagggttctcgtggatactggcacggacggtagggtgctcctcaacaacatacgggaacttggggttgagctggactcgatagatgccctcttcataacccacggccactacgaccatacaggcggaatagccgagctgctcaaagctcggagcgaaccgctcgacgtttacgcccacccagggatcttcgccagaaggatagccctaaagccgaggcggagggagatagggatccccttcacgaggaaggagcttgagagccttggggcagtcttccacctgagcgagaagcccttcgagttccttccgggcttcatctcctccggaaagattgagagaaaaacatgggacagggccgttggctaccttgttgaagacggaaaagaagtcaaagaccctgttaaagatgacatcgcactcatacttgatcttggagacagcgtggccgttataacgggctgcgggcacagcggaatcctcaacattgctcggcatgcgatagacctgactagaaaaccgataaaggccctgatcggcggttttcacctgaggggagcacctgagcatctcttggacgatgccgttgaagggctcagggagctcggcgtgggaactctctacgctggccactgcacaggaatagatgagtacgcctatctcaaggagcactttgggcttgcggagcctctattcgttgggaaggagattagggtatagttttttacctttggaatcaaaccattcttggtgatgtggatgcttggtatagacctctctgggaagctggccttcacgacagcctcaagcaagggcataggcttcggcgttgcgagggttctggcaaaggctggagcggacgtagtactcctatccagaagcgaggagaacctgaagagggcaaaggagaagatcagggccgcgagcgatgttgaggtgagctacatcgttgcagacctcaccaggagggaagaccttgagagaacggtgaaggaacttaaagatatcggcgaacccgacatattcttcttctccacaggcgggcccaagcctggctacttcatggagatggacatggaggactgggaaggggcagttaagcttctcctctatcctgcggtctatctcacgagggcactcgttccggctatggagcggaagggcttcggaaggatagtctactccacaagcgtcgccataaaggagccgatacccaacatagcgctgagcaatgtcgtgaggatttcgatggctggcctcgtgagaacgctcgcgaaagagctcgggccgaaggggataaccgtcaacggcataatgcccggcatcataaagacagacaggatgatacggctggccaaggacagggcccagagggaaggcaagaccgttgaggaggcgctccaggagtacgcgaagccaatacctctcggaaggctgggagaaccagaggagataggctacctcgtggccttcttggccagcgacctcgggggttacataaacggctccatgattccggttgatggtggaaggctcaactcggtattctgagctcgctttcttcgcatccatctctatttttggagatttcgagctaagactcattccagaattctcctcaacaacatatactccctctcatccagggcgtttttgtcaataacaactatgagcgcccctttgttggagataatataatctcttaccgtgctcatcatctttgctatcgacgggaattcgttgtgtattctaaggtattccaacccctccacaagcacaatgcccttgacaccgcttctttctgcctccaggagatatctgtggactgtctcgaccattttataaaggtcggtcggccggattgtgtttggaatctccatattgttcgctgtggtgaagaaaaagggtttccagctctctgggggctttaaagttctcagaaacgcaagaacggggacgttttccagctgggctttgatatttttgaagtcctctggcgaaattatttggaccccttcaaactccggtatctcgatgttcttcacatcgtagtcccttaggaagcgcgggctgaagattacccggtagtagaagtaaagcgagcctattccaagcactaccgcgactatctgaaccgaaggcagcagcttatgtgccgtgaggccgtactggtatggtagggggtagattatggaaagcaggcccgagagcgagacaaaagttcctggagagcacgtccatcccgagtattccaagcatcattatcaaaaatccgccgaggaagtatatatcccaggggaggtctttttcgagtatgctatcggccacaccgaggatgagtagaaggatgaaagcggccctgtagagtcctttcataaaaggacgcgatgagtcttcccatatcagataaaagagacccgcagaagccagggcaaaggcaagcgcgatgaagaagttctcaacgctcatgccagcaaggtcaaagaccacctcgaagattcccgcgacatgggtgagcgcgagaaagagggcgaatttcctcctactcatgtgataggcgtacagaaacatggaagcaccgaacgttctcaccgctatcagcgagacggcacctatcaccgaggaattcaccatactcccttcccctcagatatgacgctatgttatgcagttatataaacctttgcggaatggggaagagggctatgcaacttttttccctatctcccggcaaccttctcgtaggcccgctttatcctctcgtagctcccctttgtgaacgtgcactccttcacgcagaccgaacagccgagggttcttgagaagacgacggcgcacttcgtgtaatctatgtgcacctcccggctgttctccctcttcggcgtgatgtatatcgcctgggccgggcaggctctaacgcaagcgttgcagcggtcgcagaagtctggaatccactcgtattcccgaacgcgctcttcggtgaggtggccataggagctactctctatccgttcttctccccctgggggatcctcgttatccttcccctatacggcctccacgcgctcgttcttgcttccatagtctaccgcttcggcaggccacgcttcgagaccctatatttggcgggcgtcatcttcggcctctacgaggcgtacatcaccaagataatctggaacccggactgggagtccccgattcaggtgggcggaatcagcatccttgagcttctcgttgttgtgttcttctggcatccattcatgtccttcatgatggccgttgggactgccgaactgctgacttcaaggagaaagctacttccagaattcgtcttaaaacggccccttctctttgccatggttcttggggccctggagagctcaaactctccctcgccagttcattcatttctatccctggcctcaacgctggcggtgattctcctcctcgtgcggtggtggagaaaccgctatgaaggagaaaacctggacgacctccttcccacgctgggggaactaaagtttctcgtccccatccttttggcgtattacattgctctgggcctgggaataaaaagggaagcaatacccgggcttggagctcaggcctttgtctggttcctctacgccctcacgttctatctcctttacagggcgctcaagaagtcgaggggactggatgttgagcagactgccgccccatcgttgagaaagctggtcgtgctctcggctgtttggattatctctggagttgcattctccaccctggagcttttcatccccgagttaaagttcgtgataatcgcccttctctggctctttggggccgtagtaggccttgtaagcttcttcaggagtgcacagtgggcactggcggagtgagacacctttttatacggcagcgtgctagataacaggaggtgttaaggaatggctattatgaggctgtggcacgggcgcgtgccgagggagaagagagacgcctacgagcgctttttgatagagagggcggttccggactacagctccgtcgaagggcttttgaagctctacttcacgaggcgggacgaggagaaagaaacccacttcctgctcgtgacgatatgggattcatgggagtccatcaagaagttcgcgggagaaaatccagagctggccaagtactacccggaggacgacgagttcctgcttgagaaggagaagtacgtccagcactacgagatattctatgagaagtgagcaagcttttaatttttggaccccaataatttttggtgatggggatgaagaggtcgcagttgtgggccgggctgatagccccgctcgttgcttattctggaattctcacggctatctatgtgaaccgctcgtggtggaggttaaccgacaacgcgataagcgacctcgggaagctcggcctcccccacaactggctcctcaacgtgccgctcgttataacggcggtgctggcaatttactacgccctcggcgtcctcgacatggctagaaacagcgtagagaaggctgggatctgggtgctcatagcgggctttgtcttcttagctctgataggcatcttcccagagggaacctcgccccactactacgtcagctggggcttcttcctgacggcgggctttgggctcttgatagccggcatcggcatgggactctcaggggacagaaagatgctgtacttcacggtagttctattcgttctggcgtggattctcgccatctgggccatgagaactttcaagggtgttgcgataccagagttcatcggagcactggcggttacgatctggcactacgcagtcctttcaaagatctggggcaaaacccgttgagttctctctttttctttttcctgctaactggaactagagaagggagagaaaagagaaagaacgtcaccagctcagagctggaggatcatctgggcgggatcccttattgctggcccaagaccgaggatgtagatggccagataccagaagcgcctttcttcttcatccgtaacgagctccttcagggcgtaatagaccacaacgaggatcagggttatccacggatagtagatgtaggccccgaaccagttgacgaggtggttttcaatccagtggacttcacggtagccgtagaagtgtatcgcaacaacggttgaggccacgtcaaagtagtgggcgagaacagggtagaggtagagcctgtcgaagggcctccacctgtagaatataaacactgcggcaaagctaacggcggtgtggataagggtaagttcgtagggctcccagtttttggcgtgggtcacgaggaggtagtttgcccagagcgccagtatcgttccccatgcaacagttatcttgggatacatcccaagctttgaatcggcgtagattgcaggcagtatcagaaagaacgccgtgaagaagattccgggagtgaggatgagcggatgctggggcaggactccgccgtccacaagcgccctcacagttgcgccgaagacgaccatcggtgtaacggcccagaagagcctctcgtccacgggtatcttcagcggtttgattatccatttgtatgtgtaaataacgcccagaccgaagaggagcgcatatacaaaggtgttaaccgcgttgtagccgctcctcgtgaacatcggttcccagaaatacctataaaagaagtcaattacagccccttcaacgctcattctaaccaccggactttgttgaactggtgctttaaaggacttttgggcgcaacctataaatagaacttccacccagtttgattgatgccgggctttttccagccagcgattgaaaccagcggggtaaaacccttcgaggacttcccgattgagttctccgaggggaccctatcgggggtcatttccacagatgagctagcctcggttctattcgtccactaccttgccgctggctgtcccgacgataaaaaggcctacgtcgttgcccctggcaggttggtttctccaaagactctctcactgctcggagccgacccgtcgaagctcctcataggcagcgtttactcccccgatgaactcatctcggcgctggaactcgttgaggaaggctctcttctcatcatcgggaacttccccgcactaaacccattttccgagaccgtccttgggataaggaaggttgtggacgataagggtctgatagctgttctccaccactctcccgtggccttcaacgagcttgaccatcccggtgagttcacgcgcctgttcaaactccccgaagtccttgatgcgctcttaatcctgagaacgaactcgtaccgcggccactaccggctcaacatgaccctctcaaaagctccccccgagtgggtgggctccctcggcgaccactccataccaattgacggcctcgtcaggcccctccttggtaaaggttgacgtgcccgaagccgaggacgtagcgggcgtagagggccagggaaaaccccaccagaaggagcgcgagaaccgcgtagtccctgggcttcatttcaaggtccctcagaaaagtcctcttcttgctcgctccaaaggccctgctctcaagggcaatgctcagctcgtgggcggtcttaagcgacgcgacgataagcgggatgaggactgaggtcatcttccgcatcctggttaagaggtttcccttgtcaagttccagtcccctgctcctctgggcgtccattatggttctggccagccagtacagggtcgggatgtagcggagggctatggtcagggtcaggccaagctcgtagggaagaccgagcctgacgaagcccaggacgagctctttctgcgtggtcgtcatgaggaggaggaacgtaacgagcgcgaagccgagaagtctcgccgaatatgcgattccgatgaagaacccctcaaggcgcggtttgtaaatcaccggccagagggcgagggttatcaggactatcgggaagagaggcttcagaagcctgaactggtaggaaaagtccgcacctgcaagcacttttccgatgatgagcaggccgataaacagagcgagaaggaggaggggctggttgaagagcatgagtgtgattatcccgaggagcatcccgattatcttgaccctcgggtcgagggagtgcatgaagctgtctttcctgatgtagaactgcccgatcacacttctccccccagtttcgcaaggatttcctcaatgctcctcacaaaaccaaccccaagcctctctcccagctcgactacctcgggtctctcaaggccgtacttctcaacgtcaaaggccgtgaaaaactcctcgaccgggccgtcgaagagcttccgccccccgtggagaaggactaccctctcggccagcctcacgacgaggtccatgtcgtgggttatcagtagtatcccatggccactctcgtggagggagcgtatcacctcaacaacctcctcctctgccctcgcgtcaaggccagttgttggctcgtcgagaattaggtattttggcttcatcgcaaggacgcaggctatagccaatctctgcttttcgccgccgctgagagagtagggcgtcctgtcctcaaaaccctcaagccccactgacttcagcgcccacttcaccctctcctcaacctcttcctcgctcagaccgagattccttggaccgaaggcgacctcgttgaaaaccgtctcctcgaagaacatgtgctccgggttctggaagacgtagccaacgagcctgctgagctcggcgacggtgtgctcccttgtgtcgaggccgtccacgagaactcttcccttggaaggcttgagaaggccgttgaagtgctttgcgagtgttgtctttccacttccgtttggtccaacgagtgccactatctcctgccccatctcgaagtctatgccccttaggacttccttcccgttgtaggcgaagtgaacgttttctgcttcgatcatcggaatggaattgaggggagcgttaaaaagctttcaggttgtccagaagcttcggcaaaagctccctggctgtgcccaggagactgacgtcgccgagttcgagcgccattgatgtagctccttctggaaccgggttcttcacgttgatgccgacgccaacaacggcgaagcggattgcgtctagctcccctgcaacctccaccagaactccagctatcttcttgccgtgaacgaaaacgccgttttcagaaacctccgcaggaattcctttcccctgcaaatactcggctattacttccctagccgccttggacatcttcccagcctcggaaaggctcagttctggactggccacaaggctgaaccaaagtccacccgggggtgaaagccacctgctccccttcctccccctgcccgacttctgagagcccgcgattacgaaaaagtctctccccctttcagccagcttccaggcgacgtccatcgttgagctcgtttcctctaggtagtacgccttaactggcagttcccaggggtacggcacgtcgggccgttccctcaggaagtatccagcgtgagaggcctctattttgtaaccgagcctcttaagctctcttatgtgcttccagactgcaaccctggagatccctagtccttccgcgagcttctcgcctgaaactggcccatcctcgattgccgcgagtattcttctcttcactgcactatctctcataagccgcatggttttcgttaacctaaatcttttaaaagattaaccaagttcccatcggtggctaaaatgaacgcacgagaagttgcttacgctgggatattcattgccctcatagctgtgagcgcccagataagcgtgaacataggcccggttccgctgacctttcaggtctttgccgtcctcctgacgggcctccttctcggccccaggctcggcttcctgagcgtcctctcctacgacatagccggagcaattggccttcctgtcttcgctggctttactggaggtatagcgcacctctacggcccgacgggaggatacctccttgccttcccgatagcagcatttatggcagggctttcaaagggaaagggcggaaaggcaaagctcgtcgcttccctggttgccatagctttgatctacgtcctcggctggctccgcctgggcctctactttgggggcaactttggaaaggcgtttgagctcggcgttgcccccttcgtgattccagacctcattaaggcccttatagcggtggagatttcggaggtcgtggagagaaggcttgagctctaaacagccagtttccctttatcttacctctctccaaggttctcctcggcgaaagccttatcgagcgagcttttcaccctgaaaaagctgagagaaaccttcgggttcttctttatcagctcttcaactgacaccggctcgaaatcaaggaactcggtgatggaactaagcgttttgtgcccctcgctgagcgcggcctctatggccgcgctaagtgcatccggctcatagacggcatgtgtgacttctgcggttccgtccttccatacgggtatgaccgcctcgggctcgtcttcaaggtagatgccgacgaggtagttcacgaggaatggctgtatgagcggcatgttgccctcggcgaggaagaaaggttcgtcgggcatggccttgaggagggcttccattttattccttgcaatgaccggcacagggttagagacatggagagagtaaatcctgagcttgtcctttcggactatggtcagaacctcgtcaatccgcttgctcattctaaacctcatctcggtgagctttacaactggctcgtcctttatgggaatcgtgtagttttcccacggcttttccgggaaagccaggattactgctttcatgactctccctttgagggggttctttaaaagtcaatcgctgccctctgcgaaagctttatatactcaaggttactaaaactggattggagaaaacagacggaggtgggaaaatggcggagatgataataccctacccgcagctccagaaaatcctcgagaggacctgcgagctcgcggttatcaagccccgcgctgaggagatgatggacatcgtcgagaagaagctcgcagacctattcgaggtcgcctacgagaacgcgaaggccgaaaacgctgacacgataaagatgcgccacatcccaataaccaagggcttcaggaacagcatgaacctcttcagggcagtcattgaagacgagggcgttgaaatagagccgataaggaagtacgtcctcaagaagatacccggcgacaggccgcttgaggaggacgtcgtgaacgagcttccgatcatagccggaactctcttcgtgctcatcggaagggttatcaaggccctccacccggagataaagaacgtctacccggagcacatcgaagaggccaagaaggtgctggattacacgctgtgaagaaagatattgaacttttgacttttcctatttcttgatcttactcttggtgactattgttacaattcttctgcatctgaatttttgttttgatttatgctcaacttggagaaaaattaaaaaagaagatacgatatttatcgtggtgatctaaatgacacacctcaaaaaacttgttctagcactacttttgataggagtagtcacaataagtggatgcgttagcattgaagaacatgtgaaggtctcttcggatggtactatagagtctatgactctggtactggaaatgccacggacggtgtactctctcatggttcaaaacacaacaacaggaacattttgtggagacattcgagcaaatataacgtctgatcttaaagataaagtcacctgtgaagagtcctttacaggagacaatgttacaataacaatacatgcagagcacgtaaagcccaaagataacgccgactttgctaagggtattgaaatctataaggagaatggatatctaatcttcaaggacaacacttggcatgaagaatctgcaaaggatcaggaggatatcaaagagtatggaagcttagttacaatagattactatctcgagatgccaggaaaaatcatagattctaatgctcacaaagttgatgggaacaaagctgagtggcatttagatatgtatactgccagtaagaccccaatctatgcaaagtcagagataccaaactccagtatttgtggtccagggattataatggcacttgcagtgattcctctcttgatgatgaggagaaaaagggcatagcttcctctctgtcttattgtccctcttaaatctactctcttatcacccttttatctatgagtacgtgagttattaaaacgttttagcgttttataggagaaaatggaaaaatgcatgcatcatttattaagccacctctccatccacccagctatcagctcaagtctcctaaccctgtgctttggctttccgctcctgctgaggtcgtggttctcgcccgggaagagggcaagctcgacggttttaccgaggtacttcagagccgtgaagaactgcaatgcctccggaagccagcagcggtagtcctccatgctgtggattatgaggagtggagtctcaacgttgggtgcgtactttagcgggctcttctcccagtagccttcggtgttgctccacgggtcgccgcctatctggtcgggcgcgaagaagtatccgatgtcggtggtgccgaaaaagctcgtccagtttgagatggagcgctgggtcacagcggccttgaagcggtttgtgtgcccgactatccagttcgtcatgaagccgccgtaggagccgccggtaacccctatcctctcagggtcgatgaagtcaaacctctttactgcctcatcaacgacttccattatgtcctggtaatcgcgctcgccgtagtgtccccttatgtcggcgaactcctcgccgtagccgtcgctccctctcgggttggagaatatcaccgcgaagcctttagcggtcaaaacgtggaactcgtgcatgaaggcgtagccgtaggccgtcttcggcccgccgtgtatctccaaaacggccggatacttcttgcccggctcaaagttaaccggcttcataatccacgcgtcaatctcaacgccgtcgctggctttgaccttgaagtgctccggcttcgagaggctgtactcctttatccagccgttgaagtcggttactttcttctcctttccgtcgcggaggacgtagagctcaagcggcgtaaccgcgtcctgggctgtgaaggctatgtaatcccctatagcaaagctctcgacgctcctgtctccaccgatgacgcgctcgatcttgccgtcgaggttgaccctgaataggttcgccctcggaccgtcggtagctatgtagtagacccagccgtccctaaagacaagctcggccctctgggcacccctaacgtcgctgttgagggagttataagctgccctgtcgaggtctttcgtcagctttctcatttctcctgtctccgggttgtagtggtagatgtgggtgttcgtcggaatcccgcgctcgcgcgtgttggccttgaggatgaaggttccgtcgtctagcgggatgaagtcggagatgctccacttgcccggcgttagcctctttgctttcctgccctcaaggacgtagaggtcgctaaccatcggcttcctctcgcggtcttcctgggcggtgaagtagagcttgccattgtggaagcggatctggccgacatcgaggttcttcggggtgagacgcttcttcttcccgctctcgacgtcaacgaggtaaaccacgctcctcttcccatagatccagccgacaccgttgaaccagaagggaagctccttgatgatgtggacgtcgtccttgggcttcttctcgacgtctataggagtaacgacagctatgccctttccgtcctctgtgaagcggaggtttttaattccgtacttgaacttcgctaaaagcctcgcctcgccgccgtcggtggggatgacgtagagctcggcttccttgctctccttatcgcgcttcgatgtgaaggcaacgagcttgccatccggcgagaagcgtgggttggcgtccttcttcccagaggtgaagggctcgacccttctgccgtcgtagaggtagagccttgagaagtagtcgtctttctcgacgcttatctccgtcacctgaaaaacgagctttctccccaaggcgtctatgtttcccacgagcttgaactttccgaggtccttctcggtcagacctttcaccatttagaatcaccgaataaagtcgggctttttcgtataaaagcttagcgtttcgatgtttgttttaattagggacaatgcgaaagagtaataaagataattttcaagttccgtccatgcgtcttatactaaaagttgtctcggttttggttgcggtgttgctcataatctccacggtacagtggatagcgttccatcgggctgaggagagagtggaatccttgccctgcgacaccaggcttgctccttacagggttgaagtcgagtcgatgttgcctccctctaaacttctaaaaaacgcaacaggataccgcctagatgatggaaaagtggaggctatagttcccggaaggcttggctcacacagtccggattatgagattattctttcaagggctgagagtgacctaaactttagtgttgcctccttgagagatgtcttgaaggcagggaacgaagaaattatagacgaagcgttctattctctgaagatagactacttcaaactgaaattcgtgaaggaatacaggcaaaccaacatcacggaggtcagttttaagccatcacctcccctaaaatgggtacttcgggcgagaaacgtttttatggcatttttacaaagctcttacgtccgcgccgcaattgctgcgcttctaataagcaccgcgttctttggggcgatgcttcttgggatgtttcttatcgcaaagcttcccgaaatgaacggcactctaaagtccgcccttgctctcgcagtcttggttatcgtttttgtggcagtttttggagggttaattgtcgttttcaaacattttggtccagctgataatgatgctatcccagagataccaaaaaatccttgtgagaagtcctacaacctctatccgaacttagaggacttccacagaactgctctaaaccatatctgggaaagcgagaggaatactacctcatgcgaagtgctccaatatctccacacggctttgagtgaggaagaactagacaccctccagaaaaccctcaacgtttcctgcccttagctacctttttaaatccccctcatccttttctttcgggaggtggcggccgtgaccgtcaaggtccgctttgataaggaagtgagggagtacgctaaaggcgagaaggttaaggattcggttctcaagatcaccgagactgctttagcccaggcccttgagaagttccacaggagaatgatagtcatagagggagacacgctgaagaaggccgagctggccggtatcctggctggtgcttcagcgagggttctctccgatatagttggcgagctcatcgaaaagcgccttagagatgagagcgaggataaaatcgaggttctctacgccacggatgccctcggcgaggagaccttcggaaggaagcgctacgaggccttcaggaagcacttcgatgttctggccggttccgaggtgaacgttacggctgttactttcaagcacacgagggagatactcggaagaacctacgatctccttatcttggacatgagctacgactactcgcccaacgacctcgggaggatcatcgagaccgtccgcggcggcgggctgatattcatcctcgcccacccgttcgagaagtggaaggacatgtggacgggcttccacaagagcctcgtcacgccgccgtacactatagaggacgtcaagaagcgcttcaacaggaggctcataaggaagttcacccagcacgacgggatatacatcatcaccgagagcggaaaggcgaagaagaagcccaagaagagcaagagtcaggcgaaaataagagccagaaaaggggttgaaattccagaggagactctcttcccaaaggaactgtacgagatggctctcacgagaggacaggtggaggttctcaaggccttcgaggagcttgtcgataaggagggaatgctcgtcctcacggcagataggggtaggggtaagagcgtctctgtgggaatagcagcgataggtctcgccgttgccctgaagaagaggacgaggatagttgttaccgcgcccgagcttgagaacgtccagtccctcttcaggttcgccaagagggctctggaaaagctcggcttcaagccctacgtcgtcgaagagaagggcctcataaaggaactctacgcgaggaagattggcctgcgctattaccctccagcggagggctacaagaagaacgctgacctctacatcctcgacgaagcagcgggaatccacgtgcccatacttcacaagtacctcaacaagccgcgcgttgtctattcctcaacgatccacggctacgagggcgctggaaggggcttctcagtcaagttcctgaagaaagccagggagaagcgctctttcaaggagctccacatggaggaaccgataaggtacgcctacggcgatccaatagagaagtggctcttcgacgttctcctgctcgatgcagagcccgtcgagctgactgaggaggactacgagctgataaagcggaaggaggtctatctggaggagccggacctcgacgactggttcgaaaacgacagggaagacctcaggcacttcgttggcatctacattttggctcactaccgcaacagaccgagcgacgtggccctattagctgatgcccctcaccacgaggcgagggttctccgcctgaagaacggcaagatagtcacggccgtccagatagcaaaggaaggtggaatcccgaagaacgtgatagacaagatggccaagggctacaagccgcgcgggaacatcatcccggacatgatggtcaagcaccactacctcaaagagttcgccaggctgaagggttacaggatagtcaggatagcaactcacccggatgcaatggacatggggctgggaagcaaggccctcgaactcctcgagaaggaggcaagggaaaagggcctcgactggataggctcggggtttggagccagcgaagagctcgtccgcttctgggtcaggaacggcttcgcggttgtgcacctcagcccggccagaaaccctgtcagcggtgagtttactgccatagtcctcaagccgataagcaagaaggcgaaggagctcatcaagaaggccaacgacgagttcagaatcaggtttaccgagtggcttggcgacacccacagggagcttgagcccgagatagcgcgctggctcttcgaaacgcccttcggcgaggcggtggactacccgattcacctgactgagatacagaagaagcgcctcgatgccttcacagggaaggttctcacctatgacactgtggtggacgccgtaaagccgatagtgaagctctacttcctcgacggctggatgaagccctacctcgacgagagacagataaagctcctcatataccgcgtcctccaggcccacagctgggaggaaacggcaaagctcatcgacaggacagagatgttcacgatgatcgaggtcagggacatcatcaggggcctctggtactactacaagaggcttctcacctgagggttttagcaatttttttaacctcttttaactactcccgttggtttgaaaattacggcggtgtcagcgatgcccagtggatgggagaagatagtttcgatgacgaagagcggaatgaggatcatcggccagatgaagcggaaggtctcgaggggaaagaggatagcgcttctcatagacgggccgaacatcctcaggaaggagctcggggtaaagctcgaggacattgccgaggcgctcagcgaaatcggagatataagggttgccaaggttattctcaaccagtacgcgccccaggggcttatcgaggcagtctcaaatcagggcttcgagccgatcatagtctccggcgagacaggtgtaaaactcgccgtcgaggccatgaaggagatatacaacccccacatagatgtcatagccctcgccacgagaaacgcggagtttttgcccgtcatcctgaaggcgaaggagaaaggaaaagagaccgttgttatcggcgttgaaccgggcttttcagtggctcttaagcacgccgctgactacacgatcattctcggcggtgagtaggaatgaaggagcggtttttcaagattctaaagagggagagcgagaaaaaagaggaagagactccaaagaagacgatagggcttatcatagacgggccgaacatcctcaggaaggagtttgggataaagcttgaggacatccttgaggccctcaagaggataggaaacgtgagggtcgcaaaggtgatcctgaaccagtacgccccacagggacttattgaggccgtcgtaaaccagggccttgaacctgtcatcgttgctggagacaccgacgtccgcgttgccatagaggcgatggagctgatctacaactccgacgttgacgtcatagccctcgcatcaagggacgctgactttctcccgataattattgaggcaaagaggcgcggcaaggagaccgttgttatcggcgttgatccgggcttttctgtggcccttcagaacgcggcggactacgtcatcaagatggaagggagaaagacccctgaaaacaaagaagggtaggttaatggtctttttgccgcaagttcccaaatctgcccacaaacttttttaaacgcttctattatcgagttattgaagataacaacttgttaatccctgggggtgagaaagtggggaagatgggtgagttgttcgtgctcggggtgatcctggcgtccctcttcgcgtcttcctcgccggtttcagccgaggagacgctgactgtctactcctacgacagcatcgagccgtggatgaaggagataatccccatctttgagcagaagtataacgtcaaagtccgcctcgtgctctttggagacgctggcgaagtcctcagcaggctgataatggagaaggacaacccgcaggctgacgtcgtcatcggcatagacaacagctaccttcagaaggccataaaagaggggattctcatcccgtacaagccggaaaacgccaaatacatccccgactggataattaagaactttgacccggagttccacctgacgccctacgactacggggcgatagcgattgtgtacaagaagaacgaagtcccaaacccgcccaagactttcgaggagctcacaaagcccgagtggaagggcaagctcatagttgagaacccgctgacgagctccacgggaatggcattccttctctggacaattgcggtctacggcgacaagtggccctactactgggaagccctgagagaaaacgacgtcatcgttgtcaagggctggtctgcaggctgggagatgtgggacaaggggcaggctcctctcttcgtcagctacgccaccgatccggcatacagcgcgtgcaactacaacgacaccagcattggagctgtgttcctcagcaacactgcctacgtgcagatagagggcgctgggatagtaaatggaacaaagcaccttgaacttgccaaggccttcgtcaacttcctgataagcaaggaggcccaggagaagctcccgctcaaccagtggatgtacccagtgaacagcgaggtcgagcttccagagtgcttcagctacgccctcgacgtgggcaaggctaaggtcgtttcaatccccgctgatgagcttgctaagaacaccgacaagtggctcaaggagtggagggcgataatggtcgagggcaagagcgcctcagagatttcgccgacgagcaccgcatcagccgagaagtccggcggcatctgcgggcctgctctactcgtcggtctcgccatccttccactcgcgctgaggaggagagggtgagcctactttcctccctttttccagactatttttccgtttaccattgtcagtgcaacgtcgcttcccctggtcgagtacacgagcagagagtaagggctctccatcggcttgaaccacggctttctggcgtctatcagaaggaggtccgcgaggtagccttccctgatgagaccggctttaatccccagcgcccgcgcgcccccgatggttgcgatctcgaagatttttcttgctgggatggaatgggcttttctttcgaggaggtttgcggagagacccgaagtcctcatctcgaggaacatatccataatgccgacgggatttggagagtcgttgcctatggccacgttcaccccagcgcgaagaacttctgggaggtttatcgtcgtcccttcaagcttcacgttgctcgttggacagtggacgagcgttgagcccgctgatgcgagggttctaatttcttcgttggtaagatagacgccgtggactccgatcagacggtcgcttaacgccccagcttgctttagatactccaccgggtttagactgtagcgttttttaacttccttcacttcggtcctgctctgggctaggtggacgtgaattctggcgttggtttcctccgacagttcggccatctccctcataagctccagactgactgtgttggtcgcgtggggagcgagggtgggcgttacgagttcgctcttttcctgccagcgcctgaagaatttgaaaccctcctctggatcggcgtgtggaaaatctaccagatccattacagtctgtccgataaaagcccttacccccatcttctcggcttcccgagctatttcgtcggcgaagaaatagtggtcgtttatcgttgtagagccgttcatcagggcctccatgataccaatcctggcccattctctgatttcacctgccgtccactcaagttccataggccagattatcttttccagccattcctctgttggcatgtcctctccaagtcctctaaacttcgccatcgccacgtgggtgtgtgcgtttatcaggccggggatcacgaagaagccgtccccgccgtagacctcatcggggccgaattcccggactttctcggcggggactacggcgctgatagtatttccctctaccagaacagcatggttttgaagaattctttcggcgtcaatgacgtctccgatgagcgcgatcattctcccaccgtttgtatgtttgacagtcaagtaattaagccttttgccgttttgacatccaaatttccaaaggatttaaatttgggagagaaaagctatccccatgccgcatttgatagagataaagtcccggcccgtggcactctcgctctggttcaattgacgctattcttggtaacatagatattagttagtgttataaacccgctttcaaagcctctggaggtggttaaaggtgatcgataaggtttactgtgccgatgtcacgcccgaaatggaagggaagaaggttaagctcgctggatgggtctacagaaagagggaagtcggaaagaaagtctttatagtcctccgcgactcaagcggaattgtccaggtcgtcttttcaaaggatctgaacgaggaagcttatagagaggccaagaaagtcggaattgaatcgagcgttatcatcgagggaacggttaaggccgatccccgcgcgccgaccggtgccgaagttcagggagagaagctccagataatccagaacgttgacttcttcccgataaccaaggatgcgagcgacgagttcctcctcgacgtcaggcacctccacctgcgctctccaaaggttgccgcgataatgaaggtcaagggcacgctcatgcaggcggcaagagaatggctcctccaggacggctggtacgaggtcttcccgccgatcctcgtcaccggagcagttgagggcggagcgacgctcttcaagctcaagtacttcgacaggtacgcctacctcagccagtcggcccagctctaccttgaggcggcaatcttcggccttgagaaggtctggtcgcttacaccgagcttcagggccgagaagagcaggacgaggagacacctcaccgagttctggcacctcgagcttgaggctgcgtggatggacctctgggacatcatgaaggtcgaggaagagcttgtgagctacatggttcagaggacgcttgagctgaggaagaaggagatcgagctctaccgcaaggacgatatcaagaccctcaagaacgcggttccacccttcccgaggataagctacgacgaggccatagacattctccagagcaagggcgtgaacatcgagtggggcgaggacatgggtgccgacgaggagagggtattaactgaggagttcgagagcccgttcttcgtctacggctatccgaagcacatcaaggccttctacatgaaggaagacccagaggatccgaggaaggttcttgccgctgatatgctcgccccagaggggtacggcgagataatcggcggctcccagcgtgaggacgactacgacaagctcgtgcagagaatccttgaagagggcatgaagcctgaggactacgagtggtacctcgacctcaggaaatatggcagcgttccgcacagcggcttcggcctcggccttgagaggctcgtcgcatgggttctcaagctcgaccacgtccgctgggcaacgctcttcccgaggacgccgagcaggctttatccgtgacgcttgtgcaagggatgagtggaattcgcggtgctcttcataattttcattttagtgctttgttttgagatcagcaaggctttttgaaaaaaagcttgaccaaaagtttgaatgtcttcgagttcgagattgacctaataatggggagttctccggtaaattagcgaagaaataggggttttgtttttaacgcccttggacgttataccgtgagcaaaccctttgaaaaattgcaaattaagccgagaatctaaaaatgaagcgagaattgtgaagacattggcttttttcaaagcggacaagacataccagtcgaaaacattctgccagcgcttgtgggaggatgttggggggcgttagccccccggagaactaggaaagaaggaaggtggggaaacgtagtttcccggtttttggagaacggaggtttgagagtacaggaaactttgcagggtaaagtttcatcaaagtttgtggttcttgtctgtgagctattggaaaggatttttcactagaaaatggcttattggttgtgaattccgcttttattggccttatttttcgtgagtttttctttttaatcgacgccacaagggcgtcaaggtgagagaaactctttcttagtaggccaaattttggaattcgtgcctttttagcctgagtatcacaaaatcattgtagaatagcaattttagaaggaaccacgaaccttgatcaaacttcgcgcaggcgaagtttgtactggtgggcccgcggggattcgaaccccggacctccaccttgtaagggtggcgtcataaccatctagaccacgggcccgcccggaataggaaaaaggagagggtttataattttttctacttctcgactcccctcctaactttcacggccagtccctgctggaatatcttcagctcctcgccgttgaggagggtctgcccagtcgcgaggagctcatcgttcctgttaacaacaagaacctcgtcgtagggccttatgttcaggtctgcatcaaccacgaacttcgcgaagacgttcttccccctccttgcgaacggttctgcatcctcgtcaactacaacacgcatcctcgggaacggcaggacttcgtggagtctcttcgccccttcaattccaagtgtcagcaggccgtcctcggctctgaaggtagcgaggtgcttgcccttggcctttatctgcctcggcatcccggtcttccttgagagctcgacaaaggcgtccttgaaagcctcgccggctccctcgccgaactggtactctgcaaccgccataacgtacttcctggcttctcccttctcgggcttctcaactgtgaagtcttcttctccttcactctgggcgaacggatagctgagtgagaggtacttaggtatctcaccgaagatcgggtggctgatggtttcaggaaactttgatctaacgcgctccgccctctccctggcgcgctcaacgattggccaccttagagcctcctcgctcactttgaagaaggcgctcgcctttgttaccggctcgttcttctcaaggtattctctgtactcgagaagtctcttgtaagccgcgtagagcttgggatgggagcgggccctctcatccacgaggcgccacagctcgccctcttttatagcttgcttaaccctgttgagttcctcccttatgacccagaggttgtgaatagccagaagcctcgtcctctcctctttcggcatctcgcggagctcctgcggcgtatagcgggagcacacgggacaggagcacgggaagtactcaagctcttcaagcctctttgttccctcgggtgtcatgtagcggtcgtccttggcgtagagggcatagctggccgaatcaaagaggtctatacccatggcaaccgccagcgcgaaaatcataggatgccctgcgccgaagagatgaaccggcctgtctggtctgaggcccaccttcgaagctataacgacatccaccagatccctgtagcggtagctctccatcagcggaacaaccgcgccaatcgggtgtatctcaaagttcatcctgctgagctctctcgcggcgtatgtcctgagatcagggtacgttgagccctgcacggcggcgttcatcgctatctccttgatttcctcggcttctttcgccctctccagcgttatcctcaggtcttcctcggctttctccctcggcgcgtccggtggcgtcggaatgtcaaggaaagtccctatgtcaacgcctatttcatgctgaaactcgacgatctccctgttggttacctcgacgccgccgtagcgcatgagctggaatgagcccgagtcaacctcgattatcccgtcgtagtcgagaagtttgtgaatccccacttcaagcgccttctccctaagctctggagtcttgtatattatataggagttcgtgattatcatcccaaagcccatctccttgagctccttcggcgttacgataagctgttttggattgatgacgggcattattgcgggggtttctacggttttcccgttgactgtgagctttccgatcctgccggaagcgtcgcgcgccttgacctcaaacctgaaatcgaccatttttctcacctaccttgaattggaaggggcctttaaaaaggttcaaatggaggagaacatgctaacgaggataaaagcgagaacaccggaagccgttggagcagtgacccagccgcgcagaatgcctttcagggcctttttgttgggcctctcgcccttatacaggctcacgcccgatattgcaccgacgatggcctgacctgagctgaccgggattccgaaaaggttggccagggtaacggccagggccgcgcccatctgggccgaaaacccggaagtcgggccgagaggggccaggtcccttcccaccgtcatcatgacctcgtagctgaacgtcagcgctccaactccgagggcaactgcgaggaggcccttaaccccagctcctccatctgccagtcctatcacgttggctagctcgtttgctcctaggttgaaggaggcgtaggccgaggcggtgaaggcgagccacttctgcgtcagctcaaggattttaatgtgctttatcctgttgaggaggtgcttgtacgggatgtacgtccccacggccagaactccagccagggcaggagacacaacccaggtgagaacgatctttccgataactggccagttcacgggaaggccctccgcgagggaagccccaatgagggcacctattatagcctgtgtggtggatattgggtttccccagaggctggccaatgttacagtgatagcggagctgaagaggactagtccaatggttactggttccatgcccctggctagcccgctcaccgtgttggatacacccgaaccgccgagaaaagcccctagaaacacgaagactccaatgaggagtacggccctcttaaagccgagtattccagagcccacggcggttccaacggcctttgcactgtcgttcgctcctattgcccacgccatgaagaccgctgtcgctatcagcatcataggcatccctatagtctattgtgtctatatagtttatgtagcacagaggagtgcattgtatttaaaaatctttctgataagctctgaaaatcagcattctgcagtgtgtcttcaggttaattaccggtagcttgggctacagctttccaagcacccatttggagtatccgtagaggtgcaatatcaggtagaaaaccgcccagaaccagagaacggcggggaatattaatgaggttgtaatacccccaccctcgacgagaacgggtatgagcattgtaagtgtctcaaaggcccaccagagcccaaaagcccaccagtaaccaaaaaccaacaggagaacaggaactacaatatcgaggattgctataaagtcacccagcagcaggaacccccattctttcgtgaggccacccccaaggttcctgaggtcaccaaggaaccacctcttcctctggcgccagagtgttctgatgtccttgggcatctccgtccacacccgagcttttggcgcgtagacgacccttccgagtttctttatggcctttgtcgtcgcgtagtcttcaaccgggtcttccacgaagccgccgatcctctcaagagccccctttctgaacgccgatatcggtccaggagcgacgctcaggtcttcaagctcctttgccctcctgaaggtcgctatcctcaggtgctcaacgtcctgcgctctctcaagaaacgagttcccgagaaccctcacctggccaccaactccaagaacgtcttccgagtaaaacctcctgacaagctctttgacggcgcttttctcaagcgcgctgtccgcgtcggtggtgactattatttctcccctcgctttggacagtccaaagttcagggcctttgacttcccgccgtgggcaatcctgaaaactttaagtctggggtctctgattgatgaagccacatcgtacgtgttatcttcgctcccgtcgtccacgaatatgacctcgaaatctggatagtcctgtgcgagagcggcctctattgcccttctacaccgttccccttcgttgtaggcgggaattattatggagaccctaggagtccggtctgtagttacataattcctgaaaaggctaattatgtaattaatgaagaagtagccgtcccagaggaaaacgatgaccagcgccgttaggaggagggtgtgcatgtatgagagttaaaataaggtcttttaatcgttacttaagctaagcaccggctttcttcccagcttgtatttcacgacgtagcggccgtgttcaaagtcatcttctactgccccaagaacctcaaccggttcaagctcaaggccgaactccatggcttcccattttatgtcgtcaaaatagtcgtaaagcccacaggtggcgcagaaggagccctcgaactctattatcacttcgtctccttcaatcgagagaatcctcgcgtttgcctcgctcccgtgaagcctgttgaactcggcgaggactttctctatcttctccctcacgtccatcttctcaccatgtctggttttgattcatcacttaaaaagtttgttagactaaccgaatagtttaaaaatctaagtccgagatggagaacgatgagcgggataaggtgggccgagagggagtacacggacgaggagatttattccatccttagcgagccggttagggagtggtttaagcggaagtttggaacattcaccccgccccagcgctacgccgtccttgaaatccataaaggtgagaacgttctcatttcatccccaacgggttctggaaagactctctcggcatttctctccgcaataaacgagctgattctccttggaaaggaaagcaagcttgaggataagatctacgtcctctacgtctcacccctccgcgccctgaacaatgatatcaagaggaacctggagggtccgctggcggagataaaggaagtggccaaagagctcggctatgaactgcctgagataagggtagggataaggacgagcgacacatcgagctatgagaagagcaagatggtaaaaaagccacctcacattctaataacaaccccagaaagtctcgccattgccttaaacgctcccaaattcagcgagaggctgaagacggttaagtacgtcatcattgacgaggttcacgcgctggccgagaacaagaggggttctcacctcgcgctgagcattgaaaggctccaggagatggccgagaacgagtttgtgagaatcggcttgagcgcaactattcacccgcttgaggaagtcgccaagttcgttttcggcttcaacgacgatggaactccaaggccgggcctcatagtggatgtatccttcgccaagcagactgagataaaagttgaaagtgttgtggaagacctcatttacaccgatgccggaacgctcagcgacgccctctacaaccgcttggcggaactcataagggagcacaggacgacgctcatcttcaccaacacgaggagcggcgccgagagggtggccttcaaccttaagaagcgctttcccgagtttgagggtctgatagaggcccatcactcttccctgtcgagagaggttcgcctggatgttgaggagaagctgaagaggggagagctgaaggctgttgtatgcgtctccggggattcaaaaatcctgactgggaaggggcccgtcgaaatagggcgtttgaactcaaacatgattgcaggtatttggagattccaaactgagcttgtcaggttcgaagagccccacagggtagaatacaggagagagggagtcaagataagaacgcggttgggattcgagataaaggcgacaaaggagcacaagttcctaaccgttgatgaaaatggagagctgagatgggttgaggcttggaaactcaaggaagggaactgggttggggtcgtgaggagactaccgagtccgaacgtaaaggtctcgatcttggacttactgcccccgaacgcataccttaagctcaagggggaatttttgagggagttaaagctttcaatacaggcaaaattcggctcaatacggacctatgctaagaaaaagaggtggagcgaatcttacttagtaaaacagcttaacggtgtctatccattccggtgggagcggctgagtgccgttttaaaagaccttgaccttagaatgacagaaaacgatgttgagaggataacttcagataaaggaaaatactcgcttcccattgagttcacaccaagtatggcaagactacttggcttctggatggcagacggctcgtggaaggggggcacgctaactctattctcgtctgacaggaaaatgcttgagaagtacaaagaactgtgcaaagaagaatttggagtggttggaagaataaggatgctgaacgagagtacttactccctggaaatttctttcaaccttcttccagccatctttaagaatctaacaggaaacactgaacggaagtcaaagcttggaacttttcccagtattatctattcgctacctgaagagcataagagggagttcctggccggctactttgatggggacggctttcttgaggtgaagggtggaagggtttattccgctggattttcgacgttcaataagagattcgccgagggcatacgggacatcctgcttcagttgggaatagtctcctcaataagggccagagaatacgacgaagttcaaaagtttaagggaagggtaatccccaagaaaggggcctcttacacagtctccgttctaggtggagaatacctgaagaggttcttcgatgctgttcgcccgtggaggtcagattatgaaggatgggaaggtatgtacaatgaggggtactcgaactccgatgtcgtacccaaccttggaaagcgcttgaggagcatacgtgagaggcttggaataagtgcataccgtatgagcaaaatgggcttctacaaccccgtaagggttgaactgggggagagggagataagcaggagaaacttgaggctccttgtagaattctacgaaagagtggcgaaagagaagagagttgaagatgttcttgaggagctatcttatttgagggaactggccgaaggggatgtgttctttgacaggataacctcggttgagcccgcctacattgatgttgcctacggcatcataaactctgaaactgaaaactacattgttgaaggatttatctcgaaaaacagctcgacaagcttggagttaggtattgacatcggtacaattgatctcgtcgttctcatcggctcaccaaagagcgttaacagggccctgcagagaatcggtagggccggccacaggctccacgatgtgagcaagggcgttatccttgccctcgacagggacgacctcgttgaggttactgttttagctcacaacgcgaggaatagaagattagacagggtcagaatcccgaaaaacccgctcgacgttctcgtccagcacatagtcggtatggccctctacaaggtctgggaggtcgaagaggcctaccgcctggttagaagggcctatcccttccacgagcttccctttgaggacttcatgagcgtcctgaagtacctttcaggtggctatgagggacttgaagacagaaaggtctacgccaagatatggctcgaggacgggaagttcggaaggcgcggcaagatgacgagggctatctactacatgaacgttggcactattccagacgaggcaaagataagggtttacacgatggacaagcagatgattggaaccgttgaggaggagttcgccgagaggctgatgccaggggacatctttgtcttggctggaagaacctacgagttcatcaagagcaggggaaacaagatatacgtcgtcccgcgcgagggggcgaagcccaccatcccagcctggttctccgagatgctcccgctgagctttgatttagccctcgacgttcagcgcttcaggagggaagtgaaggagctgttgaacaaaaaacgggccaagtcccttctcatgaggaagtacggaatagacgagagggcagccaaggccataatagcctacttccgcgagcaggagaggtattcaacagtccccgacgacgagacggttctcgttgaggaggtcgagaaggagaacacttacgagtacttcttccacacgctgataggaagacgggccaacgacgccctcagcagggccttcgcctacgccgtcggaaggcggaagggggtaaacgtcggcatagccctcaacgacaacggcttcctccttagagttccgaaagaagccaggctgagcgaggctgaaatcagggaactcttccagctggaagacctgagggagattctcaagagggctctcgacaacacggagcttttgaagaggcgcttcaggcacgtggcgaacaggggcttcctgatcttgaggaggtatgtgggggggagcaagcgcctcggcagacagcaggtcatagcggtttcgctcctcaaagtcctcaaggagcactaccctgacttcccgctcctgaaggaggtttacagggagatcatggaggacaagatggacgttgagaacgccgaactgttcctgagctgggtgcgggaggggaagatcaaggtcgtcttcgagaggaacgagcttccgagtccgttcgccttcaacctcgaggcgataggttcgagcgatgtcgttctgatggaggacaggagggagatgataaaggccctctaccggaagataatggccctaataggggagaacgccacctgatttggctttttttagcctttcaaaacgcttaagacggtccaatgatttttctgactttatttgctttgccggtgtaaaaatgtgttcctggttacaccacttttcaccgccggtgaaaacaagccttaagtattttacagtcataaaattgtcgggtggtagcatgaaggtgaaagtcgggataaacggttacgggacaatcgggaagagggttgcttacgccgtttccaagcaggacgacatggagctcatcggcgtaaccaagacgaagcccgacttcgaggcctatctagcaagggaaaggggcattcctgtctatgccgcgagcgaggagttcctcccgcgctttgagaaggccggttttgaggttgcaggaacgctcagcgaccttctggagaatgttgacgtaatcgttgatgccacaccgggtggaatgggtgcaaagaacaaggccctctacgagaaggcaggcgttaaggcgatcttccagggcggtgagaaggcagaggttgctcaggtatcattcgtggcccaagccaactacgagaaggccctcggaaaggactacgtcagggtcgtctcctgcaacacgactggattgacgaggacgctctcagcccttcaggagtacatcgactacgtctacgccgtcatgatacgccgcgcagctgacccaaacgactcgaaaagaggcccagtcaacgcaataactccgagtgtaaccgtcccatctcaccacgggcctgacgtccagacggttattccgataaacatcgagacgatggccttcgtcgtgcccactaccctcatgcacgtccacagcgtcatgattgaactcaagaagccgataacgagggaagatgtgatagatatctttgagaacaccaccagagttctcctctttgagaaggagaggggctttgagagcacggcccagctcatagagttcgcaagggatctccaccgcgagtggaacaacctctacgagatagcagtctggaaggagagcataagcgtgaagggcaacaggctcttctacatccaggccgttcaccaggagagcgacgtcgtgccagagaacgtggatgccataagggccatgttcgagatggcggacaagtgggagagcataaggaagacgaacaagagccttggaattctgaagtgatttcagaaacgtctttaaacctgcccccaatttatttttgatggaaatggaagccgaagagtaccttctcctgctcgggctggcactggcagttcttgcccttatttatcccgggcagacgttaagcggggaattctgcgagggatctcacgaaaagcttggggactactacgtcagcgtctcgggcggtttcctgcgggtatcggccgtgagcggggatgtattcatcgcccacggccagaacgttattctgaggagggcaccgattgagtactcgtatctaccggacagcaggtgctacacagtcaaaatcaggtacaagggagggacttccctctacgctttcgccggcgggattgcccttgctggcggggccttcttttacatggcctttctgaagtaccgctgagtctatctttctttaaaaaaggtcttcatatcaacaaaactacccagcaaaagaaataagaaatggataaataccaccgaggccaacatgagatggtggtgacatgtcagtatcaaatacgccagaagaatgggcgtcagcattcccttcaaggcgtgatctaaaagagaggctcgagttcatccgcctctatgtcttcaggctcaagcagaacccggacgaggttttcagagagcaggttaagctcatcaactccctcctcaagtcgtcgaagagctttccgctatcaagagagaagtacctccgccttaagggggagctgagggtcaagaaaggctaaacccccagcttcttcctaacttcctcaacgctcaaccccttaaccagcaaatccttctccctgctcgtctctcccctgactatgttgacttccgctccgaggagtttcgagaagaacttcacgacttccttgttggccttgccctcaactggcggagccgctatcctgaccttcagccttccgcgccacccgtctaccccttcaatcgcgttcttctttgcctttggctggacgtaaatcattatcaggactccctctttagtctccttgatgaacttcatatcaatccctccactcgtacttccagactatttcctgcgggaattcaccccgcttaagcttttcgagtatctcatttgccaccgaatatgcaaaatcgaaagttttcttgtctatcagcctgtagttcagcgccatctcaagctcatcctcgtcgaggagaaaagcttccccgctcgggaagacgaagatatctaagaacaggtcgagcatctctatcgtgtctccataacgctttgtataagccagaacatcaacgtaaagccccttgaagtatcctttctcatcgtaaactttgaggatgtcgtagtttctcccgatgaatgcaaagtacaccatcttatagccgttgtctacgaccttaacgccgtttacgaagaggggcgccagcatgcctgagaactccgattttgcaacgactacgtccccaatgtcagcgagaacttcgtcttctctctcaagcactctgtttggaatgcgtttgtagatgaggtggatttttgaactcatgtttaaaggaggattcaaaataattaaaacgatttttgttcccatgcaataaattttgacttgtccctccagaggtaccccctcaaaaaagggctatggggaagtcccctcaagttccctttctatcgttgatatttcctcatcgaggacgtctctgatcctcttcaggagctctaagtactccatgatcgtttccctgcgcatctgcctagtctttccaatctcttcaagctttttcttcagggcttcatggtactcaacggccgtgtagagtatcctgagggtgaggttgttggaggtcttgaggtactcccatcctttatcggtgagcctgtacttaacgcgcctcaccctacccctgtactcctccctcggttctagaaggccttcctcaaccatcttgttcaggatcgtgtagaggttgctgtggctgggcttccagaggcctattgcgagcttttcgagctcctttaggatttcatagccgtgggcttctcccttaaggccgacgatgaccaagatgatgtccttcagcggcaccgtgaatagactctttattatcctcctctcaacgtcggtctttctctccattggtatcaccgttgcccaaatatttgaccaaaacccttataaatgcttctcctgacgacatgtcgaaatttaacatgtttgaaaacttcatgttgataagcgtcatggatggtggtggaaatggcctggaacgactggattgtgaagcacgcgaaggcgctcgttgtgctctggatcctggtggtgatcctcacggcaccatttgcagcaaagctgagcgacctcacaaactacagcaccgaccagttcctgccgaaggacgttgagtcggtcaagaccatggacacactggagaaggagttcccgagcttcaccacgagtgagaaccagacttacatgatcatacacggaatcgacgttaacgacccaaaaacgagggatgcctacgagaggtttaaggttgaggccaagccctacggcgacaacttcacctcgtactacgatgcgctcgatattctccagaatgaatcttacaatataactctgaacataacaaagacagccgctaacttgagcggaatactctacgattctgccgtaaacgggagcgacacatacaggatgctcctcctcggtattgaaaacttgacaaaccaagtgaggctccttaacgagaccctcccagagctggccgatgcctatctcaagcttgagaccaacctgactatcctgtacaaccaaactctcgagctcaagggagcgctcaatgaaactgatatggcttacgttcagctccaccagaatttgaccaaagccagcacacagctgaaggagctgaactcaaccatagccatgctgaacattaagctttacaacctcagcgagtcttatgctaaggcctaccttggggccatgggagtttatgaagccctgtcagccaagacgaacgcatatcagacctgcaacctcgacccacagacggctcaggccgttgccgctcagctcggcgttcccgttgagttcgtctatgcggtcttcaacgcgacgtattccgcttatcacacctacggaccgagcgcaataacggatgaactcctagccaacgttacaggcgggataatttcaaataccctcacctattcgcttgagaagagcctcgttaaggcgtactcctacgccttctattccggagtcattgcctttgacaggacacacggaagcaactacactctattggaaagtggtgagaacgctgaagctgcagtcattgagatagctgaaaacgcccttcagggcactccagaggtcgttgcaagggccggcggaacctacgccgtccctggattcggagaggtttccgcaaaggtgctggcaaaggttcttaacgttgcagtaggactgggaagaaacccgacagcgggggccgttgaagatgccacagttgaggttgctaaggccatcctggatggaagtcctctgctatcgctccctaacgccgactacgtcctaaaaaccctcctcgtgagtggcccgacgaaggaacttgaggagagcatcctcgccaatgcgctggccgaaaagctctctgaagaccagaggaagatggccgagccggtagctaaaacagtcacaaccttcgacccaatggctgagggagtactctcccagaactccagcgccctgaaagaggcaaccgtttccctcctaagcgagatattgagggagaagggtgttgaacttccgaatgacgttctggcaaaggtctacgactcaaacggcaacgtcgggcctatagccaaagagatactcgtcaaagagaccgcaaggcagtgaaggacgaacgaagagccagagacaatagtcagcgttgctatccagcatgccgatgagcttgcaaagggtgagaacgttaaggaagccgttaaagaggtcatcataaagctcgctggcaatctgccgattgacgttgagagggttgtcgatgagatatactcaggcaagagtgccagtgagatagcgctggagctttacagggaaggagttgacgagaagctcgacgatgtagacgccccaaaagaggtgaaagacgccctcagagaggttctcctggcggtcgccgagaactatccaatgagcgaaaccgaaattgaagagctgacgaaggagaaagtggctgagctcgttgaagaattcatgaaagacaccgaaagcaaactcggaatgaggattgacccggctaaactcgcagagatagcgttcaaattcaaagacaacccagaagggatggacagggaagacgttgcacccgtcgagaaggacgtctacacagccctctacaacaaggccaaactctacatcaacatgctcaagagcgacgacaacaggactatgctggttatcttcgtacccaaggctctcaaaggggttaacgacctcgaaaagcagagcaagttccagtacgagaactcgataaaggccaaggaggtcgccctgaaggagttcggaaagctctcgccttctgttgaggtatatgtaacgggaactccgatccagacctacgaggcaatcaagtacggaaaggaggacaacgacaagaccaccaagttcagcatcgcaggagcgttcatagtcctcctcattcttatgggagtggcctttctggcgactctactccctttcactggcgtcgcaacggccacactcacggcccttggaatcctctacctcctggcaaagggtgacatactggatgtcggcagctgggcgcagatgctcaccgtaacgaccgctctcggccttggaattgactactcgacctactacctccacaggtttagggaatacctcgctgagggctacgaccacaacaaggccgcgagcgaggccctcaagagggcaaaggacgccgttctggcgagcgcttcaaccgacatcatagccttcgccagcttcgtccttgcctacgagttcccgatattcaagacaatgggtatcatagcccctctcgcggtgatagtcgtcctcctggcgagcttaaccttcatcccgtcaataaccgttctcatcggtgacaagccgatcttctggtggccaagacacatcgagcaccaccttgagaacatcgacctccacgagagaagcaggatagcggagtgggccgtgaagcacgccaaagtcgtaacaattatagccctcctcatagcggttcccgctgcttacaacttcgtaaacttcaatggaacccatgacatcaagctattcatcccgaaggacagcgagacctatcacttcctccagctcagcgaggacaccgttggagcgggagttacctccccgacctatgtcgtcatcgaccttgggcataaggtaagcgactctgatctggcgaggataaacgagctggttgacaggatatcaaaggtcagcggcgtcaggtacgtctacaccatcacccagccgttcggagagagaattgacaacgcgaccctggatgagctcacgaagttcgagggagaccgctacatctcaaaggacaggcacaaggtcctcattcaggtgacgggtgagtacggagcaaccgacgaccgctcgaaggacatggttagggagattaggagcatcgttgaggacgagaaggactcgagaaaaatagctgacggaatggtcggaggaaacaccgccttggcccttgacctcagcaacctcatcaacgacgtcttctggcacaggatattccctgtggcgctgctcctgatgttcctgtcgctaatcccgacgctcaagggacttccagcggtcataacgaccatgggtacaatagcggcaggcgtgctcctcagcatcggtgtctccagctggctcttcgagaaggtctttggacagcaggtcatgtggttcctgcccatgctggtcttcatagtgctcatgggagtcggcattgactacaacagcttctatctagttaaggccagggacgagttcgagcgcaggaagcccgaggaggccctgatagtcgccgctggaaccatggataccctcgtcgttggccttgcggcagtgctcgcggccacctacggctccctgatgacaggggcgacgtggggcataagggagataggctttgccctcgccctcggagtgctccttacggcgacggcagtggtctacttcatcgggccagcaaccatggccctcttcggagagaaggcctggtggccgctgttcaataacagggaaaaagtgtctccgaggagaagaaagtaatttgatcgttatgatttttatttatctttttggttctttataaaatactcttctcgtaactatatatcaaaagtaaaatttttaaatagagacccatggatatacctactggtgaagtttatgagattattaaagttaatcggattaaaaattaggaactataggtccattaaagagcttcctttaaacgatgaatacttaatggttgaaaattttgtcacgataatcggaaaaaatgatgctgggaaatcaaatattttgaacgcaattaggatagttctagaagaggataaagtaaccaaagatgattttcataagggtaccaatgaaaacattgaaatttcattgatatttgatgccacagaaaatacggagattatgcatatcataaaccatgattctaatgaaactgcaaagggactgggggcatttttcagtagatataacaacaagagttctacaaatactaaaataaaaataaaaaagatttttgaaaaagataaacttaattcacgaaattataaaggagatactattgtagaatattttgatgaggataagaacaaatgggttaaaattaaagataaaaaactcattaataccatattaaatgatcttccagaggtcatttacattccggctattagagatgcaattgcagaaacaactcaaaaatctggttttttaatgtcaaagcttcttttgccacttttagaaaaacaaaataaaagcaattctaatgaagaaaatggaaaagaaaagcagagaagtataacagagctaaagaaagaattgcaaaatctgattagcagagagtctaagaagctcactaaaaaaattttgaaggaattaactgtattcaatagttcaattgaagagataaaaattgagcctaataaagttcaaattaactttagtcctaaaatacaaatcaaagataaatacttgccagatagtgttcctctcgagcaaaggggagctggattgagaagtgaatttctcttggcaatgttcagaatatgggcagaagtcggtgcaggaaaaggttatatacttctatttgaagagccagagctatatttacatcccgaagctcagaaaaaaatgttctctgcattaaaacgcataagcaatgaggctcaagttttgataacaacccattcaacaatatttgtggacagaagtgatttaaagtcaatatggcttatacgaagagagaatggggagacaaagattacaacattcgaaaagcctaaggtattatctgagatccttgaagaaattggggcaactcccagtgatctgtttttatccaatggggtcatatacgtcgaaggaaaaacagagattaaggtatttagtaaaattgcaaaggctatatgccccaagtgggaagagtacaatatttcaattgttagtttaggaggaggcaacatccgagatttatccgaaacgctgttattcaatggtcttgcttcactaaatccgaatggagttgttgtaattgattcagatggagagcaagaagataagaagagtggaggttgtaaaccaaaacctgaaaagcttaagataaaagaaaacttcgagcaatatgggctcacggttcatatccttcaaagaagagagattgaaaactacattcctcttaatattcttgaaaagtatttcatagagggatacattaaatcgaaatatataaccaaaattggggatcagcagcttaaagtcaacaaaattaagagtaaagagtatttcaaaaaacaatatctcaaatatttcaaaagaatggagtctaatttgagagagatagagagaaaacaaaacatgattagggcaataaatagagtatcaccctgtgaggacatccttaagaagattgacgagctcttatatactaaaaaacataaaaaatgggatcgcaaaaaagccgaaataactcccaaattatttgaaatgatgatcaaagagaaaaaagctccacttgagtttaaagagatactagaagaggcaataagaaaatgcggatttgagccagaatttagcgacgaatttgagtacatttaatgtttttagttcaatatccttttaaacgctgaattttagcttttaacatgaacatctacgagatgctcgcgctcatagcattcggatacgttctcaagcgtctgtttaagtctgagaagccctttgactacatccgaatcctcacaaacgacattcttctggccttcttcgtcttcggcaacgtcgcgagcaaggatttgggatacttactcagcataaagacggttttcatctacgtctttctcgtaataggcataagtcttggctcctcttacctctacggcaggttcgttctcaaaaacgacccctgggctggtgcactcatggttctctcggtttacccgaacaccgcggccctaggcttcccgatagcgagcctcttcttggacgacataacccccgcaattctctactcaacaaccaacagcctcatcgtaatcccgatagtgacgttcatagcggcccactactccagcggcggtgcttcactaaggaggagcatcgaaaaggccctgaagttcccgccgacagtcgccaacctgcttgccctcgcccttgtgatagctggaatccgccttccgggctggatcatcgagcccattaagacgatcggctggtggagcatcccgctcctgataatctacttcggctcgcggataaccctcagcaggttcgagctcaggaagttcctcgaagtgggggcctttaggatagcgattccattcatcttcgtcttcctcaccctcaggaacgccagcccagaggttttctactcggttctggtcgaggccagcatgccgccggcgatagccgccaatgcgattcttgcacagtaccagctgaaggctgaggaggcaataagcgttacctttgtccttactctcatcgttatcggcctcttcatggccttaaaggctcttctctgaccgatgcctttttagtccttcgatggatttttgaacggtgataacatggagcgcgtcgttgagattctgaaggagatacttgagataccgtccccaacaggctacacaagggaagttatggagcacattgagaaaaagcttaccgaggcagggattaagacctactacaccaacaagggcgccctgatagcgggcaaccaccccgagcctgaactcgtgattgcggcacacgttgacactctaggtgcgatggtaaagggcatcctccccgacggacatctgagcttcacgagaataggcggccttctccttcctgccttcgagggggagtactgcacgataatcacccgctcaggaaagcgctaccgcgggacgctcctcctcaagaacccgagcgttcacgtgaacaaagaggcaggaaagaaggagagaacagaggagaacatgtacatccgcctcgatgcagaggtggagaagaaagaagacactgaaaagctcggcataaggcccggcgacttcattgccttcgacccgaagttcgagtacgtgaacggcttcgtcaaggcccacttcttggacgacaaggcgagcgtggcagtgctaattgacctcatgctcgaccttagtcagacccttgaaaagctcccggttgcgttcttcttctcgccgtacgaggaggtcggccacggcggttcggcaggctatcccaagagcacgaaggaactcctagtcgttgatatgggagtagttggcgaaggcgtggctggaaaggagacggccgtctcaatagcggccaaagattcgagcggcccctacgactacgagatgacgaccaaactaatcgaacttgccgagaagaggggaatcccttacaccgtggacgtcttcccatactacggctcggacgggagcgcggccttgagggctggctgggacttcagggttgccctcatcggccagggagtccacgccagccacggcatggagagaacacacgttaagggaatgctcgccacgaaggagctgataagggcatacatcgaggagaagttcctctgattggtctttccaaatttttatcacatttgccgaaaagcttaaattgattctcaacagaatcattctcatgagaattattcccagaagaattgaaatgaaaaccctaagatatccaggctggaagatgctctacggccgcagaaaaacagggaagagctttatagcaagcaggttcttagatcacgacctctattactttgtacagcgagatggagccatccttgagaggaggagtggtgcaaggttatcatatcaggaactgctgaaagagctatccaagaaccttggggagaaaacaatcgttattgatgagttccatagactccctgaggacttcctcgatttcctgcacgcaaacgctgggagaagtgaaaaggatctggttctcctcacgtcaacgctctggctctcactgcggcttctctccaaaaaggaaagtcccttacttggggtagtgctgccgataaaaatcggacttattgacgagagagaagttatcatcgagctttcaaaggaagtgagtggaaaagagcttgtggaagcttccacgtatcttagagaacctatgcttgttcccctttacaagccaccactgagggagttcatggctcaatacctgtactcatcagggccggtcgttgaagatttaatcggcgaggctttcactgaagaagaaatcctgttttctgaggtttatcgagcgattctccacgcagtagcggatggaaagtccaagagcggcgagatagcgagctacctggtgtcccagggacttcttgactcgccctcaagcatccagaagtacctcaaagttctctccacaatggacatcatacggaaagttcccatcttccgaaaacgcaggaggttcagttactccatagcatcccccctgctggatttgcacttctacctcagctccaagtacgcgtacaccgagctggaaaccccacttgagttcataaggagtgccgttaatgagaaagtcccgagacacgttgaaaaatacatcgagagcctgctgggaaaggtatacgggctcagaccagttagaatcgaagaacctgaccttgaagtggacatagcccttcagggcttcaagcgtcttgagctagtgggggaagtgaaatggaagagcagggtaaagagagaggaagtttggaaaatcgaggaaaagctttcaaggttcaactgtagaaaagtgctcgtcgttcccgatgaaagcgtccttgagtcagagccaaaaaccgttgaagtgctcaccccagaggatctcttgactctcgcccagaaaagcctgagaaaggagctcggggaagaatgaagctttctcactcccccatcagcttctctatcagctttgccttctcctgggccttgcggagatgttccactgttaccttggtgtatatctgggtagttgagaggttcgagtggccgagaagctcctgtatggcccttatatccaccccttcctcaagtaggtgagtcgcgaagctgtggcggagcttgtgtggcgttacctcaaccccagctttctggccgtagcgcttgaggaggtaccacacgttccttgttgagagcttatccttcctccttcttctgtcctcgacgaggaggtattcgctctcatcggagcggctctcgaggtaggcccttatctcgtcggcgaggtacttcgggattggcacgaccctgtccttcgctccctttccgccccttaccactattagccctctgtcgaggtcaacgtcgtcctttttgaggttgcacagctcgctaacgcgcaatccagcgccgtagaggagaagaacaatgagcctgtctctcttccttgttggcggtataacagagagaagccgcttaacctcctccctagtgagtgctttcggcaggctcctcgggactttgggaggcttcagcctctcggcttcatcgtcaaggccctcaaaccgaaagtaggccctcaacgcctggacgacgaggttgaggctcctgttagagtagccgtttttcctcagatgggcaagaaatcggagggcggagtgggcgttcagatcgccgccccactcaaggtatcgcctaacgtagtaagtgtacatcctgatggtatgggggcttttaccctcaaggtccagataggtctcgaactcctcaatgacctcgttcggctcactcattgtccatacccttcaggagcctctccagctcttctggcttcacctcggggttctcaactatgttctcggtttccggctccacgggttttggctctgcaggataaacccttggctccgctttgggcttttcgctttcaagctcatccttgaccgcgaggctgaggtaaacagtcttgaggagctcttctatcagggcatcctcctcggcaaagatgtagccttggccgactattatctttccgttaaggccgagcttctcgactgccagtgcgagaatcttttcgtcgggtacgggctctgccgggaagaggttcttccaggcgtcctctatcttcactggcctggccctcttttcgaggagctctttaaggccctcgttctcgctggccagcctcttatactccgagtagagttcatcgtacttcttctgaagctcttcgtgctccttgtagagggcctcgtactcgttggcaagctcgtcgtacttgcctttgatgtcgaggagctgcttcctgagctccatgtactcaggaagaacctggagactcttgagacccgcccttaccagggtgtttttgagttccttcctgactagctcaacatcaacgtgctcaaggtcgtggccgagcgggagcttcattctctcaatgtggccgaccatctcaccgagctcgttgaagagcctctcggcaagctctcttcctaccctgtccgcgtcggtcgctatgataagcaggtccgcgccggccgcagcgctcttcgctatctcaacgttggtagtcgggattatcgctgatatagtgatgttgtactcgcttccaagggcgagcccctggagggccttgcttacgacctctacgtcgcttgcaccctctaccagaatccttacgtcaactattgccatctttaccacctaaactcatcttggacatcgggtttaaaaccgttctcatacttcaacctcaagctcgggcctttcgaggacgatttttccatcgggcaggagtgagatgctgagggcgtggatttcaacgcccgcttttctggcccctttgaggagcctcgctatctcggggtcgcctttctcgtaaggcctgaacttttcaacacctggcattgcgccgatgaagaatatcatggccctctttccagctttcgacagctcgatgagctcccttatgtgtctctgccccctcgttgatggacagtcagggtacattgcatattcccctttctcaccgccccttaggacggcactcttcatctcggcgtagacatcaccgccgggacattcaaagaggtagtcgaggcgggagcttccgactttgatctccttcttctttatggaacagtccctgagccaggggacgagacctagctcaagggccctctcaaaggctcttgcctgcgttctggtgtcgatcactgctcctttgccctcttcatcttcgaatgcgactaaaacaaagtcagtcttccccccttccttcggaacgcagaaggcttttctgccagggatcatgaactcttctaatcttccagtgttcgttaccaatgctttcctggtctcaccgtttacctcgactagagcaacgaagcggttgagacgcttaaggaacgtgcatggaacgacgtttagggtgagcagtacgggcttcgccatgagtaaacctacaccgaaagacgtttttaaaccttggtggcaaaaaggaacggtggttcaatgatacccgaggagttcatcaaatacgccttcgaggagagggttgcttgaataagaaagctcgcagaggggaagttcgacccctcggttttgctcggcttcacgcggcacaacccggcaataataacctgcggcaaagcagggccgaacgggtcaatcaagggtattggcttcattcacaaggaggaatatttagaagagaccctccagaagctccgtgaggagctgaaaaagccctacaaccccagagatgctctcaactttctcctcaacgagatatatgtgagggagaaaatagacttcaccaagctggtatcccttgagctggctaaaaagcacacgtggacaaacatcacgggaggaagcagcgaggcaacggtgctcttcttcacgcccccgagcacctcctatgaggttcggtgcgaggtcgaggtgcacgaggacgacgaggtgtgggagtacacaaacgccgtccacgacgtctttcacaggccaaagaaaccgagggactggagcaagacgcccgcttatcttttcaaaatcaaggagatttacgacaatggggagaaggcgatgggtgtgaggatctacccataattgttagggtaggggaagggtaataacctcaaacttttatccggtcactggataatccagcaggtggataatatttgaagcctcataactaggacacgacgcgtctgtcctcgtggcaagggacttcaggagaaagtgcgacgactgcctaaccatcgaggaactgctctcccacctaaacccttaaatatcccgggcgttacttttagatggaaatctaaacggaaggtgatgggaatggtcgactacgaactgctcaagaagatagttgaggcccctggtgtttcgggttttgagtttctcggcgtcagggacgtcgttatagaggccttcaagccctacgtggacgagataaaggttgacaagctcggcaacgtcatagcccacaagaagggcaacggcccaaaggttatgctcgcggcacacatggatcagatcggcctcatggtgaaccacatcgagaagaacggcttcctccgcgtcgtcccggtcggcggcgttgacccgaggactctcatagcccagcgcttcaaggtctggattgacaaggataagttcatctacggtgtcggcggaagcgttcctccgcacatccagaagcccgaggagaggagcaaggctcccacctgggaccaggtcttcattgacatcggcgccgagagcaaggaagaggccgaggagatgggtgtcagagtgggaaccataatcacctgggacggcagacttgagaggctcggaaagcacaggctcgtcagcatagccttcgacgacaggatagctgtttatactctcgttaaagccgcccaggagcttggcgagaccgatgcggacatctacttcgtcgccaccgtccaggaagaggtcggactcaggggtgcgagggtctcggccttcggcatcgacccggactacggcttcgccattgacgttaccatagcggccgacgtccctggaacgccggagcacaagcaggtcacccagctcggaaagggtaccgcaatcaagataatggaccgctcggtcatctgccatccaacgatcgtccgctggatggaggagctcgccaagaagtacgagataccctaccagtgggacattctcctcggcggcggaactgacgcaggggccattcacctcaacaaatccggtgttccgaccggagccatcagcgttccggcgcgctacatccactccaacgcagaggtcgttgatgagcgcgatgttgacgctggagtcaagctgatggtcaaggttctggagcacatcggagagcttgagctttgattccttacgttcttcccaaatttttataagcaatctctttgagtcttgattttgatatggaatcaggaatattcaaagtcccggccagattttcatgggaggccctgaagaggataacatcaaggccagacgtccttatagcttccctgccgtttcccgggtcgcttgatggaaaaactgtctcaatacgcctccctgggaaggtgttcggtttcgcattctcaggaagctttgagatgacgtacgccgataacactacaacttacataatgaagtcccctctggggcttctaatagtcaccatccagcttgatgggggttttctggtttctagggcttcggccgatctagatgagaggtttctaaagaaaagctcctcaaaattgcggagggctttgggaggactgccctggcgttttctgagagctacgagagagttataccaaaaataaggcaggaacacggcaagatcgtagtatctgacctgaaacctggagatctgattcatctggccagatacgtccgtttctttggaggaaaagacacttttgagatcgttggaacagggaagggggaaatcaagattaaagtgaaaggcggaaatctcgaagggatcgagttcagagaagatgggagtctggcaatagtggaaatcaaaaaaccccttctcggcgtttcggaggatgaactttcagacctcggcatcggaggaagatacatcttcaaagttctctgggactgagttttcgggatgaacctcggcgatcccctgacttcttccatcaaagagcacattcctgttcctccacagctcgaaggccagaaacgtggcccccatgaggacaccgaggattatgtagggcgttttactcggaagtggcagaccgcggtgccagttgtggagcaggtagttctggtagaggaacaaatagccgagccacgctattagcactgcctccacgatgtactctgctatttttccccaccgctcttccatgcccatcacggcaaaggttaaaacgggccggttaaaaccctttcccatgagtgagtactttccctacgagaacctcagacctaaccagagggagttcatagaactcatcggcgaggccgtcaagaacggcgagaacgcgatagtcgaagctccaacgggctttggaaagacgatcagcgttcttgctggagttctccccttcgccaaggagtacggctacaaggttctctatcttgccagaacccacaggcagatggacagggttattgaagagctgaaagccatccatcgaaaaaagcccgtttctggcgtcgagcttaggagcaggaaggagctgtgccttcacacctacctcaaacagttcaccaccgatgcatacaacgccatggtcgtctgtaaaaacctgaagaagctcgggaagtgccccttctatgagaacgagaagaagaaaaaggccgagtttgaggaagtcatacggtttttcctgaccgaaccgagccatccggctgagatcctcaactacgccgagacgcttgagctgtgtccctacgacctcaccaagagaatagcggagaaagccgacgtaatagtggccagctacctctacgccctaagtccaagcataagggagagcctgataagctccctcggcgttgattactccgaccttattgtcatctttgacgaggctcacaacctcccagaccaggcaatctcggcattgagcgacaggttgagcatacacacgataaacagggcaataaaggaggccgacgagtacagggagcacgagatagctaacttcctgagcattctcgggaaggggcttgagaagctgtactcggaaaagctggccgagagagacgtcgaagaagcccctgtacagcccgagctggtctttacccatgttattgaaattctggggataaacgaacgctggctcgttaagacgctcaacgagatggtttcggttggggatgccataagggaggaccgcatagagaaaggtaaacccccgaggagctacgttggtagggtcggagagttcctcctgctgtggctctccctcatcggtagagacgactacctcttcctgatgacgcgggagaagggtatgagccttgagctcgttgccctcgacccgtcacgggcgctgtccttcataaaagacgttcagagcgcgatatttatgtccggaactctcacgccgcttgaggccttcagggacgttatgggcattgaaaacgccaggatgaagaagttcccgaggatggtgaagagggagaacgctcaggtgctggttgccaaggacgtctcgacgaggggagacgagcgctccctccaggcttacaggaaaatggtcgactacatagttgaagcggtaaagctcattcccaagaacgtcggcgtctttacggcctcctacgaggttctccagggccttctctcggcaaatctcgacgtaaagctcgaggaaactgggagggcagttttcatagaacagcagggtgtctcttcgagggaaaacgacctcatgatagcccagttcaaggcccacgcgaagggaaacggcgccgttctgctcggcgtgatggggggaagaaacagcgagggacaggattattctggcgacgagatgaacggcgttgtcctcgtcggaatcccctatgcgaggccgacgccgagggttcaggcccagataaggtacttcgagaagaagttccctggaaagggtcgctactatggctattaccttccagctcacagaaagctcgtccaggcagctgggagggttcaccgctccgctgaagagaaggggagcatcgtaatcctcgactaccgcgtactctggaggagcataaggaaggatctgcccgactggatgaaggaaactatgaagccagtaactctcccgacgatgagactctacctcaaaaggttctggtctaacggacggtgaactccttctccaccctgaccctcgccccgttcacgtaggcgtgcttgactaccatgtacctgcccggtggaagctcaagggggagcttctgctcgatcgtctcacctggtatgagtacaatcatcttcctcaggaatacgatccctgggtcaagcttctgccagtagcctatgaactcgtaaagctcaacctcgttgtcgatctcgaccttcgtggtgtttgggtttgttatccagaggacaagctcgccttttcgctgcttgacttgtatctcaagctcgacctctggaggagaaccgtagggtataatcccaatgctgtcgttggaggggactttaattatcttcatcgggataagaatacacgcttttccagaaaaggttttcgcaagaaacagttggggtactcgggcaagcttcggaaggaaaaagtaatcagtgcatttgctctggtatcctaacattcagtctagagactgagtactagttaggggctttagaaaaagctccaccaaaagcttgaatgtcttcgagaattggcttaatgcagttagattctcttgattgatggacagagaagtgggggttttcttcctttttaacgcccttcgggtgatatgctgtgagtaaccctcttaaaattgcttattaagcgagaatctatcaaaagggagcgaggatgcaagacattaacttttcaaacaggtgagttagaagagtcatgaacatttcgtcatccgtttaggacgcttgaacattagtgaaagcggcgctgaaactttgctttgcaaagtttcatcaaagttcgtggttcttgattagaaggtggttctagggagattttcattcacaggaactcactgcatgagtgtgaattcaattttagtaagggttctcgatgtgagtttgctttttaatcgacgcccgtagggcgtcaaggggagaaaactccctttagaaggccaaaattgggaaattcattaatgtttagcttgagtattttgaaaatccttgtggtggagcaattctaagaagaaccacgagccttgatcaaactcaatggaactaccgttccgtgcgttgaagcggagcttcaacgtcgcgcaggaaacttttggaaaaagcttcaccaaaagtgctccctttcttttgactttcctgtcaaagagtgtattctctaccagaaagcaacttcacgcgggtttactctcaacatctcttgttaattgtgattttgactttctttttagtgccctttgggcactatattgtgagaaaatcctgctaaatcagcagattggtgcgtaaacccactcaaaagccagctcgctaaaaacgcatactactcttccgccagcgcttgcgaagcaagggctgaatggtgccggggcggggctttgaaccccggacctctcggtttctcaggctcccccgaaggggagcggccctatgagccgagcgctctgaccaggctaagctaccccggcacttcccgagcgctcgtcctatacctcaaggagggcatttttaaatctttcggcgtcaccagtagtcgccgtacgcgtactgccacgtgagccttctcctgatgacctttccgtagtagtagcctatcgcgatgcccgccagcaggcctccaaggtgggcgtatgcattgaccccaggaaggacgctgtttatcaggaacaggaaaaaggcgttcatcatggctgcctgcatatttccaccgacgacaccgcttatcgttatcaacgctccgactattccgaagagagcaccgctggctcccgcactgacggtcattgggggcttgaggaagagcgtcagaacgtttccaacaagcccagagacgatgtaagtcatcacaaccctcctcgggccgagaaccctttcaagctgtctccccatcgtcaggagaaagtacatattgaagaatatgtggattatgttgacgtgcacgaacatcgccgtgaagagctgccaccagtagccgtagttgagaaccgcgtagttccactgaccgaggagtgccaggacgctgccccttatgctcaggaagttcccgccgctcaaaactgcctcgacaacgtaaacggcgacgttgattagaaatagcgtgaaggttgcccgcccgtagcggtggaagtagtgctcaaggctcatccttcatcgcctccaggatggtgttcaggagcctctcgtttgcgacggctattatgttggtcttctccgttgcgctgagcttgacttcgaactcccttcccctttcgtccgttactattccgcccgcttccctcacaaggaggactccagctgcaacgtccgtcggcctaacgtagttccttatgtcaaagaccccatctaaggagcccctcgcaacgtaggcaagctccaccgctatcgccccgagcacgcggactcgcttcaccttcttcacgagaccgaggcatcttccccgggtatagaagctcagggcttccttccccggttcgggttcgttcacccttatcctctctccgttgaggtacgcacctttccctggctttgcttcatagaagttctcaggcaggaactcatagattgccccgtagacaggcttcttccccttgaagatccccaggctgaaggcgaagattggtatcccggccgagaagttgtaggaaccgtccagagggtcgacgacaacggtgtagtcactcccgctgtcaaccgtcccgacctcttcgctgacgacgtttactccgagagggacgagcctcttgagtattatgtcctcggcgaccttgtccacgtactttgttacgtctccgctcacgttagtcccaacgttctcgccggctttttttgtcccaaagagtggcattattttctcttcaagctccttggcggtatttagcgctatctcactccagttaaactccataatatcaccccagcaaggctataagcaggtttctcgtcccggggccgaagccgaggacgaatattgccagtttgacgaaatttatcagctcggggtcttcatcttccatcatcctgtcgagtatgtaaacgactggaatcaaaaccagcaatttttccagatacattactgcaggtgtgcccgttaggtctatgagcgtccttgcgaggacgtgctgctcccagaagccgaagaactgtatcccgacaaaggtcgtggtcgcgtcgtaaaagtgggtgtagaacagcactttgttgtcgactatcagtttgaacttctttgctagagcccagataaaggcctcggagacagcaaggctcgggatgaagtacttgaagtactcccatctgacagaaagcttcccccagttgattatgattatgaaaaccagccctcccacgagcacccagccgaagtcgcggtatatcgggtagagcctctcatccgggcccagatgtctccacaccgcaaagagggaagctatcgcaaaggccgctatgacgaagtagccgccggggctaactgtaaggtaagtcctcggaagcaggccctcatctgttatggccctcatcagcgggccgaggactatgtagggcatcagggagaggaaaaagcggtcgtctatccttattcccatcctcttaagtattcggtagaggaggagaaccattattccaaggattaccgcgtagacaagcgtgttaacagggttgtagccctggttgtattttatcggctcaacgaaatacctgtaaaaaaactccccaactcccattcgaccaccgtagggagtcttccgatagccttaaagcttttcccaccaatagtttttcggcgataaaaatggagagaaggattcatctcatgcagctcccaagggaggtactgctgggcgagaacctcacgggagaagttgttagcgttgccaagaggataggccttactggaaaggcactcgttatctacggcccaaaaacgaaggaaatagctggtagagatgtggaagatgcgataaaatctgcgtacgaggtgagctccctcaccatcagaaaaggcgcaacgatggaggaagtcgagagaacgattgaaaagatcaaggacgaaggcatcggctgggtgatagcagttggcggcgggagcataatagacgtcgccaagctctcttcattcaaaacgggcgttcccttcataagctttccaacaaccgcttcccacgacggcatagcgagtgcgaacgcttcaataaaggacctcggctcaaaaacgtccgtgaaggccgttccaccagttgcagtcattgccgacgtcaaggtcatcaaaacggcaccctaccgctacttagcggccggtgttggcgacactataagcaacttaacggctgtgagggactggcagcttgcccatagaatcaaaggtgaatactacagcgagtacgccgcatcactctcactcatgagtgccaagatggtaatgcggaacgccgatataatccgcctcggaaacgaggagtccgtcaggaaggtcatcaaggcgctcatctccacaggtgtggccatgagtatagccgggtcttcaagaccagcaagcggcgctgagcacctcttcagccacgccctagacatgctcctcgataagcccgcccttcacggcgagcagacgggcctcgggacgataatcatggcctacctgcacggtatgaagtgggagcgcgttagggaaaccttaaagagggtcggcgcacctacaaacgcatacgaacttgggatcgaccccgaggttataatcgaggcgctcaccatagcccacaccataaggcccgagcgctacaccatcctcggaaaggacggtttaactcgggaggccgctgaaaaggccgctaaaatcacaggagtgatatgatcatccatcaggaggtgttgaaagtggccataatcacgttagttggggaaaagctcgcaaaaccgggggttgagttcatattctacggtccggccgagccctgcaagacctgcaagctcgcgggcgtttgtgtcggcaaccttgagcctggaaggcgctacaagattctcagggtaaggagcatgccttcccactcctgcccgctgcacgagggaaaggtcagggtagtggaggtggtcgagccgagcatagaggtggcaatagagccgaggcttgcagtggtgggctcggtgataacgctgaagctcgaggactgccccgacctggacaaaagggatcttttcaagccggaggggctctttgacggggacagcgtgaagataatcgaaataactggggaagtcgagtgcaacggcaagacatacaagatagccaaggtcatgaggaagaaggagtgagtcttattttccattttctctgagaattctttaggaataaacgttccccctttttcctaccttcaggatcatcacaattcgctcttctttgttatactcaaatattacccgatactctccaacccggagtctgtagacattgtcgtatcctttcagtttttggacgtcaagctttacgagcggaaagaaagcgagtttggagattctgtcttttataatgtccctctgactttcggggacattcttgagttccttgagggctcttttgcttatgagaattctgttctcaaagctcatccttgaccacgtcccattccataaactcgtcctttctgcgcttttgaatttccttaatctcccattcctctggctcggactcttcaatgagctgaaggtttacttctatgagctctttgaggaacttctctatctcgtctatcttcctctgtatctcaaccagagtaacgctcacagttctcaccacaaaaagatttgtaaaaggacaaattaaattttcccttcagctccacgtctccgctatgacgtcgtgcttgtggatgctctcgttgctgatgaccctcacgtggattctgcccctgaagcgctccttggcctttgcgaatatctccctggccacgtcctcgacgaacttcgggttggcgaacattccctggacgacggcgttctcgtccacagtctttaggagcgtataggtcgggtggctgaaggagctttcgacgacgtctatcatctcctcaagtggaatctcttcctcaaagggtgcccttatctccagctcgccgatggccctctggatgtgggtcttgccgttgttgttcgccatggcgtgcggacaggccgtgtttcctatcaccctcaccctgagaaccttctcgaaggagccgtcctcattctttatgacgccgacctcgacgtcgtagggttcgtagctggtctttttactggccggagtggttctcggaattatcaggtgcgtcttgatccagacctcagctctcttatgcgggtgttttccttcgagcctctctatgacggactttccaagctcctctagggagctgtggacttttgccacttcctcctcgacagcttcgctcatggcttctgttatgctctccacgagcctgctcatgtggatgcccttcttctcggccggcacgtctatggttacctctatgagcggaaggaatgtgtactcccttcccttccagtttatcttggcgaccgtccttaggttcgttatgccgacccttcttagaggctctctgatttcgggaacttcttcctgtgtctcgacgaacattctctcacccgactggagtaggcctgcgggtttttaaacctctcccgaagagcagaggccgaggatgaaagacttcaggttttcggcggtgtcctcatcgataactaccgagttcttcctcagcaggatttcgtcccctatcatcgaaagctcgtacccgaagacccccaccctcgtcccgtcgaagaactcaaaggtatcctccgggcgcgcgctaaagaggtttggaatccagtggttgtaaattccctcgagccgcgggtagactaggagaactggaactctttttgcccccaaatactcgctgacaaggcgggagtacgtgtaggcctgataaagctcgtcgctcttcctaacgagttttctatgggccctattctctcctctgtgatacacgtagaggtttctgtattttacctcaacgacgcaggttccttcgtcggtgctgaccactatgtctggaagggggttgcccatcatgaagagtgcgccaaatctagcctcgatttcgcccgcgttttttatgacgtggggcagctgaacctggaatctcacctctgcttcgttgtcgaggacggtcttcagcgtcctgtaaacgagcgtctcaaaaagctcatccatcctgatgaacactcctggaaggaacttcctcgaacctcccgcggccagcccgaagtacatcacccgtgccagcctgaagaccgttctgaacctctcgttgaggtggttgaaggaaactttcccgaagtcgccgggttttgggtcacccacgtccctgaagaggtcgagaagtattcctccgactttcctcgtctcactcaggcgggcagactttacggcgacttccagggcaccctttagaaccctgttgaggggattgtcctcaagaaggagtgagtacctgacgggcaggtcggccttccatgctggcctccgggcgagttcatttacaaggattctgccgcggacggtctgggagctttcctcaatctccccgtattcgtagtagagtcctctggacagcgctctggagagcatgaggacgtagagatacttgaaaatttcgtccagcgccttctgcctgccgtattcaaacaccaaggccctaatttcgcccggctcaagacccatctggtagtacatattgaagagctgaaggaagaacagcagagagcggccgtcctccctgtcgtacctgaagggctttggcagtacctgcacaagcacaatcccgtcatcgcccaggtagtacgcaaaccccacactcccatgggtcttcaggtggtattcatcccttctcggatcgtaggtgactgtaaagaccggactgtcgccgccgtagagagaattcacagcctcggcgaacttcattagttctctttcccctgtctgaagcccgagtttcttcagttctgagagtggcctgttctcaaactcgtagagggttacgactctgaagtccatcatttctctgtcaccagcttgcggagggcttcaatgaactcgtcgtcgtccatctcgattatacgccctttctcgtctatgaacccgaaccccggcagggagcgccttattgcctcccagttgccgtagaagtattcctggagaagagggagtatcttgtagtagaagacgtccttgagtgcctttgccctctcctccggcttagcctttatgacctccctgaagtagccgtggcctatcgtgtagtccttcccgcgctcttcctcgataaccctgttgagcgtcgagaggaggtgctgaaggtttacaccgccgacttcgatatccccgagctcctcagggcggggcagtatctcaaggaacgcaaagcgcctcctgagggccatgtcaaggaaagctatgctcctgtccgtggagttcattgtcccgattatgtagaggttggggggaagggcgaagggctctctggaatacggcagggttatttttgtctcgtactccattccgagccttttatcgggatcgagtagggttatgacctcaccgaggatccttgagatgtttcctctgtttatctcatctattattaggtagaacttcccgcggggtttgaactcgccttttcctgtttgaaggtattcaaggacggcttcctttttcttcttgtaatcggcctctccctcgtccgggtggaggccgcggaaaatcgcctcgactgcaagcctctttaaaatgccgtcctcaacgacatagagcagtttgccctccttttcaacgggcctaaaaccttcaacgaagtcctcatagctgtacgactggtggaacgtaacgacctcaaccttatcggcatctcttgagagatccagggcaagcttcgtttttccggttccagggggtccgtagaggattacgccgccgaaccttctgagaacctcttcgagctgggtgaactggtcgtaagtaatgtccccctccccaggggcggcctgcgtggagacgtaagagtatagatagttcgaatccgggcgaacgtaatagtagaacctgccgctggcgcttacttttccagaggatttgcccagaacgagaacgtctccgctcctagatattcccgagaactttgggtcaaaggcttctgggttgtacctgccgaagactgttctgtccacaatgtcatccagttttagagagcccttttgaaggaggtcttcgtacgtgacaaagcccccgtacagatagcccctgaactggcctataagcaggaaaaggcccttttcggtgaacttcgtgaacacgagctctcccggcaggggaattatccgcgctttcttggatgtgaggatgtagagctccttcccgagcttcgtcccgaggaccgctattggctcgttgtccctcagtacgatgtcccctattgcgccttttgtcgggggcgctggggaatgggccgaaatcgtctctactccgtcccagaattcaatcggcgaataatatgggtgaggcggatagtttatcctccctatcctgagggtggggtttttcatcccgggctctttgaaggtgtggagtatgtagatttcatcgtcggtgtcatggatggcatggaaaaaggcgtagcctccctgaaggcgaggtatgaagactgtctcaaggtcggcgggggcactgaagtcgagtctcatgtcgccaaaaataaccaccctctccatgttggtcaggctcacgtagatgggaagccttgagaaagttacccttagggcgtgctcttttgggttttcatcctgaaacggatagagtgctatttccccagtaccgcacttcataaatacagccacgttttcaacgcccggaaaaacgacaacgtcctcctggcagggaatcccaaccccactcttccaccccagaagcgggttccccttcgtatcaaagatgtggagaaacctggagtcgtagtcgtcccttatgagtaccgagaggtattccccgttctctgaaattctcatgtcctctataacgtaatcaacgttgctgccctcgtattcttccctgaggctttcagctattttttccagagcgttttcggaaatctcaaatctgcccacgtgaaccaccgaggtaatgtggggcaactcctatataaccataactgccctcagtggtttggaaaatcactcccctcgaaaagaagagtaagaagtggtgtacaaatttgccaggtagtagacagtcctcagaggtattccgagctttctgctgatctctttcataggcacgcccttccgggccaattcaacgacctgttttatcgttttctcatcgtacttctttggcctgcccctcggatagctctctggcaaaagctccaccccaagctgattcagggccatgatgactttttgagacaccttagggtaaaggcttggcggacacgtgattttcctgacgttcggcgagcgctctaggattttgacgactacctcctttgttggtcggaggttcacatagacctcactcacatcctcgttcagaacctcgtccagcttcctgatgagttccgaatatgtcttcgcctttaccctgaccttcattcaatcacccctggagcagggcgaggaactgcttggctttgtcgctcttcggcatgaacttgtcaaacttcttcgcctcttccttggtgaacaggacgtttgcaaggcccgatatcacgaacttcttcatggcctcggtaagctcgtcctcgggaattcccagtatttcggcaaccttcttctcgtcgtagttgcttatgccgtagagtagaactcctccgaggaggtagttaggaaccccgctgaggtccttcttccttccaacgagctgttcctccatctcgcactttcttatgatgtagaggcttccctggcctgttttgaagtttggatcccacctaaagggcaggtcgaggattgagtagtggcagtcgagacagctctttatccccgggaaaactccgagggtttccctgtccgctggcgacgtgaggaagtagtagcggaatatgtcgagtcccagcagttcggcgcccttttcgggattaaatgaggcataggccagtgccaggttgtccaccgtgtagtggttgtttatgaggacgccccttgtcttcacgaggctgagaaccctccagcggaagcgccttccgaactgcttcctcagctcggcctcgatgtctgcatcggcgggaaggctgacgtgggcctttttcaggcggttgttctcaaagtactccacctcaagccttatgctcctggttttaaccattccctgttccctgagcctgcccttgatctccttgaaggcgtccctcacggagaggctctccctggcgaggagcttgaggacgtctcccgagtacgccaggtaaggcagtatctccactctcccgatgctgtagggctttctggtggccttcaccttctcgtcctttatctcggtcgcctttatctcactgctccccctcttgaaggtgtagttggcgtcgagaatagctaacgcgattttgtgggccgttatcgccgagcggagcctctccagggcgagcgtcctgtagtgcctctttctgtagagccactggaggtgtggatcgcggtttttcctgtctcccatcggtacggaggggcctccctcaccaactctgcgctcaagctcctcctcaagctcctcaaggagggaaaggttgcggtttagagtcagggctaacctgacggggtcaaagtcctggaagagctcgcccaggtctatgcctatatcgtccagtatcttgttgacctgggcgacgagttcttccgtcgtcgtcatggcaggagatcaccgttgtttatcttttctgggagatactccttcgcgacgaactcgagggacttgttggctaaagcctgctgttcaatcctcactccccacttgagggcgagctggagctgtctctgccactccttgttctggaaccaggggtagttcatctcctcgaggattctcttgtagtctcccgttgggccgcccttcttgttcggtggaatgcccttgagcttctcggtgacgttctcaaggccgtacttcttgatgtcgtccatggtcatgcccacgaacttcgattcaggagttgccagcttgtcgctgaggtaggcgaggttgatcgaaccctgctttatggtcgagtatatgtaccaaccgtaggggtcgccatcggtgaagacaatgatgggcaacccttcctcgtagtggagcctgtggatcaaacgcctaaccccacgcgaggcctgtccctgggtggctatgatgagggcgttctccctcttcgggaacttttcctcgatgagacggtcggccatagccgctgtctcgacgactaaggcgtagtcaacgtttatctccgggaactggatgtgctccaccgttcctggaacggcccatccaccgcttccgagcctgctcgcgttgaactcgtcttccccatcgcggatgacgatgtcgccgtagatgtaaccgcgcctatcggcggttatgtgcatctcctctctcaaaacgccgaacattctctcaaggtcttcgatgatcgggtcgctctcgctctggtcttcgaaggtgttctccctcgttcccggaatggtgtgcttgttggcgtagtaggcttcacgaaggctcgcgtgcttgccctcgctcacgagcctcttcacgtaggccattatgaggagcgtctgcatgaactttctcgcatgggcaacgttgaggaagtagcgcctcgagagcttgtcgcccatcttgatgagcctcgacttttcatcaaagtatacgttgctcagcccgcgcatcgggatgtcgaagtgggggtttttgccggctttgatgtcctcaaggatcctccttgcgtgctcgtcgagcatcttcaggactttcctggggtcgtaggagaacttctccttgggcctctccctctggattttgcgcttaggcattctcggccacctcctcggctgctacctcttcaacctccgcgcttgcaaacttgctctcgataaacctgatgaagtactccctaatcttctcctcgggttctcccgtcagtatgcttaaggccctcgctatctcagggacgtacttctcgaaggtcttccttctctttacctgggccagcttcctgtgcttgccgctcaggtaggtctggagcctcctcgcggcgtccattattgctaaacgtatctcgttgtaaatctcgtcaacgctcgctatgctctgctttcctgttccagtgtaaggaacgtggaccgaaacgacgtttatcatgaggacgagcggtgccctgtcaaggtcgtctattttatagcgcttccagtctatagagcgggccgcctgggttgtcacacacgaacctgcatcgaataggagcggcaccctgttggcgtagcggtagaggtcgaagccagccggaatctcgccgccgtacgctattccaacctcgacctggaacgggataccacctgagtagacttttggcggtctggtaacggcagtcacgaactctggtttgagtattcccttaaggcccttctcgatgttctcctccccgatgggccttaggccatgagttgggggcgccaagaacttcatgtacttgaaggcctcgactatctcctcagcctcgtgccaggtgagcttctcgggcggcttctccatcattttggcgacctgtttgaccaccttggtgtagcccttgaatgccctgagaacagccttgacgtgtccctccataagcttctggtagtactgctcctggagcttcttgtcctccacggtctttatcagcctgagggcagcgatgtactcgatgagttcatcaaccttcttgtcgcttatcctcgagaactcgccgatgaggaacctcctgacggtgttcctcctcgtcttcttggccaatctgtaaacgtcatcggtgaggactcccttcgggtgaggcttcatctcgaccggcggttccgggatgtagtcgctcgacctcggaaagactatgagttttccgtccggttcaataagctcgatgtgtgcgtgggggttggctatagccgttagcttgaggtaccagaagacaccctgcttggagcgcatgtacttgacgttcttaacttcgagctctatcctcgtcccgcgccagcccttcgggtttggatgcttctccttcttgacgattttaccctcgttcttgtcaacgtctatcttaacccatgcctcgattatctcgtcgtttccggttgaagtgatgacacgtgtggcctttccactcgttatctgggcgaacatgacggcaccgcttataccgataccctgctgaccgcggctctgtatgttcctgtgggctttagttccagcgagcatctttccgaagacgtgggttatgtacttctccggtattccaggcccgttgtcttcaactacaaccttgtagtgctcgttcccgagctcctctatttcaaccctgacgtagggcgggattcctgcttcctcacaggcgtcgagggagttggttaccgcctcgtggacaagggtcgtcagcgagcggaccttgcccgtgtagccgagcattgcggcgtttctcctgaagaactcgctgacgctctgaatcttaaactccttgaagagctggttagcctcggccataatcactcctcctcttcctcaaattcatcaaggtcttcgggcagtttgccctcgagggcctcatagtaagttgtggcctcaagctcgaggtctttcttcctccgctcaaggtagcggtaaacaacaccgtgcggggaaccccttgcgagcttctcaacggcggttttggcaacttcaacctgtatcgggttcccgattatcgcgacagtctttccatagacgctaatgtcagcaccgctcatctcctcaatgatttccctcgtccttccctttcttccgatgatcctgcccctgaccctcggcagggcgttcttctcattgccgacaacgatgtcggtgaggttcaccacctcaagggtctccccctcgttgaagagcctgaaggccctctcgggagagaagccccttccgatggccataaccacatctctcgccttccacaccgccagcgggtcgtcggtttcttccgtcgctgttatgaagacctcacccgtctcactgtccacctctatcttcgtcttggtttttctctcgatttccttcttcgtctgccctttcttcccgatgagtaccgctatcctctccttcgggattttaacgaactcctcctgctcaccaagagcggtgaaagtgatctcttcttcatcctcttctctctcaaacctgccgtccttatcaacgcgctcatacttcttaaggagcctctcaaactcgtccatgatctcacccctcaacgagctcgcggaacttcccctctggatcctcaacatcaacgcccttcttcctgaagtagttggagacgttggttatgtccctcctcaggagttcaaggctcattctgtttctcctcacagtcgcctgcgaccagtctatcacgaccggcccgtcgtggaggagtatgttgtactcgctcaagtcgccgtgaaccatgtcaccgcgcttccagaggcgctctataacccccatcgtgaagtcgtaaagcccctcgaagtcctccttactcaactctttctcaacgtccttgaggcgtggagctggggtttcatcgccgacgaactccatgacgaggacgttgtttctaaagattactggctctggaaccctgacggcatattttatcgccctctggaggttcttgaactccctcctcgtccacacgaagacgagcttcctcatgtccttaggaaggtatccgatccttggatcagctgccaagtactcccatatccgcctgaactcggtggtgtaagtcctgtatatcttgaccgctatccttttgccctcgctatcaattcccgcgaagacgttggcctctttccccgtgctgatgacaccgtagagggtctctatcttccccctcctgtggagataggcaagcgtttccttcgtcgttctgtcgaagacctcgttggctatcttgtagagctcgctgtccttctctcttctctccctgaggccgagcatctcctcgatttccctgtcaaggaactcttccctcattgtccatccctgctaattgatggaaaagcggctcagaagaggagctcgccgccgctgaggaagtcctgggttatcttacccttcctcaggagccagtcaacctgggttctcgtgtagcgatagacgatgtccccgcgctcgtcgctctggaccggccagggctggacgataaccacatcaccaacgcgcatccacattctcctcttgagcttgccagggatcctgcatctccttaccttaccgtcctcacagcggacgtccatccatcctgctccgagggcctgctcgatcactccgaagagctgtcccttgctcctgtctggaaggggaacgcgaattacctcatcaccttcaacatgcctgtcgttcttctttttaccagccatgagcatcacctcccgtgagtcgtgattagggcttataagcttagccctgcaaaaattctccaaagaccctacggatagaactttaaaaaatttttgcaaagagagttcacaatcctgtccacttagtacacatcaaagtttaaaagagaaccggacattgtgagtacgggaggaaaaatgaaagcggttgaagccgagaatttaacgatcttatacagcgggcagccagccctgagcgatgtaacgttcaccctggaggaaggaaaaacactgctcctcctcgggccaaacggtgcggggaagacgaccctactgaagactatagcatgctttcacagagagtacactggggagctcagagtatttgagagaccaccctgcgaggcgagagagcttataggctatgttccccaaagccagagtctaaacgagagagttcccctaacggcgcttgaagtcgttgccatgggcggtgtttacaggaagggcttcgtccacttcaggatacccggagaggtaatagaaaaagccgaaaaagtcctggagttcgtcggtctcgggggaattggggacaggctcttccgcgagctctccggcgggcagaagcagagggttctcctcgcgagagcactgatgagcgatccaaggctgctcctacttgacgagccgctttcggcactcgacccaagcgcgagggcagaggttgccaacgttctggataagataaagcgggaaaagggagtgacgatgataatcacgacacacgacatcaacccgctcctcgagataggggatctcgtgatgctcataaacaggaggctgatagccttcggcaggcctgaggaagtgctcactgacgaagttataaagtctgtctacggcccgatggcaaaggtgatcccggtcggcggaaaagtctactgcataaccggggacttccacatccaccgcgggggtgagaaaatatgattccagagtttctaatcagggctctcctcgcgagcataatggtcagcgtccttctcggacttctaagcccgataatcaacacgaaggggcttgctttccttacccacgccctcttccacgctctcctgttcggtgcagtcctgggaatgatactggcacttcttcttaataactacggcctcgtcattctcacggccttagtagtgacaacgctcctggtcatcctcatagcccagctggagaagatagggttcacttctgactccgctgtcggtatagtttccagcttcgtcgctgggctcaccgttctcggcttcggtgtcctctacaaggtcatggctacgagaccctacttcccgctgacccagaacatagtctcgtatctaaccggcgatatattcctcgtcacactggacgacctgacggttcttatcgtcggtggggcggttgtgttcttcgttctgctgctcctctaccgcgacttcctgtacatcagctttgatatggaaggcgttgagagctacggaggcaacgcgagggcgtatctcacgatcctttacgtgctcgttggagtaatcggtgctcttatagtccagaccgtcggtctgataactctccaagtagttgcgatccttcctggtgcgatagcgctgatggtaagttctgacttcaggaaggttctcggaataagtctactcctaactctgaccgtccagcttacctcagtggttcttgcctacttcaccgccatacccccaagtggtatagccacgataatgctgggcattgtctatggtgcactcttatttaggaggtgaaccaatgaagatagcgggcattgacgaggccgggagggggccagttatcggaccaatggtgatagcggcggttgtggtggatgagaatagcctcccaaagctcgaagaactgaaggtcagggactctaaaaaactgacaccaaagagacgggagaagcttttcaatgaaatactcggagttttagatgattatgtaattcttgaattgcctcccgatgtcattggttccagggagggcacgctcaacgagttcgaggttgagaacttcgcgaaggccctgaactcgctcaaggtaaagcccgatgtaatctacgctgacgcggctgacgttgacgaggaacgctttgcgagagagcttggggagaggctgaacttcgaggctgaagtcgttgcgaagcacaaggccgacgacatctttcccgtcgtctcagctgcttcaatcctcgccaaggttacaagggacagggcggttgaaaagctcaaagaagagtacggggagataggctctggctacccaagcgacccaagaacgagggcttttcttgagaactattatcgggagcacggtgagtttccgccgatagttaggaagggctggaagacgctgaagaagatagcagaaaaagttgagagcgagaaaaaggccgaagaaaggcaggctactcttgaccgctactttcggaaggtctgagctttttccatgcaaaactggcagccgcgaggacttttatcttgtagagtgctagggactccctgaaggcctcccatcttattacctcattcaggaagactcccattgagacagccgccgggggaacgagtaccgtggcgtagaagctgaactgagtttttcccccgagaaagtattggagggcgaagagtccaaccgtgctccagaaaataaagaagggctcgctaactcctggctttttcctgtagacccacggcagggccagtatcataacgaccattcccataaggagcacggggtcagttgacgcgaagacgtttgggttaaagtggaacgggaacggacggtagtttatgaaccactcccagaagggagatgtgtttgggttcgcacctttgtagctgaggtgccacttaaagctcccaaggaactcgttgagccacctctcgaaccccatcgcctttattgcaggaagttcgggtactaaaaacgcaattcccgggattacaacaaccgctgaaaagaacctgacaaaggagttctcgctcttaagagacttccacaaaagtaccggccatccaaaggctccgctgagctttgtagctccagctagacccagcaacaccgcggaggagagtttcctttcataaacgatggcaaggacgaagagggcaacgaagaacgccacgtggatgtcgagcatcgcagttacagccgttgcctggagcgttggatccgccgcgacgaagagaagtgctataagggacgcaagatagcttttgcttattctgtacgttgcaagaacaacggccagctcaatgagggcaaacgctattattcccgggattctccaggcaattggtctgtccccgaggagaagcatggagagcattatgatgtccttccccatgaacgggtgctccgtgttgaggtagttctgtatgttctccttgtcaggatacctgaacccggggattacatcgtagcttccatctggcaggtctgattttaatctctggagaaaatcttcgtagttctcggcaggtatctcataatagactccaggaaactccctgtactccatcctgtatctggcatcgttgatccctgcaacccaatccgtcatggcgagattttttatctttgcactcgtgtttgaaaatacaacgttcacgccatacgagccgttgtggatgtagaagacgtcaacgccgagcctgtggaggatgtttctgctcgctggaacgtaccagacctcgtctcctatgtaatcgttcaggtccggacgcgatgcaaaactgtacgaataccagattgttccgatcatggtaagggcaacaaccgcaacaaacaccgccctgattattttttcccgctccattctaacccccaatggtcatggcgggcaacgtttttaagcctctctcttaacctcccaatatgctcgagggaatcacagaggagaagatcagagaggcagaagagcttataaagaggggctatagcgagaaaaagctccgcgccaggcttggtaaggactgggagctgatagcggagatagccagggccagaatcagggctaaggacaagttctcaaggagcgacctctggatggacatggaaggactgcgctacgccacccacgaggtcgtcgccaaataccgcgccgagaggctgaaggaatttggtgtggagagcatagccgacgtttcttgtggtattggaatccagctcatcttctacgccatgaaagttgagagggcctatggaatagacattgaccctcttaagatagagttcgccagaaggaacgccgagaagtacggtgtctcgaacatcgagttcataaacgccgattctctctcaccagaaaccgttgagagagtggatgcggaggtagtattctccgatcctgctagacctcctgaggcccccgagagagaccttgagggacttctcccaagccccctaaagatctacgaggcctacaaaaagaagacccgggcatttatcttcgaccttccgccgcagatgaagcgggagaaagtcccatggaagggagagtttgaatacatagacctctttggggcgctgaacaggttgaccttttacacggaacccctcgcgagggctgagaggagcgcggtcattcttccagcgggggcacgtcttgaaagcgacccttcccttgaagacatcgttgagtgggcggataggccgggcgattacctctacgagataccacagagcatcgattatgcggatttaataaacgagctcttccacaggcttccagtcgaggccagaatgctgctcagggaaaagaggagagtcctagctaccggagacgagccgattaaaagcccatacctcaagaggacttacagcgtcgttggggttctcccattccatccagttaggataaacgacttcctcagaaaggagggctttggaagggcaacgctgaggataagcgtccccgaaagcgagtactggaggatcaggaagaaaatcgaggagaacctaaggggtgagagaagggccttcgtcttcaaggtgggagaaaaggcggtaatagctgaagaactataactcctcgattttcgcgttccttatcttctttgagcctattctgaggtctctgaagtagtttatgtgttcctcgggcagaaacgagtcgaggctggtcggtttaagccgcttcttcctccgaactggcttttctttggaaacctttttcggagttgcatcgccgatgaactcgtcgagcttcctgtccataggcatcctgtaatgaattgactttgggtataaatgcttttttccagaaagcttttaactctcctctcttatcggcttgagaagtaaaggtggttgccatgtgcggcatcattggttacataggcgacagaaaggcctgcgaagtcattgtgaagggcctcaaacggctcgagtaccggggttatgattctgcaggggtcgtgacaggaaacggcgaaaccctcgacgttaggaagggggctgggaggatagacaaactcacggagaagctcggcttccttgagatggagggcaacaggggcatcggtcacacccgctgggccacccacggtgtcccgaacgacatcaacgcccacccccagaaggactgtactggaaaaatcgttctcgttcacaacggtataattgagaattttgctgaactgaaggaggagctcctcaagaagggacacgtgttcaggagcgatacagataccgaagttatcgcccatcttattgaagaggagctgaaaggctctgaaaactttgaggaggcccttagaaaggcactaaataagcttagaggttcttttgcacttgccatagtttatgcggatgagcccgataagctttatgtcgtcaggaatgagagcccgctcgttctaggtatcggggagggtgagatgttcgcggcgagcgatgtgcccgctttccttgaatacacaaataaggtcatctttctggatgacggggagtacgcaatcctgacaaaggactcctacgtcgtcaagagaatcgacacaggggaagtcgtcgaaaaacccgtccacgagataagctggacgctggagatggccgagaaagctggctatccccacttcatgctgaaggagatatacgagcagccgagggccatcaaagacgccattcacggcaacagggagatcatcaggagcgtcgccgaggagatagcgaactacgataaaataatcttcgtggccatgggcacttcctatcacgccgccctcgttgggaagtctctcttccagaggctcgccaagaaagttccgatcgtcgaagaggcgagcgagttcaggtatgaattcgaggatctgatagacgataagaccctcgtcatagcgataacccagagcggtgagacggcagacaccctagcggcaatgaagcttgcgaagaagaatggcgcaaaggttctcgcagtggtcaacgttgtgggcagtatggcaacgaggatagccgatttaactctctacacgcacgccgggccggaaatcggggtcgcggccacaaagacctacacgacccagctcacggtcctcacaatgctcgcaatagagctcgcgaaggttctcggcactgcgagcgaagactaccttgagaagcttgaggatgagcttatgaaagttccggaactcgttgaactcgccctaaaacacgacgaggctcttagggagctcgccgaaacgctcaaggacaagagggacttcttctacatcggcagggggataagcgtcccaacggccctcgaaggagcactcaagctcaaggagataagctacatccacgccgaggggctgagcgcgggcgagctgaagcacgggccgctcgcactgcttgaagacggtgtccctgtggttgcaataaacccgagcggaaaggtcttcgacaaaatggtgagcaacattgaggaggcaaaggccaggggggctatgataatctccctctccgatagggaagagctaagcagggtctcggacgttctggtgaagatgcctgaagttgatgagctgttgagtccgatcgtctacgttgttccgctccagctccttgcctatcacctggccgttttgaggggcaacgaccccgacaagccgagaaaccttgcaaaatcagttactgtggagtgaggtggtcaatatgaaaaccgaagccaaagaaaaattgaaaaaatccgaacctggggagggacaggccttccccaaggcctacctttatttcaaagagtacgggttgcccgtcctcgtcctgctgttggcctacattgggtacaggatcagggcagtgacttccggtttcaagctgttcctcgatccagatacgttctatcacttcgaaatgtacaagctggcaatccaggattggattcccaagtattatgcctatgcggaacctccgatgggcataaagccctcagggtacctcggtctctacacggttcaggctatgttctataagttcgcacatgccttgttcggcatgaacgagtttgaggcctttaaggtctggccacccttcgttggggcaatgatggtcataggcacgtatctggtagtcagaaagctccactcaagctgggcgggcttctggggagcggccctgatgatgggcttctggggggctatagaaaagacgtactcgggcaacaaccgtggagagggccccttcgtgatgttcttcctgtttacagtctatttcctgctcctctatctcgacgaagagcgctggaactggaagaaagtccttgggctggtctttttccttgtcctcagtccactgtacatgggagtttggacggggagctcgctgggtgtaatgattctgctcgcaactggcgtggtagtgccggtgatattcttcacggtaggggacactgaacacctcaggcgctttgtcactgagtactatcctgcctttggactttccattatagctggaattttcctcgcccagagtggcttcgttggcattagaaacttccttgtgttctcctttgaggttctcatagcgggtacggtgctcgtcctgataatgctttacggtgagaggtttctgaacttttcagactggatgcacaggcttggaaccgtagttggtattggaattgccggcttcctggccttttacgcctacttcggaaaggccctcttcaacttcctcagagcggccactcagtcaactcccctttaccagaccgtcgccgagctccagaccccaagctggagatacataatagcaacgttcagcctcaaacccaaaggctcacagggggacagcataattttcatattctccctcttgggcctttttgttctcggctggaagttctataggggggtaaaggagaagcgctacgaaacctacaagcacttcatacctctgttccactacctcggcacaatatacctcttcaagcaggcagttcgcttctccttccaggcttcagtagccgcgataatcctggcggctattgcaatgggagaggccttcctctacgttgagaggatgagggacacggttactgtgaaggcactatatacggccttcctgattctaatgctagttccaatgccctatgtgtccgctagctactcctatgatgctatgaagagcgagagtctcaaaattagattaactaactccaaaatgcctggaagcgttccagaggcctggaccgacgcccttctgtggattaaaaacaacagcgacccctacgcaacagttctaagctggtgggactacggctactgggaggagtcgagcctgctgagccaccgcagagcggtaagcgatggtggtcacggctacgacaggagatacatcatagccaagttcttctcccacagcgggaacgcaggagaggttgacctggaagcctggggagacgactacgttataacgttcctcgatcccttcgatggatcgagcgacttcggcaagttcaacgccatagcctacctcggcggtgcgatagcctatggagagagatatccaatgttcagctatgtctattacaacgacatcgtggtcaccaacgataccatagcagtcaaagctggaaacgggtacgtggtacctgatattgtagtggatctaatcagaggccaggtattcaagaacaaggaaccgacccacccgtttgtcctctacatatatccttacatgacttccagcaaccaaatataccccattgggattctagcctacgaaaagatagcactcagcaactacctccagcttggattgggggttccgatttcgctcaacggagaggagagtgagaagctctttgcaaacttcaagctcgaatacaccggttacaatggctacacgaaaaagcagggggtctatgtcccaagcgttagggtctataagttcaccccgtttgcaatacaccgcatcgaggccatgatgaacggaaactggactagagtttatgattcgatcaacggcggcggactagaggttaagagcggcaacactactctgcccttaactggcgaacagaagctcaggctctacatttcggcgtttggaagagacgtaaagaacggaacgctgatatttgaagcctacaacggtacagagctggttgacaggcaggttcttgtgaagaacctcaatattgaccacctcaacgaaactcccgttgaggtcaccgtgaagattccgcaagcagagaagtaccgcttcatcctgctccaggagggtcccgttggtgtcacaaacggccctgtttacgtcaatggaaagctcgcaaatccaagcatgccgctgaaacctggggaaagtggcaatatcgagcttacggaggcgtttgagaaggactacacgaacgtcaagttcactctgaggggcgttgtttactactacgtggcacccaacggcaacgacataaacaggcccgagttctaccttgagcctcacatggacataatcggctacatccctgttgcagaactggataaagtccaggagggggacaacttaatcagaggtcaggccagcgtcccgaaggacttcttcgattcatatatccaagaactgaagcagaagtacggggacaaagtcgtggtggttggcaagcgccttgagccgatattcctcacccagaaggagtacgtgctgtgggaaggccattagaaattttccaatatttggccccctaattttagattttttccaacattttgtcgattcatcttgtattttatacaaagagaacagaaaactttaaattctgaacggcacaaaatagcatcgggcgaggaaggtgtttgaagttataccagagaagtacagacccctgatgcagaggcttttcatatccaagatatcagacgccttagactcccttgggatgaggttagtgagcagttcgatttacgttaatcctgtcggaaaagaggtattcctcaggtttcatcttagggtgattcagacgagtttggcaggttctattgatgttgagccgaccgttaaaggacttattgaaaaacttgtaatggaagccaacgagtcgcttgggagggtttatggtgtaactttcataattgaggacgttagtattgagcaggaactcccaaaagaccacgaaagtctccaagatcaacccaagttggtacttgacgtccccctcgagctggagggacctttcagacggattgggaaggggcttgtgatttccttacgggaatggggaatagccgcggcatcaatcgttttgggagttgacccctcaggtttaaatcgcgttagtctggtcgtaaagctgagagaaccgatgggaagggaagaaaaggcttccctcgttaaagctctcagggaaaagcttgcggggtacataaaactcttgataaagaagccgatgcagacttctgttaagatcattgatcccagcgataaagtcgttgccaaggtaatgaagaaaacaaagctcatggagaaagaagtggagaacatcatcggcaacgaagacgttagggctatcatgaaggcccttggaaagctctgaacctttactcatgttccttcctcttctcctcgcgtgagtgaatgtaatccagtaaaggctgtatcctcttccatacttcacttatcggcccgtcgccgtcaaccctaacgtatatccccttggcacggtagaacttgattatcggctccatgttctttgagtatatcctgtacctcttcctgacgacctcttccctgtcgtctgccctctggatgagctcggagccgcagacatcacagattcctggcaccttgggtggattgtactttacgtgatagactgctccgcagttggggcatatccttctcccggaaatcctctcaacgctcgtgtcctcatcgatgaagatttctagggccaagtctagcttaataccatggtcaaagaggtagttctcaagggatatgacctgttctggcgtccttgggtagccgtcaaggataaagttctccctctggcggcggagctttgagattatcagggtgttaacgatggtatctggaatgaggtctcccctgctaaggtaggcctccatctccctgccgagagaagacttcctttcgatttctctcctgatgaggtctcccgacgaaatatagacgaggccgtacttttccattattgttcttgagtgcgtactcttcccgcttccaggcgggccgaagataagtatgttcacggacgaccaccaataaatatttatgcacccgaagttgaataaacttttggtggtgccgatgaagttaaacaccggctacgtccgcgccagtggttacgctcacaaagtaaggagggtgctctttgcattagttaagggaaaagttgatcccaaggaggtcgtcagggccgctggagagcttaactcaaagatatttgaagagttccagaagttaggtgttgagaaggaagacgttgtcaggataagcgttgagttctccatcaaggatggttcaatagtgtgggactacgacaccctgtctatcgaagtctacaagaagagcgaggaggaaaggctcgcaaaggccatggaggaggttgaagcaagggaacgcgagttagaccagaagataagagaggtcgaagagctggcgctgaagctgaggagtgttgccgaagaactcgtggaaaagatagaggagctgaagcaggagcatacatccctcaagctgaaggctgagatggaagagagctgaacttttttctaagatttttcagaaatgaaaggtataaaaggacaaaaaagttgctaggactacaaagtccactgaacgagcttcctgacggcttccctcagcttctcctcgtcctctggcgttgggtagcctttgctctcaactgtcgcaacgtggtcgaacttgcttctggtgatcatcgtttcgattttcctaccagcaacgccgccccagccgaaggccccgacaatgagaacgggcttttcgtagttggccttgtcaacgatctcgtagagggcgtagcgtattctcgggtgtatctcggcctcgtaggttgatgcgccaattatcagggcttcagcgctcggaacctcgccgagtatgtcgctgaccgctggagcttccttgtccgtgaagcggtaaactacaggtttctttccgtgcttccttagttcatcaagaacgatctccattctcctttcaacgaaaccgtacatggagtcgtagatgacgagaaccttgtccttttcggaaacccctgcaccaacgcgctcgtagtgttcgaatatcctgagcgggtccctcttccacaccaagccgtggccggggagtatcatcctagcgctctcaactattccaagactcttcagcttcttgatgttctggacgatgtacttgtggtagtggccgataacggtgacgatgtacttggtcacgtgcgggaggtacttctccacgaactcctcatcgctgtcgtcgatggtttcgggaattgagtacccgccgcctgcgtcgcaggagaagattatcctgtcctcaacgacgtaggttatcatcgtgtcgggccagtgaagccatggaactgctatgaatcggaaggtctttccgccgatctgcatctcctcgccgtccttgacgaccttgaagttctcgacaactttgtctccatagaacccctgaaggaggttcctcgcgaactgggttcctatcacctgggccctgtagccgttctcctcaaggactttgggcagggcaccgctgtgatctggctctgtgtggtggacgattatgtgggttatctcctttggatcaacgagcttcctaagtgcgtccataaaaaggtcggtgtactccttctttgttgtatcaaagaggacaactgcaccgtcgagcttcatcaggtaggcgttgtaagttatcccctcgggaatgtcccatgtggcctcgaagtaccttatttggtcatcatcaacccttatgatgtagagctccggatcagtacagagcttttcaacccacagcctcggcatttccatcaccgaacccctttggtgcggaaacataaaaaagctttccccaaaccatatgttttggacagaattgttgccctaaagaggctaaaaataagagatcagtggagcacttcaaaaatctcctccagatctggaagctcgcttatcgggtagactttgaaaaagactacccttccttcctcatcaaccagcacgttcgccctctctgagaagccaccgtcttctctaaatatgccgtagagctttgaaacagccccgtgcggccagaagtcgctcagaatcctcagcctcttcagccccatatgttctgcccacgccttcttgctcggcacggggtcaacgctaatcccaacgggaacgacgttcagctcctcaaagcgctcgtagttctcttccaaagctttcatctgcttctcgcatatcccagtccacgcaagcgggtggaatgagaggaggactctcttgcccctgaagtcgctgagtctgaattcttttccgtcttgatcttttaggacaaaatccagagccgtttcaccaactttcacactatcacaccccaattagttttgatcgcaggaataaagcaagaaaaagaaaaaaaaatcattctgggcctttcagagcttcttcccctcaaagaacttcttcaccagctcgggcttcggctcgcgcttccagagcggtgtcttgtccttcttataagctggaacctgctcctcaaaggtgggcttctcgtggatgtagaatattccgagcgggagcgggtcgctctccaaagcccttctgaaggcagcctccctgtcgtaggggtcgtggtcgtccatccagtatgtgtgctccctgtaccaggcgtaggtgttcaccttgttgaagctcacacacgggtggaggatgtccactatggtcaggcctttgtgctggatggccttcttgatgatctcgacactctccttgaagtatcccataaaggttctcgcgacgaaggaagcatccaaggctatcgctagggcgagcgggttgaagggctcctcaaacactccccacggctgggtgggggtcttcatgcccttcatggtagttggagatgcctgtcctttagtcagtccgtaaacctggttgtcgtggatgaggactgttatgtcaggattcctccttatggcgtggagcaagtgatttccgccctcggcgtacatatcaccgtctccaccctcggctatgaccgtaagctcggggttggatgccttcacaccagtggctatcggaatagccctcccgtggagtgtgtggtagccgttgacgttgatgtagtgcggcatttttgccgcctgtccaataccgctgatgatggcaacctggttgggctttagcccgagttcggccagtgctgagatgagaatgttccttatgccgaagttgccacatccagggcaccatgctatatcttggcttccgggtctcttcggctcgaagagctccctcccagtgggaagctggacgttcattctatcacccccttgaggccctcaagaacctcttcaaccgagaacggcctcccgtcgtacttcaggattttatggtgcacctctatgccaagctccttcctgagaagctctgcgaactggccggtgatgttgttctccacatcgatgagaaccttaccttcgaagaactcccttaccttcggtttgagtggatagacccagctgaagtggagcagagcaacgtcgtcccttccgagcttctcaagggcctcttcaaccacgtggagcgtcgaaccccatgctatcactaagtatttggcattctcgctccctataagcttcggaagcggcgcgttcttttttatggtctcaagcttcttgatggccctcttctcctgcatctttatcgtgagctcggcgtcttcagttatgtcgccccactcgtcgtgctcgtttccgttggcaatcacgacctcttctccgtagcctggaaccgccctcggcgagatcccgtcctctgtaagctcgtaccgcctataacctggcttcgcctcgacgatgtagcgctcgaacttgactttctccatatccggagcagggaggttgtagtaggtgtcaacgaagtactgatcggtgagaattatcacgggaacctggtacttgtccgctaaattgaacgcctccgccgtaaggtagaacgcctcctcaaggcttcctggggctaggattatcctcgggaagtcgccgtggccggagtagaggacgaggttcaaatcgccctgcatcgtcctcgttgggagacctgtagcaggccctggcctttgggcaaggtgcaccaccacagggttctccgccattccggctaagcttatcgcctcgctcatcaacgcgaagccgccgccagaagtgctcaccatcgccctcgctccagcgtaccacgctccaagcgccatgtttatggccgaaatctcgtcctcgacctgctcgacgattatcccaaactcctccgcgtgctgggccgcgaaggttgaaactcccgttgatgggctcatgggatagaagctcaggaagtccatacccccagcgaaggcgcctattccgaccgcttccgtgccggtcaggaggacttcatccttaactttctcatctctctcaacctcgatcttgatagtcccttcctcgcagagcttcacccccagctcgtagccctttcttgccgcttcgatgttcttctggacaacgttctcgcccttgcttccgaagcgcttccttatgtattcctcaacagccccaaagtctccgtggaagaagccgactatcaggccggccgctgtagtgttgaggtagagctggcttccgacttccatgaccatcttcgtgagcgggacttcgacgaggttgaccttgtccaaaaactcctcctcaacgttttctttctcccctaagacgacggtgttttctccgagcctgtctctaacccagctcagaacgccctgcttgaaaggcacgaggatgtctatcctcttcacgaaggccctgacgcgctttgaagaaacgcgtatctccgtggtgtttattccgcccctgactcgggacatgtactccttgtttgcatagacgtggtagccggacttcttgagggcgtgggtgaggatttcctcaaccgtctggatgccctgtccggccgctccgccgagaactatggagacgtcttccttaaactcactcatgcttcctcaccaccagggccgccctgggtctgccctttgggagggcccttcccttgggtatcatcctaaaactaaaaacggagagaatgcgccttagagcacttctgttcatttttaaccaccaacaggtaatagtatgcaaaactatataaagatttccgacatcattcggttggagatgtgataatgggtggtatcaaaattgaacctaagacggcaatattcgccggtggctgcttctggtgcatggaggaggcctttgagagacttcccggagtgattgaggcaatctctggctacaccggcggctgggtggaaaatccaacctatgagctcgtctcaacaggtgaaaccggccacagggaagcggtaaaggtgatttacgatccatcaaaaatttcctacgagagacttttggatgttttctggcggaacatagaccccacggatccaggcggccagttcgccgataggggcgagcagtacaagaccgctatattttacctcgacgaggaacagagggaactcgcggaagaatcgaagagaaggcttgagctttcgggaatattcgacgagccgatagctaccgagattctgccagcgaaggagttttatccggctgaagactaccaccagggctactacttccgctttgaggcgaactacaaaggctacaagctctactctggaagactgggcttcataaagtccgtttgggagaaaaaccggcacttcaggctcttccctgagagagagggctactggctcggctatgttaagcccagcgacgcagagcttaaacgtcagctaactcccctccagtatagggttacacagctcggagatacggaagagcctttccacaacgagtactggaacaatcacgaggaaggaatatacgttgatgtggtctccggagagcccctgttcagcttgctcgacaagtatgactccggaaccggatggccgagctttacaaagcccctggaagagtgggcagtcgttgaggctggagagtgcgagggcttcctctgcgggcgggaagtccggagccgctttgcaggttcccacctcggacacgtcttcgacgagcccacaccaacgggaaagcgctactgcataaactccgcggcacttcgctttattccaagggatgagcttagaagatacggctacaccgcttacgaggggatttttaagtagtcatcctaaaaattaggtgagggttcatgggagtggtaatacgggggagagatcaggagtttcctgtcaggagggattcctggtacttagtcgtctattttaacgaaagcctctagtatctctctattccatcttccagcgagaaagatcttgaaaggctcgctctcgtgagattcctctttgaactgtctgatgttccacacatagtttttggcatggccagggagggcgtttatgaactcggtgagaagtttttcgagcggctcaaagaggaacacggcatagactcgcgctccagtactgagaaagacgccctgactctccttaatgaacttgaaaagatggaggcgttctacacagggcttggcttccttgaagaccttgaagaagtgatggacataagaaaagccgcgatggaactccttgaaaaactgaaaaatggaaagtgaactaatttctgctccttatttcttccaaaaggctgctgacttcttccgcgctgagcggccaggggtagattctaaggtcggcgatgtccccgtggaagtagaggaactctggcgttacagagtccgccgtctttccgtagccgagggtgaagagctccttccccgggatgtcgacacagaagagcctcatgctctcgttcccgaagttgtagtgcctccaggtcatctcccttccgttcaggtaggcggtgtttccatcctcgctcacgaccacgacgaggtgataccaccttccgggcttgaggttgaagccgctgtcgaagcagagggcaggcttatctccctccggaatccaggtgacgtagagcctcctgttgttctcaccgttgtgccctatctcaattatgaagaggctctttccttccctgtcgccaaagtagaggattgggaggacattctggtcggtttcctcgtagcggaagacgagtgaaatagctccaaccttcatgtccgatatttctccgatggcattgctgaggtcaacgtagccgttcccatcaaaatggagcactcttccatatgcagtgacgttgccgattaaggttccattgatgctcttgatgggcccagttggagtggtgtagagtttgagcaccccttctatgggagtcccatcaattgagacttcctccgatgtcttctttgagttctcttgatagatggcacttgcaacgactccaatcgctatgaggtctataactatggcaatgaggagtatcctcgccctgtccatgccaccacccattaggactagagaggatgtcgatattagggactcggtgaaacctgcctggttcgatatgttctacatgttccaaatcgtttctttagcaagaatagtcactttgatactgtgggcttcaattttttgggagcagaaacgccaattccgagaacggagcgaagcagttctaattccctcctgtcccaagcatcttcctcgaggagaattatgagcgcaccgttttcgaccacgaggatatcgtgtattgttgccagggccttgaggagagccttaaaatcgttgtacatcgcgagtaattcaaggccctctacaagaaccaccggggttacacccttgttctttgcctctgcaacgtatcttgccaccatgtccacgattttatggagctcggtcgggtatatgctcgtctcgtcccttccagcagctgttatccagtaggttttccatcctggaacggagatgcgctttctcatgaaggccagcacgggatagcccttcagacttctctcctctatcttccgtgctatggtgactccagactttatattgatctcttctggagtctcctcgatcatccctccatgtagaacaagaagggaatacgttaacgtcactataatgggagctgttaaaactacccaatcgtttggattgacaattggaacgccccgatttccaatcataacagcggtactggttgctccaaccccgaggagaactatgctggccccaaagaggtaggccctccagccgtaccgctttccgaggaactcgattattagaaagcccgctagggcaagggttatacccgtgatcacataaggatagctcacggccccagttgggcgcccaactcccagttcaagaacaagtgctccgagaaccgaagagcctatgggaaggaggtagaggccgttttcattgtgagtggcatcatagtgtctatgttctcctcatcgaggagaagattaagggccgtgattatagtcgtacccacaacaccgactataaggccaaaaagagtaggatcaccaatataggcagcgtaatctacagcaccactcaataaaagcgcgattccaaggaatagggccgattttctctttgttcgaagatggatgtaagcgaaaacgaggagaaggactgtccttagtgatgtacccaaaagtatgttcataagcttccctctttgggggtggggaaagtgctttataacgcttttgccaaattcttgggggtgagcgcattggctagtgatgaaaagaagaggatagggataaatgaagttagagccatggcaatacgctccgaaataggcgccgccagagtgtatgaagcacttgcggaacttaccgaaaatgaagagatgaagaaactcttccttactctggcgagggaggagtggggccacaaggaggttgtggagaggctgataaacgagaaaacccttagtcctgtggtagaactgccagaggagatagtaacggagttcgccgttctctatgagaacgctgagaggctgctctcccctgagacaactgctaaggacgttgtagatgtggcccttcgggcagagctggcgagcgagaagttctacgcgcacctaatagattacgcaaaagatgagaaggcaagaagcgccctccagatgttggcaaacatggaaagagatcactactcaaggctgatgacgtggaggctcctgctctgaatcactcggcctgggcgtagtagcacctcttcggcgagactatcttcccttcttcttgagcttctttatcgccctgccaacctccttcttatcgagaccagctaactcggctatttcagcagacttgagcggtctgccagcttctttgagaaccttgaacaccagctcgacactcatcttcttcccctcctaggttcgcattttgaagtttcgaggttcgaacttacgggtttaacggccgaaagggttaatagggacggtgttcaatatggtattggtgattctgcatggaagttactgagaaggaaatctttgagattgccgtaaactccgagatcagagccaaggaggcctacgaaaagctcgcttctatgaccaagagcgacattataagagatgagcttctcttcttggccaaggaagaggacaagcacagggagataatagagaagatggccgagcgctttgcggccgaaggtggcgagtcgaagaagatagagatggaggtcatgggagagttcaaggtcatagccgagaagatggccgaggccatcaagaagcctgatatcaacctcgacgagatatacgagatagcgatgcaggcagagctggtgagcgagaagctctacaaggagctcgccaagtacgcgagcaacgagaagaccaagctcctccttgagatgctcgcggacatggagaggaaccactacaacatcctcaagaagcagtacgactacataatgcgctatccagagctctacaaggaagagctctacgaccagctcatgaaggacataaacttcaacttctgaggccttttgcctttcctattctctttcaggccctgttgtacctcgcaaagaagccgtagaatatcagcgttgccaccacgtacagcgtggcagtcgcgtagaacgggtagctgagcgagattgagaagagcactccgccgatgtagttcccagcgccgcgcatgaatgtcgagaaggccctccttatcccggcggcggtggctttctcctctgtcgtgaagaagcccatcatgaaggagtcgtttatcggccagacgatgttcatgagaatggaacgaacgatgtagaggaaggccgccagaaggaagacgtcaattagcgggaaggtagcgaagagcagggccgcgacgagctggaaggacgttatgacgttcacgggccctatcttctccaccagctttggaaggccgaaggagccgagacccatgacaagctgctggaagaagaagacaccgcttattgccgccaaagtctggccaaagcggatgttgaagtataggctcatgtagggaatcgttataccagccccaagcccgatgagggcgcttggcagggagaacttaaggattttgattaccagctcccggttccagtttatcctcgggttcttcacggggacatcgtggataacaagcagtgctggaatcaccagggcgaactggagaagcgcgagcgagatgaccagacggtaggctatttcggggataagcccgaaggtctcggtcagaaaatctggagcaaagcccgctatgaggactccgattgcgttgaatatcgtcccgaggccgaagctgatcgagaaggcgtggtgtctgagcttttctccaacctcttcgcttaacagtgcagagaaattgggctgtctgatgcccatattaacaccaacgaggaaaaatccgaggagtaggaagtacttgtttagcgccagaacctggaaaagcctccccaaaaggcctaagactgctcccatgagaagggtcttcctatagccaagcctgagggaaatctggccagctatgaggaagaacagcccgccgatgaaggtctggacggagaagaagagccccattgaatccatgccgtagccgagggcgcggagatagaatggcattatgaatatcgagaactggaggaacagttgacccactgcattggccgctatgagtatcttcgcgtcccttccgtaaccgctgagcatggttgaagttcctgttggtgcgtttataaggttatcgaaacgcttctcccaagctgttgctgaatggagtgctgaatcttagaaggggcaaaaagttggaatcctcaagccccgtaaagctcttttttcagctctttctctatggaaaatgcctttctaatgtctccaataaccacagctccgaccagttttccgtcctggaagaatgccttggtgtgctcgtcgagccactcgccctctcccctcgtctttccaatgatggctatcggcaggtcgccgaacttgaagactgaggagcggagttcgaagggatagcggtcttcttttcccctcaagaggtttgccagaaccttcgcgtggccggcggcggcctttgcagtgccgcagatgatcccgctgtactctgcgcagtctccgatggcatagacatccttagcggatgtcctgaagtggtcgtctatcagaatccctcttcctgtgtgtatgccgctcctcctcgctatctcgacgtttggagtgattcctatagcgcagatttttactttcccttcaatgtagccccttgttgttagaaggccgttctcatcggccttcaggagttccgcgccgagatggaactcaactcctgattcctccagcttttcccttatcaggctactgagttcttcatcgaggccgagaaaagtatccctccggtggatcagcttgacgccgtagccggcctttgcgaggttcccggccagttcgaggccgatgaaacctccgccgattatcacagcctccccgtgctcctcaagcagggcctttatcccctccgcgtcctcaatgcttctgagtgtgaggaggtgctccttgccatcgacggtaggctccctcgctctcgctccagtggctataacgaggatatcataagggtattcgcctttatccgtgacgagaaccttcctcaccctgtctatcagtttagcctcttcgccaagcttcaggtttattcctttcctctcgtaccaatcaagggggtatatgaagagcttttccttctcaatcagacccgctatgtagtggctcagcatgggctttgagtagaatgggacttcttctctctcaaagatgagtacttcgtgctctccggacagttctttggcaagctcaacgccgccggggccgtttccaatgataacgatttccataatctttgcaccgacagaatttctccgcggtgtatttaaggagttcgagaactctaggtttacaaccacaagagacaacaatgtctcaatcccctcacgcaaaaatatacctccattgctcaattataatcctgtgaactgtactctcggcactggtaatccttatctggtgaataccctgctatcataggggatctgcatggatgtgctcaaagtccttaaatggtccggcttaacgggcggcatcgtctactggctcttcgtcgcgtggagcataagtagaaatgggtggttctccttcttccacaacgccctcagcgacctcggcgacccgtcaaaggcgtcatcgccgtggatatacaactacggtctgatagcgacgagcatcttcgtcctcgcctttgccatctacctcattctgagtgccaaaaacaagcttcaaacggttggaggggcttacatcagtatctcggcgatatttctggctctcatagggatcttccacggcggaacgaggccccacgtctttgtctcgacgtacttcttcgttcagttcttcctcggagcgctggtttacggtgctgggagcgagaagagggaggtcaagtacggctccatcctgatcttcctgcttgctctcttcgggactttcgtccactggccttccttggcgctcgaggagacatacgagatagcgctggtgatggctttcacgctcctagtggcgctgaaaagtggaagttaaaacactcgatctttacaatttgatacttttgattaatgagcatcctcttcgttaacttcctccaggggtatccaactcgatatactgaggttacgagaacgaagtttgaactttctattcgttttatcttaggataataagaattcttacgccctcatagaaagccttatatccaagttcgaacctatgtatgaagtggagggataatatggccgtgaaaatgggcatcaagttctttgacgagaacattctgaaagacgggttcccggagggcttcactgtcctcgtggcgggagaacccggtgctggaaagaccatcctcggctccacgttcctatacaacggcatggagcagttcggggagaatgagtccagatgcacgacctcagcataggaaggagcgccaaggaaatcctgagaaggctcaaggcttccaagtacgtccgcgagcatcctggtaaggtctgccccgcgagctgggagccagggaaggaagccctggatgtcagtcttgagctggtggggaagctttgagttattctctttttacctctcaaccgccttatcgcacaccaccctttttgtgccttcaaaaaaagttttattccctgagtccgagctcccgccatgaacgcgataaagagactcctcgcggccctctcgctcggctacgtcctctacttctactccgagctcgccttctggggcaggtggaaggctgacgataccatcatcggggccattatgacgtggctaatctactcagttttggcgttcttcgtcctcctgatggcggagcgcctcaaggctgattccccctactccgtctttctggtgggagcggtcttcggctggctcgttgagggtgttatcgtccaagaagcatacaaggcctttcccttccagcttgtatggacgcctttagcttggcacgccctgatttccatgctcctgggggcttatctcgcgagaagggccattggtgagtggagcctccctcgagcggcggtcctttttgccggcctcggcgttttcttcggcctctgggcgacctactggaagcttgaggacggctacgcggtgagcgttggacacttcgcggcctacacgttaatttcgacggtctttctcgtggtcgcgtactttaccttcgacttgaccgttcccgaggagtttatcccgaccaggtgggagattggggcgttcggcacggtggtggcgttcttcgccctcttcacgtttatagcggtgcccttttcaccccttgtgcttctccctctgcttgccctgacgctgtacgcactcaaagggctgaagggtgagaagaacttcctcaggggttcgagggctcccgcctacaggtacctacctcccctcattattcccctcttcgccgtgcccacatatgccgcactgaaggatgtccggtttgaggtgaacgtcccggtggcactcgtaacgtcgggagtggggctgttcctatacgttaaaggcatctaccgcgggctgaaggcccggcgttctggaaaaatttgggattaatgatcgttggttagggatatgcgtgtgtagataatatcccgctactaactggcccatattaaagcaggtattcaacggccacaaccgaaaaagcctaagttttggacacttttctcccaaagctcaactggagagcgtagcctaataccagcataaagagcgaagtggttataagccccatcattattccaacgcagttgaagagaagcccaagaagaacgttcagaactccacttgttattgctgccgtgagggagtaaagagagcccaacgttgcccttttctcgtctggaatagcagcttggaaccgtccctgccactccttaaagctctgggtaaaaacgaatgtgccaagaatcatcgtaagaaagccaaaccactcattgagacctgcaaaaaacagaaggatgggtaaaatagcgccagctttatcgtagatccatttcctatatttcccggtgtctatgtaccatgaagcactgttaattacggcttgaagggccatgaccatagagactccaaggacagaggagaggacatcgtaaaagtagagctgcataaaggaggtaaaagcggcgaaggaaagcccgatgaagttcgcatatacgatgagccacgccacaacggaagagcttcgaacgaaatctatgctctcaaaaatgtgggacatgtaagatgtcctgctttttaccgtgtccgcaggaattgttgccgtgagcaccagcgacagcaggaagaacggtgcgctcattaggacggcgaacctcattccaaaagtctccgccagcatgccaccagtgatcatccccacgagcccaccagccagttcaaaagcccttagcctgccgtataccctgggatagtcgttagccctgccgtccctgctgagcagttcgtaaacccaggcggtttctgcaccagttctaaatgccgtggccagcgcggcaattatcatggaagcgagaaccatgggaaaagagcttgccagatatagaactgtcacgtagaggacggagaggccctcagagagaaggacgctcagcttctttgagactctgtcggcaaccacgcccgttggcacctcaaggagggcgactaaaattaaagagagacccatcaggaagccgatctgggcctttgaaagcccaatctcctggaggtaaaccagaaagaaaccagagtaaaaggctatcctgaggaatccagataggtaaaagcgggttgtgtagtccaagtctaaccccccatatcgagggactaatcctacatcacctatgctcgtgagattctctattctttctcttctcctgccatggctttctctaagttctccctcgtcttcttgaactccctcaaacacgtcggacagcaaaagaagtagaccttgtttctgtacttgtagactatcggctcgccaactatctccttcccgcagtagtcgcacttgtaagagacttttatttttggtctgggtggtttctctttgctctcaaggatcggcattatctcaatgacttcaacgccggtgccctcgattacccgcttgaggtcttccatgttctcaactgccacctttatgaggtacttcgtgctcgtgaagcggtttacctcgattatctcctcgaacccgtccatcttctccgggttctccgttttgacaacaagagcgacaacgttgtgagccctctggagctccgggttgagctttatcgtgtagccctggattaccccctctttttcgagcttctccagcctcgctctcaccgtcggcctgctgacgccgagcctctcagcgagttcagaaatgctcagcctcgcatcgtccattaacagatatatgagcttcagatcaaggtcgtctattttcataaaaccaccgatgggtgttctcgcacactcataaaaatactttcccttcactctttccactgtggtcaaaaactggcgctcaaattttatgctgtgcaaacttacgccgcgacacttttttagcataaaaatgctaattttttccaaaaaaatttataaacttagcattttttagttaaaaacatgagggacggctttagaattggaatcctcggcggcggacagctggccaagatgagcgcgcaggaagcgagaaggatggggtttgatgtcttagttctggatccaaccccgggatgtcccgccagtatggtggctgagcaaatagttgggagcttccaggacggggagatggtaatcgagctcgccgaaagggctgacgtcgtaacttacgacatagagagcgtcaacgttgaggcgctcaaaaaggtggcgaaggagaagccggtcattccagagccgcacgtcttggaggtaatccgcgacaagtacgtccagaagaaggtgttgaggagggcaggagtcccagttccgtggtttcgggagctgaagagtttagatgagcttgaaaacctgatccccgttgtccagaaagcccggagcggtggctacgatgggaggggtgttgtggtcattagagacgaaaaagaccttcaaaaggctctgaacgttccctcgtacgttgaggagctcgtgccgatcgaaaaggagctttccgtcatagtggttcgcaacgatgacgagacgctggcttatccaaccaccgagatggtcttcaacaatgaggggaacattctggacttcctcgtggcccccgggcgggtcgaaaaggacgtcgagaaggaggcagaggagatagccattagagccgttgaagccctcgatgggcgcggggtttttggggtcgagatgttccttgccagggacgggagggtgctcgtgaacgagatcgccccgaggccccacaactcagggcactggacgatagaagcggccgtatcgagccagttcgagcagcacgttagggtagtggccgacctgcccctcgggagcaccgaggtagttttaaacgccgccatggtgaaccttctaggagaaaaaggctattacggaaagcccgtctatgatggggttagtgaagcgctcaggattcctggggttttcgtccacgtatacgggaagagggaggtgttccccttcaggaagatggggcacgttaccgcagttgatagaaccctcccaggcgccatcgagaaggccctgagggcgaaggcactgataagggtaaggggtgaggtgaatgcccaaagtgggaataataatgggtagcgactccgacctcccggtcatgaaggccgcggccgaggtgctcgaggagttcggtgttgactacgagataaccatagtttcagcccacagaacccccgagaggatgttcgagtacgccaaaacggcagaagaaagggggatagaggtaataatagccggagctggaggtgccgcccaccttccgggcatgacggcatccataaccacgctccctgtgataggagtccccgtaaagacatccacgctgaacgggcttgactcgctcctctccatagtccagatgccgaggggagtgcccgttgcaaccgtcgccataaacaacgccaagaacgcggccctgctggccctctcaatcctcggggtgaagtacccggagataagggagaagctcaaggagtacaggaggaggatgagggaagaagtggaggagaaggcggagaggcttgaggagatgggctacgaggagtacctccaagtgacagggcaaggaaagtgatgcagacttcccaatatggaaaaattttccggctcttctttccaatttgtcacgaataagccccataagcccttctaataaacttcattcaggtgagagcatgaagaccactctgaaagtcaacggcatgacgtgtgccatgtgcgttaaaaccatagagatggccctagctgggctggagggggttaaagctgcaaaggccaacctgaacagcgagacggtcttcgtggactttgacgaatcaaaggtgagcataaaccaaatcatcagggcgatagaggatgttggctacgaggttatcagggagcgcagggacgccgtgataaagataggcggtatgacgtgcgcgatgtgcgttaagaccgttgaaaacgcaataagagagctcccaggagttctcgacgtgagcgtgaacctcgcgaccgagagcgcgagggtctcctacaatccggctcttgtaactattgaggacatcaaaggggccgttgagggcgtcggctacgagtttttgggcgtggagggggaggaaagccacgacatagagaaagaggtcagagagaggcacataaaggaaatgaagagaagcctcctggtggcatggggtatcgggataccgctcttcctctcaatgcagttgaagaggttagggatagaggttgaaaacctaatttacgtccagttcctcctcgcgacggtagccatagcttacgccggcagagggatcttcaagaaggcctactcgtcgctcaggcacatgacgctcaacatggaggtcatgtacgctatgggcataggctccgcctatctgacgagcgtcctcgctacgttgggcgtaattccgagggagttcaacttttatgaagcaagcgttcttcttatggcatttcttcttttaggtcgttaccttgaagccagggccaagggaagaacgagcgaggcgataaagaagctcatgggccttcaggcaaagaaagccaccgttgttagggatgggaaggagatcgaggttccgattagcgaggttaaggttggcgatatagttgtagtcaggcccggagagaggattccagtggatggtactgttatcgagggtgagagctacgttgacgagtccatgatcacgggcgagcctattccggtcctcaaaaagagcggggagaaggtaataggtgggacgataaacaggaactccgtcctcaaggtgcgagctgagaaggtcggaagggacacgctccttgcccagataataaaacttgtcgaagaagcccagaacaccaaaccacctgtgcagaggcttgctgacacggtcgtgacgtacttcatcccggccgttctcacgatagccctcctctccttcacctactggtacttcatagcgggcaaacctctggtctttgcctttaccgccttccttagcgttctggtcatagcgtgcccctgtgccttcggcttggcaactccaacggctttaactgtgggagtaggtaagggggccgagctcgggatactcatcaagaacggtgaggcccttgagatagcgaggaaggcaacggtagtgctcttcgacaagacagggacgctgacaaaggggaagcccgaggttaccgatgttataaccttcgatgtggacgagggagagtttttggaacttgtcgcttcagccgaaaagcgctccgagcatcccttgggtgaagcaatcgtgagaaaggcggaagagcttggaatcgaagtggaagagcccgaggaattcgaggcggtaacaggcaagggcgttagagccaaagtccgcgggaaggaagtccttgctggaaacaggaggctcatggtcgagaacggtatagaccttgagagcgttgaggagaccctccagaggcttgagagcgaggggaagacggccatagtggtggcgatggacgggaagatcgtgggaatcattgccatagcggacacgataaagaaaggggccagagaggccatcgaggatctccacaggatgggcaagaaagtgggcatgataacgggtgacaacagaaggacggctgaggcgatagggaaggccctcggagtggactacatcttagccgaggtgcttccgggggataaggcaaacgaggtaaagaagctccaagaaaaggggaaggtggtggtcttcgttggcgatggaattaacgacgccccggccatggcccaggctgatgttggaatagcggttgggaacgccacggacatagtgatggagagcggtgaggtagtgctggtcagaaacgacccgagggatgttgtgagggccataaagctcagccagaagacgatatcaaagataaagcagaacatcttctgggcgatgttctacaacaccatactgattcccttcgcggcggggctcgcgtacgtgctcttcggggttacgttcaggcccgagtgggccgctggagcgatgagcctcagcagcgttagtgtcgtcacgaactccctcatgctcaagcgcgttagggtttgacaacccttttatcttttgaaaacaaaaataatggctggtgtcggtatgatagtggagtacgatgagaatgttgactttaccaaggggaaggccgtgctttggttttcaattcctggctgtcccccgtgcaggctcgtggaggcctttatgaaggagctgagcgaagaatttggggaaatagccattgtccacgtaaatgctgagaagtggagcgggctggttgaggggttcagaattttaaacgtcccaacgctcgtctacctcaaagatgggaaagaggtcgcgcggcagaacctcataaggggaaagggtgaggttctcatcaagttcgaagagccccgggaactttagcgcctcccaggttcacacctgcgggactccgaccgggaagatgtagagcggctctccgggaacgcccattaattttttgacttcctcatcaatgaatgctccaacggcaacggttccaagccctaaagcggtcgcctgaaggtagatgttctgacccatgtggccagcatctatgtgcacgtacctgtaacccctctcaccatacctcctcgtcgtcctctcgtagtgggcgactatgatgatgtttatcggcgcggtctccacatgcctctgacccaaacaggccttcgcaaggggtttgtttatgtcgccttctctcacgagctcaagggcgtgtgcttccccgtcgtagtggtagaggcctggatttaggcctttcaccttcgaaaccgccacgtagacctcgaaggggtagcaggcacccgcacttggagaagtcctcttgccccaggcgttcatcccgtaggccgcccagaggagctgggagacctgctcaagtgtcagcggcgcatctttgtacttcctcacactccttctcaggtttatcgcttcctcgacgctcatttctcccttaagccttggggcggggagttcaatccgcatggtacatcccgaattaatgaaggtattttcattgattagggttttggcctcgaacagccttggggtgtatctttcgagtggtctcgttcaaaactctaaaatatcatgacgacgtaacggcaaacatggactatcggagagcggccgtactcgttgtagtcttcgtgatggtgtcatctctcgcgttattcctgaagccatacattcccggggaaagcaggactcagtactctggggagaaaattctcctgcccccaccaaggttggaaggcagcatgagcgttgaagaagccatcgcaaagcggagaagcatcagggagtataaagacgaacccctaagccgggaggagcttggccagctcctgtgggcctgccagggaataacccacgaggagatgagggcagccccaagcgcaggagccacgtatcccttcgaaatctttgttgtcgtgggcagagttgatggattaaagcccggaatctaccactacgacccctttgagcacagtctgactttggttaaggaaggtgacttcaggagggagctccaggaggcggcgctgaaccaggagtgggttgggaaggctgcaatggacatcgtgctcgtggccttttatgagaggactaccaagtactacggggagagaggcatcaggtacgtccatatggaggcaggccacatcggacagaatatatatctccaggccacggctttgggacttggaactgtagctgtgggagcgtttgatgatgagcgagttgccgagatactgggcacgaagggggctccgctctatatattccccgttgggagggcctaacatggtggttttagaccacgggactctcggatacataaccttcggccttatgagcttctcaatgctcagcggcgccttcatattcctctccaaaaagaggcagttctggataaaggtgcacctgctggtgagcattctggcctatatcttcatggtctggacgatatgggtcgtggggtgaaggggagaaaaaaagtaaaaccttcactcctctgcaagcgttggaaccgcgtttcctgcctcgaacttggcagtgaagagtccccttgtcttgttggctatccaaacgaggctcagcattatcgggacttcctcaaggacgccaaccacagttgccagagcggcaccgctctccagtccgaatagggctatggcaacagccacagccagctcaaagaagttgctcgcgcctatgaaagaggctggagcggcaaccttgtgcgggagcttccagagccacgcccacccgtaggcaatcgcgaagataaagtacgtctgtatcgtcagcgggatcgcaatgagggcaatgtgcagcgggttttcgaggattatcttcccctggaaggagaataggagtatcagcgtgaggaggaggccagctattgaaacggtgctcagcttcggaaggaactggcgctcgaaccacaccggccccttggtcttcaggatgtgtctccttgagatgtagccggcagtaagcgggatgacgacgaagaggacaaccgaaagtaggagcgtgtcgtatgggacgggtacctcgttgaggcccatgaggaagccgactatcggggcgaaggcgaagagaattatgaggtcgttggtggccacctggacgagcgtgtaaagcgggtcgccatcggccaaatagctccacacgaagaccatggcagtacagggtgcagccccgaggagtattgcccccgctatgtactccttggcaagtgagggctcgatgatgccgagcttgatggaaaatagcgtccctatgaagaaggagcttatgaggaacatgctgaagggctttatgagccagttggttacccaagtgacggttaaccccttaagcatctggcccttgtgcactctctttatcgccgaaaagtccaccttgaccatcatggggtatatcatcgcccatatcaagaccgctatcggcatgttgacgttctctatcgtgagctttgagagcgcctcgggcaccgacggtatgagctttccgagcgctatgcccgctattatacagagggctacccacaccgagaggtacttttcgaagaagcttaacccctttttctcgcccatttccacacccgttggattgaatgaggcttcaaataaaagggtttttaaaaccaaaggtggaaatgttgatgaaatgctcttcatctatatggcactctatagactactgcggcaacgcctttaaacctcttctccgagctcttcctggtggaaaaaatggaggaaaagctcatcctcttcgtctgcgtcaagaactccgcaaggagccagatggcggaagcgttcttcaaccattttaacgatgatccaaggttcagggccatgagcgccgggacggagcctgccgaagagatagatccgctcgcgagaaaggccatggaggaaattggaatttcccttgagggccagtatccgaagctttacaccgaggagatggccgataaagcgtacatcgtcatcacgatgggctgtctcgacaagtgcccctacgctccgcctgaaaaaacgtgggactgggggctcgatgacccctacggccagccaatagagaagtaccgcgaagtaagggacgagataaagcgccgcgttttgaagctaatcgatgacttaaaggctggaaagagcagggaagagataatcgggaagaaatcggcgttttcaatttcaattagtgctaaatgagggtattggttaggttctgctgtttcgtttcaaatattttgccgctagttctttctttttcaaaagacgaaggggagaaaataagcaccttgcaacaatgaagaaaagagaaaaatttgggatttgggtatcatgggctcactgtccgctaaactccatcctcttctttactacatcaatcgccctcgctgcgtcctccttgaactccggaaggccgagcttctccatcgtctccggcagtgggacgccgagctcctcgtgccagcccctcagcctgtagaactcccttctcgcttcgaggaagtcgttgtagtctatgaaggccgcgttgcccttcgccggtccgtccggctcgggctcccaccagcgaggaggaatggtgtcgtcgagcggcggtgttacccagtcgagggcgtcgtgtattctcgctatgctttcaactccccatgccctctttctgagttcttctactgtccactcttccccggtagctacagagtagagcttggccaggtcttccatcttgtagggcacaaacttgcacgttccgagcatgtccgtgatgtaactctcgtctctaccctcgatgagagaaggtacaagctccttcgccggcccctgattggggagctggtgaggcctcggccagccgcggaggtgtgaagcgccaacgtcagcggtggcgtagctaagtccgtatgtcctcctgccgcgcgggtcccaggccgggctttccatgcccttgacgtgaacggcgaactcgcagccccttccaagcctctcgcaggctctcttgactccatcggcgaggattgctccgatgcccttcctctcggccatcagctttatgagcctctcctcagcttcagcatcgccgaagcccttcacgggaaaacctatctcgtcctcgctaatcagtcccctctcaaccatctcgaagagccagccgattgtcgctcctgtcgctatgctgtccattccgtagtcgttgacgaggtgtatgaaatatgccacggcagggaagtcaaaaacgccagtagctgctccgagcatggctatgctctcatattcaggcttgacgcggatcttcttgcccttgtactcgacctcaacgtagcgggcgcactttatcgggcagctctttccatggacgaaccactccggctcgacctcgtacttcttgacctcatctccaccgagtttggaagcaagctcgtccgggatgtagggccttgagaagttgtaggccgggctcattccgagtgaagcggcgctccttagggcgtcggtcgttccgtaggttctcgtgtgctcgtacttggggtttgtggcgaactcgttgtagtattcctgccagagcctctggaactcctctggctccgcgaccttaggtttctcgccgggctcgacgaccacggcctttaccctcttgcttccaaggactgcaccaagaccaccccttccgctggccctctcggtgtcgtaaattatgtccgctatcctgctgagcctttcaccagccgggccgaccattgccatgctcgccgtcggatactccttccagagctccttggcaacctcgtagttgcccttgccccagaggtggctcgcgtccttaatctcgacctttccgtcgtggatgtagaggtaaacgggctcctcgctcttcccttcgattatcagtgcgtcgaagtgtcccctgagcttcgggccaaaagcgtcgccaccgctcgaatcgctgatgagcctcgtttcggggctcttgctgatggcgattaccttgctcgaacccggaacgaggccagtcaatccaccagccgcgaagacgaacttgttcgctgggctgagcgggtcggttccaggcgggacttccctgtagatgatgtagtagccgagcccctttccaccgatgaacttccttatcacctcatcaggaagctcttcgtaggttacctttccagttgtcaggtttacacgggctatcttgttctggtagccatacatcagacacacccccttgcgttctctctatcctcctttgagagtctccatcccatagcaccgaagttctcctctaggtgagccttgtttccagcctttgggatggctatgacgttctcctcccagatgaggtagttgagcgcaacctgagcggctgtcttaccgtatttcttcccgatctcggccaaacattcgtttctcgcgagggttcccttttcaagcggcgtgtaggctatcagcgcaatcccctcacgcttcatgtagtcgagcagacctgtagtttctggccagcggtctttgagggagtacttgacctcgttggcgactatctcgtacttcttcatcgcctcctggcttctcttgagaagctcgaggtcgaagttgctgacgccgatgtacctgatcagcccctcgtcgacgagctcctctagcgcgtggagcgtctccttgatcttctcccaactgtcgccaggccagtggaggagataaaggtcaatataagtgcctagtctctttgcgctcgctcttgcggccctctttgcttcctcgtagccgaagtgtgtcggccacactttgctgatgatgaaaatatcatcgcgctcgaactcctttatggcctctcctacgagctcctccgagtgtcctgccccgtagaactcagcggtgtctatgaggtttattccgagctcgaggccatgccttagaacctcaacgctctcattatcctttgaatagtctggactctcgtagccgcctattccccacgtgcccatgcctatggccgtaactttgtcgtcacctatccacttaaggtcgttaaaaatcctaaccttcttcatctttcacaccaaaacgatttggaactcgaccttaattaaggtttctctctgaacgataaaatggaagaagaaatgatgggtcgtggccaactctggaaactgagttttggccaaaacggttggggacattctgagagcgctaccatgaacggcagttttattaacaacgatagattcacgcccaatatgagacactttattcgaccctttaatgaaccaatgttctcactcagcaacgcacctcacaacgggggcctctttaaggcaaacggcttcttcttcatgatggttcacaagaactattctggcgactataaggccgattgtctgaagttcgaacaggaaaacggcctaaataacttcgtcggcttcatgacggcggctaacattgagaaagtcctggccgtctcaaggagcggaagcgttacagcctacataactgcaggggtaaccaaccccgcgatagccggagaagtcccaccgccttggaagcccgggacgataaatatggcgctcgttattgaagacggcctgacggtcggggcaatggccaacgcaataatgacggctaccgaggcgaagacatacaccctgctgagacttggctacaacgcgacgggaacgacgagcgatgggataggagttttcgccttcgagggagaaaaagaatgggccgggacggcgacggagctcggaataaacataggccgagccgttaggaaggcgctggaggagagtttggggaagtggaaatcatcgagaaagggttaaatacacgttcgtcaaaattcacctcggtgagagaatggaagatatggagagccaggttgagagacttttcctgtacgcccagaacctcctcttgaagcttcggctgaaggaacttcaaaaggatcacgttacacttgaagacattgagagaattgttcaggaggagttaactgttgacgaggatgttgaagacataacagagataattcgtcagatgagggagagagattatgagtttgagtactgacgtggtactggataccagcgttctcgttaagggtattttgccccctctgcgtaggaaacgtgatgatgtttattatagacagctctcccttcatttgaaggccaaggaacttttgaataacgttcaggacggaatattctcgcttcacgaacccgttgtagcccttattgaaacttcaaccgtgctgtggagactttcgaaaagtgaacgaatagtcaatgttgggatagagtttttggaggcacattccctcttttacttttttcttctgaaagcctcgccctttagggcggggatgcagtaatcaaaagaccagcctgaaagcgagaaagcacttcaccaaaatacttaaatactaaaccatactactaaatactggtgagtggagtgggagtaatcacaatctccgttgatgatgaagtcgaaaagaaattcagagaactcgtggagaaaaaatacgggaaaatcagaggggctttaggtgttgcggtaaccgaagcaattaaactctggattaaaaaagtcgaaagcgaggaaaaatgaagcgaacagtaacagtaaaactacaaccctcaaaagcccaagagaaagctctttccgagttagctcttattagctccaaagtttggaacaaggtgaactacctaagaagaaaagaattcttcgagggcaaaccaatagactttaacaaaaccgagaaaatagtctatgaagagtttaaatccgagataggctcggcaacagtccagcaaatagcgagaaagaacgccgaaagctggagaagtttcttctcactccttcggaacaagcggaacggagaactaccaaaatggttcaagccaaaacccccgaactacatcaaggaaggaggcttaataatcctcagaaacgaccaatacaaaattgagggaaacaagctaatcctcaaaggcctcggaaaattcagaagactggaagtccagttcaaagggagaatccaccttaaaggcaagcaaggtcgcttagagataactttcgaccctgtaaagcgaaaatggtatgctcatatttcatacacggtggaggagaaactaattaacggtaagtgggttaagcttccaagagaacccttaggcaacctttcagcaggcatagacttgggagtgaacaacctaatggccgtttacgttgagaatggagagagtttcttggtgaacggtaggccattaaaaagtattgatttttactggcagaagaggattgcagagtatcagtccaaacttaacaaaagcggagctaaaaagagtaagaaactctccagaatgcaccagaaggccaagcttcaggcgaaacactacattaacacgatggtgagacaaaccgttgagaagctttatcatctcggagtttcgagaataatagtcggttatccgaaggggatagcaagaaactccgacagaggtaggaagcagaattatctcctctcccacgtctggcggtttaacacggtgataaaacggctcaaggaagtcgccgaagagtatggtattcaggttttggttgtgaatgaggctttcacttcaaaaacgtgccccgtctgcgggaagccccacgatggggcgagatttgttcggggtttgtttaagtgtcccgcaacggggcttatcttcaatgcagacctcgttggagcgtttaacattttgagaaaggctgtaaaaacgataaccccgagcctctctgctttgtcaggaggtaggggtaattggccggagacccggccagaggggtcgaagacccgctttaaattgggtctgaatgagactcctcaaacctctccgccaatggtgaggggttaattcgttggaaccctcgccctttagggcggggaggaggtcagtcggatgtgtacctaatggatgaggctatgaaactaggtaagaaaactggggccagcggctttgatgttcttttcctggcctgtgcaaaggtctgtggagcagtcctcatcacagatgatctaaagatgtatgaaaaggcgagagaaataggaataatgagccagcttctcagggagatttcatccccatgagcctcctgtaaagctcctcaaccttcgctgagacctcctcgggtgaaaagcctgccttgatggcaagccaggttgctcctcccgctcccacgccctccttgacgtagccgttctcgtagtccctcaatcctttgaactcactcttcgagaagtcgaggtcggccgcataggtgattattcctatctccttcgccgtctctatgaaggttgcgctcttatcgcggactacccactttgtcgtagctatcatgaacctgctcatgtcctcttcgagggccttcaggagggcagatactgccagcatctgcgttcctcctgctaaaactacatttttcctgaaaccgagcgccagacccacgacggttgccatcatagggtcaccaaactgcctgagcgcttcgagcggattgtctttcagctggcccctctcgatccccgctctctggaatccctcagcaataacttgctccttgaggctctgggggttctcaggtgaagctgagctcgtcctcgcatcgtagcccatagcccagagaacggcctgggcagtggtagttccgccgggggttgactcgccgataaccagctcttctatctccgtcctattgagctcctcgccgaggagctttgccatcctgacaatctcgccgaattcggggagtgctggctctctcctgaagtccctcccaacggctgagcttatgtgaacgtggggtacgaggggggcgaggtatgttccgcccctgaccacgagtatcggaaagttcgcaagttccctagcggccttggtgattatagccggtgtcgggtgtccttcgggggttacggggatagcgtctattatcctcggcttttcatagaagaggtattcggcgtcggcgggcggagtcagctttgtcaattcgggagtcgctccagcaacgcttatccctggtatcaggctgacctcagtgtttcccagaaccagaatgaagatgctcttcacttcaaccaccgtggactttttatccagagccaatttaaacttgttgggtgtgggaatgacgaggatttaccacgcggtcaggttcaagggcggaaccgcctacgtgttattcgacggctgtaactggaactgctctttctgcgtatggaggaaggtaacgcgatggagcctctgcttgccgttggaaacgcgcagaaagctcgactacatgtggaggacgggtagagttaggtacctctccgttaatgaagtcgtggacctcctgaaaaaagcaagggtaacaacggccttcctcggcggaggagaaccaaccttggaccccgagctcaaggctctaatgcgggcccttagacgcgaggggataaaaccctggctcgtcaccaacggcgagaacctcgacgacgagatggtggagctcgccgagggggcgaccttcagcataaaggccctcgacgatgaactccaccgcagaataacgggagccccaaacggaaaggctattaagaacttcaggcgctacgcgggaacaggaaagcttgtcgcggagacggtctttgtgcccggcctcgtggagtgcggggaaatagagagaatagcacgcttcatagcgtccatcagcccagaaatgaggctcagaatagacccactcgtccagggggtcgacattgagaaggtggacgaatgcatagagcgcgtgagggaaattctgccgaaagcggataggatacgcgttaagggaagcgttgagccccccgaagtcctctacccggaggtgtgaagatgggaaaggcgctgatggttcagggaactatgtctggggccggaaagtccctcctcgttgctgccctctgcaggatattcacgaacctcggctacgatgtggttcccttcaagagccagaacatgagtctcaactcggctccaagcatcgaggggggagagataagccgcgcccagtacctccaggcgctcgcgtgcagaaaaaagccgagcgtgaagttcaatcccatcctcctcaagcccgagggcaacatgagaagccaggtcgtcttcatgggcaggccgattgggagcgtctcggcaagggactacatgctctcaaagaaggctgagctttttgaaaaggccatcgaggttttgaaggagctaatgagagagcacgacctcgttataatcgagggcgctggctctcccgttgagataaacctgaaggactacgacatagccaacatgcgcgtggcaaaagccgttaatgcccccgtcatcttggtggccgacatagacaggggcgggagcttcgcccagatagtcgggactatggagcttttaagtgaggaagagcgggagctcgttatgggcttcatattcaacaagttccggggcgacgcttccctcctgaagcccggcttcgagttcctcgaaaagcgctgcggaaagcccgttctcggtgttgttccgtacatcgagcatcgcctgcccgaggaggactcgctcgccgagttcccgaaggttaggggcgacctccacattcagataatcaagctcccccacataagcaacttcactgactttgaacccctccactgggctaacggcgtggactacgtaacgagggccgaggaaataaagggcgacctcataatagtccccgggagcaagaacacggtagaggatctgctctggatgagggagaacggaatcgaggacgcgataatcgaggctcaccgcgaaggttccttcgtcgttggcatatgcggcggcttccaaatgcttggaaaggagataatcgatgaggtcgagtcgaagaggggaagagtagaaggcatcggccttctgccagccaaaactgtctttacaggggagaagagaaccaaccatctaaaggctgaagtgctttgggaacccgcaaggggtatgtgggttgagggctacgagataagaatggggcgctcaacttctgaaaagcctttctcggtaataacctcaataaacggggccagagccttcgagcctgagggagcgataggcaagagggccttcggcacatacctccacggaatcttccacaacttcgccttcacggagagatttctcaacatgctgagagccgagaagggccttgagcctgttaaggtcgaggagtggagcatcgaagaggagatagagaagtttacccgggttgtgagggagagcgttgatgtcgagtacataatccagagacttgggctttagcgacaccgatggagaattttcttcgtagctttttccagttttttcatctcagatgccattctttctgctagggcttccctttctttttcgctcatctcgaatagggacttcgtgagggggtagtagatgcacaacctctttgatcctctagtagttccgtatggttcctcccacttgatctcttcgattggtacattcattgcccttgctatttcgtcaatacgttcctgaagacattcctgtatccgttcgttctcctcgggagagggctttcctatatagactccaattgaaaatttgtattcccatatacgccactcgtagggaacatcagagacgccactaccaaacacgaatctgtatcttggccgtggcctaaggtttttgccgtatctctccaggactcttctccagatatctagataagtctcttccctgggtcccaatcgttcaatggcactcttactgattttcctccactgattgggcattacgacgatatcgaagtcaaccgcatagggggagtctccgattttcacagccttcacttcaattccaaagaatccgatatcctggccagtgttctcgttaagccagtttagtgcctgtttatgctcttctgaaaacttctcggctatccacactatgatttttgcatctaatcccgatgcataagtgagtatttttccgaggtgatcatgattggttttttcgaactgattctctatgattaccattccctcgctattggcatccctcgcaactatatccgcaaaatagcttccaatctggtattccctctcaatgtcttcgagttctactcctattttttcttcgagaattttaatgttctcaacaagccagttactgaactcctcttccctggaaaacactttccgaatagggaagacacctaaacgggcaatctctaccataccatcaccgtcccgttgttaggtcttcccacccaaatataacttttctcacaagcctcgctatcctctccgcgagctttaaatcctccggcgtgttgacgttcagggccaaaagcgggttctcaagctcaaagaatccctccccctcgaagccaaccgcgttgaggcccactattgcgtagccccgataaacgagtggcttaaggtcttttgggactttctgtataggcaaaactccggtcaggctcgttttcccgttgaaggcctttttaacggcatagaaatcgctcggctttacgaagggaatatccgatgaggagcttataaacggtccgaactcatttaaaagccactgaacgtcctcgacatagcctttcccaggggtctccatgaaggggatcccctcgcgaaggcacagctcccttgtcttcggcgtgttttttgagagggccacaatggtctcatcaacccgggaagcggaagcgtaaacccagaggagcatctctttgccggctattttcagaacgggcttttccttgcccatgcgtgtggacttgcctcccgcgaggatgattatcacagataccaccacaccagcgccataaccacgagtgttccagcgcgcgttatctccgcagtagccccgaggcagtccccgttcaaaccgtcgaagttcttcagagagatcctaatgatatggactccaaagaggagcccgaggattccggctagggctctcggctcaaacaggacaactgaaaggcccaacaaaacatagaggagcgtcccgagtgccagctgtcttccgttcatcccctccatgaagtacgcacccaatccttttccaaggggccgtttagttgctagagccaacaacattgcgtatttggaattcagctccgccagaaagagcgcgtagaacgggagaagctggagggaataaacttgaaggaggaggactatcacgaccgcaaaaagccccgctatacccgtgttcacgtccttcataacctcaattttcctctccctgtcgcctttggccattattccgtcggcccagtctgccaaaccatcaaggtggaggagaccgatcgtccagtagagggcgagaaccgcaagcaaattagagagaggaagtccgagatacaggataagggttggaagggccgagctaaccagtgccacgagtgggaaggcccaaagctcgtttcgggccttttcaaaatctcctttgacagggattctcgtgagaaagggcaggatgttcctcataattctccctcgaacagctttgtcatgcagccagctataaacccgccgatggcatcatcgaggaacggtggaagttcagccagaattccgggcttcctcgtgtcgtagtagaagaagttgaagagcgccatctttccgccgatgtactccgctaggtttatcccgatgagttcatcagccacgaggttcacggggtcgccctcaactttgaaaccttcttcgagaagcagggcggccatcaaaagggcctggacgttgatatcgtttaagtaacggagcatcaaacctctgagcttttctctggcggcttctttttcctctccgatgtagagctccatggccgtgtcgagcatcgcctccagggttactcctttggattcgagcttttggaggagttcttgagcgttcatagctcagacctgccttcgaggaagttcaaaacttctctgggagtgtaaaccttgatatatccgccaacagatttcgcaagcttcttgtctcccgtgagaagcgggacgttgagtgccagagcgagggctacatatgggatgtcttttggatcaggacaaatttccctggccttttccatcccttgaaggactatgttttcgggaattacgacagtctgtctccgtataatcgaaagcacgtaggcaacttcgtcttcactcaaatgcgtgagcctcgatattctttcgcgcttggagtcaagctcttcccataaataggctggaatcaagaatcggaacctctcaaggacgtggttctccataaaaatcctgtaggcaacgcctcttccgtggagtgccgagaagatgacgttgaaatcgagcacaagctccattcataccgccccgtatctccgggctattgactcttttatctcctcttcgagctttttgagtccttcttcatctggttgagcttttttcaggatctcctcaaactttcttgcctcctcaatcctccgctgtatctcctgggagacctcaaggatcaccttttccctaatggcctcggacatcccctcccactcgggaggtaccttgatccgtatgacgatctcggacgcccccataatcctcacctcaatacgcctaacacctataacgttattatgtctttctcaacccaaacctcgcccacaggtaccgctcgctctcttcaacgaacttcacttcgatgccgaacctttcttcaaagaggggagcttccaaaacgaccgtgtgaaactcccctgcttccccgacggggtcacactggggttcgcttccaggaacttctccaaatcctcaaccgagcggaagatgtagcctaaccactccctcccgagcttttctttgttcacggctattatagcccacttaaagcccgcttccagcatctcctcagcgagttctctagtgttcctcccccagaggggttcgagcggttttatgcccgctttctcggcaagaagctttacccacctcaggtggtcttcgaggtaaacgtctccagctatgaggtagtcaactccaatggagcctatgaactctgccagggcatcgctcccctctttcatgtcaaaagtgagcatctcctttcccatggcagttgccagcgtctttagcgcctctagattttcccagtgaggggagaggcctatcgtggttttgagcgtgaggaggtagggcaccactattccttttttctcagctaagtggagggcataaagcccgtccttgccacccgagaagaacgcgactcccctcaaagcctcccctccagtttaaccctctcatattcctctcgtattttctggagctccttttcatctacgtagggaatcacggccccacaatcaaggcagagccaaggatatgcgtgagtagggccttttatggcatctctaaggccgtgcttccagggcgcctcccagaagtatcgagcgtatccggcttggtagtttttgccctttaccatcgttccaccgcacatgggacaccttttggtttccatggtcaccaccaaagctataaaccccatggagtttttatccattgcgcccatgagcaaaaactgtgtagcagtaaccaacgggaggagtcctcaggatgcacgctttagttccctttctcctggcactcgcgtgggacttaacccttggtgaacctcctgcaaagctccatcccgtagtctggttcgggaggatagctggctttatcgactcccgctacaaaaggcgctctccagtccttgatttcactgccggccttctcactgcactggttgtaatcaccttcgcgtttctgctctcgatcgtgccgttttacgcgccctttcccttaaactatttcctagcggcgtatctcctcaagagttcctttgccataaaaagcctccacgagcacgtttcgaggacgataacggatgatatcgaggaaaagagaagggcagtctcaatgatagtgagcaggaacacaaaagtcctcgacgaggcccatctaaactccgccgccatagagagcctcgcggagaatctgaacgactccgttgtggctcctctcttctacttcctcctttttggacttcagggagcggtgatttaccgagccgtaaacactctcgacgctatgctcggctaccggaacgagcgctacgagtttttcggcaagttctcagcgaggctcgacgatgctttgaacttcattcctgcccggctgaccgttcttctctaccttcccctcggcgggaggaaagttcctgagtactacaggctggcaaggttcaagataaactccgacaagccaatggcggcgatgagcgcggtccttggcgtttggctcgaaaagcccggagtttaccgctttccagggaaagagccgaaaaacgaggacataaaacgagctttgagaatttactggctggttgtaactgggtgggttatagttgtggtattactgctcgcaacgggggtatgtccatgcttaagcctgtagagttctccgcataccatggcggggcaaggagaaaagaggaaggtttgatagacttctcggcttccctgaatccctatccgcccgagtggctggatgagatgttcgaaagggccagagagataagcggccactatccctactatgaagagcttgaggagggtctcgctgagcttgtgggcgaaccgatcaccgtaactgcaggaataaccgaggccctctacctccttggaatcctcgcgctgaggggcaggagggtgatagtgccagcccacacctacggcgagtacgagagagttgcgagaatttttggagcgagggtcgtcaaaggtccgaacgaccccgaagagctttcccagcttgttgagagagattcagttgtcttcttctgtaatccaaacaacccggacgggaggttctacgggaaaaaggagttgggacccctcttggatgccgttgaggacagaaacgctttactcgtcctcgacgaggccttcatcgacttcgttgaaagtcccgaaagccccagtggggagaacatcgtaaagctgaggacgttcacgaagagctacggcctgccggggataagggtcggctacgtggcgggttttccagaagctttcaggagcgtcagaatgccgtgggcgataggatcggttggtgttgccttccttgagttcctgctggaggacaggttccagcacttaaaggggacgatgcccttaatctggcgggagaagaggcggattgagaaagcccttggagtcaagagcgatgcgaacttcttcataaagtacgttagagatgccaaaaagacagttgaggagctgaagagaaaggggatgctcgtgagagactgcacgagctttggccttccgcaatatgtccgattttcggtcaggaagcctgaggaaaacgatgccttagttcgggcgttgttggaaatttccccctagagccatcccaatctttggccgttttatccaataactttttaagcctcaagtctacccacagccggacaaataatccaggtgataaaaatgaagaagaccaagctctttggagcgcttcttttagtggccatcgtcttcgtgagcgggtgcataggaggctcgggaagctcaacgaccccgagccagacccagagcacttccacaccgagtgcgacccttagcaccacccccagttcgacccagacgccgactgaaactgccacaaaatcctgcgagtgcccgaaggccaagccctactatcctctaaccatcactgacttcgcgggcagaaacgtaaccatcgagaaggagccgaagaggatagtttcactcgccccgagcatcaccgagaccctctacttcctcggagccctcgacagggtcataggagttaccaagtttgacgactatccccctggagttcaggagggcaggaaaataatagggggcttcagcgacccgaacatcgaggtgatagcttctctcgaacctgacttgataataggcacttcgatgcacctacagtacctcgaccagcttgagaagatagcgccggtcataatactcgaccctaagaacatggatgaagtttacgaagccgttgaactccttgggaaggttcttaaccagagcgaaagggccgaaggagtggtcgagttcatgaaggccgaggttgccgacgttcagttccgcgtttcaaataagacgaggccgaaggttctcttcataagctggtggaatccgctttacgtcccgggcaacggcaccttccaggactcactcatcgaactcgccggcggtgagaacgtcttccacgacgctactagctgggcccaggtcagccttgaagaggccgtcgccagaaacccggagataataatcctatcggcccacgcgggagccaccattgacgacatctgcaacagcccgctcgcggacacagatgccgtaaagaacggcaggatatactttgtcagcgacgacaacgccatatcaaggccggggccgaggctcgtcgaggcccttgaggagctctcctacttcatccatccagaggcctacggctacaacttccagcccgtcacctgccccgttgagggctgaattctttcttctttttattccggcaaaagaagttttaagaacagaaaaaaggaaatcacgcaccgaacttctcgcttctgttcataagatccatcattatgggcactatgtcgtggccctttatcctgccgattccgccgcgcatgcactccctctcgccgaagctctcggtgtggtctggtctgactccgccgccagcgatgaggagcggaaccgggtcgccgctgtggttcataacctcgcacggtgtcgagtggtcgccggttatcgctatgaccacatcctcaaggtcgatgtgctcaaggatgtagcctatcattctgtcggccttctctatcatctcggccttgagcttcgggttgttgtcgtggccagcagcgtcggtcggcttgaagtggaggaacacgaagtcgtagtccttgagcagctcaacggtcttcttggctttggccatcacatcggtgttgtactcgccagttgctccctccggagtgtagacgtcgaagcctatcgccctggcaacgcccttgacgagcgagacggctataacggccccggccttgaccttccactgctcggtgaacttcatcggtatgtccgggtaagttccagcaccgcggatgaggaggtagtttgctggcggcttgccctccttcctgcgcttctcgttgatcggatgcttgtcgagaacctcgtgggccttctggacaaactcctcgaggatttcggcgaccttcttgctctcctcgtcctcccaggtgaactcctgcggcggctttccggcctcgtgcgggtcgttttcccctacgcggtagcccttcgccatgcccctgaggacgaggacggccctgtggccggtcgcgccgacgaatatgaagtcaaccgggagcttgacgttctcctgaacggccttagcaagctcgtgggcctcctcagtgcttatccttccagcgcgcctgtcggttatgattccgttctcgatggtggcgaagttaacgcggaaggccagatcgtcctcgttgaggtcgagtccaacgccaagggcctcgaggaatccccttccgcggtagaccttgtaggggtcgtagccgaatattgagaggtgagcggtatcgcttccggccggctggccgggttttatcggatcctgctgaccgagtattcccatcttggcgagtctgtccatgttgggggtgttagcgtactcaagcggcgtttttccgccgaactcttttatcggcctgtcccctagaccgtccaggattatgagaagtccctttctcttcttcatatctatcacctttggtgattaaggcatggggtttaaaggtttgttggataaaactttatgaacaccctttcaaatctcccgccggtgagagaaagtggaaatgctggtgtgggcaggttcaatagttatcggaataatactcctcgttgtctttggagacaggctctcggataaaatcgtagaggtcgccgaaaaggcgggggtttcccccctaattataagccttgtagtcataagcctcgcaacgacgctgccggagataacaaccagtgcgatggcaagcatcactaaggccgagggtatagccctcggcaacgccctcggaagcatcttcgccaacatagcactcattctcggccttgcgtcagtgataagacctctaaaagctggtagcggagcttatgagaattccctcgtcatgcttgcttctctcgggttcctcatgttgctctccgttgatggcaccctttcaaggcttgacggtgccctccttctcgtagcttacgccctgtacctgcggtggctctacaagaagcacttcagaaagggacgcgaaagtggagctgaacgtcacacaaaggcaacggccctcgactacgtcttactcctcatatatggtggcttaatggttattggggcgaggctcgtcgtttacggcggcagaaacatcgccgaggcccttggggtggcggagtacgtcataggtgccaccattgttgccatcggcacctccctgcccgagatgacgaacgccctttacggggcaataagggagcgcggaagcataagcgtcggcaacataattggggcgaacataatgaacgccctcgtagttcttgggctggcctcactgataaggccaatcccgaccggtgcatcgaccctaaccatcgtgctcgtcctcatggccatgctcccaatgatagctgaactgaagcgctctggcggcctcgacagaaggatagggttttacttcctgatcctctatgcggcctatctcgttctgctgttttcgggggcgaagctctagttaagcttttaagttccccctctttctcccgctggaggtgagaaaatgaaagtcctgtgggcaccttggagaatcgagtacatacgctcacccaagcatgagggctgtatattctgcgacttcccgaaggagaaccgggataaagaaaggctcatcctctaccgcgggaagcatgctttcgtgataatgaacaactatccctacaaccccggccacgtcatggtggctccatacaggcacgtcgggagatgggaagacctgacagatgaagagcttttggaaataatgaagctctcccagctcatgataaaggcaataaagaaggccatgaaccctgatggcttcaacctcggcgtgaaccttggaagagtggccggagcggggatagacgaccacgtccaccttcacatcgtcccgcgctggaacggggacaccaacttcatgccggtcatagcggacacgaaggtcatcccagagtccctgcaggaagcctacgaggagctgaaaaaggcgatagacgaagttctcaaggagtgagctctctcacttttattttgaagcttctgtccaagggtaagtcttcaaacagaccctcatccagttcaaccacgctgacatcggtgcttatcacggattcccttgttccctgttttagacgaagttcaaccagctttccgttaactacctttgctgccaggtaagtcccgtcatccgcggttccttctaccatgaagctggtaccgaactcaagcgcaagtctctttaagagagcaggtgcactatcaggggttatcctggtaacttctcccccttcctcggacaccttaaccacgggacatttaagggaggtgcagaactcttgaactgcctccgctatcccgctggcaaaaatctccaagggcttgcccatcagggcctctccaaaacccgcccaatctgcggttaccttgagacggccgttctggactttaaaggtcactgtgagtattccccgctcccctctgaaggtatatatcgcctcgctgttcccaaacccaacgtctaactcaaactcatagccaaaattgaatatgaacctaggcacttcaaatctgactttttgtccgtcgaattccttaaagtacgggaagaacagcagtgtctttttcggctcgctcaggatagttttaaggacgtcccaatcgacgttaacttccacttcccatctccgtgatttcaacggccatcaccggaggggcattagagaagagaaataaaaccgtttctaaaaccaaaggtttctaaccctcaaaaagcgttttccacttttcccctgtcctcttccagcatcccgggggcatcagttctccctcagggcagtagccgagctggacacaccttggcccgagcttcgcccactttattatcggtctgagctcgtcgttctttgcaatctcctcgagcattttccaggccacttcccttatctcccactgcgccctctcgcaggccctgagtcccagaaagtgcttcagctcccggaggttcatcgtgacgactatcttcgtcctgacagcttggggaaggataaaacgcgcgtcttcctgatgctgaccgcgctcaacactctttttatagagctcgatggattttttcatgagttccttccactcagcaagaagctccgggtcttcttttatcccacttggaatgacaaaggtctcctcaacgtcttcagggttcaacacgatataacgctgtgactgctgggtataagaagcaagcctatgacgaacaagttggtgcgaacaaacacgggaacatccctctatggcgaaggtcagcgtcgcgtgctcgaggatactctcgtgcccataacctagaaccctcggaaggtgcatctcaacgtccttgtcgctcattctcccgaaggtctcagtttcccattcatcccagtagcttatgagagccgcccatgtgacagtttcaagaggtttttttgtataattgacaagctttacccttattccattgtccatcctgcccacctgcagtgagatgtagtacttctttatatcttctaccccgttctagttgggacaatctccgaggagagtgtagttcagtgagcataagccccaagattgagccagcattctgccatactgataaaactttgcgtttgtaaagttgtctttcttctcccccaactccctttcgctccccgagccccttttccgacgaaagggttattaaactcgctccacagttctatacggtgatgcacatggtggttagccttgcaggaagagatgttctctgcctccaggacttcacgagggaggagcttgagactattctcaagactgccgagatgatgaagatctggaacaagattggaaagccgcaccgcgttcttgagggcaagaccctcgccatgatattccagaagccctcgacgaggacgaggatttcctttgaggtcggaatctaccagctcggcggctacggcctctacctcaacgcccaggacctccagctcaggaggggtgagaccatagccgacacggcaagggttctcagcaggtacgtcgatggaataatggctagggttttcgaccacaaggacgttgaggacctcgccaagtacgcgagcgtccctgtcataaacggcctctcggacttctcacacccgtgccaggccctagctgactaccagaccatcctcgagaagaagggcaggattcagggacttaagattgtctacgtcggtgacggaaacaacgtcgcccactccctcatgatagccggaaccaagctcggtgccaacgttgtcgttgccaccccagagggatacgagccagacccgaaggtaatcaagtgggccgagcagaacgcggccgaaagcggcggaagcttcgagctcctccacgaccctgttcaggctgtcaaggatgcggacgtcatctacaccgacgtctgggctagcatgggacaggaggccgaggccgaggagaggagaaagatattcatgcccttccaggtcaacaaggagcttgtaaagcacgccaagcccgactacatcttcatgcactgcctcccggcccacaggggagaagaagtcaccgatgatgtcatagacagcccgaacagcgtcgtcttcgaccaggccgagaacaggctccacgcccagaaggcagttatggccctcgtcatgggcgggattaaggtgtgattttggactcttttctccatttgtctttgcacttgttaccatgcagaggaaggtctcttcgagttgtaggcattgcaaacggcgaaccttttaaatcaattccctaactcccaaacatgctcgaacgtctcttcagcctcggctactcaaagaccttcgcggagcgctattaccagctctggggtgagagggctttagcgatagccgaggcgatggaaaggcctcttccgaggtgcttccgcgttaacacgctccgcatcgaggttcacaaactaactaagctcctcaacaagaagggctttcagtttaagagagttccctgggcgagggagggcttctgcctcacgagggaacccttctcgataacctcaactcccgaatatctaagcggcttactctacatccaggaagcgagctcgatgtatcctcccgttgccctcgggcccaaaccaggtgaagtcgtcgccgacatggccgccgcccccggcgggaagacctcttacatggcccagctgatggagaacggggggataatctacgccttcgatgtcggcgaggacaggctgagggagacgaggctcaatctgtcgaggctgggcgttactaacaccatactcttccacagctcgtcgctccacatagacgagctcggcgtcgagttcgacaaaatcctcctcgatgcgccctgcacaggttccggaactatccacaagaaccccgagagaaaagccaacaggacaatggaagacgtgaagttctgccaggggctccagatgaagctccttgagaagggcctgagcgttctgaagaagggtggcgttctggtttactccacctgctcccttgaaccagaggagaacgagttcgtaatccaatgggttctggacaactttgaggttgaactccttccgcttagatacggtgagccggctttgacgaagccattcggcatcgagctgagcgaggaaataaagaaggcgaggcgcttctacccggacaggcacgggacgagcggcttcttcgttgcgaagattaagaagctctaacccttttcattctcggcttccttcagaagcttttcctcgatctcgtgcagccttttcttcacgtcctcgctcaggtgtttctccagctcttccctagctgccttcgccagctcgaacttcgagtcgaactttccgagctttatccagtctattttcttcccttccacgaagacgtctatgtcgcagaacctcttgtagtccctgtattcgaggcccttcaggaagaacttcacctttacagggtcttcccaggtcaggagcttgagcttgtaaaccggaacgcgcatgaacggcctcggatagtcccagtcccagccctcgccaacgacgaagcctaggtcaaggtcttcgagaaccatcatgagccttgcgatgttctcttcgtacctcttctccgtgtcgtaaatttttatcgtgatttcgttccactccggcatcagcttgaggaggagcatcggggcctctatgctcaagcggcggtagaccttcaggaagtgctccctgacgaggactgcaccctcaacttcctcaggcccgagaggacaggagagcctttttcttgtcacagctataacggtgtccctcgcctcgccttcgtccagggcatccctaagggacattacctcgccgttgagctcttcagacaggaactttagggcttcttctactttttcagggactctaaggaatattatcgtactctccacgtggactttctctattggaaggccgttgtttatgatggccgccaaaacagagcgggctgagtccctgattaaaaaccccaactcgggtggtatcgtctccttctgccattcgaaggtgacgaagagcaaagtttcaaactcactgctctcctttatcgcccgatcagttggaattggcttagccccgaatatcttcgtgatgtcctcgctgaccgcctcagagtgaggagtcctcaaaaacaggattgaagggccaaaccgcataaacctcatcacaatcccctccagagcttgtaaccccggtgagtatcggtgcccgggggatagcctatctttacaacccgccttgagggaagaaagacgatgttgatacttctgaggccgtttagccctcctggtatcacttcgaagttgtgcccgtagagtctgaaatctgcatccaatctcgcaacttcttccggtttatggccaagtgcaaactttaccccctctatctcaacgaccgtgccaggttccaccactgaaccctcgaagtactctttcagaatttccagatcgtcctcgttgccggggacaacgtaaagctcagcccctgagcctttcaaaattctcgcaagctttctgactccgcccacgtagagaggtttcaggtcaggtcttctctcaagctttatgttgtcaacgaggtctccagtgtggactatgtactcaggatgaagctcatctataagctgcgctatcctggggtaagccctctcaggtgtgtcgcttatgtggagtagggccttttcatcttcgttctctcttcgaaggcgctttctccgaaggaactcaagcatagcgggcacggcacctttttactgcttctcttcaatatacgtcgggagaccttataaggcatgcttccataagtcaggatggtgataggatgaaggttctagttctgggtgcgggcaacgttggaagggccgttgcttgggatttgagagatgagttcgaggtttacgtcggagatatagacggcgagaagctgaaggcagttggggagttcgccactcccctgaaggttaacgcggccaacttcgaagaactagtcgaggtcatgaagagctttgacctcgttgttggcaccctgcccgggaggtttggctacgggtcaatcaaagcggccatcaaggcaggcgttgatatggttgacgtttccttcatgcccgaaaacccgcttgagttgaaagagggagccgaaaaggcgaacgtgactgttatctttgacgctggctttgcaccggggttaagtcacattctaatgggcagaatctggaatcagcttgatactcttgaggaaggaaggatatgggtgggaggcctgcccaaggatccaaagccaccactttattacagaattacatggtcacctaaagatttaattgaagaatacactaggccggcgagggttatcaggaacggtgccgttactacagtggacccactgggtgaaatcagggaagtcaacataaacggcatggagttcgaggccttcgtaagcgacggtctgagaagcctgctggaaagtgtaagggccgaaacccttgaggagtggactctccgctggccgggtcaccttgaaaagatgagggttctccgcgagctgggattcttcagggaagagaaccttgacttcacactgaaggtcatatctcccctcatgagctttgaaagtccggacttctcgataatgctggttgagggagaaggcgttgagaatggagagagaaagagaatgtcctaccttctgtacgatgaggaaaaagatggtttcacctcaatgagcagggtcacgggcttcacagccgcgataatagccaggatagtggcagagggaagctgcatttacggtgtaataccacctgagatactgggaatgcggatagacacattctccagaatagttggtgagatccgtgagaggggaataacgttagaggaggtggagggaaatgcttcacctgataatagctgaggcggagcttgagctggttccggagagcattagagaccatccggcagtcgtgaactacgcaagaagacggaagaagaggccagaagaggcgatactggacagcacctaccaccacgcggcactgaagaagctcccggacggcgacaggcgcggaaggccagatatagtccacatctgcctcctcaacgccctcgaaagtatagcgaacaaagagggcttcctgcgggtctatgtccacacgagaaacgatgaagtgatacacataaagcccgaaacacggcttccaaggaactacaacagattcctgggtctcatggagagcctctttaagaagggtgccgttccggaagggctagagcttttgaggatagaaaagaaaccgcttgaatctttgattgaagatataaaccctgatacggtcttcataatgcacgaggaaggggagctaataaggcccaggtcgttcggagagatcttggcttcccaccagaaccccgtcgttgtagtcggaggttttccccacggcgacttcatgaggcctattgaggggacgaaagtcagcctgtatcgtgagcctctaatggcatggacggtagtaagcgaagtcatcgtaaactttgaggctgccctgggactttgaacgtggaattgagtatccacaagttttaagctccccaattttcagttccaaaaagcttttatcttttaattcaatcgatacatgtattgtcaattcaaatcgctctaccgtagaggtgatgaaaaatgaagaggattaacactctgatggcgctgttgataacaggttatattataggagtactgaactacgtccttcttcccaagtacaacataatcttcggtctcaaaggaatactgataggggcattagtctcccttgcagtcctcgtattaatccgctctgagactgaaagtaccaaaaggacaaggtatttaccttatgagtttatgttcaaggtctcgcgtactccaggcctgatgataacgttcgttctgttccttgtcatagttgctggaatcacggcgtatctctctggatgggcaatgatattccttctcgggcaggatagcagcttcatagtccccctggcgatcctgacaatcctaatagccgcactcctcctgcttctcgcaaagggcagaactgtcgaactcttagcggttctctcagtcttggttatagtcctaacacttgtctctgtctttctaatacgcaacgaggcctcatcggtgatagtctcaaagcaggcaaagctatacatggatcatgtgctctcgagtatgtggtcgtttgattcgcccctaaacatacaggggttggctacattcttctctgggatcctgctggcgtttggtttgggagccggcgtctattacgtcataggaagcttttctccagaagaactgaacgtggagagagtcctgttgggagtctttgtccttcagctgatcttgggcattgcagcctcgtacactgtagcttactcccttggggcctccttccaggcctttgaagacgccgttcgcaatcccaacgcatccccagaagaggtattcaggctctatcgggaattccagacattgaaatcatacactgggaatccatcagtctccgttcacgagtcaatccaggcattctacttaataccctccattctccttgacgtcctcccaaaagccaaactaatggtatactccctcctgatatctctatacatggcaggcttcacaacggtaatagtccttatagagatgggtgctcagatgacggcagaagtcgtccagacaaacagaagaaacgccctagcaacggtctcagtcctgagcctggcgatttcccttgccatgtggaacgaggcattatttaaggtattcatcttcctcccgttcagtatcgtgggaatcttggctgctatcgaggcatatccctccctcaagagcctccaatcccatgaaaagctcctgactgccctcggagccgcagtaatgctcgtgatagggcttggctccctttactattcccttaccgggatctttgccatgaaactcgcggccattaccggcctgatactgctagtgcccgtggcatttaatagtatgcttctcagaagcggaagacaaaggtagctccccttttcaaaaattttttaaatgccccttcctatgcaaaccagaacgcttatgggaggtatgtgagatgggagacaagactaaggttcaggtcagcaagctcaagccgggcaggtacataattatagacggtgagccgtgcaggatcgtcaacgttacggtctcctcaccgggcaagcacggttccgccaaggccaggatcgaggccgtcggcatcttcgacggcaaggtcaggagcatcgtcaagccgaccagcgccgaagttgacgtcccgatcatcgacaagcgcgtcggtcagatcattgccataacccccgataccgtccagctcatggacatggagacctacgagaccttcgacgtcccgatcgagggcggcgtcgacgacgaggtcaagggccagctcaccgagggaataaccgtcgagtactgggagaccctcggtagaattcagataaagaagatcaggggcgagtgatcctttctgtttttctttcacaccccttgggttttaacttgaaacgaaactcatttaagagggccttttctcccccagctgggggtagttatgggctggcttcacgatgtaatactcagaaagtttaacaacatagccggcacaaggtatgaggaaatactcaaggcctacgagaacttctttttaaccgaggaggagctagtgattccagaaataaactccatactgctcgtttttgacaggttctctgaaaaagttccagaggaagtccacgagacactctcagcgttcgaagaagcggctgtccggatagtttacgtaatcgacgagggcgttctcaaaatgatacgtgaaacactcggagaagaagctgccgaggaattcagaaaaaaggagatggcatttgccgagactttcctcaaagaggttgaagaaaagctgggcgatctgaacatcaagtttagcaggaaaatagccttcggggacaaggctgagtacgttgagggtattgccaagaaatacgacttactcgtaatctcccgtcactacggctccgagacgacgagaacacaccgcgtaagtcccgttgtctttaggatagtccagcacgttgaaaagcccgttgttctctactgaggtgatgaaaatggagccaatggagctgatagcacttgcgatattcataggcgtctatgggctcataatgagcgagagaattcaccgcacggtagcggcaatggtcggggcatcgctggtgctcctgattaagatagttccgtgggagaaagtgccggagtatcttgacctcgacacgatactcctccttgcgggaatgatggtcgtcgtgaacgtagccagggagagcggactgtttgagtacatagccataaaaaccgccaaactctcaaagggaagcccgatgaaagtcctccttctgttctcggtggtgacggccgtcgtcagcgcgtttctcgacaacgttacgacggttctcctcctgacgccaatgctcctgtatataaccaagaaaatgggtgtgaacccaataccgtttctgctctcggaggtgtttgcctcgaacatcggcggaaccgcgacgctcatcggtgacccgcccaacattatgataggctccgcagctaacctcagcttcaacgagttcatcctcaacatgggacccatagctctcgttgacctctttgcgaccattggaattatctacctcgcttaccgcgccgagatgaactctcacaaggaaaacgaagaagcaattaagatgactataatgtcgctggacgaaagggatgccatcagggatccctcacttttcagaaagtccataacagtgctcattggtgtcgtcattggattcttcttccacgacaaacttggtgttgagcctgctgttatagccctcacaggagcctcaatactgctcctctggagcagagcgtcacctgaacacgcacttgagaaagtcgagtgggcgacgctcttcttcttcggcggcctgttcataatcgttggctccctagttgagacgggtctgatcacccaggtcgccaactggatggttagtcacatccacagcgagggcgaggcagtcctgataatttcgtggttctcagcgttctcaagtgcaatagttgacaacatcccattcacagcgactatgataccgctgataaaggcaatgggtaatcacatgaacccctacccgctctggtgggcgctctcactgggagcgtgcctcggagggaatggtactgccataggtgccagcgcgaacgtcgtcgtcataggtatagcccaccgcgagggcgtgagaataacgttcaacgacttcctgaaggttggaatgaccattatggtaacgaccgtggccatagggacggctataatctggttgaggtacgttgggttgtgaggtggtggatatgaggatactcgtgctcgtggatggctcaaagtggagccaaaaggcagcccttcatgcgttttcggtggcgaagaaaaagggagctaaggtggtactgttctccgtcctggacaggaaggaggcgcaggcgatagcggtaagcctcgcaatgagaagcggcgacgttgaaaagctcaagaagttcgaggaaactgcctggaaggagatgaagaagggcatccacgacgttatctccgcccttctggagctcggacagagggagggtatcaactgctccttcaggattgtcgaaggaaacgcccgcgagaaagtccttgaggaggcaaacagcgggaagtactcccttgtcgtgatgggtgcgtacggaaagagcggaaagacgaggataggctctctcctcgaggacgttgtgggggtgataaagcctcccgtgatgatagtcaggtgaaggcttttaagccctcttctatttttgcctttaggtgagagaatggagttcctgtacacgtatgagactctcaagctggagttcccgctcgtagaacccgagaaagccaggttcatcctgctgggggttcccttcgacgggactacgagctacaaagctggggcacgcttcgggccgaccctaataaggcaggcgactctgaaccttgagagctacatcctagactacgaccttgacatagcggagctcccaatagccgacatcggagacattgccgtcgtcgcaggagacccgaggaaaacggcagacagggtaagggaaacccttgaagagctcaagaaggcaaacccaaaggctattccaatcctcctaggcggagaacattcccagacgcttggagcagttgaagcactgaagccagcaagctacgtcgtcttcgacgcccacctcgacctgcgcaacagctacgaagacaacccctacaaccatgcctgcgtcgcgaggcggatcagcgagctaggggtaaaggaagcgatattcggaatcaggagtggcaccaaagaggaagtcgattttgcaagggagagggatatcccgtgggtgcacgcgagggactacagctttgacgccttcgttgacctcgtagaggcccttcccgaaccggtttacctctcaatcgacatcgacgtctttgacctctctatggtgccctcaacgggcactcctgaggcgggaggtttaaggttctgggaggtagtggaggcaatagaatggctggtcgagaagaaggagatagcgggctttgacataatggaggttgcaggtgaaaagctcggcgatccgacggcattgacggctgcaaagctcctcttctactccattggtgcaatggcaaaattcgggcgctgagccttctgcgttcttttttcagtatccatcaccgtgaaaaaatgcatttttctatgctcttctgcttttcaccgttcagaaacccttaagaggactttttcaaatcttacgcccggtgaagcatatggatgtcgaagcggcccttgaaaagtttcactcgctcaaagtctctgagataatgcctaggctcgatacaatgcccatcgtaaccgctgattctgacctcctcaacgtcctcaagctccttaggacgaggcaccacgtctgggtcgtgaaggacagggagagtatgaagctcgtcggagtcatccgctacatggacgtcattgacattcttctcccaccagagtctcacaggttcaagctcggaatgacgagcagaagcatgaggtcccttctcggcggtgcgaccaaggctgaggacgtcgcagacaggcaccctctaacgattgaggaagaggcaacggttctcgatgcactcatcaagatgaggcgctacaaggcccaagttctggcagtggtcgaaggagagaggctggtcggcgagataagcctgagaattctgatagacgagttcctcaggctgctcagggtgggtggtgcccaatggaaggggtagcgtggcttctagcaactataggcatcgccctaatcctggccaaaatcggcgacagcataatagagcgctttgagctccccggagtcctcggcgaacttataatgggtatgatcctcggcaacctcgtttacttcggttacgttgctcccgattatctgcccattgtcagcggaatgggctatgagtccgtcttaaatcagatcgctgagtttctggcgaagctcggcataatcttcctgctcttcttaggcgctcttgacgcggacatagaacagctcaagaagactggcctcacggcgacggtttccaccgttctcggagtcttcgttccgctcgttcttggctggtgggcgctcatggcaatgggctacccgagcagggaggccttcgccggcggcgtccttctgacagccacgagcataggactgacagtgagggtcatgatggatctcggcgttctgaggagcgaggtcggggcagcttccctcagcgcgagcgtcatggacgacttcctgggcatagcactcattatctttgcagttggtactggaagtctcttcgagctgagcattaagatagttgccttcttcatcataacgggcgttcttggatggtacttcatcgaccactacatcaggttcgcggagaggcttcacgtggagaagggcatcctggggatggccatcggtatgatgttcctcttcgcggctttagccgaagggtggtttgcagcggccatcgaaggcgccttcatgatgggcctcatactctcgaagctccctgaaggtaagcgcattatggaagatgtccgtgcgataggctacggcctcctgattccgttcttcttcgtccacactggagctatgctcaaccttaaggtcttcgagcacggcgatgcaataaccctcgcggcagttctatcggtcatagccatagtcggaaagatcgtcggcaggggctttggagcgtggataacggcatggggcaggggaagggacttcctcttcacgcgggagaacttctggatgtcgctccagatgggcataggctccgttccaaggactgaagtagcgctcgttaacctcatggtggcaatccacggcggggcaataccctcaactgacgctccgaagtttatagcggccacgctgatattcatcacggtctcagtgctgataacgccgccgctcctcaaatgggctttcaaggcagagatagagaaggcgaaggcggagaaggccgctcagaaggtcgggagaatacaggaaacaaaggagaagataaaggagctgaaaggctctgagtgagcctctccctttttcatccaaagaaagcacccatcatgtccatctgttcttcgctcattccctttaccttgaactcgggcatctcgggaaggagcttctcgtattcctcctttgttatctccctagcttcgccgttctcgacgagatagaagataccgtagtcggggtcgcggtaggcaaccaggaacttctcgacctctatgtcgtcgaagttcacgaatatgacgtttccaccggtgtagggcttcttgcacttgaatgggaagctcgatgagttaagcatggcatcgccgagggcctggttggccttctcaccgtttatctcggtccagaagggtctgccctcgaagtccccttccaccacgatgaggaactttccgccgtccagttcgagaacaggggcgcctttctcctggagtatcttaaagagctcgcctatcgtctcggcttctctgagtgcagctacaaatccttcaactttcacagtcttcaccaaaaccagttggggcggtgggtataaaagcttaagccccaacatcggtaggatactatggcaacctcaaacggtcgctacatcaagaagtgggcaacggtgcttgggttctcgctgatggcgggggtagttgggggactcggtgccgtcctcttcagagttctgatagcctggactcatgatttcttcttcggtaagattctgcccgtagtctcctaccaggtaggcgagctaaacctgggctatgctcttcttccagctttgggtgcgctcattgttgccttcatcattgttgaatttcctgacataaggggaaacggaataccggaggtcatcgaggcggtcatcttcaagggaggcaacataccgggccgtttcgcagtagcaaaaatagttgccacagccataaccattggttctggaggaagtgtgggcagggaagggccgataggcttcataggtgcggcattgacttcgatcctcgcgaggtggttcaacctttcaaaggagatgaagaagctcctcgtaacctgtggattggccgctggaatagcgggaaccttcaacaccccgctcgctggagcgatgttcgcccttgaggttgtttatatgggggccttctccgttaacttagtcccaatcttcatctcctctgttactggaaacgccatcacactcgccatactcaagagggcctttgaggtcgaaatccccggaaacctcgggcataccctcctcgagcttccctttttcttcctgctgggtataatcctcggagttctcgcggctttctacgccaggttcatctaccgcgtcttcaacgcctttgaggacctgaggatcaacccgcttttaaagccggtaatcggcggccttggagttggttttctcgggatgttcttcccaacgtatgggatatttggaataggctatgagggaatggagctggccttctacggaaagctcaccctcgggctcctgcttacccttggggtggttaagatgctcgcaacggcactgaccgttggctctggaaacagcggaggcgtcttcgcaccgagcctctacatagggacgatgttcggggtggccttcgggattcttgtgggaatggcttttccctcccttgccccaaacctaactgtttatgccctcgctggaatggcggccttcttcagcgggatgacgcaggccccgataacgcagatactcatggtaaccgaactgacgaggagctatgctgttctgccggcagttatgacatcagcaacgatgggcttcctgacggcgaggttcttcctcaacggcgagtccatatacaccctcaagctcctgagaaagggctaccgtgtcaggactggaagacccgtggttcttgagacaatctcagttggggaaataatgagcagagaccccgtctatgtaacaaaggacatgaccctcttcgacgttgagcatctaattggtgaaaccgcccacgactgctttcctgtggttgatgagaacctcaacgtcgtaggcataataggtatcaaggacatcctgaagaagccatcatccgtgaaaaggctgaaggttgagaggttcttaaacagagcctacgccgttacctatccaaccgaaacggccgaggcggcattcgaaaagctgatggcctacgaccagaaccttctccccgttgttgagagtcctaccaacaggagactcgtgggggttgttaccaaaagggacatataccgcgcctactaccgcggccttgaggggatgtacatagactgaggtgatctttatgatagttgatgccgacctgcacattcattcgcgctactcaaaggctgtctccaaggcaatgactattccaaatctggccgaaaacgcccgcttcaaggggcttgaaatggttggcacgggagacatcctcaacccaaactgggagaaagagcttctcaaatacacaaaaaaggtagacgaggggacctacgagagaaacggcatcaggttcctcctcacgaccgaggttgaagatacccgaagggttcaccacgtccttattttcccgaacatcgaaaccgtccgcgagatgagggagaggcttaagccttattcttccgacatcgagagcgagggaagaccacatctcactctttcggctgccgaaatagcggacattgccaacgagctcgacgttctcataggcccagctcacgcatttacaccttggacaagcctctacaaggagtatgattcacttaaggaagcctacaatggagcgaaaattcacttcctcgagcttggcctctcggctgacagcgagatggcagatatgataaaggcccaccacaaacttacatacctcagcaacagcgacgcccactcaccgatgccccaccggcttggaagggagttcaaccgctttgaggttaatgaagctaccttcgaagaaatccggaaggccatactgaagcgcgggagaaagatcgtcctcaacgcaggtctcgacccgaggctcggcaagtaccaccttaccgcatgctctcgctgttacaccaagtactccctcgaagaggccaaagccttccgctggaagtgcccaaagtgcggcgggagaataaagaagggcgtgagggacagaatccttgagcttgcagacactaccgagaggccgaaggacagaccgccctacctgcacctcgcccccctcgccgagataatagcgatggttctcggcaaaggagtcgagaccaaagctgtaaggcttgtctgggagagatttctgcgggagttcggaagcgagataagggttcttgttgacgttcccgtcgaggagctggcaaaggttcacgaggaggtagccaaggcagtctgggcatacagaaagggcaagctcatcgttatctccggcggagggggcaagtacggcgagatcaagttgccagatgaggtaaggaatgcgagaattgaagacctagagaccatcgaggttgaagttcccaacgttgaggaaaagcccaagcagaggagcataaccgaattcctccgaaagtcaaataagtaagaaagttggaatttcttacggtgatactcatggaggtcgtgaaagtctcctcgaagggtcagatcgtgataccgaagagcctcagagaaaagctgggtataaaggagggggagtatctgctaatcttctccagaggggacgttatagtgatgaaaaaacttaatatcgacgtcgaggagatcctcaaagaaggagaagaagcggcaaaatcccttggagtttcagaggaggacgttgccaaagcagtaaggaaagtgaggtatggggaatgagggttctgctcgacacaaatgttctcatttctgcctacttctggcacggtaacgaacggcggctcctctgggaatgccttgtgggactccacgagaacgtcatctcagattatatagaggatgaaattagaagagtccttactggaaaatttgggatttctcctgataaggtcgacagatacctcttgctcttggaagagttctcgatcaaagtgcaaacaggaaaaattccgcctatttcgcgggatccaaaagacaatccaataatcgctgcagcagtttcgggaaaagttgaagcactggtaactggagataaagacctcctcagccttcgagacggtgaaaagcttttctgccacatggggttctgttttatggtcttaacaccctcggaggcgatatcatgcgggagtcagaaataatcgagctcttcctcaagcacctgaaaaggcatggtgagctcccccttggagacgatgccggcgcactaaagataggagacgagtggctcgttgccacgaacgacatgctcgtcaggaaaacagatgttccagacataatgactccagagcaggttgggttcaaagccgtgacaatgaacgtgagcgacgttgcagctatgggggcggaacccatcggttttctattttcgcttggactcccggaggggttggatgaggactacattgagggaattgcccggggcataggagaggccctcgactactataaaatccccgttctaagtgcagacaccaatgaggcggatgacctgataatagacggcattgcccttggaaaaaccaaaaggctgttaaccaggtcgggtgcaaagcccggtgacctcgtttgtgtgacgggagatatagggcgggcgttcgctggctatcttgtatggaagtacggcctcgaagtgtctgagagcaccagaaaagccctctacgaaaagttccttgaacccattgcacgggttaaggagggaattatcctcagtaaatctgcgaactcggctatagacataagcgacggcctatctaaggagcttcatttgatctccaaaatgagtggtgttgggattgagataagctccgggaagcttccgatacgtggggaagtgtatgaagtggctgaggtcattggtaagagtcccgttgagttagccctcgcaagcggggaggaatttgagcttctctttaccgtgccaccagaaaagatttcagagcttgaagttgattttaccgttatcgggcaggtcagagagggaaacggagtttatatgggcagaaagccgcttttcccacttggttgggagcatttttcgagattggattaaactgaattccgctaatgttttaaaaggctcacattagatactgcaggtcgaggtaaaatggagaccctcaaaatagcgctcgtcagcgactggtactatccaaaactcggcggggtagccgttcatatgcatgacctcgcgttgtacctgcgggagagagggcatgaagttgatataatcacgaacaacagaaaaacaggaaaagaggacgagctaagggaactcggcatcgggctcgtcaaagttccgggcaagatttttccgagcgcaagcctaaacgtctctgcctttgcgaagggctacggcctgctcgagccgttagtcaggggctacgaggtcgttcacgggcaccatgcgtttacccccctttccctgaaggctgcaatggcggcgagaaaactcggcaagggcagtgtcgtgacgacacacagcataaactacgagaactccttcacaatacgcaccatgtcacgggcaagctatccctattaccgctatcacttaacttacccccacaggataatagcagtcagcaaggcctccagagagttcataaagaggttcacaagagtgccagtgaggatagttcccaacgggatcaacatcgaaaggtttgatattcccgtgagcaaagaggaggccaaagagctcctgaaccttgatgggaaagtcgtcctctacgtcgggcgtcttgagcccagaaagggagtggggactctcatatcggccatgaaagacgtagatggaacccttttggttgcaggttcagggagcatgctgcccgttctccgcaacaaggcaaagctccttggaatctccaacagggtgaagttcctcggcacggtcagctattcgatactccccctatactaccgcgcgagtgatgtttttgttctcccgagcctgagcgaggcctttggaatagtccttcttgaggcgatggcaagcgggacgcccgtagtaggaacaaaagtaggcggtatccctgagattgttgacggctgcggtatgttagtcccccctggaaacgcccgggcgctcagcagtgccatcaacgaaatattaaacaaccagaacctggagagaaaactcggaaaactcggaaagcgcagggtggaaagggtttacgactggagcgtcgttgtgaagtccgttgagagggtttaccgggagtccctggaggaggcggaaaaggatgggtcaagttatcctcacgtttgatgtcgagcaggactgtccgccgtttgcttcgtccaccagagggatggaagaaggcctgcctctggtcatggacctcctggaggacagcggaatcaaagggacgtttctatttactggaagaatggcagaaaagttccccgaactcgccagaagagcagccaaaaaacatgaactcgggtgccatggacttgaacatgaaaggtttgacagactccccggggaagaggttagacgccggctttctgaagcgagagagatcctctcccggtttggaaaagtcgtttccttcagagcgcccaacttccagtttccagatgaccactatccaatacttaaagagctcggatttttagttgattcaacgaaggcaaagcacaagggctggcgaagaggagtcacagagatttcgggcctgctcgaagtcccagcaactacgacgtccatagttacccgccttccgtggacactgcaaaagcccttccacaaacgcttcgaagacccaatcgtttacatattccatccgtgggaattcgtgagaatgagcaagaggctcaggccggactgctggtttgggactggcaaaagtgcccttgaaaacctccgcaggctgatagaattccacatttcaagggacgccgagtttcttacccttagggaattctaccacgaataccaaaagcttaaacgtgaaggggaactatgataactgggtgagaacatgcgcgaggcgatgtggtgggagccgctcgaaaacaaccgcgtgaggtgcaggctctgtcccctcaactgcatcatagacgatggtaagcggggctcctgtaaggttaggaagaacataggcggaaggctctacaccctcaactatgggaaggtctcttcgatagcggccgatccagttgagaagaagccgctctttcacttctggccgggttcatgtgcattctcaatagccaccgttggatgcaacatgcactgcaagcactgccagaactgggagataagccaggctgatgaaagtttcccatacctccacgatatgacgcctgagatgatagtcacgatggcgaagaagtacggctgtgagagcatagcctacacctacaatgagccgacgatctggtacgagttcgtcctggacacggcaaagctggccaagaaggagggcctctacaacctcatgataaccaacggctacatcaatgaggaacctttcagggagctcgccccctacatagacgcaatgaacatcgacatcaaggccttcaacgatgagttctacatgaagatagccagtgtcccgagcggggagccgagcaggaggacggctgtgatagcgaagaaggaattcgggatccacgtcgagctgacctacctcataattccaacgctgaacgacaaggaagaggagataagggccttcgcccgctgggtcgttgaagagacgggcgacgacacgccagtacacttctcccgcttcttcccgcactacaagctccttcaccttcctccgacgccagttgagacgatcgagatggcctaccgcgttgccaaggaagagggtctgaagttcgtttacatcggcaacgtgcccggccaccctggtgagcatacctactgtccgaagtgcgaaaagcctttaatagtccgctatgggtttgagatcgttgagtacaacgtgaccgatgatggaaggtgcgggttctgcggagaacccatcccaatcgttggcacatacacaaaaaagagatatcctggtatgtggtggtgaaaatgaggccgattgaggttatcttctacattgagggcctatccaacgacaagaaagctttagaaagcgccatgggccagaccgttgaatcactaaaggccgaaaaaggtgtcgagattaaggacatctacgtcgatgagatagttgaagaccctgataacgatctcctgccatactccgggatgatagaggccagaatcagggggccttttgaagtccttgttgacctggctatccgctacgccccagcggccgttgatctcgtttcaacaaatggcatcgagattcctgcggagcaactgacgaaaatccttgggggcgtatcctatctaatggggcaactaatggagaagttcgggccgctggcggcgtatccaaaactcgatgaactcccagagccaaaggtggggtattccagggaagagatagagtccatgataatcgacgaaagaatgctcctctacaggttcgttgtcgaagtctacggagaggacgagaagagggttgaggcagacatcaagaaggccctcatgtacgaaggatgcagaataaacaagtttgccatgcagcagcagggagagaacgaaaagaccggcagaaaacgcttcctggttgctacagaactcatctccgggatcgaaactgccttccagctgacggggaaatatgccccggttgccatatcagtagtggagccagagatcgttgatttgaacccatcggagatccagggtgttctttccgacctggcaggcttcgctcacgagcttgtcataaggccgctaaaggccatggccattgagaaggcgaacacctcattcaagctgactagataatatcggcaaaaggcgaattatgtgtaggcattaggttaagccttcttttcatttttacggcaatcagcgagctttttttggccgctgaaagggtctgaaagcgaaaagtatttaaaccccaagtggccagataggtatgacaacacttagtaggggctaaagccccaacaacccaaggaggtgttgtggaatgaaggtgaagaagatcgcggcactcgcagtcggtgccgctatggttggcgcaaccctcggctttgccagcgctaccgaggtcccgaacatcccgaaggacttcttcgttaagaacggagagcccaacgttaaaatcgtcattggaagccaggccgctgctcaggatgttgcttcagccgctgacatagccgttgcccttggtaccctgctctacaccgaggaggatgttaaggttaaggacgccagcgttgttgttaagaaggacgtcgcctacgacccggctgacatcccggtctttgacaacctctacaaggggaactacaagcttaaggaggaccttaaggacgttgagggctggtggaatggcgccttcgacaaggatgactatcccgagttcaccgttactctcaaggactcaccatgggacgatggtatctttaacaaggacgacccgggatgggaggatgtcggaaaagtcactgtatacaacgccgtagagtggaaggacggaaacgacaacaactactggaaggacccgaagggcaactggcacgacgctaccgacgtcagcatccactacaccgtggccataggcaagatcgagcttaagggctttgacgaggtcgacaccaccgacatagacgagttcagcgacttcacactcatcgttgacgacgtggtcgccaacgtgagcttcagcctgaacgcctacgagaagaccctcaaggataaagtcctcggtgccactgaagagacctacgccgtcagtgacgttaagccgagcagctcctacagcctctaccaggccgatgtcattaagggcgttgagaagggagacaccatcaccctcttcggcaagaccatcaaggtcctcgacataggcgatgactacatcgagtacggtaacgactggggagagaagtacgtcaacaaggacgaggtagcaaccttcggcgactataccatcaaggtcatcgatatcgacgtcaacaaggtcaaggccctcttcgaggtctcaggcccggccggaagcaagatagtaaccctcgacactgacgacagaaccgacataaaggactccgaaaccctcttcaacggaggcataaggataaaactcctcgacaccttcattggtattggtggaaccaccagcgccctcatcgaggtccagaccgacatcagctacatcgaggacggcaaggagttcatgcccggctggatagccaagctcggcataaaggacggcaagctcgagtggttcgccctccagaacaaggaggagcttgagggcaaggaggtcaagctcttcgacacctacaaggttgactacgtcgccgacatcatgaagaagaagaaccctaaagacgacaagacctacgccgccatgagtgcctacgttgtcatcgacccgctcaagccggagtacaccaccaaggagctcggcgtcggcgacgagcttgagggctggacaatcgacgacataaaggccaccgccagcccggccaaggccgccgtcgtcagcaagataaccaccccgataactgtcctcgacgacgagatcatcgaagccggcctcgacagcgttgacagcaacctcatcctcgtcggtggtccggttgtcaacaaggtcaccgccgcccttgccgacaagctcggcgtcccgaccacctacgaggagtgggctgctgacgagaacctcaaggccggtgtcgtcaagtacatcgacaactgcccgaccatcggcggccacggcgtcgtcctcgtcgctggtgctgacagggacggcaccaaggcagccgccgaggctcttatggagtacctcgctggccttcactgaaggcctttcttcttctctttcctttagttagaatttctaggaggttgttgatgtgtccagaagactccttgctgccctagttcttataatcctgattgctgctcctctaggttatctaggatatggatattcaaattatgagagttcaattcatccgtccaagtcagcacctgctaaaacatacctggttttcaaactgcccgatggtcgttatctctcccttacccccaaggagtacgttaatctgacactccagggttttaagctacctgcgggcgctaaaggctacgcagtaaatgtcacgggatacgtgactggaatccccgaagtggacgtaaacgtaacactaagagcaccttacgagaagtttaccataatcatcggcgacacaaacgtcaagctatgttcatcgtctcctgaagaattcgttggcagctgtgtcgagagaactgccgcagtatccgagataagcgccctgacttcaactctgtttaagaggtactactactggaagggccttcaggagggcatggacaacgccagtgccaaggcctatgcatatgaagagaccctgaaaaggcatgacattaggtacctgacgttcttcaccaaatccctcattggacttgggcgtattggaaacagaaaacacctggcagttgtgttactggggcccaacgaaggagctaccacgaacagaattacagtgccgagagaaggactgatagtacttgaaggaaaatctgacagtgccctccgcgctgaagtagcactcatagaacacataatcggattcaaatggccggagggcaaccagacctctacagggtgattaggtcttttagcacgttctttttatcctctccaataacttcgaagaactcttctggagtcttaaagggacgttttgccagtattttcacggcagtcttctttcctatgcccggtatgtactccaagacccttgggctctcttcattcacatttatcggcacagggattccagttatgctcctgaacccgtgatcaacgattaaaacgtcgtagaatttgttgaggggaacctgcttgggcatcccgactatgagtgggtaactcccaatctgcctcccataggttaagccgttatcaaagacttcagcgcggacgtcccttagaacagttcccactgggacaacacgcctgagcataggtaggtctatctcgtgccttatcttgtagcggtagtgctggataagcttcttgtgcttctcaaccttcactttatccctcatgtgccacaaaggtgttcctggaaaaactactacctggcggatgtttatgcgcctgaccatcagaccatcatccaggagtcttttcaggaactggaacgtgatttcgtagctctttttggtctctcctggcagaccaaagattatgtttatgcccggaagaagccatggcattccgttgtagcctcttcttcccccaatttcgttgagaagtttgaccgcctcgtaggtctcctcagctgtggcgttaaggttgttgagctttgcaacctttgggtcggcgctctccagtccgaaggcgactacatccccgggagtgccgtactctatcagggccttcgctattctcctgctctcgtcaggatagtttgctatgacagcagggttggcgttgtctacatggagcgtcttaacattcggagcgaccgagcgaattccgcggaagagcttctcaactgcctcggggtttggtatagggaccctgccatctggctttgccatgtaggagaatatacagctctgcctgcctacccggaagtgtctgacaccaagggtatagagggctttaacctctgcaacgacgtcctcaaccgacctgtcttccactctgcgatacctgacaggctcggtacagaaggaacatcccccaattcccatggctttgggacagccgcgttgggtttcaatttcaactataacaaagtcaggataatcgggaaactgcttgacgacttctgctccgataattgcataatcccttaattctgcataagtcctgaagcgaagcgggtctgcatcttttggattgctcaagtagtcaaagagaaatgcctcaaggtcgccatagactacgtggtcaaaaacctgatgggcgagctgcagttctctgctggttatcttaatgccccccatgctggcggagcccatgaaagcaggcccgccgaggattttctctcctttgaactgagtgagaaaccttgctacctcctccacgctcccggggactgcggacaggtactttccaggagtgtggagaccgccgatgtaaactatgatgtcggctttttctaagattcctttcgtcttaggaaagttcggcgtcttgtttcgggtcgctatccccccctcacccaagaatgtggcacgcaagtcgtctattgtgaggtagaaaatcgacgcatctttcctggccttctttattgcaccgtaggcatacctcgggtatataccgaggtaaggaggaactcccaagccagctggttcgtcggtgtagccgtctataatagcgactatcatgtactcgggtcggagagaggttttaaaaaagcttgggtgttgtaaagagtgtgagggggtatgggcgagcgaacttatgaccacttgaagaaagcaattgaagaccttcagagactaagccctcaagaacttctgtcgtactggatacagaatgaactgaaactggcggagacctgcaggtctctctcaaactatgcgaaagaagtcagatgggggaatgatgcttcaaacctctgcgagcggctcgccgagttgagcgttgagacggccgagaagctgatggcggaataccagaaacggtttggaacttctgagctttctcccaccaatgttgagccaatagaactcctcttatccttgaaagatctgaagagaactctgaaaactggcagaattgaggacgttataaaaacgcttcttgagacgcaaagggtgatgcgcgagatttattcatccctggcatcaaaaacttccgatgagaggctctcggagcttttcagcgccctatcggagctgtcccgcaggaggtattcaacgctcaaggagatgctggataggactcaatgaccccttccttcttcaaaaactcctctatctcaaggacgtcctcgggagacagctgaaagactcttctctctgaatggggaacccttgagaaaacctgcctcagctccctggctttatccttcgagagtccaagcatatgggcagactttttcagggccgcggaaacagtacttcttctgtgctggaagagagctttcacgaggttttcattgaggtcaatcctctcctctggaggctttggctcaagcacaacgacagcagaatcaaccttgggtctcggccaaaaggccccttttccaatacgctcaacgagttctgccctcgccttcgccctgaccatcagggagaggcgagaatagttcttatcccctggcttggcgaccattctctcggcaaactcaagctggaatatcaacaccgcacgctcaaactcgcggctcagaagtttaaacgtcaccggggaggatatctggtacggaaggtttgagaccatcttgttgaactccggccactctaccttgagtgcgtccccctctattatctcaacgtttggccagttgtattcccttctcagtatctccacgatcctgcagtctttttcaatcgcgtacactttcccggcccttttactgagcgggtccgtgaggacacccaggccgggtccgatctccaggacggtgtctttctctcccacttctgcccgttcgatgttgcgctctattatgtcgggaactatcagaaagttctgcccaaggtctcggtttgggtggaggttgtacttataaataattgagaagaggcggtctctcatacgcggaatagcctcctgtggccgacaaacagcttgtacctgtccttatcctggagttcatcaacgatcctctttgctatcattttcacgggatcgggaagccccttaaccctctgcttcagatcctcaaagcttttgaagggctctctctgcctctcctctattatctcccacatgtgctttttcccgattccaggcaggagttcgaggctgtggagcctgttggttatcggcggtgccatgttgaaaaactggacaaacctctcttcgttgtttttcacgatttcctcaacaacgtacggaagctcggccttagcagtgtcggtaagctcatcgtaggaaatcctcttgtttataagcaggattttatccctgtttccctttccaataaagaccctctcgtagagcatgaggtcagtctttggagtaacctcaaggagcgtaaaggccttctcaccaataacctgggcaaccggctttccggtccttctcccgctggcaatgtcaatgtatccatctggaaggtagtctaacacataggcgtattcctcatactcattgtggtgcctctttttacccacactctccctataggagtgtctcctgtacctatccatagtctctcccccagaagttattcacctaccagtttttatactttcctcaagnggaaaagaaaagaagtncacgtcgaggggccggtattcgtcaactaaccttgannntaatctcctcggcctcctcgggagtcggcatgtactcctccttcgcgaagatgacgcggatgtcgaggtagtcctctggtaggatgtcaacgagctttgcggctattctttcgtttatccagtcgaagaggcccataagcttctccttaagttccctcgcctgctcgggcttcagctttgcgaagcgctcggcgtgctcaaggctaaccctggcctcgtagaacatcggctcctcagggttttcggcaaggccttcggcatgccttctctcgaggagctccttagcctctgctatggtaatgtagtgctcctcgagcttcttcctgcctatcatagtcatcccttctggggcctgagatggacggggtgtatgaagaaggtcttgaccttaccgccgtcggttatctggacgatgtaggcgtctccgcgcttgccgacgacagttcccgtccttccgtggaacctcgggtcgggcatgcccttgtggtagctcggctcgatgacgatgtgaaccttctgcccgacctcgaactcctggaggaacctggtaagcgggggaaggccccttctcctcgggtgcttgctgagcttgcccctcgtcttcctcctgaagctgtgcgccttcttaaccatttcaatcacctcacaggtgtctttaatcactcaatccagcaactcccacagggagagtccagtcttttcacgagtttcccggggtcgctcttttcgcaccagtttaccaactaacccaacccgggaatcagtattgcctctggtgaagcgtttataaatttttcaccactcaagaagagtcctcagatctctcctcatcaaggacgtttagaacatcaagccgctcacaccacgccggcttgccgagaaggtcgctgacgctcggcttcgtccttcctttgtccccggagatgagctccttgatgtagaggccgccgtctgtaatgagcctcagctcgaaatgtttatcatcgatccatcttgcttcggcgtagtggactctcctcaccctcactttgtcggccctcgccttcctgactctccagggcgttctctggtgaatctcaagtccagtgagctttttggcaacttcctcagcttcttcgggagtaacaccttccttcacaagcacaagggcaaggtactccttcctgtgcggtgtcgagaggactctctcagcttcgtctggggtggtgaaccttaggttcagcacttcaacctttccgcttgcgttgatctccctcgctatctcttcaaggttaatatttctcctcttcgggcgctttatctccaggatgaagggccttccgttgccgagcatcctaacgtcaacgtcctctcttccggcccctttaaagacgcacttccctccggttgcccttgaaaacgggcgacagattattgatgcgacgctctcttcgaagtccgggtgcggtgtctggggtattccacgaaggagctttctataacgaccgtatatgtagagggggtttatctggagctcaattttgccggagtaaggctcgactatgaagacaacgtcaggactttttgacgtgtcctttccggttgccctcccaaaggcctttccaagctcgcggttgaactcgcggtttatcggctcggcggtttctattccgaactcatcccagatcgccttctctttctccttgacctcatcaggaaacctcgagccgacgagaaaagtctcaaactcaacatctttcgctgcttccttcatattctcgacaagctcagggattctatcaaaaacattgttgcacagctcacattccttgggctcttccaccggtgggagaccatctttagcccgctccatgttgagaacgaaccttatcgcctttcccctctcctcgttcgtgccttttccgagctttgcgaagagcctgccgaggcagtggtcgcagagctgatacctctcaagcacttcactggccttctcgactatcatgctcccaccctaaagctttttatttccagcttcaaactacccccatgccgactcggagggagaggataataagccttttggaggagcgggattactcccccagcgagctggcgagagcgcttgatctccacgggaagggatcagtgaagataatcctcgaagacctgaaggcgatccagaaaattctcaagagagatgggaaagttcttctgataaagcctgcagagtgcagaaactgcggcttcgtcttcaagcccgagataaaagtcccctccaggtgcccacgctgtaagtccgagtggatagaagagccgaggtttaaaatagagagcaagtaaggcctgtcttccaagttaggcttttctgtggaatgcagtccacgattattaccgtatcttttcctgctttttcctcccagtaaactcgcgggatattatggcgaggaaaactgaaattccttccacaacgagcgcacctgttattgcaacaaaagttatgccaaatgcgttctcagctgtaatgagacccattgcgccaacaatggcgagtcctgttattgcaccaccgaagtactctggacccgaaataaaagcatccagaagtgataatggtcggaaaaagtatgtcgggagtgatgaaaccgccacaaccaggagaagggcgcttccgggaatatccttattccaatagctcaaggccgctaccagaaacaccgctccaatgcctgagatgtaggatatcggagccgacaagaagtccttggataccttagtctcaaaaagagttccaacgacgatcatcccgattagtatggtcgtaagggatatcctgggcgatactgattcttgatactgagtgacaatgataacgaacgaaaccagagtccccattcctgagcccgttatgaacctctgaaccctcttagtgttcatcatttactcccccactccagctagtatggccccttgaaagcctgtccgcaattctcagcggtagcggatagccatttttgtttaaagtcttaactacttcaaccgccgagggcaggtcaatgaggtgtccaacactgacgtaggccttacccaccttcacccatgaaccctctggagtgcccctcaacaaccgctttgaaattccaatcgtcggaattcccagaacaaggccgatgtgcgaggccaacccatatccccttggatgggccctcccgtgtccttccacgaggagtacgtctggtctctccttcccgagggcaatgagaaccggccttgtctcccggaggaaaaagaaagttgggatgtacggaaagctcacatcaacttcaacaaccctttgtttcagcagttcgcagtctggaaaagagcagaggacgaaggcagctcttgctctttcatctcgataagagacgtcaactgcccctacggttttaatcttcgagacttccagcggcctttcaactatcctttcggccaacttcctctgaacttcctccagctttttgaagagtccctcactcatccccaaccgccgctttcagcttctcttcaagccttttgttcagcttggccctcgtgaggtcctcaagggttctctccagaatgtgccgcgcctgatcctgcttcgtcctgatgtttacgaggcctttggggtactcaagcgtcataagctcgccgtacagctcctccatgaagcggtaaacttcttcagcttcctcaaccttgccatcgatgagcaggagcaggaagtgccttctcagttcgcctacgaaatctccaaggcccaggagatagtcagcctctggaacacctagatcccagggggatgggaactcccttccttccctgtaggccaggagaagggtcgcctcgacgaattcctggtgggcgctctggacgtagccggagtagtacagcatcgggtaaggcttgagactctccctgatcatctccacgagctgctgggcacttttgagcctctgccttgcagtctcaaggtcgtttctgtggatggccttcacggcatcgccgctcagcctgacaacctctcgcgttagccttagagcctcttcccttgcggaatcagcctcgtctaaggttctccttatgccatcaattatctctttcagctccatatgaccaccactttgtgtacgcgaaactccttaaaagtccattcacaagcgttttatagtgtttgataaactttggcaggggatgggaatgaagagaaaggtcgatgaattcatggaaaggcacggcctcggtgtgggggacctcgtcagggtcgtcaagagggaaggagacgagaggataaccttcgagggccttgttatgccgccctacgagctttctccaggagagacactcacaattaagctcgacaacggctacaacatcggcatcctgatagacgcgatagagggcatcgaaatccttgagaaggcgaaggaagcccccaagatggagttcagggaagtcctgccgaggaaagagggcctcccaagcgttaccattttaggaacgggtggaacaatagcaagcaggatagactacaagaccggcgcggttcacgccgcctttactgccgaggagctggcgaaggcagtcccggagatcttcgatatagccaacataacgccaaagctccttttcaatataatgagcgaggacatgaagcccgagtactggaaaaagatcgcccacgaggccgcgaaggctctcaactccgatgaggacggagtcgtcattgcccacggaacggacactatgggctatactgcagctgcactcagcttcatgctgaggaacctcacaaagcccgtagttctcgtgggctcccagaggagttccgacaggccgagcagcgatgcggcgatgaacctcatctgcgccacgaggatggcagttagtgacgctgctgaggttatggtggtcatgcatggagagaccagcgacacctactgcctcgcccaccgtggaaccaaggtcaggaagatgcacacgagcaggagagacacattcaggagtatcaacgacgttcctattgccaaggtctggccagacggaaagatcgagtacctaagggacgactacaggaagaggggcgagggtgaggtagaggttgacgacaaattcgaggagaaggtcgcgatactcaagatctatccaggtgtaaccagcgagctccttgagttccttgttgataggggctacaagggaatcgtcatcgagggaacgggcctcggccacacgccaaacgacatgatacccgcaattgagagggccgttgagaacggtgtggcggtatgcatgacgagccagtgtctctacgggagggtgaacctcaacgtctactcaactggaaggaggctcctaaaggctggcgttattccatgtgaggacatgctccctgagacggcctacgtcaagcttggctgggttctcgggcatacggacgatctcaaagaagttaggagaatgatgctgaccaactacgccggcgagataacgccctacacgaggtttgacacattcctgaggtgatgagattgggtattaaggccgtttaccggaacggggtgttcaagcctcttgaaaaggtggaactacctgagggcatcgaggtagaggtagtgataagaaaagccggcccgattttgaagaagtactcaggagtcctgaagaagagcgagtacgactgggaggcagagtactatgagtacatcgaagagagagcgcgtggtgattgacagcaatatctgggtggaagtcctgagcgggaacagcgacgtcattgaacttcttgacagagtcagcgaggatttcaccctatgcataacgccaaccatctattcagaggtctctttcgtgatactcggtcactactttacatcaaaaactgggaagaaaggtgtctacgccctgaaaaaagagctgaaaaagaacccagaactttatgagatcgtcgaaaaatttgatgaacttctctatgagctttcagaagctggcctacttgaattcctgggggagaatgaagaagtcatcagaaggagcagaaagctcagaagggagtacaggctcctacctaacgatgctatgattcttgctgtctgtgatgtttatggaatatccaaaattgtgacccttgatgatgactttttgagaactcacctggaggtgttgagatgacagacaagttcaactacgaggagctcggcctcaaggtcggtcttgagatacacaggcagctcgacaccaagaagttattctcccctgtcccgagcgagctcagcgacgaggttgacttcacctttgaaagaagattgaggcccacgatgagcgagctgggggagattgaccctgctgctctggaagagttcaagaagggcaggaagtacatctacgagggcaactacaggcttaccgacctcgtttacatggacgaggagccgccgagggggcccgacagggaggcccttgaggttgcactccagataggctacctcctcaacgccaagccagttgatgaggttcacttcatgaggaagatcgtcatagacggttccaacgtctccggcttccagaggacggcgatagttgccgtgaacgggaaggtagataccccctgggggagcgttggaatcccaacagtctgccttgaggaggatgcctgccgtatcgtcgagaggaaggagaaggaggtaatctaccgcatagatcgccttggaatcccgctggtcgagataagcacaaccccggacatacaccaccctgagcaggctaaggtcgtagccaagtatataggagacgccctaagggccacgagaaaggtcaagcgcggtctcggaaccatcaggcaggacctcaacgtctcgatcaggggcggagcgagagtcgagataaagggtgtccaggagcttgacatgataccactcatcatagagagggaagtcgagaggcagctgaacctgctcaggataagggacgagctgaagaggaggggtgttaagcctgaggacatcaaggaggagttctacgacgtgacggagatcttccagaacaccggctcgaagataatcgcgagggcaattaagagcggcgggaaagtcttagctgtaaagctccccaagttccgcgggttaatcgggaaagagattcagcctggaagaaggctcggaacggagatggccgacagggccaagaagtacgtgaggggcatcttccacatcgatgaattacctaattatggaattacagaattagaggttaatgcggttattgaaaaacttggtctcggagaggaggacgcgttcgttctcgtcgcggccgaggaagagacagccaagaacgcgctccgcgaagtcatcaagagggcgagggaagccatcgaaggcgttcctgaggagacgagaagggccttaccagacggcaatacacaatatatgcgcccgcttccaggaaaggccagaatgtacccagaaactgacataccctctatattcctgccgccggaggagaaagagagaataagggccaacctgcccgagctcccgcaggagagggtagagcgctacgtcaaggagtacaagatagacaggagcttagccgagacccttgtaaacgacgaaagggatgagctcttcgaggagctggtggagaagggagttaaaccctccctggcggcttcaatactcgtcgtcgtccttaagggcctcaagaaggaagtcccggtcgaaaacattaccgacgggcacatcatggaagccttccagctctacctcgaagggaagatagcgaaggaggcctttgaggagatattcaaggagctggcactccacccggagaagactgcaaagcaggtggctgaagagaagggactgacgctcctcagcgaggaagaggtcgagaaaatcattgatgaggttatccagcagaacatcgaggtgatcaaggccaagggcatgggggcaatgggcatgataatgggaagggcaatggcgaagctccgcggaagggccgatggaaagcttgtcagctccctcgtcagaaagaaaatccaggaaatagcgggctgaggtttttaagtcctttttctcctatcctcttttgtgagtgaaaatgaaagccagattcattgtcttttactgcataacggacgaccagccacgaggtctcgacataaagggctacctcaaacttttcgagcctgatacccagaccctcactgatgctctccttcaggtcgctcagacttcagaggtaataaccgttctgaaggctaattcaggcgattattcagttgtttacgtggttcctggtaagaccgatggactcccgtgcagagaagcctacgagttcctggttcagagagagaaaggtctgggaaaggtcgctgaagatatagttggcggggattcaagaaaatctgtcctgggaggtgctttggttctggtgggaatagccgttctgttctacgtcggctactactatcacgcactctccgagataaacaacctgctcctcttcatcggcgttttcctcagcgtttttggtggtatcttgaagggataccagaagaagagggtcagagcatcggctcctcgtcacagatcggagtgagggaaactgctcatcatccccgtttaagcctccactgagaagtttttaggtttagctttttcatctggaacacaacgcttttaaaatccagagtagtattcgacttgatggagtcagagaaaaaaatctcgtataggccttccccggtggaagcccaaaaaatacgtgatgtacgcgcagattaggtgtaatgttctttcaacctgtgcctcagagcttgaggcgattttcaaaacggctggagttgagttcgtggggctccttgaacccgaccccgaaactctcgcctcctattcggacaggctctactcgggaaaaacaattgaaataatcgaactaatcgatggactgagcaggatgttttacctggcctccctccagaccccgattaagcccggtggggaacttgaacctgagtttaccctcttcttcaatgtgaatagcagggaagcccttcaagtccttctcagggtgatcgggaagaagagaatccgcggaaagagatacagacatcgttctgggataaacttcgcaataagcttcctgggcagtctccttttttcatccctccttaacactaagaactactttctccagtccatcctccttcttgctctcactcttctgatatatcttgcaattgactacccccttcgcgctcctctacttcagaggcattgaggtactctcccacgatccctttgaaaagaagagcgttaaaatagttaaaattgtgagggcaaagacaaaccaagaagagaaaacctaacgtccaagctccttatgggcctttgctaggtgcttcgccgctatcgccgccagcagggaaagctcgccagcgagaactgctccagcgactatctccgcgaacttcttggcgttcgttcccggtgggtctccacctccggcaacgcccataatcgagagagcctccctctgcgtggggactcttgtacctccgccaactgtcccaatctcaaggctcggcatggtgatgctgatgtagaggtcgccctctggcgttacttcggcgagagttatgccgtgtgatccttctgttatctgggcctcgtcctgcccggtagcaaggaatatcgcgccgacgatgtttccgaagtgggcgttgaaaccgtacgagccggcctgcgctgaaccaacgaggttcttgcggtagttcacctcggctatgagttcaggcgttgtcttcagcttctcctcgacgatcttccgaggaatcacggcctcggcaatgacggtcttgcccctcccgttgatgaagttcatcgcgttgggcttcttgtcaacgcagaggttgccggagagtgcaagatacttcacgtcggggaattcctcctcgatgaccttcattatctcctcgctcgctatcgtgaccatgttcattcccattgcatcgccggtctcgaactcaaagcgtaaatagaggttgttgcccacgatgaatggcctaacacccctcagcttcccgtgcctggtgacctttgagaccgccttctcctggaggtagtcaaggttgttcttcacccactcagcaacttctctagccctcctcgcgtcgggacacttgaggagtggcgcgcgcgtcatcttgtcgtctattagggttgtcttaacgcctcccgcagcggtcaaggcagaacagccgcggttcacgctcgcaacgagtgcgccctcagttgtggcgagaggaatgtaaaactctcctttcgcgtactcgccgttgattttaagcggcccagcaacgcccatgggtatctggacgacgccgatcatgttctcaatgttctttcctatgacctggttgggatctattgagtagtgcccgatgttctcaagctttattccgagctttttctcaagggcttttcttcttatttcagtcgcgagctttttatcgccgttcgtgtacttctcgacctggtggagcttaatttcaccgcttgctaccttctcaacaagctcttcaaagttcatttcaacacccccaagttattcgccaaaaatccattcctcaagaacatcaccaatctccctaaaggctattgccgcatcactgtttggcatgtatttaactatcggaataccagcgtttacagatgcgggaacattgggatcaaaaggtacccaccccaacacgggaacatcgaggtcagtttcaatggcgtttataatctcatcgaccacatcctcactttcacggactttgttgagaactaccccaatgttgaggttgtacctctctcccaacgccttgagcttttcaatctcatttttgaccatgacttcgaaggagtatatcggagaacgctctatttccaccactatgatctggtaattggccagctgaaaagtcgggagcgtatcaaagggcacccccgttggggagtccacgaagaccactccaaacttgtaacggactttgtctataacatccacgagcttccttggagatattcccaaaacatcctgaagctgggtgcttccgggcattacatatacgccggtctctctgtgcttgtatattgcccattccgggtctatatcaggattcttcataagggtgtgcacggagtacttcacagcatccaggccaaaatggaaacccaagtttggtaaataaaggtctccgtcaatcgccagaacacggtactctttcatggcgaggtgtgaacttaggtttgccgttgtcgttgtttttccagccccacctcgtcctgtcacgacgatcactgccatctctatccctctagccattagtgtgcagtttgggggatataaggtttccgattttctctctggataatcctcggaattttacacacatatgtcccctgaagaataaccttgaacgcatgaacacaaaaggtttatatcccaagctgtttagactgtgattgtaaggttaaggagatgatcactatggccgagaaaatgcaggctattatgaagactaagccggcgtacggcgccgaacttgtagaagttgacgttccaaagcctgggccaggagaagtcctcattaaggttctcgcaacgagcatctgcggtacagacctccatatctacgagtggaacgaatgggcgcagagcaggataaagccgccccagataatgggccacgaagtggctggagaggtcgtcgaggtcggtcccggcgttgaggatctccaggttggagattacatcagcgttgaaactcatatcgtctgtggcaagtgctacgcgtgcaagcacaaccgctatcacgtctgccagaacaccaagatattcggagttgatatggacggtgtcttcgcccactacgcgatagttccggccaagaacgcctggaagaacccgaaggacatgccgccagagtacgcagcccttcaggagccgctcggaaacgccgtcgataccgttcttgcaggcccgattgctgggaggagcaccctcataaccggtgctggaccgctcggtcttctcggcatagcagttgccaaggcaagcggggcttatccagtcatcgttagcgagccgagtgagttcagaaggaagctcgccaagaaggtcggtgctgactacgtcgttaaccccttcgaggaagacccagtcaagttcgttatggacataaccgacggagcgggcgttgaagttttccttgagttcagtggtgcacctaaagcccttgagcagggcctcaaggcagtaacacccggaggacgcgtctcacttctcggcctcttcccgagagaggtcacgatagacttcaacaacctcataatcttcaaggcccttgaagtccacggcataaccggaaggcacctctgggaaacctggtacaccgtctcaagcctcatccagagcggcaagctgaacctcgatccgataatcacccacaagtacaagggcttcgacaagttcgaggaagcctttgagcttatgcgcgctggaaagaccggaaaggtcgtcttcttccctcacaagggatgagtggcttgatattcttctttccaatttttcagaaagggtttaaatactgagataccaacttcccacggtgagagtatggagatagtaatccctgacgacataatcactgccatgaagctcccgcgtggagaagttgagagggaactgagagttgaccttgctgttattctctaccaaaggggcattctcccgcttggaaaagccgccaagctcgctggaatgacaaagagggagttccttgaggaactggccaagagaaaggttccaaggcactacactgagaaggagcttgaggaggatctggcctttgcccgtggtgagtgactcaacgcccttaatccacctagcaaagatagacaggctcgaacttcttcgggagttctttggagagataattattcctgaggccgtttatagagagtgcgtccttgaaggagggaactcagaagacgccttagctattaaaaacgccaagtggatcaaagtcgagaagatatcggacgagaagctgaagcgcgccttaatgcttgaactggatgagggggagagcgaggcgatagttcttgccatcgaaaggaacgctgagctgattctgatcgacgactacgatggacgggaagttgcgagggccttagggcttaaggttgttggaaccataggtattcttctcaaggcgaaactccttggaaagataaagagcctgagggaagaactcgaaaggctgaaagccaccggattctggttaagtgaggagttttatgaaagaattttgaaagagacgggagagctttagagtttaacggctatctcggcgtttccctcctctgtaactttgagaaggagaagagccttcctcggctccttgtagcggctgtgggcgatgaatatcattatgaagttggcgaggttgccgagtcaggccaagatagttgatatcggtccgatcatccatgtaataatgaacgctatcccaccaagtatcatgactttatcgagtaattgcgggcgtcctttgccatttccattgcattcttgatagcaccctctcccttgtagtgtgttactaggtattcggcttcttctaactcttgatagctctttatggctcccgagattaaaggtcctccgaaaagcaatccgactccagtgtcagataatatccagagaagcataaatccaagtatcaacgaacataaggttaggtaatactaagtcttaccattctgttgaggatagtcatagataccaacggccatttccctcactaccgggggtataatcctgaagagcagaagaagagggaccaacttggcgggttttccgacacttcttcaaccgcaattctcttaagttctccctctcactcacacggggaggtggcagtatggagttaagctacccggaaaagctcacactcattaagctcgcggagctcaagagggcgaaggttgaagagctcgttaaagagagcggtctcgaacaggtcgcagtgatgcgcgcccttctcggccttcaggcaaagggacttgcgaagctccacgagaggagcgaaagggttgtcaaactcaccgagaccggaatgaagtacgctcaaatcggccttccggagtggagggctttgaaggttctccgcgagaagggaaaggcaacacttgacgacctcaaagacgttctcagcgaggacgagctgaagcccatcgttggccttctcaggagggaaggctgggcaaacgtgaggaaagaagatgggaagctagtcctcgagataaccgagaagggaagagaagcttcggagagacccattgataaagccttaaagctcctcgccgagaggggcgaagttccggttaaggaaatcgaaaagctcgtacccgttaacgaactcaagaggaggaagatcggcgaagaagacgtcatcaccgagagagtagccgagataaccgagaagggagaggagctcgttaagaaggggcttgagctcaagaaagaggtctcagttctcacacctgaactcataaagtccggcaagtggagggaagtggagttcaggaagttcgacataaaggctccggtgaggagaatttacccgggcaagaagcagccctacagggccttcctcgacaagataaggagaaggctcatagagatgggattcatcgagatgaccgttgacagcctcatagagacccagttctggaacttcgacgcgctcttccagccgcagaaccacccggcgagggagtggacagacacctaccagctcaagtacccgaaggtcggctccctgccggacgaggagcttgtcgcaagggttaaagccgctcacgagcacggcggcgatactggctcaagggggtggggctacgtctggtcgccggagagggcgatgctccttatgcctcgtgcccatggaactgcactcgacgccagacagctcgcgaagggcgttgagataccgggcaagtacttcacaatacagcgcgttttcagacccgatgtcctcgacagaactcaccttatcgagttcaaccagatagacggcttcgtagttggggaagacctcaacttcaggcacctgcttggaatactcaagcgcttcgccgttgaaatagccggggcgaagaaggtcaagtttctgccggactattatccgttcaccgagccgagcgtccagatgagcgcctaccaccctgagctcggctgggtagagttcggaggcgctggaatattcagggaggagatgacgaaggccctaggcatagacgttccagttatagcatggggaataggtatcgacaggttagctatgttcaagctcggaatagacgacatccgttacctcttcagctacgacctgcgctggttgagggaagcgaggctggtgtggtgagggattgagttatgagtgaggagataattgtgaagtacgacccaaacgttgacatcctgtacatccagctctcaccaaagaagcccgtggacgctgacatgaaaggagacgttgttatggacctcgacgagaacggtgaggtcgtgggtatagagatatggcgcgcgagagagctcgttctcccagagttcctcaagttcattgaaagggttaaagaagaaggaaaggccgttgaaagccaggggtgatggccgtgcccaaaatcgttgttcagattccggaaggtgtgagaaaggaatttgtggagctccaagttaagcgggcgattgaggccgagagggcgaggatagagttcatcgaggacatcgcgcggaggctcgggatagacgagaaggacattgaggcaatagagaaagcgagggatgaggcttggcaggagttcaagaaagaattagggctggagtgatcgtggataccaacgtcataatctcagccctcattcccaaaaactcgaagctgagagagttcctacttacgaccgaaataccactccacgccccggattatatgctaagggagcttaaaagatactggaccattattgaggaaaaagccagaaaaagaggaataactgagcccgagttagcccacttcagggaagagctcctggggaggattatctctcatccgctttccgagtaccgcggttttataaatgaggcctaccgaatatgcagggagtttgacgaaaaggatactcccttcgttgcactcgcactctcgctaaggcttccgataataaccaacgataaggatttgctcgcccacgctggcgagtatgaggcaattcccctgaacgatgtgttgaggtgatgctcatgccgaagttcgacgtttcaaagcgcgaccttgagaggctcgtcgggaaaactttcagcgtcgaggagtgggaagacctcttcctctacgccaaatgtgagctggacgacgtctgggaggagaacggtgaaatctacttcaaggccgactcaaaggacaccaacaggcccgacctctggagtgccgagggtatagcgaggcagatacgattcgcccttggcttccagaagggtttgccgaagtacgagatcgagaagagtgacgttgtagtttacgtggacgagaagctgaaggacatcaggccctacggtgtctatgcaatcgttgagggcctgaacatcgatgaagaggccctgaggcagatgatcaacctgcaggagaaggtcgcgctcaccttcggaaggaggagaagggaggtagcgataggcatcttcgacttcgacaaggtcaagccgccgatatactaccgcgccgctgagaagaccgagaagttcgttcccctcggctacgacgaggagatgacgcttgaggaaatccttgagaagcacgagaagggaagggaatacggacacctgataaaggacaagccctactatcctctcctcgtggacagtgagggcaaagtcctctcgatgccgccggtaatcaactccgagacaactggaagggtgacaaccgagaccaaaaacgtcttcgttgatataaccggctgggacttgaataaagtcatgcttgccctcaacgtcgtcgtcacagctctcgctgagcgcggcggaaagataaagagcgtgaaagtagtttatccagacttcgagatagagactccagacctaacgccgaaggagttcgaggtcgagctcgactacatcagaaaattagccggccttgagctgagcgacggggaaatcaaggagctccttgagagaatgatgtacgaggtcgagcttgagaacagaagggcaaagctccgctatccggccttccgcgacgacataatgcacgcgagggacgttcttgaggacgtgctcattgcctacggatacaacgagatcgaaccagaggagccgaagctggcagtccagggaaggggcgacaagttcatcgagttcgaggacgccgttagggagctcatggtcggctttggcttacaggaggtcatgacgttcaacctgacgaacagggaggcccagtacgacaggatgaatctcccctgcggggagcaccaggaggagtgccgggactacttcaaccacccgcccgctgagctcgtggaaatagagaacccgataagcccgaagtggtcagctttgaggaactggctcattccgagtttgctcgacttcctgagccagaacacccacgaggagtatcctcaaaagttgttcgaggtcggaaaggctacgctcatagacgagagcagggagactaagacggtcagcgagagcaagctggcagtggctttagctcatccgcgcgtgaccttcacagaggcaaaagaaatcctcgagggcgttatgcgtcacctcggcttcgagtacgagcttgaagaggcagaacacccgagcttcattccgggcagagttggtaagatcattgttaacggggagacgataggagttataggggagatacacccggccgtcttagagaactggggaattgagatgcccgttgcggccttcgagctgttccttgctccgctctacacggagccctatctatgatttctccctttccaaacttttctcgaagatggccttcattatctcaaagttctcaaggtttgtaattatctcgatatccctcaccattttcatcgccggttctacctgtatggcagtatttatcaactttttccagatgtttctgtcattcattccagattgaagtttacaaatatcaagttctctgccagggtgtcaaggaaaaccattttataccgttcccgaaaagtggatgccatgaagctcgcactgagagttgcctacgacgggagcgccttctacggcttccagcgccagccaggcgtaagaaccgttgagggagagataataaaagtccttcagaagcttgggataattgagagtcctgaaaaaaacgacttcaagggggcttcgagaaccgacagaggggtatccgcgttcttcaatgtggtctccttcgttccatcggagaggccagacctcgcccgcccggaagtcctcaaccaccatttaagcgacgtctgggttctcgggattgccgaggttcccgacgattttcacccgcgcttctgggcaaagttcaagacatatcgctactacctagtgaacgagggcttcgacctcagtgccatgagagagtgtgcgagccttttcgttgggaggcacgacttttcggcctttgcaaagctcgaaccaggcagagacccaataagagaagtcgagagagttgaggtcatcgagaggcagggctaccttgtgattgaagtccagggaaaaagcttcctgtgggagatggtgcggagaattgtaaatgccctccgcttctgcgggctaggccttctcgaagctgaggaagttgaaaggatgctttccggggagtacgggaagaaaataccgccggcgccgcctgaggggctggtactgtggcacatagagtacccggggatcgggttcgaaggtgatgaaaagggcatcaaaaaggccaggagagacatttttgagcgctattcaagagccttaactagagcggcgctttttggggactttctcctcgaatattgactccattcccttgtcgtagtacttcccatagtactgcttgagggccttttggcgctctatgaagtgcgtgtagaggagtgggtcgtcgtcctcgatgtcaactataagggctttcattcccttcttcggcctcagtgcacgccctatcgtctgaatcgtcattatgtcgctctttccgccgccggcgagtattatggcagagatctccggtatgtcaacgccttcctttaggagggtcgagattaatactggaatttcgccgctcttgaacgcttccagtatctcccagcggttcgggctttgcgagctgaggaattcggctttaataccttctttctccagcatctccttcagaatctttccgtgctcaattctcctgacgtctatgagaactctgtgccccttcctggcaagctcgatggccttcttcactatcgccctgttcctctcgtcgttgttcattatcatgtcctcgtaaagctccttgtagcgttcgctgaaggagggcatctttgattcgtaggttattatctcgaacttcggctttgccaaaaagccctcccttatgaggtcttcagccctgacctcgtagattatcggcccaactaccgcctcaatcttgatctcctcccccctaacgcgcctccatggagttgccgagagaccgaagcggtagacctggggaaggcttatgccgagctggtagaacttttcagctgctgaagtcctgtggcattcatcgaagaggactatcgcatagtctctctggagtttatcaactcccctcgaaaggagggtctgtatcatggcaactgtcacaggcccctcttcccacttgttgtcccccacgatgccagcctttattccgaggacttcctcaatcctctcagcccactggtagaggagctccttggtgtggacgactataagagcggagaggtcaagctcatggattatcctgaggccgactatcgtctttccactcccaaccgggagggcgagaacgcccattttctcctttagtgccttcttgactgccctcccctggtagcgcctcatctggaacttctcgttccaggtggagttgagcttttctccgcgtatctgcctctcgtcctttaccctaacgcggtagcccttgctgttgaggaatttcttcacccggggcagaagcccgacgggaaacgtcttctcgtaggggtcgtagaggctctcgggcttctcccacttcccgtagtccttcttgtaggtgagcaggtcgtagattttgaagtagacgctcgggtcggctttctctatgtacaccagtgctgagccatctgggattctcaggacaaccatgggcatggccaatcgccgaaagtttagaaaaaggatttatagaccttttggaagttggtatggtgatagcatgctgagggagatactctcacggtttgaagacctagttgtcattaaggaacccgtaaagaaagagctggagataacccgctacctcctaaaataccctgacaggccggttctgtttgaagacgtggaaggctggaaggtcgctggaaacatctggagcacccggaagaggatagccacttacctcaacaccacgagggaagagctcatccacctgatagcggaggcaatggaaaacccaaggcagtacaaagaggttaaagaggcaccttttctcaagaactcgacgaaggacttctccctcaagaagctcccgattccaaagtactacccaagggacggcggtcagtacttcacctcggcgatggtcatagcgaaggatgacaacggctttgtcaacgtgtccttccacaggatgatggtgcgtgacgagaaaaccgccgccataaggctcgttccgaggcacctctacgcgatgtggaaggagaaggccgagaacggtgaagacctcgacgttaggatagtggttggcaacccagtacaccttcttctggcagggtccgtgagcaccgcctatggggttagcgagctggagatagcatcggccatgagtgagattgcctttggaaagccgctcgaagtcatagaacttggcgggattccagtcccgatcgagagcgagttcgtctttgaggccagaataacgccagaactcgtcgatgaagggccattcgttgatataacagggacgtacgacatagtcaggaggcagccgctggtagtgtttgagaagatgtaccacgtggatgatcccatcttccacgccctgctctccggcggctacgaacactacatgctgatgggccttccaaaagagccgcagatatacgcgagtgttaagagggtcgtgccgaaggttcacggggtcaggctgaccgagggcggggcaatgtggctccacgccgtcgtttcgataaccaaacagcacgacggtgacggcaagaacgcaattttagcggccttcgccggccacccgagcctgaagagggttatagtggtcgatgaagacataaacatctacgacgacagggaagtcgagtgggcggtcgctacccgcttccagccggacagggatctggtgattgtcccgaacgcgaggggaagctcactcgacccctcagcggagaagggacttacggcgaagtggggaattgacgcgacgaagcctctgggcagaaaagaagagtttgagagggcgagggtgtgatcactcccccatttccctaatcttcctgacttttccaccctttatttcgatgtagccgagcttcttgaggagtttcagtgtctcttctatggcctccttggagtagtttatcacaagagtccccttgggcgttggtatcgccattggagcggccctcatgaagctcttgatgagctcttcctcagggatctttccgtcctttagaaccctcaggatttcttccgcgaggatgcccctgcttatgagggcaaagtaagccttaaggagaacatcctccgggaagtacctgcccgctatcgagccgattttgttgatcctggctatgtccagctccaagaactcgaattcatactcgggaaggaggtctgtaaacacaaactgcttggctaccttttcagcctcttcaggattgtggacgatgttgaaggggaacttaaactcgaatctgattgaggatgggtcaacaccttccctgagcttaacggtctttccatcgtaatcaagcactccagccctgtggagctggtcgaggatatctcctacccatgcaccctccattaggagcttttcggcgtcttccccaactttcaggtgctcaagtatgtgggtcacactttctttaaacgacatgaagccctctctcaaagcgtctctatcaacgccctcaatgctttcaacggctttttcaatctcgtcaagggtgcccgtgagcatgtagccgataaaaccgtcgtagccgagccgctccctgacctcaaactttatcccttccttccgcagttcggcggcgagggaatccctgatgtgcttacctctaacgatcagcctcatgataccacccctcagcctggggaagggacacttataggctttgtggagaacacgaaaggtgaactaccccgtcctttcgggcggggcttcctgcttcataaggaagacttgccccgtgatgacggcctcataaggcacgacacggggtagaggtcttccctccacaggcaatccggtcgtcccaacccttcatccaaacccctcttcaatatgttgagggaagcgttcaagtccctatccatcaccagcccacacttcgaacagcgaaaaaccctctccaggagaggcaattcctccacaacgaatccacaacgggagcaagtccttgaagtgtaggctggctcgacgaaaacaactctccgaccagctctctcagccttgtcggagagtatcctaatgaaagcaccgagagaagaatcgagcaaacgacggttgagacttttattaccgttcccaaccatattctttggttttaggttttccacgacaataatgtcgtaattcctaacgtagtaaagagcgagtttatggagaaaatcatttcgctggttcgttagcttctcgtaagccttagctaattttattctctccctctcccagttcttcgaacctttttgcttccttgagagtctcctctgtattttcttaatcctttcaagggatttctcaaggaacagcgggttctcaaaagcgttgccgtcgctatcaacgacgaaatgagcgactcccaaatcaattccaactgccctacccgttctgggcaacggttctggttcttcctcagcctgaaaaatagcataccacttcccagtcttcgtccgtttaattattacgcccttgattttacctttgattctcctatggagctttatggggacttccccaaccttagagagacgtagtctcttcctctcctcgtcaagcttgaaaccgctttggttgtagttcagcgtcttccagctattcggtgaggtcttgtatctaagcctcccaactttatgtccgttcttttttagagccttcaggacggtcaggttgttccagagctggtggttcaccatttggagaactttggagtaaacctccttgagttctggcttttccttctttaattcaacgattagcctttgggtgtcgattctcccgagcgaagggttttcccgtattgccctcaataactcgttgtagagccagcgacagagttccatatgttggagcatcctttcctgttgtgcttttgagggatagattctgaagcggtaggaacgcatcaactcccctcaccttggctctcaacgtaggctttgagaacgtcgagggtcacctgcccagaggttgcgaggaagtatgagggtgaccaaaaggtgtttctccagagtttttccttcacttctgggaagttcctgcgtatttcccgtgaggtaattgtctttagggcgttgatgtattttggtatgttgagggtgggttttgccttgaataggatgtgaacgtggtcttggtctgtctctatggtgagaacttctacctcgtgggtctctgatatttcgtggattttctgtttgaggaagtctattatcctgtcgttggtgaagacttttctgcggtgttttacgactaaaatgaggtggtaatagagtgaatagactgaatgtgctcctttatcgagtttgtatttcatagttatcacaaattttgtgtaactatgagagtatttgagggtttcgggctttcatcccctccctctcggaaggggacttctcgcccgaatatgttaaaaagcccaagtcatgtgcaggattgggggagaaaccatgagtgagaaacagtacttgcttgacaaaacactcgagcgctggaagggacagagggttgctgtagggattggaagcgagatcagtttttcgggaattcttgaggacttcgacgaagaggtgatactgctcaagaacgtcactgactacgcaggcaataaagcgagggagcttatcgtgaagatagacgatatgaactggataacgctcctgtgaggtgcctgcgatgagagcggtggcgttcgtgggctacaagaagagcgggaagacgaccacagtagaggccgtcgccagagtcctcaaagagagaggttacagagtagcgatagcgaagagcatgcatgcggagttcgatagagagggcactgacacttggcggttttcccgagtggccgacgccgttctggtgagagcggaggacacggatgcccttctcttcaaagctaaggacataaacgcgctcttctcaatggtcagcgctgattttctgctccttgagggattcaagtcggtggagcacgttccaagggtggtttgtgcaagaacgccggaggaagtcgaagaacttgacgggggacttgccatagcggttagcggagttgttgcatcaagggggataaccgaaatcaacggcctcccagttatcgatgccaccagagagccagaaaaactcgcagacctagtggaagagaaggccttcatactccctaacattgattgcggcctctgcggcttccgctgtgctgagatggcgaggatgatagtgaaaggcgagaagaccacaaaggactgcgttgttctcagccagaagccgaaagtcgtcattaaaatagacgggcaggttctccccatgaaggactgggttcaggagctcgtggagaagacgataaagggcatgctctctgcgatgaaagggtaccgtgaaggaaagaagattgaaataatagtgcggagtgattgattgagggccctaccctattgttaacacttttaatagttagagaaatgcatccccatgcactcttctttccaaatgtaaagattactctcctctttgatgcttttttgtgttcgtctcttggctaaattaaactatttttggaaaaattttcaagaaaaaaccgaagaatcatggaatttttgtgatttacagccgcgtaaaagtttacaaccgtaaagtatataaccgtgctccaagataaaaatgttctgagatgcactttagcatatctggatgaccataaatggagaatgaggtgaagaaaatgaagatgaaagctctcggtctcgttgcccttttggtctttgctcttgtggccagcggttgcattggtagcggtggaaacggaagtaagacttccgaggagataacaatctacaccggaggaacaagcggtgtctacttcccgctcggctcaaagtacgctgaaatactcaacaagaacggcataaaagccaaagcagtcacgagcggtgccagcgttaccaacgccaaggccatcggcgaagggaaggcccaggccgccatactgcagaacgatatagcttactacgcctacaacggcctctacatgttcgagggacagcccgttaagaacatacgcggtgtcgcggccctctatcctgagacggttcagttcgtcgtcagggccgacagcgacatcaagagtctccaagacctcaagggcaagaaggtcgccataggtgctgccggaagcggcactgcagttgcagccgagcagatactcaaggccgctggcgtctgggacagcatccagaaggtcaaccagaagttcagcgaagccgctcagagccttaaggtcggccagatcgatgccgctgttatcgtttcaggtgccccaacccctgccgttaaccagatagccgtccagaccccagttagaatcctcccgattccagatgacatcctcaacaagctccacgaccagggatacatattctacgtcaggcaggttctcccgaaggatacctacaacggcatgaccgaggacactccgaccgttgccgttaaggctatcctcgcggtcagtgcggatctgtcagaggacactgtctaccaaatgaccaagatactcttcgacccagccaacctcgaggaactccacaaggtccacgccaagaccaagtacataagccttgacactgcccttgacggtatgagcatcccgctccaccctggagccattaagttctacgaggagaagggcataacggtcccggacaagctcaagccgtgatgggtgaggtatttgaggaagtcctttctttttctggcatttttcctgattttactggtatcatctgttgctgaaagaggtgttctcgtgataacggatgggaaggaggagatggtgtatcccctcggtgaacacgaaataacgattgaatacatccacagcgtggagcggagcgaggttgtggagacgctgaaggtaaacagcagcggcatctatgcaataggtatgaagtggaaggacttcggtgccggccttccagaggacttccaggagtggaacggaagctggtacgagaagcggatcaacatctacctcggaaagagccttgactactggttcatcccgctcaaccgggcaaacataacggttgacggtcttccggcattcgctccacgttccgatacactgattgagtttcgagtcgaatcatgtcccctactgctgatcaagattgggaggtgctgataatgggtgaagagccaccacagtttgagaaggccaaggaggtcgttattgaaagggttagaacccttcccccgatgcttgataacgtcgttaaagcggccgcaatcctgataggtatctacgaaatactgttcatcttcaacttcaactacactctctacgacatgttccagaagatggggataaagatcggaatcctgcaggcgacattccagaccaagcagggcgaggccttcgtcctggccatgatactgataatcacctatctcctctatccgataagacggcaggaaaagtatcttcagaaagtccagtggtacgattatattttggctatactcggggcaatctccgcgttgtatctctttgcagtctatcagaggtacgccgagttcgccgaggtctacaccaccgacgttatctttggaatcctcgccataatcctcgtccttgaggcaacgaggagggttcttggatgggttcttcccgcggtcgttgtcgtgttccttatctacggcatccagaacataggctttgactggatacgctttacccagcagctctacttcgatgagggaatcttcggcattccattcttcgtcatgacgatatacgtcttcgccttcgtcttcttcggcgcgttcctgctgaagatcggcataagcgactacataacggaattcatgataaccctctttggttcaagacctggaggaccggcaaaggccgccgtcatctccagcggcctgatgggaacagtgagcggctcaagcgtcgccaacgtcctgaccacgggaaccttcacaataccgctgatgaagaaggcaggctatcctccggaaatagccggtgccgttgagccggtagcatcaacgggcggtcagcttatgccgcctatcatgggtgcagcagcattcatcatggcggagttcctcggcgtcccctacaacaagctcatcatagccgcagtcattccagcgctcgtttactacgcgggcgtttacctcttcattgaccttgagacaaagaggctgggcctcaagggaatgccgagggaaagcttctccggccttgactacttcataaggaagctctacatcctcctgccaatagtcgtcatcaccgtcgccttagtctggggtattccgccgcacatctcggcaatttcatccctcggagtagccatctgggtcgcgtggatttccaaggacaacataaagggccacgaggggctctacgttgctgttgtcctgcttgccaccgctctgatgttcacaggcaaggccatggccactccagtcgccggaatctcgctcctaatcctcctcggacttgctgcagtaggcttcataagcgacaaggtcgagttcaacgagaagttctacataacggccctcttcctgctcttcatagccctgaccaagtacatcggcatgaccaaggagcagatactcctcctcagcggtgtctttggaataatattctcccttataatcggctggtactcgaagagcgaagacggaagggccatgtacagggcaacctacgagtccatgatagacgctggaaagacgagcacgagcgtcatgttggcggcggcgagcgcaggccttatacagggtgtcctcacgatgaccggcctcgtcacgagtctcggctaccgtctcgttgacctaaccgctggaaacctctggctcctgctgatgctcacgatggtcttcagcctcatcctcggaatgggcgtcccgacgacggccaactacatcataacatctttagttgcggctcctgcaatattcaacgccgttcagggcctccacccatattcagacccggttccgggattcgcaaccccgatagccctgctggcggcacacttctttgtcttctactttggaatcctcgctgatgttacgccgccggttgccttggcaagctacgccggttcggccttagccggcggagacttctggaagacggcgatgaacgcggtcaagtacgccctcgccggatacatcgggccgtacatctacttcacgcaccccgagatgttcatcataacagtcaagcactggaccacgatgaccgcccttcaggtgctctacgacctcagtgcaacgctgctcgtgatgtacctgctcgcaatagcgctgaccggctggttcggaaagcatctgagaaaagagatcagggggcttgcagggatactcggcattatctcggcaaccctcaacccagtgatagtcgggattagttttgttttcgttattgccctgagactgcttggagagaaattgtcttcttgaccttctctttgtcttttcgacagctgtcggtgggttagatttataaacctttgacagcctgacaatagatgcggtggtagtatgaagtgggagctcacgctctacggcggggaacatcacgggaaaacccttgtcgtcgaggcggaaaatgttgaggaagccaggaggatcgccctccaggaagcaaggcggaaggaagcactcacctacgagcttgcaaagattgagtgacgtattcttgcgctaaccttctcccattcttattcccgttattttctcaagcttcactagggttaaaagggtatgtcttctttgcttctatggtggtgagaaagtgatagtgcgcacgcctaggaggctccacctcggcctcatagaccctacgggcagcctcggaagacggtttgggagtattggggtagcaatcgatggaggctacgaggtaagggttctcccctctgaaaagatggaaatcaaagctcagggagaggatatcgagacgatcgagaaaactttagggagaatgaacgccgcttttgggactggggtgaactatctcgttgaagtcaggcgtggaattccaaggcacgttggtctcggttccactacccagctcagcctggccgttggaactgcagtggcgaggctcaacggaattcatgtctcgataggggaacttgctagagcccttggaaggggcaagaacagcggcgctggaatatacaccttcgcctacggcggatttgtgctggatggcggtgtcaggaactccgtcccgccgctggtactccgcgaggactttccggaagagtgggcgtttctcctggtaattccggagcttaagcgcggcccagacgaggaggaggaaaagcccgcgatggagtcaagctttggcgacgttgaagcggccagggagataagccacaggattctgctcggtcttctaccgaccctcaaagagcgcaatataaaggcctttggagagcatctgagtgccatacagaagctcgtgggcaggcactttgcaggattccagggcggagagttcagggaggacatctctctgatagtgaagtttctcaacgaaaagacgtatggagcgggccagagcagctggggacctactgtttacggcctgatcctgaagtcggaattccagagtgccagcagcgaggttttcgactacctgaaggatcaggggataaaggccaagattgaactgggaattccaaggaacactggggcagagatcgttgaggagaacgccttcctgatcaggattataaaaagcgtcgccggtggtcagtgatgagcctggagcgttttgtaaaaataaagtaccagacgaacgaggaaaaagccgacaaacttgtagaaggtcttaaagagctgggtatcgagtgcgcgaggatcatagaggaaaaggtagacctccagttcgacgccctcagacacctccgcgaaaatctgaacgacgatgagaccttcatcaagctggtaatagccaactccatagtcagctaccagctgagcgggaagggagaggactggtggtgggagttctcaaagtatttctcccaaaatcctccagagaagagcatagttgaggcatgctcaaagtttctaccctcatcaagaaccaaccgccggctcgtcgccggaaagatcaagaggttggaaaagctcgagccgtttctaaactcgctgacgctccaagaacttaggaggtactactttgagaatatgatgggactgcggaacgacattgcagaagccctgggatctccaaaaaccgcaaagaccgtggttttcgccgtcaagatgtttggctacgcgggtagaatagccttcggggagtttgtcccgtatccaatggagatagacattcccgaggacgtcagaataaaagcctacaccgaaaggataactaacgagccgccggtgagcttctggagaagggtcgccgaagaaacgggaattccaccgctccatatagactcaatcctgtggccagtgcttggggggaagcgggaagtaatggaacggctgaagaaggtctgcgagaagtgggagttagttcttgagctcggatccctctgattttcctttttaaactgccctctgtggaatgttgcggagaccgatagtcttttatattactgcctttagttctatttggttaaaacttcatgggtgataagcgatgcactgggggctgaagcttgaatttatcaaaagcatgagaacgaagaaggtctgggttctgctcggcataatgatgcttctctacgtgccggggttctacctagaaaaaatgaacggaaatacgcctcaaaccgttggtgaggcagtaaacatgctcgtcagcaacatcgaggatctggcagggttcttccttggaatactcgcgctcctccttggtgccaccgcaataaactccgaccttgagaacgggacgataagggtagccctcagcaaaccagtgaggagaataggctaccttgggggcaagttcctagcccatgttgttgtgctcctcgcggcgctcctcctgatgacggtgataggtataatcggcctcgcctggatgggggcaccgttcggccaaaagctcgtcaccgagtcaatgctcctgaactttcttcttctgctcgcgatgatccagctcgttgcactgggctacatcctctccacgatgataaaatcttcaggaacggcccttggagcagctctggcgctgttcttcatactcttcatgctcataccgagcatcgtctcgttcatggcaatcaaagactacgtcttcgacgagaacgtgaactacgatgaggtcgcggagagggtggacgagtacactacaaagtacctgttctattcaccgctctcccagatgggggtgattctcggtgacgtgtacgaggacggcaattacgtaggcattgcccacgccataggtaagaacccggtaaacttcggtttgatagtcggtatgaccatcgtgtactttggaggggcctttctgaggtttgccaggatggatttgaggtgatggtttgtgatgagggttgagaatctcgtcaaattctacaaggacgttaaggccctcaacggcctcaacctagaagtaaaaccaggccaaatctacggcttcctaggcccaaacggagcaggaaaaagcacgacaatcctgagcaccctcggcctaatcttcccacaacaaggccgcatacaactcttcgacctagaagtcttcagggatggaaaattcgacgagaacaaactcgtccaagcaaagaagagaatcggctacatgcccgaacacgcaaccctctgggacttcctcacaccagtccaaaccctcgacataatcgcggatgcattcaaaataccaaaaaccgagaaggagaaaagaatcaaagaactcctagacttagtaggcctaagcgaggctaagaacaggaaggtgggcaaattctcgaagggcatgagacagaggctcctcctagcccaggcactcatcaacgacccagacctcttaatcctcgacgagccaatgagcggtctagatccaaagggcatcgccgagttcaaggacattatcagggagcagagaaaagccggaaaaacggtcttcttctcaagccacatcctggcccacgttgaggaaatctgcgataccgttggagtcatcgtgaagggaaaactcatcagggaaggaagcttggaggagattaagcgcgagttccttgagaaagcgggctacacgataattctggagacgagcaagcccgtcgactggagcagtgctccctggcgcgcttcacccctcggcgagaacaagtacaggattgtggccgagagagacattagagaagaactccacgactacgttgcaaaacaaggagcaaaaatactcaccctacaaatcaaagaacccaccctcgaagaaatattcctaaaaatggtaaaagagtgaagagaggattctcctcactctttcttttctggagctttcgctattatccttgcgtcaacgacaactgctcccttgcccttctcgtagacgaagacagggttgaggtccatctccttgatgtagtccctgagctcatcaacgagctgagacactttaaggagcatgtccacgatggcgtctatgtcggctggctcttcaccgcgcgctccggccagaatcgggtagcccttgatctctgctatcatcttccttgcgtccttctcggttattgggattatcctgaaggtcacgtccttgagtacctcgacgaagatgccaccgaggccgaacattatcgcgtggccgaactgcgggtcttctgtgacaccgatgataatctcccttcctggcctgagcatcggcgctatgaggacaccgagaatctcggcatcggggcggtacttcctcgcgttctcgtgaatctcctcccacttctgcttcagctcttcgggagactttatgttgagtatgacgaccttggcgtcgctcttgtggagtatctgaggcgacatgagcttcatggcgacaggatatccaatctcttcggcgtactccagtgcttcatcaagggtcttggcaagcttttcgtttgggacgggcagactataggcctttaagacctgcttggcctcgtactcaacgagcgcagtccttccagacttcaaaacgctctcaataaccttaagggcctcttctttggcgctcataacatcattcccccttaaccttgcggaggtattcagcatacctcacgagacctgccatggcacggactcccctctcgggggtcgggtaaacggggacgcccttctcctcaagcatccttgcgtagcggtcggtcttccttccgcccatagcaactgccactatcggcttgtccgtcttcttctggtagtcagcgagtatctcgatgatcttctcctcctcaaggagcggcacctggaagaggacgatgatgactatcgcatcgacgttcggatccttcgtgaaggcttcaatagctattctgtacctctcggcatcggtgtcgcccacgacatcggtcgggttgccagctaccgcgtgcggcgggaagttctcctcgagaaactttatcgtctcctcgctcagctccgccatcttgaggccgaacctggcaactgcgtcgctcgccataactccagctccaccgccgtcggtgattatgcctatcctgtcgcccttcgggagcttgtggagtagtgcggcgaaggccttagcaaggtcgaacatgtgttcgaagtcctcggcgcggattattccagtctgcttgaagaccgcgtcgtagatggtgtcggctccagcgagcgagcctgtgtgagaagatgcagctttagctccgtactccgttcttccgctcttcaaggcgattacgggcttaaccttggtgatcttctttgccgcctccatgaacttccttccgtccttgacgccctcgatgtagaaggtaacgacctttatctcgtcgtcgtggatgaagtactccatgagatctgcatcgtccacgtcgagcttgttgccgtagctgaccatcttaccgatgcctatgccagccatagcagcccagtcgagcatagcagctgcgaatgcaccgctctggctaacgaaggctattggcccgctcttcggcctgtccatcttctcttccggcaagaagacggtatcaacgccggtatctggaacgtaaacgccgacacagttggggccgatgacccttatcccgtttgccctcgctatctcaagtatctcctgctccattctcttgccttcttctccaagctcaccgaagccgccggtgatgatgacgaccgccttaatgcccttctcagctacctccctcatcgttgccggcacgaacttggccggaatcgagataacggccagatcagtgtcatcggggagctctttaacgctgtggtaaaccttgtagccctctatctcgtcgagcttggggttaacggggtagatgttgcccttgaaaatcccgcgctccttgttcattctgaagttctcaaaaataacgtttccgacctttcccttcttgtcggttgcaccgatgattgcgaccgccttcgggtcaaagaagggcctgagttcttcgacgattttctctgacatgcctatccctcctgagaaagcaactttcgagtaaaaattccacgagaatgtataaaaatgttgcgcagagaaaaattcgagcgctgatggatttaaaggttcaccagtggaccgattttataaaatgggggccgctcttttttctttttaagtagggggtctttatgatttagccactccaaggtcccaggtgtgatcggggataccctaagtctaacataaacaacgcgtacaacgacttagatatcccctctttccctcacctttctcctcacgttggggtcgcggtcggctatgatcttcagcgcctcctcgaagctcatccagtcgggaacttcttcgttgaggtatatcccggtcctaccaatgctgtccctcctcgtaaggacgtgaaccctctcggtaacgatatccacgctcactccaagtattttggcgacttctggctctcttcccatgacttccctctctatgtgtcccttctccgttgggagtattaggatgagctttttgttaactcctgggactctctccttcgttttgacaccccagatgtcgattgccccgccccagcggtagaactcaagctccctgtccgttggttcaagcagaggaaatgtaacgctagtctcctcatctatctcgatgacgccctttatcaggtgccatggtgttgccataacgatttttctcctccgtacaaggccttcgagggccagctcgatgaggtagctcggaacccgaattggaatgaagatgtctatgtcgctgtcctttctgacgtctcccctagcgacgcttccatagaggacgggatcaaagtccttcagcctctccataatctttagggcattctcacgcttttcccacaggtagcgccagcgttttggggagtacacaacttccctctcgtcccagattttcacaaccttctccctgggcatcgattcgttctctgtcgttttcctttaataagataaccgataccgttttatagtacagaactaagcccaccctggtgaacaaagatgccggtggttgcacacaacctcacgaaggttgaggtagaaaaactctcaggaagcatacccacgggtcagattcaggtaaacttgagcccaaaaatagaagatctcaggctgggagaggtaagaaccccaactggaaagataaacggtgttgaagtggtgttcagctttgaagtgacttatcagcccgagattgcgagggctgtcatcaagggacttctgctgtaccttcccccgaagaaggaaatgattgacgaaatcctgaacctctgggaagaggagaaaaaggtaaactcagtgctctttgtggaagttaccaacttccttaccagcgaactttcgccgctcctgatgatcatctccaaggagatgagactcccataccacattccgcttccgagggcacagctgaggactcagtaatagccctccgcctctaaaatctttttgttcacttcctcaagctgtgagttcttttcaaggatcttgaccaagagctcataagcctgggcgggccttttcctggacacgtagaactcggcaatctcaacgatgtcgaggaggtcgtagagcctctgatttgcgatgtaggtctttagcagggccagccgtatcctgatcttctgttcaatgttcgagctgatgttgagggcctctttatagtgtttaactgcatcatcgaacttgtttattccgattaatgcctcggcgagctcaatgagcttttcctgcgtcgctttatcgtctcctgcggcgcgataggaactcactatttgatagagcatcctaacggcgtttatcccaacgagctttgctctgcccgtgttctcacagagcatatatgcatactgggccttgacgaggttcgttgctgtcccgtcaagatcaccctcggagtatgaaagcttgctggccttttcatagtttttagcggccgtttccataatctcaaggtagtgagagtcgtgaccgaatatcgccctgacgtacttagcgagcacgtagaacgcgtcagcggcagccgaaaggttcttactttcaacgagattctcggtgatttcaccgtagatatcgaggagttttccagcgatacgctttatgtccgtctcgctacccactatcttgtagtagtgaaacgcagactcgtaaaccctggcagcagttttgagatcaccagagctttcaaaagaattcccaagctcctcgtagatgttcccaaacctagtgccgtactttgtcatgaacctcgagtcccccgtgactgcaaagacctcaaggacgttcagggtgtattggtcaagggcatccaggtcaacatcgggctttgatatctcctcctcgaccaagtttatataaagtgacgccgctttaagaaggtaaggcctggccttctcgggggaagcctttctagtcagatacctcccgatgtacctgaacagcctcgcagcatcctcgtagttctttctctcttcatacctctgggcagctcttagtattaacttcaatccctctttaaccctgccgctatcaacgtatttaaacccaatctcctcaatctcctcgggggatgttgtttcgggcaaatccaactctctcaccccatatcgttacattggtgaccatacaggtactaaggaaatgttcacagaccaatatttaagcgttgcctatgctttaacgatgttatagccggccgccttcctcaggcggttcattactgcaagccccactcctacctcctcaaccccttcggctattatcacgtccacgccgcgcttgtcaagctctctgagggccttgaagagatttctggcgacttcttctaaggttttcccgaggaagtagaactcgtccgcctccacttcaaaagtcgccatcacaccaacgcggtggccctttttcctgtactcatccaccagctcctggatttttcttctcctgttctcaggagttccctcaacaactatcaccattgcgtttggggcgtagtgcttgtacttcattccgggagccttcgcgaggtctatcttctttcccttgaccgcggggtgtatcctgatgggcccgataactttctccagctcctccagcgggataccccctggtctcaggagaactgggggctcttcggtgaggtcaacgaccgttgattcgacaccgacccaagtctcgccgccgtctattatcccctcgatttttccgtagaagtcgtcaatcacgtgctcggccgaagtcgggctgggcttcccgcttatgttggccgagggagcggccagtggggtgctcgcccttatgagagcgagtgctattgggtgggcgggcatccttacggcgacggtgtcgaggccgccggtcgtgaccagcggcacttcctcacgctttggaagaacgagtgtgagcggtccaggccagaacctctccgcgaggagctttgccttctcgggcacttctctggcaactttctcaaggtcatcgatgcttgctatgtggattatcagaggattgtccgcgggtcttcctttggcctcgaatatcctcctgacggccccctcgttcagggcgtcggccccaaggccgtaaacggtctcggtcggaaacgccacgagtttcccctcaaggatgagcctcgcggctacctttatcttcttctcatccaggccgtctcgcatgttgataactatcgtcacgtccctcaccccatcgtatttgagaaaaccgagagttctgagcgataatcctgaacgccctctcgacttctggtgagaaaagtggttaaaaagctatcccacgagggacgagtacacccgttcaacttcctccgcaactttttcccaggagtacttctcggcaacgcgttttcccgttgaacccatttttctggcggtcttcggactttccaggagcgctctaacttcgtccacgaggtcatcaaagctggtgaacgtcaggccgttcttcccctctctgataagctctggaatcgcgctgacccgccttccaatcgcaggaacgccgagggagttggcctcaaggatgacaagaccgaatccttccctcttggaagggagaaccagcagaatgctcctgcttaaaatctcctcaacatccgtgcgatagccgaggaaatggacgttcggcggagctttcgcctcaagccttttcctgagggggccgtcaccaaccacgaggaactctgtgttgggaaagaacttagcgagctctacaaacgtttcgggggatttatagtcccgaagggcaccgatgaaggtcacgtactccctctttcctccctcggatccttcaaactcgggaagtccattgggtatgaccttgacgttttccgcgccaagggttttagcgagtctcgccaggtggtggctgaccgctataacgacatcagctcttttcaggcttctcgtaacgtagaacctgcccaggggcgatttgggggtgttctccaggtcgcttccgtgagctgtgacgacaaagggcaggcccgtcttctccttggccagcgcgccggagaaggaggtcgttcctgcgaagtggcagtggacaatgtcaaaaccgaactctctgtggagttgagctatcttcctagcgcccgcgaaggcgaaggtgcttcccctcagaccataaaacggcggaaccctgagctgatggacaaactccctctcgaactccctgaccttgacggggccgtatgtgagcacatggacttcgtggcgctttctaagttcccttacgaggttgtcgagatgcctcgcaacaccgccaccgtggggagggtagtgtccgaccattaggattctcatggaggaaagttaaaggtgaagttaaaaagcgtttgggaacgtctccctgaagagtttctccgcgaactctctgagcgttaggccctcttctctggctatcttctcaaggagcttctgcgccctgctgccgtactgcgcggccctcttctccctctccgctatccactcggggattccgagacgcagggcgagtttcctgaggatgacttttctggttccatccactatcttagcttcgagcggcagtttaagggcaaagctcaccacaggaagggcgaggaagggatatcttccttcaactccgttcagcattgttatcttgtcgtccctcgcgaggttcctctcggagatgagggctatgtcctcttccataagttcgggtctctcaaggtactttgcgtagcctccgaagagctcgtccgccccctgcccgctgaggaggacgcgcgtaccgtctgaagaagctagaccagaggcaaagtaaagcggcagtccaattgcgaggttcatcgggttgggctcttcgatggcgtacattactcttttcacggcatctctgacatcctcgacttcaaaagttctctccctcagcgcccagccaaagtggtcggccactttcctggcccactctatgtcgggactgtcctcagttccagccgtgtacagtatcacgtcggagtactgcgaagccaggtaagcgaccagagtgctgtccaagccgccggaaaacagaactcccgtttttttgctgaccctgttcttcactgcatatctaaggagttttccaacgccgccaaccgggtctttcctttcgcattttgctttggattttaggttctcaagggagaacagcctggcccgcctcaccccgttcttttcaagaacgacgagctcccccggctggacgggttcaacttccctctcgcccaccgcccagaggactttcttctcgcttgcaaacaggccgttacgtgagaagtagagcggcctgatccccagaggatctctaaacaggtagatgcgctctccatctgagaaggcaacggcgtagtccccctcaagcatccagaagagttttttaactatctcgggatagctcagatgttcttccctcaaaaactcgataagcctaagtacaacctcgctgtcaacgtcgctctcaaaagaaacgcctctcctctccaggtattctctcagcgccgcatggttgtatatctcaccgttgtgaacaagggctagatcgtttatgaatggttgagtaaagctctttgaaccagttatggccagcctgcactggaggagaccgattctcccgtctggaatctcggtcagctttgaaaagtcatcagatttgaggactcccccatcggtccagaccccaaaactttcagggcccctgtgctttcctgctatcgccattttgatgagcttttctctgagattcccccccattccgccagcgatgaggcacatgagcatcacccagggcatttaaaaaccagaagagataagccttcccattttccacgtgaaaaagtgttctggctggtttcttccccttgaacaaccgttcaggtcagatcgccgcaggtgcagtagtgctcatatgccacggtttcgagatcctcgaatccctcaccggtttttgccgagaggtagagaaccctcgtgggaggggcaagctccggaagagaggagcacagcttgtaagccagaagcccctgggtggagggctcaagcttcagcctcgccgtgaggtattctatgtcgtcgaggtacttccgtatcccttcgatgtcttcaactgtatccaccttattcagggctggcaccgtcgttatccccagcctgaggtctatcatcaggccgaagaacaccgcaaagcagaagtcagagggcttcctaagcacttcaggtgagaaaagataaacccctagggcatctggaaaggcctccataagctcaaccccaaactcgtggaagaggaaagtctccatctggcccggggtgtctatcagaacgtagtcggactccttgtcaagttccctgatcttctcggcgtattcccccgtgtattcggcaagaatgtcgtagctcttcactatagccccgttcggtccgaggccttcgtccataaggctccacgcggttaccttctctctgacatcaagatcgggagtgtatggaagttttctaacccccgtgtccagattaacataggctaccctatacccgttttcggagaggtattttccaaactcccccgttaaggtcgtctttccgctcccggctgtgcctatgaaagccagtatcatcccatcacccttgccttgaagccagctatcctgcttacctcctccgccagtgccataaacgccttggcaccctccgagtcgggagcatactcaactaccggaactccttccagtgtggcttccctaaccttcgggtcttcggggataaccacaagcaggggaacctccataacttcctcggccgcgtcgggcggtatgtcgttctcgctccttccatagcggttgaggacaaagccgagaaccgccagccctgcctttctgagaactatgccaaccttcatcgtatctgttatacaggatatctctgggttcgtaacaaggatcacctcttcgccgctcatcatggcgttcatcgcgtccatctgaaggcccgctggacagtcgatcagcacgaagtcatactccgatttcagcggctttatcgttgaggggagcctcctcgggtctgccttaaggacgtgctcccagtcaaccgccgccggaatcagatcaacgttctcatagctcgttgagtagatagcgtctttgatgtctgcttcgcctgcgagaacgtcgtgtatcgtggtttcagcgtcgtctatccccataacgaggctgaggtttgccattgtaaggtcagcatcaacggcgaggactttgtagcccatctttccgagggccaccgaaaggttggaggtggtggttgtcttgccagtcccacccttaccgctggctatcgagattaaatgacccatgagcgtcaccccaatgtttttgtttttctccccttatgaactttagggcacgctaacctttatgaaggctacgcttcactctggataggtgagaaaaatgagagtgcttgttccggatacgagcgtcatagttgacggcaggctcacgcagttcctgtcaacgctgggcgagaaggtcaaggtcgttgttccagaggccgtcgtggctgagatagagcaccaggccaacgagggaaaggcgataggccacgttggtctggaggaactgaagaagctccgcgagatggctgataggggcgagatcctccttgagttctacggcgagaggcccgacctctggcagataagacgcgccaaggcgggagagatagacaacatggtccgggaggtagcccagactctcagcgcgaccctcgtaaccggcgaccaggttcagagggacatagcgatagccaagggcatagacgtgatttaccttaccaccaagaaggaagtcaggcaccgccttgaggacttctttgatgacacaaccatgagtgtccacctgaaggccgggataaggccgctcgcgaagaagggacggcccggcgaatggaggctcgtcccggttagagacgaaccgctcaccgatgtggagcttgaggagatagctgatgacatcgtcgagagggcaaagcgcgacccggagagcttcatcgagctcgacgaacccggagcaactgtggttcagctgaggaactaccgtatcgtcatagccaaaccgccgttctcggacaggatagaaataaccgcggtcagaccgataaccaagctctcaatagaggactacgaactgagcgagaggcttttggagaggctcagggacaaggccgccggaatactcatagccggtgcccccggtgagggtaagacgaccttcgcccaggccctcgcagagtggtacgcgagcatgggcaagatcgtcaagaccatggagaagcccagagatttgcaggtcagcgaggagataactcagtacacggcactaaaggggagcatggagcttactggagacatcctccttctggtaaggccggactacacgatattcgacgagatgaggaaaaccagcgacttcaagatatattccgacctcagactcgctggagttggaatgataggcgttgtccacgccacgaagccgatagacgctatccagcgcttcatcggaagggtcgagcttggaatgataccgcagatagtggatacggtgattttcatcaaggccggaagggtcgccaaggttctgaccctcgaatacctggtcaaggtgcctagcggaatgaaggaggaggacttagccaggccagtgatagaggttcgcgacttcgagactggcgagcttgagtacgagatatacacctacggcgaggaggtaagcgtcgtccccgtcaagaaggaggagaaagctcctgcactcagactcgcagagaagaggctcaagcaggagataaagaagttcctgcccgatgtcaacgccgaggtcgagatagtcagcccccacaaggcggtgatctacgccgacgagttcgatattccagcgataatcggcaagaaggggaagcgcatcacggagcttgagaagaggataggcataagcatagacgtcaagagctttgccgagagggaagaactcaagccgaaggagaggattcccgtcgaagtcgaggagaaaaagaagacgatagtcctcagagtatcgccggagtacgccaaaaagccgctcaagttctacggcggcgagcagtacgtcttcacggccacaccaagcaggaagggcctcgtcaaggtcagcaagagcacgccgataggaaaggagctgaagaggctcctcgatgcggggataccgatatgggcatccacttaggctcggttgcgagggtagtcatcaccggtcagctagcgaaattgtcgtcatcgcccttccaactttttctcttcagcttaaaacgttcccggtggtgaaaatgctagtgcttgcgtcggcctcaccgaggaggagagagatactttcgaggttcataagggagttccagataatcccaagcagtgccagcgaggagtgctcaatagcagatccgagagagcacgcccttgagcttgctcgtagaaaggcgagggaagtttacgagaggcttggcaagaaggcgactgtgataggggccgataccgtcgtcagcataggcgggaaaatactcggcaaaccaggaaacgaggaagaggccttcaggatgctcaagaccctgagcgggaggatgcacctggtaactacgggctactgcatcatccaccgcggagaggagcactgcggcgcggtagttacggaagtgaagttcagggagctggacgaggaccttatctgggcctatatcaggacgggggagccgatggacaaggcaggggcctatggaattcagggaaagggcggactattcgtggagtggatacggggggactactacaacgtcgtgggctttcccatcgagataatctggaagctcaaggagctgggttttgacgttctatcacgctaaaagggctttgattttgtggagctccttttttctgattttgctttggaatcaaactcgcaatgaaccttttgaagtctttagtaacgttcggttattatcaaacaaaaggttacgtattcttccagtttttgcgacgaaattttttcggaattctgaataaggtcattttagagcttttttcgtacttcctcccaatgcagatgcaatatttttggcaaaaacttccttaaaactggtcaatttcttcttaaagatctaaaaatgcccgggaagttctctgaacattgttgtgcatgctcttagcggaagagtgagaagccgtttctggttgaaaaatccgctcacaatccgtgaatcagaggcgtttaagggctttttagagcaccctttgcggaaaagcttataagattcgagggttcttagtagtttgtaaggcaaaaggaagaaaaaaccgccctgttgcaataagactctaagagaattgaaagtttgccaccctgaatcactcttgcaaccgctattctgaagttgcaataagactctaagagaattgaaagcgtcttcctcatcgtcgtagagcttgaccctccacccaccgggttgcaataagactctaagagaattgaaagttttttaggtgtagtttggtggtgtgggcgaggttcagttgcaataagactctaagagaattgaaaggcggagaagaagccacgggctacgcaatacttgcctacgttgcaataagactctaagagaattgaaagaagagacgatcatgctctcacccccaggagttgctcgtgttgcaataagactctaagagaattgaaagaacgatttgttctctgtggacttgggtctcattgggagttgcaataagactctaagagaattgaaagggaacacatcgccaggaacctcaagcgacttcgggtggtcgggttgcaataagactctaagagaattgaaagccaaaatgaataaaagcccctatccctaataaatgtaagttgcaataagactctaagagaattgaaaggcagatggtgagatggaggtaacaatagaatttgtgggttgcaataagactctaagagaattgaaagggttaaactcagtcagagggccagtgaggtcctgagagttgcaataagactctaagagaattgaaagcctgtgcagcctggaggtagtagtcaccgatcatttcctcgttgcaataagactctaagagaattgaaagtcttcaagtgaagcgaggatttcagcgatctctctctgttgcaataagactctaagagaattgaaagaacacttgcgaactttcccggccagaacaaggaaagcgaggttgcaataagactctaagagaattgaaagcaagtttgaagaattagtcagtgaaaaaggcaaacagtgttgcaataagactctaagagaattgaaagcagacttgccgttcactgggacagggatgcggaagcgggttgcaataagactctaagagaattgaaagatggactgaaagaccctcttcagttcttccgcgtttttgttgcaataagactctaagagaattgaaagagttctaagactctccccaagaaagggcactacgtctgttgcaataagactctaagagaattgaaagtaggacatcacctcacggtgctggcgggagggccttcacggttgcaataagactctaagagaattgaaagagataacgctcgacgtgccagcaaacaaagccgaagttgcaataagactctaagagaattgaaaggagttctaatgattagcttaacaatatccccatctgatgttgcaataagactctaagagaattgaaagtcacttctcctgagaaacgaaaggagtcgagagtctgtgtcgcaataagactctaagagaattgaaagtacttccggctaagaacgaaaagccgctcgacaagccggttgcaataagactctaagagaattgaaagacatagccctctcccaggccgcacaggtcttcaggtacaagttgcaataagactctaggagaattgaaacgattaagggtggcgtctgcgctggcgaacgggcttacggttgcaataagactctaggagaattgaaacgtagtacttcttaagcatgcgttcacgccttagataggttgcaataagactctaggagaattgaaacctgtggtggtcatgatagtacgtgatagcagcactagcgttgcaataagactctaggagaattgaaactcgctatgacaatctttgcgtcctcatccatcagaatgttgcaataagactctaggagaattgaaagctatcaggccctctgtctggccagttaggtccttccacgttgcaataagactctaggagaattgaaaggaagatcgtggccaagatactcaacgagatgtcgaaggttgcaataagactctaggagaattgaaaggtcttcgcgaggatctcccgtgaagaagactgagaccggttgcaataagactctaggagaattgaaagcaaggactacctacaatttccctaccactatcggcgcgttgcaataagttgcaataagactctaggagaattgaaagagaataacgccgtcaccggccaggcggagcgctttaggttgcaataagactctaagagaattgaaagcaactctcatacatcacacccccagctcatagattttgttgcaataagactctaagagaattgaaagaggctcgccgcgccgccgaggagcatcagcgctggctcgttgcaataagactctaagagaattgaaagagcttatacatcacgtaaaccgtgaacgctgaaccgaccagttgcaataagactctaagagaattgaaaggtgtagcagtatgcccagaaccgtgcccactgccaggttgcaataagactctaagagaatcaaaaatcccaaaacagaagaaaaggaaggcatcagaacagccactggttctcgatacactcgtcgcacggcggcttctcgccggcgatggccttgaactttttgtagatacactccggcaggccgagcgggcagtggtcaggatactgacccggcctgaccttcgtcggatcgagcttgacctttatgtaggcctcgtactcctcgaccttcttccagggaagtaccttagcgccgtagattacgaggtcgtctgctatccttgcgtagtcgccgacgacggcgttctctttgatgattacgttctttcctacgacaacaccctcgccgaggatggtgtccttcagctcggcgcgctccttgatgatgtcgctgccgatgagtatcgagcgcttaaggtatgccttgtcctccacgattgtgttcgggccgatgtaggtgtaggcctttatcttgacgccgtggccgatcttcgctccctcgtcgatgtagactggtccctgaatctcaacgtcgtccggaacttcagcgccctccttgatggtaatgtagccgttgtccttggctatctcgtccatggctatctggtgggcgtagaagaggtcgtcgggtgttccgagatcgacccagtaggcatctctgggcatcctgtaggcgtaaacttcgcccctggccacgaacttcggcaggacttccctctcgaagtagacctccttgcccttcggaatctcctcgaggactttcttgttcacgacgtagattccggcatccacgaggttcgtcttcggcctgtggggcttctcctcgaagtgtgtgaccttgccgttctcgtcggtttcaacgacaccgaagcgctccgggtcgtagaccttggtcaccgcgaccgttatcagcccgtcgttgttcctgtgggcctctatcagctccctgaagttgaagttggtgaacacgtcaccgtagatgaccaggaagtcgtcgctcacgtactcttcaacgttcttgagcgcgccaccggtctcaaggggcatcgggtcgttaacgaagcgaatgtcctttggatagtcggccatcttctcgtctatgaactccctaatctcgccgcgcatgtagtggactgagaggatgacctcgtcgatctcgggtatcttctcaatgttctcgaggaggtactggaggttcggctttccaaggactggaaccatcggcttcggtctcgttgaggaaatcggcctgaggcgggttccaaaaccacccgcaagaataaccgccttcatgagcatcaccagtataaacttatggagggagcttatatattttacggccgtaaaatatatccctcccagtgaacaatagcctcctacctctccagagagaaggccttctcagtcagtttgaacgcctttgctccagtgggtctcaaacacgaaccgtagcagaccttcttcaaaggacaggtctcgcaggcctttgaaccgaactccactttttcaacgtacccgaggctttcaagaatttttattatgtcctcaacctctttagatgagagtccaagcctttcggcgatttcgcgctcgttggtgacgccagcttttatcagctccagaacatcctcaagctttcccatgtgatcacctcactaaactacaactccaaaaactgaaaataaaggtcaggagaggcccagggcaatgcccacgtgccatatcagaatgcccacgatggaagcaaccgctatcatgtaggctgttgtgaacagcgcccacttccagttgctctcggcccttatggcacctatagtggctatgcacggtatatagagcgtcgtgacgaccgcaagtacataagcctgaagcggagtcatggcgttctttatagcctccgtagttccatatatgacaccgtaggtagatatgacgttttctttggctatgatgccgaagatcaggctcacagctgctttccagtcaaggcccatcagcatcatgtatggctcgaagaggtagccaagcgtttcagcgtagctctttccgcttccgagctcaaccgggtagttgctgaggtaccagatgaagatcgaacctaggagtatcactgttcctgctttcttcacgaactccttgctcctctcccatgagtggagtatcacggtcttccagcttggtatgaggtattccgggagctcgatgacaaaggggctctcctcgccccttacaacgaagtggctgacgaaccacgccgagagcagggcaacgagtatagctatcagatagacgctcagggcaactagggcatggttggagctaaagaaagtcccggctaggaagcttatgacgctaagacgggccgaacaagggatgaacgggttcacgaacattgcaaccagcctgtccctttcatcctcaagggttctggtcgccatcaccgcaggaacgttgcagccgaggccgaggatgagaggaataacggcctttccagggaggccgaacttcctcatgatgccctccatcagaaccgctaccctggccatgtatccaacgtcttccagtacagacagggcgaagaacaggagaaagaccagcgggaagaagctgagtaccgacccaacgccgccgattacgccgtcaactaccaggcccctgagggtctcgttcgcgatgtggggtgcaagccactcgccaaacgaggcaaagaggccgtcaagccactcctggaggggcaaaccaagggcaaagacgaacttaaagaccccgtagaaaactatggcaagtgctatgaagccgtaaactgggtgtatcaaaatcctgtcgagctggtccgtcaggctctctccttccctgcccgcgtagctcatgaactcgtgggtgagcctgtctatgaactcgtacttctggctggctattatgagatccatcgccctgccgtagcgcgcctctgcttcacctatgtgggtcattatctccttcagcttctcctcgccgatgtgcctgaggacgagcttcataacttcatcatcacgctggaggagctttattgccagccagcgaagaggatagcgcttttcaagttccgttcccttcagacaaccgattatgtgctctatctccctctccacctctggatcgtatcttggaacgacggggttagtttttaccatcccgttgnccatctcgtatattttctccttcagctcctcgacgcctatgccttccttggcactcatcgctacgacaggaactccaagagcctttgacatctttatggggtctatccgtatcccttttttctccgccaggtcgatcttgtttagcgctattaccacgttcttcaggcccatctcaaagatttccatggttagaaggagattcctcaggagagaggtcgcatcaacaacgttcacaacaacgtcggggtttccgttgagtagaaagttcctcgcaaccagctcgtcaattgaatgtgccgttagggaatacgtacccggaagatccaccacgagaaacttctcacccttgtactcgaaaacgccctccttcttctcgaccgtaacgccgggccagttgccaacgtgctgcctcatccccgttaggctgttaaaaaccgttgttttgccaacgttggggtttccggcgagagcaacgaccttcattgccattttaaccacccgaaggattctaaagcttcctcacaatgattcgtgaggccattcctctcccaatagcaaatcgagtgccgctaacgcttatgattagcgggccagggttgtagacttcgatgacctgaacgaccgcaccgggggttatccccattcctagcagtctgtttctgaatcctggacccccctggaggttaacgacaatccccctctccccaggctttagagaattcaatggaacgatcatgagcatcaccgttaggttttcctaatccaacttcaagtctctcgatgtccttaaaagcctttggtgagcctaacaaaactcagcggttcgaagagaagcggaagggggttcaaaaagtgcactaccccagataagactcataaaaaattataaaatgcaaagttttatgtagtttgaagccgtagctaatccgtaataatccgcatagggcggaaaggaggtgttggttatggaagaagccccaactggagcaccgcaaaagaggacttccctcggcctcgatgagaacatcgagggactgctcgcatacctgcttggttttgttacgggaataatactcctgctccttgagaaggaaagcgatttcgtccgtttccacgctatgcagtcaacgataatctttctcccgctgtggattgccataaagatcttctcgtacatacctatcctgggctggattatcgcagatctcctaggtttaataggccttgttgtttggattgttggtatggtcaaggcctaccagggagagcgctacaagttcccaattgcgggagatctggcagaacagtggctcggcaaggtgaacgtctgaaggtttttaatgcccttttcaaactttctttatgctcgcggaagtcatcgaggaaacaagaaagttcgccgagaaaaaaggccttttcgaaaaacgggttcttatgctgttctctgggggaaaggacagttctctcgctctctacattctaaaagaagcgggcctcgacgtctcggccttgaccttcttccatcgctggagctggagggaaaccctcaactgggcgatgaggttcaccaaaaagctcagcgtcgagcactatcttgtggacataacagagggacttctccgcgaggccgttggcaggaaagggccagtctgcatcaactgtaagaaggtgatgctctggaacgccaagtggttcgccctcaacagcggcttcgacgttttagccaaaggggacaacgcgaacgacaagataatcggtgcgctcctcgaccagtgcgaaggggacatacggctctgcgagattccgaggatgggtatccccttcttccgccccctgataaagtaccctgccgagatcgttgaagagctcgccgaagaggcaggaataagaccctaccgcatgtacgagcacgcgaggaggaggcagtggagggagggctgccctctccagtacatagacaaggaggaaatagtaaccccccaactcatggacttggcctacaaggtgaactacgaggtgagcaaggtagcgaggagaaagagagtaagggttagcgtccgcgtcccgagctttgagataatgtgctgggactgcgacgaggagacgctggaagaggttaagtcgataatcagacgctttggagggaaagccaatgctcccgccgggaaagctgagaaatgacatccttcgcgaggtcgtctttcccaacctcggagtggaggatagtaaggtagtctacgggcctagggagggctttgactcggctgttcttgaatacgacgatgaacactacctcgtggttgctacagatccaacgctcggcgttccggaggagacattcggcttctttacctaccacttcgcctcaagtgacgtggcggttttcggggcgaggccgaggtggctcgtcgttgacctcctcttccccgaagggacttcgagggaattccttgaggcaacgatgaaagacctgaacgccgaatgccgcaagtacgggtcagcaatagttggtggccacactggtgtttatccgagcatctcagagccaaccgctacgacaactgccatgggcatagtcaggaaaggcgagctgaagctccccctcgccaagccaggagataaaatagtcgtgacggctaaggtcggccttgagttcgctgtttcagcggcctactttagggcagacgagctttcaaaggttctgaccaaaaaagagctcatgaggctcaagcgctctttctactttgaaacggctgttcccgacgcactagtggctaaaccctttgtgaggggcatgcacgatgcaacagagggcggtttaacggccctccacgagatagcggacaactctggagttggcttcagggtttactcagatagactccacattgacccgctcgttaagaaggtgctcgacttctacgacctcaaaccgtggagcgtctcctcaacagggacactgatagccataacgcccaccgaaaaagttaattccctaattacagaattacttaaaaatggaattcttgcattcgagctgggggagttcacggaggagaaggacagggttctggttgaaggggaagaggagagacccttcccggagttcacagaggacccgtatgtgaggctgtatggaaagggctaaaaatgatcgcatcaaaagttccaatatgcgagacatcataaggaaagccatcgtagaaactgcagaggagcttggagtcgaagtcaaagaaataatcctcttcggatcaagggccagaggggatttcaggaaagactccgactgggatgtgctggtagtaactaaggaaaggattccaagacacgttgaacttgagctgtataagttggttcataggaaactgctgtttaatggcataaaggctgacattctcataatatccaaggatgagcttgagaaagtaaaggataataaggcttacgtctattattacgccctcaaggagggaatcaaggtttgagctacaaggagtggctgaagaaggctgaaaaggatctgatcctctctcgcctcagcttatccgaaggcatctatgattatgccgccttccacgcccaacaatgtgccgaaaaagcgctgaaagcgtttctagtgtggagtagtaagcccattaagaaaacacatgacattggagagttaataatactgtgttcccaaattgacggggagtttatggaactattcgaactagacgttgatcttttaacagcttatgcggtggaagcgaggtatcccacactacacgagccagatagagaagaagccgaaagggcaatagaactagccgagattgccctcagcttcgtaaaatcaaagattacttcaccctgaacctcaacagtgccgcaagtccgccgagggccttcagcttctctccaccttcgtgctccgagctgactacaacgacctctccgcgggagtacctcaccgcgtccatcagctcctcgaccttctccctgagttcacccttaaggagctcgtcaaggaccaagagcgtctcaaccgcgccgtagttcacagcctcctcgacttccttaaggccgtaggcaaccagcccgttgttcctggcgatgttttctaggactttctcaaccagctggacttccttcgcgacgcggttttcctgatagaccctgtcaacaaccccgcgctttatgacctcgtagatgcccgtccttccagtgacgctggtatcctcgattacaactttcttggccagctccggatacttctccttcaggaacttgtagaagtcctccttgacgaagccagggccagcaactattgccttctcgacgttctcgcgcttcattacctcttccatagtcttcgcaacgtcgtggaagaacttcatctcctcgctctccctgtccgtgttgtatctcttcccgccgaggttgtggcgtatgctgtttagtatctcaaccccgtactccctgacaagggccatatccgcctcgccatcgtcaataaccactatcatcacgcgggccctcttggaagccgcaacagcttccttaagcctctcaatgtggtgctccttccaccgcggcttctggatggtcacgacggttccctgctctatcgctatcgtgtggtacttgccgagcgggacgtcttccctgctggcgtagactattggcccggtaacgcgcacctgattggcaaacttgtggaagtttatcttttccgcttggactccgaggaaaaccggtatgacctcgaccttctccgcccttaaggaatcagctctctgggcctgcttcctgagggttttggcgtagacgatgtccccggggtctattatgtggtaaaggtgccagaggtcgtcaagggtctccgccttcactttcaccttgccttccttgggcttttcttcgagtatctgcattttatcacccctcaaaggctgtcgtagaccccttcgcgctttcctaaacgtacaacgtaaacgatcctagcctcgtcatccacggtgtatattatcctccagtctccaacgcgaacacgatagaaaggatagcctctaagcttcttatattgcattgcccagggattctccttcagtttaaaaagagcgctaacaattcgctttctatcttcaggaggagcttttttagtgctttttcacttttcccgctcaggattagttcatagctcattgaggacgtcctccagtctcttgccgtgcttctttgcgtcttcgagctctctgtaaagttcctctatctcctcctcatcaagatcaaagtagcctgtgaagttatcgatttttgagttcaggatctttagctcctcctttatctccctcagttcgcgaaggatgagcttttcaacacctgcctccatatgctttccccctatttataaagagaaaactctggttaataaactttcgtgaggagaaatgagagaataggtagaatgctcaaataagctccctctccgtcttcgtgagcctctcggcgccgttctccgtgatgacgatggtgtcttctatcctgacgccgccgaacttcgggaggtagatgccgggctcgactgttatcaccatccccggcttgagaacggtctcgtcattctggtttatccccggccactcgtgaatctcaaggccgacgccgtgaccggtcgagtggatgaaatagtccccgtagccgtattcagctatcacgtccctgacgatagtgtcgagctctttagctgttatcccgggcctcgcctcttcgacgcccttcttctgtgcctcgaggacgatctcatagatttccctctgcttctcgttcggcgagccgactacaacggttctcgtcatgtcggaatggtagtggttgaagagcgctccctcgtcaatgacgacgagctctcccctctcaatcctcttgtcgctcgctactccgtgcggaagcgccgagcgccacccgcttgctattatcgtgtcgaatgctgtcttttcagccccctccatcttcataacgtactccatcttggccgcgacttccctctctctcactccctcacgcacctcttctatggcgacgagcatggccttgtccgctatctgacaggcccgctttatgacctcaatctcctctggagtcttaaccattctgagctccttgatgacgtcgtcaacgacggcaaactcctcaacgccagccttttccttaaggctctggacactggagtagctcgtcctcccctcgatgcccagtttcttgaggttgaaggccttcagtctctcgtaaagctccgctcccctcttgaagtactcaaccggaactcttgagctctccctggcctcttcatactcgagctgtggaacgaggaagagctcttcatcggcggtaaccacgaggtagccgccgagaaccggggcggaaccggtgaagtagaacaggtttggcttgtgggttatcagaacaccgtccagctccttctccgctatgaactccttcagcctttcgatcctcatctcaaccaccggggttagtcttcatcgaaggataaaacggtttcggaagggatataaactccggcgcttattactggtcaggtgtcgggagtgacggtttacctctttgacttcgacggaaccctcgtggacagcaccggtgcagtcgaaaaggcccttcgaatagccattgagaagacgataccagcggtcatagagagcgacctctacgatgagtactacaaggccctcttccttttcataaagggcaagctgacataccagcacctcggcgtcatccacgagcttgtagcccagggcacgatacacgagtactatcgtcagatgcccaagtacatcaaggattttccccacgcgaggagggtcatcagaactctaagaaagcgcgggagaacggttatcagcttctccggcgagcacacctacccaggaggtaaggtgatattcctcaagaggacgaagtggtacgatgagttcgacgaggtgataaccttcaagagcacgaaagacatgctgacgaaattcgagactctcagagagctctatccagacgagccgtttgtctgggtggacgacagccccagcaggtttacgtacatcctcgatgaaaacaccctgttagtgcagaaggcctcaccacacaagagcgacgttgccctgctcttcgagaggcagaactttctgaaaataaagtccctcatcgaggtcttggagatagacgatggcctctcggagtttctgtgagactcgaaatttttaaaaactgcccgctcaacctatgaacggcaccacaccctggccagaggctgagggggtggtggtcgtgaggaaggccgttgttctgtcctacgtcgggtcccacgagcacagggatccaaacagggtgattctcaagccgctcgacgtcaacgacaggggtagcgcggcgaggctcatcggcaggaaggtcgtctggagaactccaaccggaaggaagctcgtcggaaagatagtccggactcacggcacccgcggcgaggttaaggcggtcttcaagcccggccttccaggtcaggccctcggagactacgttgaaatcctctgacgcaacccctttaaggcctctaccttttctttatccggtgagagaatggagcttgtggcggtaaaggaaggtctcgcgaggattctcgtaccgaaggccgagaggatatacgatgcccccgtcttctacaatcccgtaatgtccctgaacagggacatcagcgttctcgcggttaaagttctcgggccgaagagggttttggatgcactctccgcaacggggatcaggggcatacgctacgcccttgaaactccagcggaagaggtgtggctcaacgacatcagcgaggaagcttacgggcttatgaagaagaacgcgagcctcaacatcgatggggagctctacgaagagggcgaccgctcgtatctctggggggaaaagctcgtcgttataaacaagggcgacgccaacaggctgatggccgagaacttcaggtacttcgacttcctcgaccttgatcccttcggctctccggtcgagttccttgacaccgccctcaggagcgtgaggcggaacggcgttctggcggtaactgctacagacacgggagtgctctgcggtgcctacaggaacgcctgcctcaggaagtaccttgcagaacctatccgcggcccgctctgccacgaggctgggctcagaatactcatcgggacagtggttaggtatgcagccaagtacgacttgggggtcgaagtcctgttagcttatcaccgcgaccactacttcagggccttcctaaaacttaagagcggggcgaagaaagccgacaaaagcctctcccagcttggcttcctttgggccgacaaaagtggaaggtttgagtacagaaggggctttttaccggacaaacccggggcgagcggtcccctctggctcggcccgctgaaggacgaaagtttcgtcgaggagcttcttgaatctgccagagaccacccgctcgcccacaagaagacgctgtcattccttcagctcatctcggaagagctcgacgttcccttccactacgacacgcacaccctagctagagcctgctccctgaccccaccgaagcttgatgtcataatccagcgccttagagaacttggccacagcgccacgaagacccacttttccccgacctctgtgaaaacggacgctcctttcggagtggttgcggaggtgatgaagaatgtctagactgattgagctagctgagaagttctacagggacgagtacacggattcagtcctctactccaggctggccaaggccgaaaaggacgagaggatcaaagcggagttccagaggcttgcccagatagagtctgagcatgctagtttttggtacgagttcctcaagagaaggggtgtaaaaccagaaaaaccgaagatagggcgcttccacttcacatcggttttcgtcctcagaagagtgctcggtgctggggctgtgacttctctccttgagatgggagagagggacgcggtaaagaagtactacagatttctaacagaatactcctcagaaatgagcgaagatgaaagggagaggctcaagagtgtcatcctggacgagcttgagcacgagaagttcttcagggaagaagagaagaccttccacaccgagaacatccgcgacctggttttgggcatgaacgacggcctcgttgagattctgggtgctgtgaccggcctttcggctgtctacccaaacaggccagaactcatcggcataagcggcctaatcgttggggtcgctggagcgctctcgatgggaataggtgccttcatctccgtccgctcccagagacaggtcaacgaggccctcagggagaagatggaagtcctattcagggtctccccagagagggccagggaagagataatggaaaggctaatggaagggggcctgccgaaggaaatcgcagaaaaaaccgccgaggaacttgcccagaagggggatgctgtgataagccttctcctcggggagagcgatgagaacgaagtccgatcggccctctatacgggtctctcttatctgctcggagtggcgtttccagtaacgccctacttcctggcgtcgagctctttaacggcccttccgttctcaattctgctcgcaggcagcgtcctcggcgtcgttggtacgatggtggcccttctctcgggaatatccatcagaaagaaggccctggagatggtttcaaccggcctcggggcggcgttcctgagctacctcttcggaaggctgatggaggcagtctttcacgtctcggccctttagaggtatgtaacctcaacgccgagcttttccgccgtttttccctgtttttcatcgctcgtggcgagctttccgtattttagggcctgggctatgtagagggcgtcgtacaccgttattcttccctcacacgctatctcccgtgcttgaggcaggtattcgagagggttttcaagaaataaaacgcttctcataaggtctaaggcctggctccttctttcaaactcttcccgatctatgcgggagtacaacacgtggtgcttccacagggcgtttgacacttcaatcaacgcgtattccagggatgtaaggtcgtttcctcttatgaactcctcgattctctcccatccaggttccaaaaggatgtacctggcgagagacgatgcgtcaattactatcacggtcatccctcacgtactttcttgcagtcccttcatccgcaggggttccaccagaaaggagcctgtgaatctcgtcaagttttttctgtttctctgccctaaggactctctcttctatgaacttccgtatttcctcgctccagttgatatcaagctccttcatctttgccttgagctcgtcggggatgcgtacgcttatcacagccatacgaccaccgtttacatttttgtaatacagcaatataaacattttgggggaagagccagaaaagaaaacagttcagaccttaacgtacttccatctgcccttcttgaatatccaccagtacatggccgcgctcgtgaacgtctcgagggtcatcgcgagccaggccgctatgacgcccattccctctatcacgaaaggtcctaccgcaagtccaaatccgaagacgtaggaaggaactatcctgaacaggagcttgctgattgccgtgacgtacatcggactcttcgtgtcgccggctcctcttagcgctccgctgaggacaaagacccatccaagggggacttcgcttatcccgacgatgagaaggtagatgcttgccaggtggagcacctcatggtagtgggggtcgcttgaggacaggaaaggcatgacgaggtagcgcgggaacgctatgaggataatcgccatcacgcccatgaagacgctaaccatcttcagggcctcgtaaaccgtcctttcggcctcttccggctttccagcgccgaggttctggccgacgagggttgaagccgcaacgttgaaaccgaaagcgggcatgtaggcgatgctctcgaccctgaggcctatctggtgggcagctaacgccacatccccaaagcgggtgactatgctcatgtagaggaagttgtagaagctgaagaggccgcgctccaccagggtaggaatgcctatccttagaattctgacgaccatctccgggtggaagctccagctcggcctgaacttgaggacgagcttcccactcaggagaaggtacaggccaatcagaaatgaagacgtgattccaatccccgaggcccaagcagctcccacggcacccatccttggaaagccgagcttaccatagatcagaaggtagtcaaaagtggcattgacgacgttcatgaagataccgagcttcatgggagtcttcgtatcccccgctccccttagagccgaaaagagagtaaaaccgacgagcctgatgggatagaacaagaacacgaccttaagataagcgtaggccgttctgaggagttctcccttggcgcccataacccagagaacctcgtctccgaaaaaccacccgaagagcataacggggattccgaggaggaaagcaaggtagaggctctgctccagaaccagctccgcttgggaatagtccttagcaccaacaaagcgggctatcaaggcaagcgttccaacagaaactgccatcattatggggaacatgaaccagcttacctgtccgccgaggccaacggccgctatcgccagcgcgctgacgtggccgaccatcagagtatccactaggttgaggagtgtctgggagatgttgcccactatagcaggccacgccagtgcccatatttttcgctgggtctcgttgcggaacattaagacgcgcctctaaacgaacagagaaacgtttagttaataagggttgcggtagtgttgcagaactacgtaagtaggtcagagaaaagaaaaaggttcagtaagagaggttcctcttcttcctccacttgtgggaccagctgtacttcctcattctcctgctcctgccgaatccgcaggcggcacagtagcccttcttgacgttgaaggccctcctaccgcagcgcctgcaccttatgtgggttggagtacggttcctcttgcccttcggcgcggttccagctcccatgctatcaccccgctaagctctcactcaagctcgacaggggagagggccaagacgttgtctccccttatgacgattttaccgtacttcttaacgacctcgccgtcctggatgagctcggcatcggcgaggacaacgttaaggtggatgtcgtaaccgatgagcttacccctgaactcgttccccctcttcaggagcacgaggacgtccttgtcaagggacttgtggataacatcgagtggtctttccgccattttcacgcacctccaaataatcaaagctcatagccttaacgagggaaacggtttataactctttccgttctcctggcccttctcaacattgaacatggagtttttgtttcccggggaaaagggctataaattgtatcactcaaagtgattaaggtgaaagcatgaaaaaaggtggtctgctgctcattctcctgattctggtctcaatcgccagcggatgtatctcggagagcaacgaaaatcaaactgcaacggcttcgaccgttccaccgacttcagtgacaccctcacagtcttccactcccacaacctcgacctcgacgtacggcccttccgaaagaacggagcttaaacttccttcggttaactacactcccatctacgtcggcatagagaaaggctgtccctccggaagagtcccggtgaagttcacgtacaaccccggaaacaagaccgtaaagtctgtcagcctccgcgggagcttcaacaactggggagagtggccgatggagctgaagaacggcacgtgggagacgaccgtctgtctccgccctggaaggtatgagtataagtacttcatcaacggccagtgggtcaaggacatgtccgacgacgggacgggaaggccctacgaccccgatgcagacgcctatgcccccgatggctacgggggaaagaacgccgtgagggtagttgagggccgcgaagcgttctacgtggagttcgatccaagagacccagcctacctcagcatcgcggacaaaagaaccgtggtcaggttcgaggctaagagagacaccgtcgagtctgcggttctcgttacggatcacgggaactacacgatgaagcttcaggtctggtgggacttcggcgaaacctggcgcgccgagatgccagttgaacccgctgattattacattctcgtaacctcctccgacggcgggaagtttgccgtcctaaacacaagcgaaagcccgttcttccactttgatggcgttgaggggttcccccagctggagtgggtgagcaacgggataacctaccagatattccccgacaggttcaacaacggcaataaaagcaacgatgccctagctttggatcacgacgagctaattttgaaccaggttaatccagggcagccaatcctctccaactggagcgacccgataacgcccctccactgctgccaccagtacttcggcggcgacataaagggaataacggagaagctcgactaccttcagagcctaggtgttactataatctacatcaacccgattttcctctcgggaagcgcccacggctacgacacctacgactactaccggctcgaccccaagttcgggaccgaggatgagctgagagagttcctcgatgaggcccacaggaggggaatgagggtaatcttcgatttcgtgcccaaccactgcggcatagggaatccagccttcctcgacgtctgggagaagggcaacgaaagcccatactgggactggttcttcgtcaagaagtggcccttcaagctcggcgatgggagcgcctacgtcggctggtggggctttgggagccttccgaagctcaacactgccaaccaggaggtcagggagtacctgataggagcggccctccactggatagagttcggctttgacggcattagggtggatgtgccgaacgaagtcctcgacccggggacgttcttcccggagctgagaaaggcagttaaggagaaaaagcccgacgcgtacctcgtcggcgagatatggacgctctccccggagtgggtgaagggagaccgcttcgactccctcatgaactacgccctcgggagggacatcctcctgaactacgctaagggcctgctcagcggagaaagtgcaatgaaaatgatgggacgttactacgcttcctacggcgagaacgtagttgcgatgggcttcaacctcgttgattcgcacgacacttcgagggttctcactgacctcggtggtggcaaactgggagacacaccgtcaaacgagtcaattcagaggctcaagctcctctcaacgctcctctatgccctgcccggaactcccgtcaccttccagggggacgagaggggactgctcggagacaagggacactacgatgagcaacgctatccgatacagtgggatactgtgaacgaggacgtcctgaaccactacagggcactggcggagctcagaaaaagagttcccgcattgaggagcagcgcaatgaggttctacactgccaaaggcggcgttatggccttcttcaggggacatcatgacgaggttctcgtcgttgccaacagctggaagaagccagccctactggagcttcccgagggagagtggaaagtaatctggcctgaggatttcagcccggaactgcttcgcggcacagttgaagtgccagccatagggataatcatccttgagcggggttgacccccgcttccattaatttgtttggcacgctgacaaagagcatcccaaaagctttttatgaaatgtccttactccagtttcaggtggtgagtgatgggagagaagcccgacaagtacgagattctccaggatttgatgaggaggagaggtttcgcctgggggagctttgaaatctacggcggctcacgcggattctacgactacggtccgctcggcgcgacgataaagaggaagatagagaggaagatcagagaggccttccagagggaaggcttttttgagcttgaaacgccggacataacgccagagaaagtgttcatagcgagcggccacgtcgagaagttcgttgaccctctggtagagtgcaagaagtgcggggcaaggttcagggcagaccacctggtcgaggaagcccttggaatagacaccgagggaatgagcgccgagcacctcacccagctcatccgtgagcacgacatccgctgtcctgagtgcggcggcgagctttcagatgtgtggtacttcaacctcatgttcgagacgagaataggcccctacggcgaccagaagggctacctgagacccgagacggcacagggcatcttcgtgaacttcaggagactgaacgccttcgcgaggaacaaacttcccttcggagttttccagataggcaaggcctaccgcaacgagatttcgccgaggcaaggtatgttaaggctcagggagttcacgcaggctgaagcagagatattcttcaaccccaacgaaaccgagcatccgcacttcgacgaggttaaggacgaaaagctgaggctctatccgatagagcaccagctcaagaacctcagtatgatagagctaaccgcggaagaggcagtaaagaagggctacataatgaacaccttcttcgcctactacatggtcatggtcaagagggttctcctcgacatcggcatccccgaggataaaatccgcttcaggcagcagctccccgaggagagggcgcactattcaagggacacctgggacgctgaaatccacagcgagcgctttggctgggtcgagtgcgttggaatagcgaacaggggcgactacgacctgagcaggcacatgcgcgagagcggcgccgacttaactgtccttatccactacgacgagccgaagatcgtgaagaagcttgaggttagcctcaacatgaagagggtcgggccgaagctgaagaaggacgccaagaggataaacgagctgatcaagggctggggcgaggagaagaagcgcgagctggtggagctcctcgaaaaagaagggaaagtcacgatcgagggctacgagcttgagaaggacgacttcataatcagggaagtcgaggagaaaataaccggcgagaagatcgtcccgcacgtcctcgagccaagctttggtatagacaggcccttctacctgctcctcgagaacagcctcgtcatcgaggaggatagaacctacctgaggatcaagaaggacatggcgccgatcgaggtggcggttttaccacttgttgcaaaagagccgctcaagagcatcgcctacgatatcttcagaacgctccagaaggagggcttcatagccgtctacgacgagaaggacaccgttgggaggaggtacatgcgctacgacgagattggtacgccttactgcgtgaccgttgacaaccagacgccagaggacggtaccgtgacgatcagggaccgcgacacgagggagcagatcagggtgaagatcgaggagctgccaaagaagctgagggagttaatctttgaaagctgagcttttcctttgcttattttactatgaagacacctgtggtgattttatgctcaagtacattggatatcttggagttggcatagtcataggcatcctcgcggcaatgttcggcctcggagggggcttcctgatagttcccaccctcaacttcctcggcgttgagatacaccacgcggtgggaacttccagcgctgcagtcgtgtttacttccctgagctctgcgatagcctaccacaggcagaggaggatacactacaaggcgggcctcctgctggcttcaacggctgttatcggcgcttacatcggagcctgggccacgagctacataagcgccgcccagctcaaggtgatattcggcgttgtcctcttcctcgtggccataaggctctaccgcaagaagagcagagagccacatgaggttgaccttaaggaagtcaagctgaactacaaggtggttccgatcggcggctttatagcgggagttgcgagcggcctccttggaatcggcggcggggcaataaacgtgcccttcctcacctacatgggacttcccatccactacgcggtcgcgacttcgagcttcgccatagtcttcacggccacgtctggagcgataaagcactacaccctgggcaacgtggaggtcgagtggctcgttctcctcgtcccgggcctgataatcggcgcccagctcggggcgaagattgccaagaggactaaggcatcccagcttacgaaggcatttgccgttgtgatggcctttctggcgataaggatgatcctcaagggactgggctatcccgttccttgagccttttcccttgtcttctgcttatagagggcaattgacaggaaaatcaccacagtgaggagaatgcaccacacaacgatgaggggcctgtcgtaggggtacggtcctcccgccaggatttcagggagggccctggggaagagcatcaggctgaggaataaaccggggaagccggctattatgaaagttgaaaacccgcatcggtagcccatctggccacagatcccactctgggcggtgaggcctactagaattgtgataatccagacgaaaaccagtgaaacaaggcttttcagggatatcgaccccttcctccattcgtaaaccccgtagaggatgacgaagatcagggcagagcccgcacagctcatccaagtggcgaggtctttggagaacccatagggggcatcccagttggcgaaggccacagctcctggcatcgttaggacaaaagagaacactgctataagccagagcttcagagtctcactcctcatcatgcccactatctatcctttgagggaaagtataaatccttttccagcggcaaactttaaaactcccctccgaactacgaccatgctctacgtggagatactcggaaacctgcccgaaatggcacgggacgaagtgaaagcgatgctcgaactcggcggtggggagattatcggtcaggattacctcttcctcaaggtcgatgcgggtgagaaagccttcccgtttctcgacaggcttggattagcccacgagtacggtcttctcctcgtcgaggcggattccgttgaagaactcctccagaaggccggagaagtggagtggccgataaagggggctttcaaagttgatactgagaccatggccaactgcaggcacgatgttcttgaccttcccagaaagctgggagctgtcatccacgcccagggcttccgcgtgaacctctcaaagcccgacaccgttgttagggtctactgcggcgagaggctctacgctggaataaggctgaggtacttcgacccgaaggacttcgaaaagagaaaggcccaccacaggcccttcttcaggccgatatcgctccacccaagggtctcaagggcgctcgtgaacctgacgaaggcgacgcgggaaattctagacccattcatgggggccggcggaatacttatcgaggccggtctgctgggcctgagagtctacggcgtggacataaggcctgagatggttgaaggcgctgaaaccaacctcaagcactacggggtgagggactacacgctcaagctcggcgacgcgacgaggctggaggatctgttccccgacaagaagttcgaggcggtagcgaccgacccgccctacggcaccgccgcgacactcgccgggagaaagagggacgagctttacaggaaagccctgaggagcatctacaacgtacttgaggacgggggaaggctggcgatagcttttccgactgacttcaacgggaaggcggaggccgaagcggtggggttcagaaccctcggaaggtactaccagagggttcacaagagccttgagcggtacttctatgtgtttgagaaatgaatcatcaactataacagcataagcagatgtctaactctggctggggactatggtcaactcacgcagtattgaaactcgttgaacgaaatgtatggcatgaagcggtagtgggctatcttaaaactctttttaacctctggagtttatgttcaaaaatttaataatgctctcgatattaagagtaccccaaatcttcagataattgcgcttgtgataacacccgctaaagatatgctttaacaaagatttataggtgaagaaatattttagaatcgtcaattttggataatacttataaaggttaacatacctattcccttgggtgtcaatcgttccccaaagtagttgacacccggatgcgtctttagaccacggcgtatagactctaggggggataaccaatggggtgtggaatattgaaggtgactagaatactggtttggctgggggtgctattaggtatagtgcccataaccctccttcttggggttggatctccagtggtgggtcttgggctcttggtgatagtggtgctattaacgtacttccttataacgcacccccttgcagaggcagaaagactgtttgcagagggtaagagcaaggaagccaagggtaagctgacgataccgcttattatctcttttataaccggaaacatcctcggattcatcttgatcctagtgggccttttgacatgtggatgaccagtttgttttcttctttttacaatctcttccttaaaaggtcttaaaaggtgtggattcagtaacgcctaaaacggcatgagtgctgaacgggtgaagttcttcagtgaagatttatacgagtgcttaggtttctttgacattgaggtgtactataacggagaaatctcgaaaagtttttaatatcgattttttatcaaacatcatgagaggattaataccactcctctttggaattttgcttgtttcacctatcgccctggccagcaatgttacggtctcatttcatgccccccaggatacgtgctcgacgacgcgactgttcattacaacgcctcctgcaccggttgggtggtgggagttttcgacgacggcatctcacttcaaagctttgccctttgtatcaaccggagtggagaattcagactctccagctacgtattcccccgcgaaaagaaccccaagccctatctaaacacaacctgcccaatcaacgtctccgttacccctcagtatcagccagatatttttccgatacgattaggggagagtaccgtaggtatctgctcacgaaggtttggtttagaaaccttggaagcggcacctttagaataaacgttccctgggaactcatagccatctaccttgaaagcgatactatatatgaaaacgggacgtatgtcccaaaactcccgctggatgttgaggtatcttggaaaggtgaagaaatcgacaggacacccgctctggcagaacctcccgcttcttactggattgacatcagcgaggagaaaccctctggggaagttttcgtaaaagtaagtggggagcgagctaaattcataaccaaggtttatggatacgttatcattccataccaatcgtattatccagcaataggtgggtttccctttatatttccccagcacgatggttatcgcattagtatatactcctattttggaaacgtcgaagttgagggggagtttctctggaatgggagcaatttcaccctttttaagtttactacctcaaagggcgagactaaggagctttacgttaaagatggtcgtgtatgctatggaaaatggaccaggagagcgtgcggtaggtattcactaccaaggggagcactaaaactgactgtgggctttaatagagggtctctgtgggtctggaacgatggaactgtgtattttaaaacaaagcttgactcactgggcataaagtctatggaattcctcggtggaattccaagtgaagacatctacgcggtcagcgtttatgccacggacagggtttacgaagagaaggatagtcctttgggtagggtatccttagcactaagcttcattgcggttgtactctcgctggccgcactcctgaggtcaagaaaaaaaggctgaaaacgtaggtacacggccagtcgatttgagtgcgggaaatctaaaactcagaaagctccaaactcattcctcaagccagatttcgagcctctgcttgccccttccgaggctggagcgcttgagcttcttgaggtggcctatctcctttatgtccctcacgtgcgtcccgccgcaggggatgacttcgaagtcccttatctgggtcagcctggtttctccttcccaccatatcttcatctcgccgccttcgtcaacgtagcggttgaagagctcgattatcttctccttgtactggttcacgttctccgggtactctatgtcgtagcggcccttctcatagctcatcccgctcccgtaaggcttccacttgccctttccaaggacttcgttgagcacgtggtcgagcaggtgcatcgcgctgtgtatcctcatcagcttgtagcggtagtcccagtcgattttgagctcgacctcatccccaaccttgaacatctctggttcagcaacgacgtgccagacgttgccctcctcatctttgtaaacatcgagaacctcaacgccgtttatcgtgccccggtcgtggggctgaccgccgccggtcgggtagaatatcgtctggtcgagaaggagagcgttgtcccttacttccagaacctttgccttggcttccttcaagtaggcgtcctcgtagtagagcttcctcgtggccattctcatcaccagaggaaaataagctgtcgccatttaaatgggtatcgaaattgaagaaaaggaaagctaaaggaaaagcttttacttccttctcctgaggagaagaggcacgacggcaaggcctacgaggaacgccggaccgcaggtactgcccgtcttttcttctacgttgtacttgacttcaactctctcagggactttctccatcatggcaaagtagtccctggccagcataccataccttacgtaagcgctgctttcaagaactacctctttgtcgctgacctttgtgaccttcatagttatctggcttccgttggcctcaacatgtatgtcatccggaatctgtgtgaacttcgagccttcaggcagtataattctgatcgttgtagtctggttgatcccatccgtcagccttcctttgaccgagacatcgcggagcccgagggaagggtcgtggacgtaggtgttgttgttggccttggtgtagttagccagtacccagtggaagcgcagccgtaggggtgctgtggagtttacgttctcgaattttatgctccagtctttcacacttatcccctgttgctggaaggcaaggaggttgttctggtaaattgactgtatgattgcatcttctccctggtacataaccatgagtttgagatagttcacgtagtcttctggggctatgtattccatcagggtatcgatcactgtttcttctttgccgatcgtaatattggtctcagtctttgagctccatactgaatagttcccttcctggccaggtcttccgcgatactggatgataaacggctgaaagtcgctgtaaagcttctggaggtcatcttttgttatgttctcatcgaagtgcatacgcgcgtccacgattatctcgttcccgtgaacatcaacgtttatcgacacgtagctcttacccgattccctcgaatagtccgacggaatgctcacgatctcggcgtcctccgggagcactatcgagtagtggtcttcaaagtcgaacgtcctgtttagagatgtgaggtcaacctgtgagatctggagggtacgaagaacatcaagctctatttcccagatcccatcgtaggagtagtattttgcaaagtcgagtaccttccccgtaatttctgtgattagaggcccatcagaatcataccctttaacggtgcccgaggcgtttgccaggttcattccaagctgcgagaagagctgaaccctctggttaacaagcatttcagtggcgttctccagacccacctttaagataccctctttggtactgttcagcatgtctgagggtccatagagggtcgttatgaactttaaatctgctgaaccgtcccagtggacagtgtacttctgctcaaccttctcggaatacgcatcggcgccaaagctcggcacggcaattgctccgaacgccaaaacaatcaataacaaaacaccaactttcttcattagaatttcccccattaactcactcctagtagggactcagggaggtttttaacctttttcatcggttgaagctctgccgattaccagcgtgagattaagattctaacgtgtattcacttgattttaacccacacaaatacaagcggtgaatgtccaagacatcaaaagtaagaataggggtaatgaaaataggggccatcaagagatccacttgctctcgtccagctctttctcggttttggcaacgataacagtcccagccaggtcgccggtgacgttgaccatcgtcctccccatgtcgaggatcgcgtcaatgccgagtatcatggcgtaggcaagcgccaccggacttccgggcgtaaggtcgaggccgacgctctggaggaccattgcgagcattattgcaccagcaccgggaacaccggcggttcctattgaggccagaactgccgttaggacgacgacgagctgctgaccgagggtgagcggatggccgatagcgttggcgacaaagagaaccgtgacaccctggtagagggcagtaccgtccatgtttatcgtcgcaccgagcggcagggtgaatgagaatattcccttgtcaacgcccatctcttcctcggcaacacgcattgtaacagggagggttccgcttgagctcctggtgacgaaggcggtgatcatagcatctttcgccttcctgatgaacttgatcgggtcaatgccgaagaccttcaagagaatgaagtaggtgatgactatctgaaggaagaggccggtatatacagctccaacgaccttcgccagcggcccgacgaccctgacgccctgctcggccatgacgtaggctatgagggcgaagacacctatcggtgcgtactgcatgacgccgccgactatgaggtacatagcctcggcaaggccatcgaagaccctcaggagggtctcggccgactttctgaccctctcctcgttcctgttcatgaggtaggttatcgctattccgaggattatcgcgaagaatatcactgggagcacttcacccttggcgagcgaggcaaacgggttcgttggaactatgttgagtagagtctgaacgagggagggaggctgagcttctatggccttcccggtaccgctcccgaggttgacgttggcaccgacgttgaagagcctgccaacgatgagaccgaagaaaactgccatggcggaggtagcgaggtaatagacgacgatcttgacgccgacgcggccgagacgagcagggcttatacttgccgcaccgactacgagcgacgctagaactatcggcatcacgagcatcttcagcaatctgacgaagaggtcaccgaagggcttgatataggtcttaacggcccccgcatagccgaaatgtcccgctatcaggccgaagactgcaccgagaaccagaccccagagaattttccacagaacgggatagtcgagataccgcctcaggaggctttttcccatcttttcacccccttattggctggcttattgccagcataatccagttaaaaaaggaagtttattagggttgtccctggaaaattgtcaaaaagtcaaaacttatcggttaattctaactgacacatcaccatacactactttaactgtctgtccatcaacgtccagaataagggagccgtcatctgatatggtgattaccctgccaacgaggtcattgccatcgagcaggactcttacttccttcccgattagcatcgttctcccgcgaacttcttcaacaactaaaggcgggttttcaagaaatgtcttataccagcggccgagatactcaagcagcctttccaagacttccccaatgtcaacgggttcccccagggcttccatcatggaggttgcagtctcctttagaccatctgggatttcattgttcacattgagacctacccccatgatcacgaaatcacctttcacttccgttaggactccagagattttcctgtttccaacccagacgtcgttgggccactttatccatgcaccaatgccgaagtccctcagtgtgtccgatactgccagtgcacccacgaatacgagcctagggtcgatcatgggaggcttcaggatgacgctcatccacaggccgccctcgggagaagcccaggctctacccttccttcccctcccggaggtctgcctctttgcaactacgactgttccttcagagacatcgggaatgagcttcttcgcgtactcgttggtcgagtctacctcatcaaggcgaatgacgttccactccataagccctcccgagattaaaactcgggaaggagtttaaactgttttggagaaacctatgcggggtgtctgaaatggtgttgcatgtctccccagatggcttcagttttgatgacgacacaggaaatctcattatagttggctccagaacttccaggaagaaggccgtcaggtttattgcactagtgaaaacaagacctgtaaaggatgttctcccggtgtacctcaaggccatacttgaaaagttcagggaaagccccgccgaatactgggacgaggaaactgctctcgatgttttgaagtcaagggggcttaaagttcattccttagaggttgagcgtgagaggcagagtgtgagggcagagtttcaagcagagggactcatcgaaaacaatcttggggcaatatctccggagaaagttaaatacgttgaaaagctaatgagggatttcctctggtcgattattgacgacctgactgcatctgacctgtgggcacccatagcaatcaacgaagaccttgatgagattggtgagggatttttaatggggcccgaggaagaggagacggatgagcaggtcttttcaagtcttgagttctggtgggaagagtactggggagacaatggaaaaccttaaatcctccctttgtatatcactcctggtgattagtatggacgcataccagagcgttgggattaggaggaggcttaagagattcttccgcagggacggaagggctctaatattcgccatggaccacggcttcgaacacgggccgaccgattttgagcccgtctgggagcacgttaacccgaggatcatcattaggaaggtcgtcagggctggagttgacggagtcatgatgctccccggcatcgtcaggatggccggcgacgagctcaagccggacacggggcttatgataaagctcacgagcaagaccgagctaaggccaaaggaggagcagctccttcagagccagctcggttacgttgaagacgcgataaagctcggcgccgatgcgatagcggcaaccgtctactggggctcaccacaggaagacgttatgatgcgccagttcgcggagatagcgagctacgcccatgacttgggcttccctgttgtccagtttgcctatccgcgcgggccctacatcaacgagaagtacggcaagaaggaggactaccgcgtcgttatgtacggtgcaagggccgcagccgagactggcgctgacatgataaagacctactggacgggatcaaaggagaccttcgccaaggtcgttgacgccgccgctggcgtcccggttctcctcagcggtggagcaaagactgacaaccccgttgacttcctgaaggttgtctgggatgtcatcgaggctggaggggctggagccgtcgtcggaagaaacatcttccagcgcgagaatccagagccgatgataaaggccctcataagggtcatccacagaaacgaggatccctgaagaggccgctaaggccgaggggcttatttgactcatttccactttttcgtttcggatagagatgcttttcaatgaaactggaactctagtgctcgtttatgttccccaacttttagaaacggcattggggtactcttctgttcgtttaatgcctaaaattgtatcgtcaaaagccgataacgttaaaaacagtgctaagaacatataaacaggtgaggagaatgggaagggtcgagataatagatacgacgtttagagacgctcatcagtcactaatagcgacgcgccttcgaacagaggacatgctccccatagctgagaagatggacagaatcggcttctactccatggaggtctggggaggggcaaccttcgacgtgtgcatccgctacctgagagaagacccctgggagagactccgcattctaagggagtacctaaagaagacgaagctacagatgctcctccgtggccagaacctcgtcggctaccgtcactacccggatgatgtcgtcgaaaagttcgtcgagctcgcacataagaacggaatagatatcttccgcgtcttcgatgccctcaacgatatcaggaatatggcggtggcgataaaaaaggctaaagaagtcggtgctgaggttcagggggcaatagcctacacaacgggtaaagtgttcacactcgaatactacatgaagaaggtcgaggaacttttagcccttgacgtggatgtaataacgatcaaggacatggcaggtctgctgacaccttggaaagcctacgagctcgtcagcgagataaaggagacatacggtgttcccgtcaatgtgcacacccactccactacgggaatggccgttgccacctatctcaaggccgtggaagcgggagctgacttcatagacaccgccataagcccattagccttcggcactgcacagcccgggattcagacgatatggcacgccctccccaaggcagttggttctcatcttgaccgcgagctaatccacgaggtctcgcgctacctcaagaagctcctggaggagaagtactggggactgctccacaaggaggcgttgatggtcaacccctacgtcctcaagtaccaggttccgggtggaatgttctctaacctcctaagccagctcaaggagatgaacgccctggacaagctcgacgaagtccttgaggagataccgcgcgttagggaagacctcggctggccgccgctcgtcacccccaccagccagatagtcggcactcaggccgtcttgaacgtcctctttggaaggtacgaaagggtaacccagcaggtcaaggactacgtgaagggcctctacggaaggccgccagcggagataaaccccgaaatcaagaagaaaatcctgggcgacgaagagcccataacggtcaggccggctgaccttcttgaacctatgcttgaaaagtgcaggaaggagcttgaagaaagggggtacagcccgactgaggaagaccttctgacctactgcctctttccgcaggtagcgctggagttcttcgaggcgaggaaagagggaaggaaggccccagaggtgccgcctaccgcccagaagttcaaactctacgtggacggcgttgagttcgaggtgggaattgaaggtgttgatctaagcgcgctcagatacctgccccagatggcaagtgcgggagcagctatctctgcatcccaaacgatttccactccaagtgctccctcttcgattccagctcccatcccggctccagcggcaccatcaccagtcaccgtcgctggtgagggtgtcgtcaccgccccaatgccgggcaaaatcctgagaatcctcgtgaaggagggcgagcaggttaagactggacagggactcctcattcttgaggcaatgaagatggagaacgagattccagcgcctaaggacggtgtcgtaaagaaaatcctagtcaaagaaggcgacaccgtaaacaccggcgacccactaatagaaatagggtgactttctgagtgtcttttcaatttttgccctcaaaaaggttctaacaaagcactgaaggtctttcttatgcccccaagttaaaaatcgaaatattttcagcccatttccgaaagacatttaagtacggaaagtgtacattgaagtgcaaaacttaaatggaggtgcaggaatgaactctgctgtaattgttctggtggccgctgcaatatacgtggccatgtatttcacctacggtaagagccttcagaacaaggttgttaaggccgaccccaacagaccaacgccggcccacaagctatacgacggcgttgactacgtcccagcacacccgctcgtcctatatggacaccacttcgcttcgatagcaggtgcgggaccaatcgtcggtcctgcggtggcaatggcctggggttggctgccgggactgatctgggtctggtttggaaacgtcttcattggtgccgtccatgactacctcgcactgatgtcatctgtccgctatgatggtaagtccgtccagtggattgcaggaaagctcatgagcaagaggactggagtggcgttcgaactttacatatggtttaccctcctgctcgttgtagctgcgttcgtcgcggtaactgccaaactcctgacaataacccccgaggcggcaactgcaaccctgctcttccttctggtggcagtcatcctcggatggttgctctacaagatgaagatgaacttcacagtggcaacgataataggacttgtgctgctggccatatctgtctggataggccttaaccacccgcttgtcttcgttaacggtcagaccgacacaacctccgccgcctacaccaccgcataccactactggaacataatcctgctggtttatattatcgtagccgcttccctccctgtgtggattctcctccagcccagagactacctcaacgcatacatcctttggttcggcctgctcttcggaggcatagcctttgtactgctcgccaaggactttaccgcacccgcatacacatcttggagcgcctacgtaatcaagggtactgaggcagttccctcaccgttctggccaacggtgccgcttgtaatagcgtgtggtgcactcagcggcttccactccctcgtcggctccggaacttcaagcaagcaacttgacaacgagattcacggtctcctcgttggctatggtggcatgtttacagagggcttcctctcaaccattgtcataacggccatagcggtctacggcgtccagcttacaggtcttgaacctgccaagtgggcaacggaatacattaccaagggcggtcttggaaccttcatcggaggctacgctaagggcgtcagcgagttctacggcgtaagcgagacctttggaaagaccttcgctaccctctgggtctcggccttcacactgacttccctcgacaccgccacaagacttggaaggttcgcctggcaagagctcttcggaatgatcgccgacacgagccagggtatatggaagactatcaccaataagtgggttgcctcaataatcatagccggtctcggcacctggcttgcctggggtgcaagttacaaggttctctggccggctttcgcaggaatgaaccagctcttagcaagcatagcaatgatgactgcagccctttgggccgccaaggtccagagggccggaaagtggtcctgggccgtcctcctgccagcactgttcctctggataaccgtgactgcagcactgatatggtacatagcagtagtgccgctgagcggaagcaccctcatagcagtcaagggatcgctcctcatcggcctgctcctgaacttcctcctggcatgggacttctacattgcctggaagaggccagaagaggagtacgctgcagctgcggcctgaagttctttcatattttcaacctttttttgagggacaggggatgcggaaaatcagagatattgtttcaaagctcactctcccgcttcgcttcctctgggagtttcacagggggtttgaactatattatatccaggggataaaatgggaagaggaagagcttgaaaacatattcgcactcatactctttggagattacgtaggcctgccccatcctccgaccgtgcttacatacaggctctttccatacgtcattagggagctgtacgtgatggagcagaagagcaagaaagaggtttccatgaaaagcggatggataggcgtttgagggggataaaaatgcctaaaagagcccttgaagatataaaggctttccttaaagggtttgcagagtcgtttaagcacaattcaaccgaataccttgagtttgagctcagggagcttgagaacgtcttcgctctcaccctcatgggggaattcgtaggaataccgagtccgccaacgactctggttataaggctcctcccacacatgactcgcgagctgtacgtgatgcagagaagggccgttgaaatggacgacattcttggcgagctagcagggatgtttgaaatcacatgaggtggtagccatgcgagaattcttcctgccgaagaaagactaccgtgttgttttcttcatagggaaaggcggagtcggcaagacgacgagctctgcggcagctgccgttgccctcgccgacaagggctacagaaccctcatagtctcactcgacccggcgcacaacctcggggacgttctgatggagaagctctcagataagccaaaaaagatagcggagaatctctacgcgagcgagctggacatggagaagctgataaagagctatctaaagcacctagaggagaacctcaagcacatgtaccgctacctgactgtcataaacctcgaaaagtacttcgaggttctcagcttttcaccggggatagaggagtacgcaacgctggaggctgtaaaggagatactgatgaaaggcgacgaatgggacgttatagtgttcgacactccccctacgggactgaccctcagggttctcgcgctcccgaggatatcactcatctggacggacaagctcatcgagatacggcgggcaattctggagagaagggccgcgatagccaacatccacggcgagcaggagttcgtggtagaaggagagcggataaagctccccaccaaggaagaggaagaccccgtgatgaaggagctgaaggcctacaggaaagaagtagcattcgttgagagtgtcctcactgaccccgataagacgagcgttgtggccgttatgaaccctgagatgctcccgttgtatgaaactgagagggcctacgagagcctcaaaaagttcaggattccgttcaacatgatagtaatgaacaaggtcttcgagctgaagggagaagtcccggaactgaaagccaaactggaggcacaggagagagtgctaatggaggtctctgaaaagttcaaaggggttgacatcgtgaagatacccatctttcccgaagagccccgcggcgttgagaggctcagagaacttggaggggcgataatcggtgaacgctgaggaaatatacgacagactccgcagggtgaatgagcccataacggagatggacatagtcagcctcggcctcgttgagagggttaccgttgacgaagatggtgttaaaatttacctcaggctcgccgagggaatacggcacccgttccagaacgccctcagctggccggtcagatggagaattgttagggatgtggttaaggcccttgatgatgtgccaaaacttgaaatactcgaagccagaaatcttacgagatactatccggaggaggattgagatggacaatcagcttctgtttacgataatctttgtactggctgggatatctgtgatccagtactaccgcgggaggaagatgaacctgatcctcatggagcactacataaggatgatcaaggacgtcgtgaagccagaggacgaaaactacacgtggctcggcggttacattggcttccgcgcggagtacaaggtaaaccgcgacaacataagggagttcgagtacactcttacactccttccaaggcacagcatcctttacttcccgatttcgctggtcacgagcagacacgacaagctcttcatagtcatcaaaccctttgcccagatcaagcgcgaggctcacctcatccagaagggctactacaggctcaggcccgacatcgagaacgctgagctactgcagagggaggaaatcgagatagcgggcaagaagtacgaagcattgtttgagaagaagcgcgacgttgagaagcttaaatccctcgtggaaagtctcccaaagccagagaacatcaaacacgtagcacttacaccgaagacgaacgtcttctacgtccagatgaagcccgagccggacacgataaggaaggacgttgagaaaatagtacgttttgtcaacgagaagctcaaagaaagcccgttctcctcttgaccttttcccttcttcgcggcgcaacccttttatgagttaaacttcaagttatacttggtgataccggtggttagtatccgcctgaaagtcggcccaaagggccagatagtaattcccaaagtcttcagggaggcctacggaattaaggagggcggggaggttatagtggaaccaagggaagatgcactcgtcatcaggagagtgccggacacggaagaactccttaaaaagctcagggagtaccacaaaaagaggaaaggcgcgaaaccagctaaacttggggaactcaaaggagtgagccttgaagacgagttcgacgaggtctgggggattgaggaatgaggctgctcattgacaccaacctttttgtctatttaaacgccaacatagacgatgaactcgccgagaggctcgatcgcttctatgcagagctggttagagagaatgaagcttacacgaacgtccttgttttggacgagctcattcacgtttctaaacgaaaatacggggtgagctatcctgagacgatatcgttcatagaagacgttgtactgcctgccgttagggtgcttcccatcacctttgaggattacctcacggccaaagaaataattctcaagtaccaccttcgcccttcagatgccctccacgccgcgacgattcagaacaacggccttcaggctattgtgagtgaggatgaggattttgataaacttcccattaagaggctctggctggaggtgtaatcatggaaatctacaaagccaagttcggaaatcctgagaggggttgggtagtcttggttcatggccttggagagcacagcgggaggtacggaaagctcatctcgatgctcaacgaggctggctttgccgtctatacctttgactggccaggacacgggaagagccctggaaagagggggcacaccagcgtcgaagaggctatggaaataattgattccataattaaagaattaggtgaaaagcccttcctcttcggacacagtctcggaggtttgaccgtcatccgctatgccgagaccaggccggataagatacgcggggtcgtcgcgtcctccccggccctggccaaaagccccaaaacaccgggctttatggttgccctcgccaaggttctgggaagaatagcccccggtctgacactctccaacggcattgacccaaacctcctttcaaggaatccggatgcggtgaagcgctacatcgaagacccgttagtccacgacagaatctcaacaaagctcggaatgagcatcttcaagaacatggagctagctcacagggaagcggacagaattgaagtacccattctcctgcttgtgggcacaggtgacgttataacaccccccgaaggctcaaggaagctcttcgaggagctcaaggtgaaggacaaggaaatcagggagttcgagggtgcttaccacgagatatttgaggatcccgaatggggcgaggagttccacaagacgatcgtggagtggcttataaagcattcagagaaggcttgagaatgaaagtcaatagggaacgccttttccatatttccattttgattcccctcctaacacttccctgactaggcaccacctggctaattttcactgttctggggtttgttcacaaattcagagaaaaaatctgggccgcttacgaacgccatagcggagatttcggcacatatctggtcgttggcatggcttcagcctatcttgttgaggttcttgccataattgacaacctcaaactttcccctgaggaaaagatactcctcaacccggatccactgacagacctgtacctcgctttcgcctactacttccccttcgttctctattggggactggccattcgaaggtacgactacagctggaaagatgtgttctggataggggcgccactggtatacttatggagcagatgggggcggtctttctctctttcaacccggttgcatggctctacgttctgctggtttatggttcctacaaggccattccagttctcgtgacggagaaatgcttgagacaaagggagagaaaacacatcaagacatggaaaaaactcgttctcggtgcactgatagagttcctggcattcgtctcggcaggagggttgctgtggatttttgaaattgctctgtagggtaaagttagcgtttatcataacccttttatcgagcaaggtggaagaatcctgttgggagactcgctttgaggttgatatatgcactctcgggtggcctctatgctcgtcgatacttttcccaggttccttaaggagtggaacgggaccgtagacagctggctccggtatattcggggataccctgagctatttgggaaggtaaagtgggactatgagcgctatggaatggactggaaggggtttacgaagttacttttaaaacgaaacatggaggagctcatccttgcccacgaaaagctgcttgaagttctcccaaggatggaaacaaagattgaggagctttttggaatcaaaccgaaggactacaacgtggttctctacataggcattgaaaacggggccggatgggtgaccgaattccttggaaaacccccgattctcttcggtctggaggcaatagccaagcttaagtggtacagcaaacttgagggattagttgtccacgagtttgggcacctggttcactggcttttaaggggagaaaacatagagcggcttgaggatgagcagatgttcctgctgtatacagaggggttcgcccaacggattgaggacataatcatcggaaggccctggcacctagaggaggagggatggttcgagtggtgtgaagaaaacgagggactcctgaaggccgaattcttgagaaggatacaggaaaaagaacccctgaacccgtttttcggctcgtggtataccctctttgggaagcggttcttaggctactacattggctataagttcatctgctggcttgaaaaggactattcccttgaagaaatttcaaagcttaaaagagaagagatcaaaggtaagatcctgaagtttctcccctaaatgttctcccttctgtcaatgacgtgctccagctctggcccggtctttatcagtccaaccggaacgcctaccctttcttcgatttcctcaacgaactcctttgccctcttcggaagtttatcgtagtcagtgacaccgaaggcttccccgtcgtacttgtcgagcatcgtgagggcaagcatcgtcgcgccgtttattctcgcggagtagcgggcgaactcgaagtcaaaccagcccactcttctcctcctgcctgtgacagtaccatattcgacgagcccaagcctttcagcctcttcctgaggcatctcagtcggaaacggccctgcaccgaccctcgttgggaagctcttgaagacgacgatgacatcgtcaaccctcgtcgggccaattccaacgtcgctcgcaatggcagatgccgtcgtgtctttggaagtgacgtagggataagtgccgtagtagaggctcagtccgaacccttgagtgccttcaattagaacgagctttccatcgtcaagggcatcgttcacttcagcagcaacgtccgtcaggtaaggctcaagctccttaatgtcctttgcgagctttgcccttctcataactctgtcggcgtttgccggcccgcatccgctcccggtggttccaatctcctcgtgcaggtggtggttgcttctatccagctgtttgtgcttctcctcgattatggcacagcggtaatctatcccaaccctcccccgaacgttgaagtccttcaggtgttcgagctcgtggaaaaagacttctggatcaacgagaacgccagccccgacgagaagtctcgccttggtctgcataaagccagttgggagctgcctcaccgcgtacttcttgccgttgatgaaaacgctgtggccggcattagttccaacgccgccgcgtgctatgacttcaggctcgtctttgagggccagataggctataacagagcccttgccctcatctccccattgacctccaacgacgatgtagctcggcatggctcttacccatgtctaagtcaataaggggtttataatgctttccatgttgacatctattcgttaataacgcctcgaaagtattaaatctctttacgcggatttttatatggtgatgcctacggcctgcctggagataaaccccgagcggaggagcgttatcgtgagaacagaggacggtaaaaagcttggagaattggacctcgatgatctggctgagatcgtggaattccgatacgctaccccctggaacgttacaaaggactcccttgagaaggtggcgctcgttctggaagaccttgcgtatctggcgcggagcggcagagagctcccagaaaaggaagttctcatcgacatgttgaagaaaagaaagtattaaaagggccagctgccttaaagctgaagggtctcaccatgatcaaaaataagttagttgtcgtcactgggggagcgggctttataggctctcatatagcctgggagcttatcaaggacaacgatgtggtaatcatcgacaatctatacactggaaaagaagaaaacgttccaccaggggcgaagctcgtcaaagccgatataagagactacgaggcaatagccgagctgataagcaacgccgactacgtttttcatgaggccgcccaggtgagcgtcgtcgagagcatcagggatccggtttttactgaggaggtcaacgtcctcggaacgctcaacattattaaagcacttctcgaagggcatgggaagttgatctttgcctcttccgcagctgtttatggagacaaccctaacctcccactaaaggagactgagagacctagaccactctccccctacggggtgaccaaagcaaccgccgaggagtacctccgcgtcttccacgagctttacggcctgccagttgtttctctccgctacttcaacgtctttggaccgaggcagagcaccaaccagtacgcgggagtgataagcatcttcatcaaccgcgcgctgaagggtgaacccctcgttatcttcggcgacggaaagcagacgagggacttcatctacgtcaaggacgtggttaaggctaaccttctggtagccgagagcagaaaagctaacggaagggttttcaacgtcgcgacagggagagagaccacgatccttgaactcgctatgaagattatagaaatcaccggaacgactagctcggtagtctttgataaaccgaggcctggtgacataagacacagcagggccgacataagcgagattagaaagctgggctttgagccagagtggtctcttgaagaaggactgaaaaaaacagtagaatggtacgccaaaaataatccttaggggcaattccttcactttttaacgctgaagcccatcgcctgcttctgctggatttcctgagcctgcctggccagctctcccagctgggcttcgagcttcttaagggcctcctgtgtctttgctatcgcctcttcgtactcctttatgcgcttttcgaggtactcaatagagtcatcaaggctcttctggacggcatagccagcacctacgctgactatcgcgttcttggcgtcaacgatcttgcccttgaggaacgatccagcccctatgggaacaaggatctcgaactcaccctcctcattcttaaggccttcgagggtttccttgaccgcctggaactcgttcctccccagagtcaggagctcaaggttctgggcgagcagttgagcctgagcctggaggagctggtactggtacgcgagttcctcaagcttcttggtgtcttccgccatttcaaccaccggagtaagtccggggcggtgcttttaagattttagcttaaactagcaactcaaatcgcatgacagagagcagtctaaaatggctcccgtcaaccatctactcatgacattgtttcccatctcattattactgactgatgttgataggaatcattcctctcgttcagagaccatatttttgccatagcaaagacaatcgagcttaaatccttcagaaagcaaaagatatgctgttaatcagcgcagcaaagtttataaaccctttagctccacatctgacgcccctcgtaggaggggaggtggtcggtatgtactacccacccaggaagaaggtccagcccaagaaggttgaggaagaagaggaagaggacttcgagcccctcgaagcagtcgaagaagcctacgagaactgggacgaagaagagtttggcgaggactgggaagaagaggaagagtgggacgaggactgggaggacgaagaagactgggatgaggactgggaagaagacgaggatgactactgaattctccctccctttttgaggtgctcccatgaagggccggccggtaaagagacagaagaccaccctcaagaccctcgaaaagcgtcgccaaatgcggtaccggccggaccctggcagatggttctattcttttatcccgtttaaggtcgccaccggtggagctgcaccattgattccgctcctcacaatgaacgtcggcggtgggccggcggatgttggaatagttaacgcggtgggcagtacattctcaatgctcggcggccttttctggggaaagctcagcgacaggctcaacaggagaaaggcattcctgcttcttggatttctcgggactgcaataatgaccatgagctttgccctcgcccgcacagtccaccaggttattgccataaacgcggcctacacgttcttcatagccactaccatacccattccaatcctcataataacaaaggctttccgccttgaggactgggactacgcgatagggaagttcaatgagatcggcggctgggcctgggttctcggtttaatagtaggactgctcttgacacccctgttcgggattaggggaactttcattgcccttggagtcatagggcttctctcgtttccatggggcaaaaagacaatacgggaagtcccacttcacatcgatagaaaaatccttggcgtttacgctggctacgtcgttgagaagttcaggtaccttccgaacatgataactcacctgccaagattctcgacgaaggggtttgggaggctctacttctcctccttcctgttctgggtaggcgcaatgctctacttcacccagttcccggttctccttaagtcgaggggcttcggtgccactcacctctacctcatgagcatagggaactccaccatatcggccttcatgtacacgcgggtcggtctgaaactcaaaaagagcgggggctacctcgctctcattcgtgggctttcagttagggcatttgctttctcgctccttgcggtatccacgctaattgagggccaagtttttgcgctccttgccttcgtctcgtatttcctggcaggctacacctgggcatacataggaatctcaacaacctcgataatctcgcgcttcgctccccccaagaagaggggcgctctgatagggacgtacaacatgataagctccctgggtgcaatagcggggaacttcctcagcggttttctgacggaagggctaggttttaccgtgaacttcacggttgcaactgccctcctcctggtttcaatacttccgctcctcggcgagaacgttaaaagcagaaaatccaactaactccggtgatgaccgtgttctggctcaagacgaggataagtgagggggaggactcactagagagcctcaaggacgaggccaaggatcacgaacgggttctcatactggcatctggttctatgaagaggcacggctttctaagcgaggccgaggactacgttagggaagccggagcagaggttatgagtatatcaggacttccggcggagccgagcgttgaggtcattgaggagttcctgccgaaggttagggagtttgggcccgatctcctcatagccatgggcggcggcagcgttatcgacacgaccaaagccctcaaggtcttctacgatgcccccgagctcgtctttgaggagatagccttcatcaaccgtttctcaaggccgaagcccgttccaaaactaaaaactcccctcatcgcgattccctcaacgagcggagctggaagcgaggtttccgcggccagtgtcctgaagaagaacgggataaagtacaacatcgtaacgccggagatagcacctgaggtagctattctcgacccgaggctcccgaggactatgccaagggaagttgcgaggaattctggcctggatgtcctcgtccacggtatagaggcttacacaactaaggtcgctgggcccttcagcgatgcgatggcgataagggcgataaagaccgtcttcgagtggcttccgaagtcggttgaaggtgaccccgaggcgagggcaagaatgcactacgcggcaacgatggcagggatagcctttctcaatgccaggcttggtttggcccacgcgatgagccacaaggcggcatgggtaggtccccatggcttactcaacgcgatattcataccctacgtgatggagttcaacgccgagaggtagtgagtatgcgaggaagcgtctatgctgagatagcgcgcgaacttgggttgaagagtgctgaagagctgataaaagccgtcagagagctcaacgagcgccttgtgagttccaaagctaagcgagcttgttgatgaagagacttttgttgaaagggttgaggagatggctgaaaaggcctaccgcgacgggctgatagcgttcaaccccgttgaaccaaagccagaggagataagagagctttatctgaaggctttgaacgcgttatagattcagatttaattttcttcagtttcgataacagggcaaatcaaggataaattttaaattttaaatcatattgaacaggaattggaggttgataacaaatgaatcaatcagttataatagatggaaaaagatatggcgttgaagggcacataaaaaatattgtaatttcaccagattcgcgatatttattagtagaggaaggagaacatgaaactttttctaagttgcacttatacgagatacacgataatgggattaaaagagtctttgaccctatactaaaaaacgaaaagggggtattttattcttttgtagggggaggtaaatttatagtctcatatattccatccaacagatttttcatctatgatttcattgacaaagactacaatgagctgtattttaccaatatgggcaaaatattctttaggccaacagtcccagatcacaaaattgtcgtcatatatgccccaagtggtgcattattccctcatagaaataggaaatatgtgaatttaatccaagaaataaatttcaatcaatatatcggtgagtacaagtactatttggaaaaagtcccaaataccattgtctcactacgagatggaagcttttatctacctgtgatagtaaaaacccaagatactggaaaaaaacaacttatgattctaagatctacccaaaataaacaacaacctcttcggataattgatatcaatgatcacgatatagatttcaaagactgggacattcagtattatcacgagaatgacaacgaactgataattggagctgttaatttatcttttaagaacacacttcttgtatatattatcaatcttgttggagaacctaaagtatcatcttttgatattgagtatcaagggaaaattaagtatgtaaaaatgacaaataaaaatctgtatttagtctatgttgactcccaagacgaaaaatatttgctacaaattccaaataaggaactagtagattatattagacattctaaaacatcaattacattagatacgagattagaaaaatacataaaagcgtccttaaaagaatacaatattacaatccctgatgatgagaaactttcaattttatggagctggaatacgcctaaaataataatcactccaatttctgaacttttaagtgctccagtagattatatagaaaattatcaaatagtagagaacagtgaattcacaaactattctagcaccaatcaaaccaatcaaaacagtagtagttcttataaacatgacataagtaataaaaatagtaacggtggatattgcaacgaggataagataagcactatccaagttcttttagatgaatacaagcaagttatcttatatggaccaccaggaacaggaaaaacatttatggcccgaatgtttttgagatgtattaatgtacccaatacacactactcttttgttacattccataagtcatatagctacgaggattttgtcgaagggtatcgcccactcactcgcgaaggtaaaatagaatatgctgtaaaagatggcatattcaaaaaactcgcaattaaagctatttatgaactcatgtcagacactatcaaagaacaattattacccaactatgaaacacaaatagaaaatcatgctaaaaagattgcttgggaacgcctaatttcagacttgaaagctaatcgtataatccggaatgatattcgggttgacgacaaaggaagaatgtatgttgctgaatataccatatatgatggggacgatctaataacaaaagcagagaagcttagagagcttcttggtgatttagaatcaattttcatgacatataaagaagaagctgaatatgagggcgttaagttcctcgttcagagatttcttggaattctagattcaaaaatttcaaatggtgctcttagcacagaggacatcaataacttattcactaacaaccccaagaaattttatttggttatagacgaaattaatagagcagatgttagtcatgtttttggtgagttgataactcttcttgaaaaagataagagaattagcgaggacaacaaaaatcccataatagtccaactgccctactccagagagctttttgcagtacccagcaatctctacataatcggaaccatgaattccgcggataggggaatatccctattagatgtagcactaagacggagatttgcatttttggaagtacaaccagactataatgtgctggaagaattaaatctctatgggataagaatcgacaagttgctcaaagcaataaatgacaggataattcactcaaaaggcagcaaagactatcaaatagggcactcttatttccttgaacttaaagaagcgttatcaaatggaaatgaggatgatgccctgcaaaaactcatacgtatatggtataacaggatacttccattacttcaagactattattactcaagatgggatgaactagatatgcctgaatttatagatggcacagggcaaataaatttcgaactaatgaaatctccagagaggttcattgaagctctgagaggtatattgggagaataaatattcatcaaataataggtggaagaacatggatcacatctacatctatgtgccagagcattctatagacaagaggccatggaatcttcctgaaataccatccgagctagttaatagcagagaatttcaaaagtttgtagagcagataaacaattcatatttcgatccagtattagttataaagcacaacaggctcgccgcaggaccctatgttgggttcgttttatataaagacaaaacttctggaaagatacaccaaatcaacatttatccaaaaatctttctgggtgggctatcctcagaagatagctggaaaatagtactaaaaatcgcagacttatactacaacttaggtttaagagagtatgatataaagacagctcttgcaactgaagggaattcacctttcattgatattctcttggatatcttttcaaatagactacttaatgagctccgatttggtatttatggagaatttgtatctactgaggaaacttcttcgtccttgcgaggccaattattagtagaaagagaaatattgaaattgccaacccagaagcacaaatttgatattagatataaaaaatttaccgtagacaactttcttaatagggtttttaagtataccttatacttagggctacaacatactaacagaagagaaacaaaaagaacattatcagaagcatgggatatgttaaaagaagtatccttaacaccgatatcagttgattccatagaaaaattaacactaaactccttaaatcttagatttgaacttcccttgaagttagcaaaaataataatatcaggattagattatcagaaaggcctaatctccccaggatttattatacctatgccagatgccttcgagttttttgtatataaattgctcagagccattcttgggaaagattatagagtacgatatcatcctcagaatagagaattcgttctggaaacacctagaaaattcattgagaacccaccacagccagacattattatagaatcaagctctggacagcctttagtcgtggtagatgcaaaatacaaaacgctatactgtcctaaatgtggagaaaaacagagatacgtcaagaattccagtgatttatatcaaatatattcttacactaaattatataatgctcatgcaggtgttctcgtatatcccatgctgaaagattatagtcagggttcagggtataatcaatataatcaatggctttgtgatatatcctcgatatccacctgtaaaaattcgatatttcattttttcgataaaactaagttggggattttaggaataaatcttgcacaccttattagggactcaatagaagtctctagtggtaatataacaaaaattaaccccaaaataaaagaacagttaatttcttatctaaattcgctaataaactaggctcaggaaataaataaaaactttaagagaccataatttccttttctcccccctcctccacctcgcgtatctttccgcccttcatgacctcaacgatggcaaatgccagcagggccaggaggagatagaccaccgacgctcccccaaagagcacttcgtaggccttttccgtcggaatcttgatctgaacgaaggccggtgctccaggcgggtggaagaggacgtagtaggtgctcattaccgttccagctattgccggcccccaggtcgagccgaagttcctgaagaggctgttggagcctgtggcgacacccatcattctcggcggcactgagaagaccagcacgttgatgagggatatgttcatgaggtttatgcctattccaacgacggtcatcatcgtcacgaactgccagagagacatcttcgttgcgtagagggacattaccgcgagggcaccgcttccgatgagggcacctgctatcgctatcggcttcgccccgatcttcggcatgaactttccggcgagaggggcgacgatgagcataacgagggccattggggtcatgagcaagccgctctggagtatcgtctttccgaagccgtagggttccggcatctggaggaggtaagtgttcgcctggctcatcattgagaggccaaaagccgctaacattatgcccagattggctattgcggggttccttgaggagattatcttaagcggcagcaacgggttttccactctcctctcccagaggacgaggagtaccgcgccaattacaccaactccaaagaggattaaggtttccttcgcagtccagccgacgtttggtgcccttgtgactgccacgagcattggcaccacgaagagagtaaggagaaccgctccaactcagtcaacctttccaggatttacatagcggctctccctgagtattttccaggcgaggaagaacatcagcacggcgaagggagccgccgagtggtacgtccagcgccacccgtagttctctgtgacccatgcacccagggggagtgctatgaccattccaaccgcgaacatggcgcttatcattccctggacctgcggcaccatgctcggagggaactcctcacggacgagggagaacgccagcgggaagatcgccattccaaagccctggattgctctcgtaacgagaagcctctggaagcttggagcaaagccgttgagaatgacgccaagagtgtaaaagccgagcgctatgaggaacatcttctttttcccgtacatatcgccgagctttccgaagagggcaacgctgacggttccaacgaggaggtaaatggtcagaacccagctgacgtcgttggggtttatcgcgaactccttctggatcgttggcagagctggagtcagcatcgcctcggtgtacatgacgaggagcgggagaagaacgacaacgaacatcgccttctttgcataggataagtcgtaggtctcacccttctcgactacctgcatttttcaccaccgacctatcgaacgatatatcacttataaagctagcggtggtctccagtaagggttataatagggagaagcaatgttttactgagggtgtggaggatggagaaaatagtccgcggcgtttatcgctcgggtgagattatcttacttgacgagacagagcttcatgagggcgagattattaaggtaaagcttgttgggaggaaagaactcgtggataagcttgcaggcgtgctagggaagggaaagccagaggacctcgaaagataccttgaggagatgtactatgagggttctccttgacacgaacgttctctacaactttctctttgagacgcccctcacggaaagctctaaaagtcttctgtctgagccttacgaattctacgttagcactctgattcttaacgagctatcttactcagtcatccggagaaaggcggaaacagcctttgaaatacattcatacagaaaactcaaggagtttctcaacaagaacggttacaaaccttttcaaagagagttacggctcatggaatctgcaatagaaggacttgggataatcaaggttaatgattcacagaactgggagcttatacgagaactcatgtttaggtattctctccttccgagtgacgccaccattttggcaaccgccatcgaaaacgggattgaagccctcgccactttcgatagggactacagcaaagttcaagaactcaaaatcattccttaaaccatgcaccccctcctcaagaaggtcatcaaagaacgctttgggaagctcaacaggcttcagcaggacgcgtttagagaggttagttcggggaagagcgttctgatcatagctcccacaggttccggaaagaccgaagccgctgttctgcccgttttcaacgaaatcctcgaggaggggttgaagccgatttctgcactctacatagccccgctgaaggccctcaacagggatctccttgagaggcttgaatggtgggggaagaagctcggaataaccgttgaggtgcgtcacggggacacctcggcttataggaaggcaaaacagacgaagaaccctcctcagatgctcatcataactccagagacgctcggcgtgattttgacagttaaatctctccgaaagcacctggtgaatgtcaagttcgtcatcgtggacgagattgctgagcttgtagataacaagcgtggcgcccagctcctcctcggtcttgagaggctcgctgaaatagcagatttcagaagaattgggatgacggcgacggtgggcaacgaggacgaagtaagggagtggctaaaggctgataccatagtcaagccaaactggaagaaggcataccgctttcacgtgctctatccaaagcccgaagaaaaagatgaagagctcgccagggaactcagcgtttcccccgacatcgcggcgcgcctcagggttctgtgggagatcgtcgagaggcacggaaaggcgctgatattcaccaacactcgccagttcgctgaaatcctcgcccacaggctaaaggtctgggggaaacccgtagaagtccaccacggttccctttcaagagaagcaaggataaacgccgagagagccttgaaagaggggagaataaaggcacttgtttgcacgtcctcgatggagcttggaatagacatcggtgacgttgacgtcgtgattcaatacatgagcccaaggcaggtgaacaggctcgttcagagagccggaagggcgaagcaccggataggagaggtcagcgaagcctacatcataacaaccaacgttgaggactacatccagagcctcataatagccaaacacgccctagaaggccgctttgaacctgttgagcctatcggcgggctggacgttctggctcacttcgtcgtcggtctgctcgtggaatacaagcgacttccaagagagagaccctacgagatagcgaggagggcctacgtttacagggatttgagctgggaagactacttggacactctcaaggtgctcgaagacgcccggataataggctacgacgaagagaccaaccagctctacctcaggagaggggccttccagtactactacgagaacctctcaacgataccggacgaggtctcctggagggtcatagatgccaaaagcggacacatcgtcgggagactcgacgagagcttcgtgatggacctcgaagagggtatggagtttgtgatgggtggaaagagctggatagttctcaaaatagacgacgaggctaaaatcatcaaggcgcgcgagagcccgagcatcgagagcgcaataccgagctgggagggtgagatgatacccgttcccttcagcgttgccttcgccgtcggcaggttgaagagggagctggcctttgacttcaggaacgcgctgtccctcattgagggtgttgagttcagagaagaggatctgaaaagggcgtttgaagagataaggggcgaacccttctcgacagatagagacatcttcgtggagagcacgccgaaagccctaatcatccacgccgattttggcaacagggcgaacgaggcgataggcaggatcgttcactcactcttaatcctccgctacggcagggtgttctcggtaagggcgcaggcccacgcggtagtcttcaagacaccgttccagctgaaccccgaggaagttaagcactacctctaccaggatccagagagcgttgagttcatcgtggctaggtctctgagggattcccacgcttaccgctggagaatgttaaacgtcgcgaagcgtttcggggcactgagaagggacgcgaagataagaagggtcgagcggctctttgagggaacggtcatagagagggagactttgaacgagctctaccacgacaaggttgacgtgaagacggccgagctggtcatggagatgcttaaagccgggagcctcagggtcaaaaccgccctcaggaaagagccctccacacttgccaggctgaacatgaccgttggcggggagttccttctgagcggaatccttgagagggacgaagtccttgagctgtttaagaagaggctcctcgagcacgaagtagttttagtctgcaccaactgcggctggcactcgaagacaaaggttgctcgcctgaggagtatcaaagagagggaatgccctcgctgcggctcgaagatgctggccgttgctcacccgatagatgcggaagaattcctgccggttctcgacaaggtcaggcacggaaggccgcttgagaagaaggaggaacgggtttacaggaagctgttgaaggccgctgaccttgttgattcctacggcttcgatgccgttctggcccttgccagctacggaaccgggccggacacagccgcgaggattctgagccagtacaaaggggaggccctgctggttgcactgatggagcgcgagagagatttcatcaggacgaggcggttctgggtcgataagaaggataacagcaacgagaataaggataagagctaaaaagactctctgacaatgtcacgatccgttattagtgagcgtcatcattttcagatttaaaagttcgtcttgtgataatgcggccaattgagtaccgtttttacaacagccccataagagaatcaaatgtaaaactaagttatacacaatggccaaaaatgtggaatgatgtgttctatattcagatgtatacctttggttcgaagtaaactttataaataatgagggaaactcccaatgtactgaacaccggggaatgccggtggtgaaagtggcattagtattgagaagaaaaacatctaatcagggccccgttgtagactatcgggagctcgacaggttgcttgctcaagggggctacaaaaagctcctcataacgaggcaaccaatcataaacagtgcccccagcgacgtggtgccgatctgggtaagcaaagcagagcaccccaaggccgtgaagcctaccgacctccatatactcgagagtatcatctggagagaactccaaaatggcaccaagtcagtaattctggacgctcttgagtatctcatgatcgaaaacggtgtagaaagggcgcttagattcgttggaaagctgagggacatggcaatcttaacgggggctactttctacgtcacggtcagtgaggggattgacgaaaaaacccgagccatgctccgtagaatagttgagtgaagtttatataccgtcggctcttctccaagatttaggtgtggatgatgccttacattgagaaaattgaaatgaaaggtttcaaatcttatggtaacaaaaaggttgtagtgccgcttgcgaggggttttacagctatagtaggagcaaacggttctggaaagagcaacatcggagatgccgttctgtttgtcctcggaggactttctgcgaaggccatgagggccagcaggataagcgacctcattttcgcgggttcgaaaggagaacctccagccaaatacgccgaggttgccatgtattttaacaacgaggacaggggctttccgatagatgaagacgaagtcgtgataaaaaggcgcgtctatcccgacggaaggagtacgtactggctcaatgggaagagagcaacgaggagtgaaataatagacctcctcagcgctgccatgatttctcctgagggctacaacctcgtccttcagggtgacataacgaaattcattaaaatgtctccaatcgagagaaggctcatcatagacgaaatttctggaatagctgaatacgatgccaaaaaggagaaggccctaaaggagctgaagcagacggaggaaaacctcgcgagggttgacctcctgataagagaggtaaaggcccagctcgacaagcttgaaaaagagcgcaacgacgccctccgctacctcgaccttaaggagaagctggaaaaagcgagggttacgctccttctggctgagataaaaaggcttgaaaagttcattgaggaaggtggatcgcgggaggaagagattgaagggcagatcaagtcccttgaagacaggttgaaggagatagcaaaagaaatagtcgcgaaggagaaggaactcgccgaaatagagcgccagcttgaggagaagagcggcgacggcattctcgagataaccaggaagataagcgaggtcaagtccaagatagaggtcgcgaagaggaacatagagaacgcgcagaaggaaatagaggagagccaggcaaggcttagaaaatccaaagaggagctgaagcacgtctctgaagagattgagaagagcaagggagcgataaagcgctgggggaagagaagagaacagctcctcgttcagataaaggagagggaaaccgtcagaaacgagcttgtcatcaagcttggagagatagacaagcgcttctccgaggccagggaggagttcgataaggtagtcgcggagcttgaagaggccaaaaaggcgctctacatgaaagagagtgaaatatccaagtttgaggaagagatcagcagggccaaagccaggataacccagttcaacgctaggaggaaccttctgaaggaaaaaatagcggaggcaaaggcttctctcgaagccaagaggtcggagctgtcccaggtagagggtaaaatctccaaagtggaatcaaggcacaggaaagccgagaaggagctcgaagaaaaaacaagggagctccagaaggtggagagtgagctggccaaagcgagagaggaactgatcaaggcagaggcccagagagaagtcaggggcaacagggccgttgagttcctgaagtcccagaggatagagggcctgtatggcactcttggagagctgataagcgttccaaagagcgagtatgctttagctgttgaagtcgcactcggcggcaactacgacaatgttgtggtagaggacgatagggtcgccgagaaggcaataaagctcctcaaggagaaaaagctcggaaggctgacgtttttgccactcaacaagataaaaccgcgctccatgagggagaagccgaagcttggcattccagctatggacgtcgtctcctacgacccgcgcttcaggaatgcagttgcctacgccctcggggataccctcatcgtgaacgacatggacgaggcgagggaagtaggaatcgggaaggtcaggatggtcacactcggtggggaacttctcgagcggagcggagcgataactggaggtcactacaagccgaggggtaagcttggggttaacgttgacgagataaggaagagggtcgaggcccttgaaggaaggaaagaggcgctggaagcccaggtgaacgccctgaaggtagaggttaaggggcttgagaacgagcttttcgagctccgcatgaagaagagcgagctttcaaaggacgttcaggtcatccagaaggagctcgactcctatctagccgaagaccgctccctcaaggaagagattgaagaaaacgagcgcctcatctcggagcttgagaagaggatagaggaatcgaagggcgagatggcaaagctcaggggaagaatagagagacttgagaaaaagagagagaagataaagaaagcccttgagaacccagaagcgagggagctgaactcaaagatcagagaagttgaagcggagatatccaaactcaaggaggagctgagcagggttgaaagcaagctcgaaagcctcgactcgaggataaacgaagagctcctcccgaggaaggccgacctcgaggaggagatagagggcctcgtgaacaagataaacgccctgaacgcctacatcgaagagaataaaaacgccataacagagcttgagaaagagcttgaagagctgaagacggccgaagagaacgttaaggacgagctcaaggagctccgcgaggggagagagcaaataagggtggagatagcggagcttagaaaggagaaggacgagcttacttcaaagctccaggagcttaggatagaggctaatacgctcaaagtcaggctggcccaggtcgagacgacccttcaggagaagagggccgagctcaagcactttgacccggcgctcgtacgctcgataaaggaaatcccgcttgaagttgagaagctcaggcaggatattgagaagatggaggaggagatacgctcgcttgagccggttaacatgaaggccatcgaggactttgaagtggttgagcgcagatatcttgagctgagcagcaagcgcgagcaggttctggccgagaaggagagcatagaggagttcatacaggaaatcgaagggcagaagaggcaggtcttccttcagaccctcaatgcaatagccaagaacttctcggagctcttcgccaagctctcacctggaggagaagcgaagctcatcctcgaaaaccccgaagacccgttctcaggaggacttgagatagaggcaaagccggcaggaaaagacgtcaagaggatagaggccatgagcggcggtgagaaggccataatagcgctcgccttcgtctttgccatccagcgctacaagccggctcccttctacctgctcgacgagattgatgcccaccttgacgatgccaacgtcaagcgcgtcgccgatctcatcaaggaagcttcccagaacagccagtttattgtcataacccacagggacgtcatgatggcgcaggcggacaggataataggtgtcagcatgaggaacggcgtctcaaaggtggtctccctcagcctcgaaaaggccagaaagatactggaggagataaggaaaaaggacgaggccgagcacagagagatgttcggccggctggaggcgtgatatatggaatccagattcgagccagagataacgcccgttgatatcctcctccagctcgtccagatggggaaggttgatccctggaacatcgacatagttgacctaactgaaaagtacatagagcgccttagggagatgaaggagcttgacctgcgcatctcagcgagggcaattctagcagcttccatcctcgtcaggatgaagagcgaggcccttctgtactccgacgaagagcaggataagggggatgaagaaaaggagcgcatccgcgtggatgttgaaccgctggcaccgcccttgagaagggcagagcgctactacaccttcgaagacctcatcgaggccctcatggacgcccttgaagaagctgagaggaggaagccgaggaagaggaagcgcgaggaagtcgaggaggaaatctttgtcgttgatgacttccgcgttgacattgagaagcacgtgaacaggctgtacgagatagtcagaaaactctacagcgagaccagagagcccatacgcttctgggacctcgtctttgatccacagccgaaaataatagccaggactttcctctatctgcttttcctatcaaacatggggaaggtagacctcctccaggaggagccctttggagaaatcctggtcgtcccgctggaggaaaactcctaactcctctcctccctttttgctgggcggagggtaataaccaggaatggaggctcgctcccaacgtagaggcttttcttttccccgttcaggtagaagcagtattcaccatcagggactgtctcaatgaacttttcgggcctggtaacctttgcaacccgcccatcaaaatacacgcactcgtaggagtccattatgcccctaacccgctcaagaatctcgctcttttgaagcctctcacagtctaagcgagtgcacacgagtgccttcctcccatctgtaaatatcgtgattttctcattaacatcgatccgcttggagcgatccagaaaaacccacagctcggagtacatcctttcgagcctgcctctcttcgcgagcctcttcttcagcctctcctttgcgtgataggtgagcagcatggcggaatgtatccttagcgaatttaaaagttgtttgttatgtacctacatgtgtagatatctatgtaggttgtgacttcacaaaaaagtatttaaaagatggcacttagaggagcatgatgtgaaaatgaagtggagaagagaaaaagcctatggggcagcttttttagtgttctcactcctcgacgcgcttaccacctgggttggagttcaaaggggcttttccgaggcaaatccaatagttgcgagcaggctttccgatccagcgctgttcttcgggagctttgcgctgttcacaactcttggacttctggtgatattcgcgtcaagctacatgagccgtttttctagagcatttggatacttcccgccactgtttatcctgatgagggcactgcctgtcttcaacaacgcataccttctcgcaggaaggaactctgcgttcctatcgcttccagcaggctttctaatcctgccgctcgccaagaactcaggaaagcttttatcctctcccactaagagttgagtatgcagtacctcagacgagacctcatagagccccgcgtttaccaggaggtcatttacgccaggtgtaaagaggccaactgcctcgttgtcctgcctactgggttaggaaagaccctcatagccatgctcatagcagactaccgcctctcaaagtacggcggaaaggttctcatgctcgcccctacgaaaccgctcgctgtccagcacgccgagagcttcaaaaaactgttcaacatcccgcccgagaagataaacgtcctgactggtgagctgtccccaaagcagagggccgaagtttggaagaacagcgtcgtaataaccgcaacgccccagacggtcgagaatgatattttaactggcagaatatctctcgaagatgttgttctacttgtctttgatgaggcccatcgagcagtcgggaactactcctacgttttcatagctaaggagtacctgaagaccgcaaaacacccgctcgttctgggccttactgcctctcctggaagcgacgaggagaaaataagggaaatagtgagaaatctcgggatagagaggatagagattcggaccgaaagctcaccggacgttaaaccttatgtccaaaaaatagccttcgagtgggttaaggtcgacctgccgggcatctacaaggaagtccgttccatcctccgcgagatgctgaaggagagcctcaagcccctcgcccagtttaagctggtctcgacgtattccccagacatctcaaagaaggaagtcctccaggccggctcgaagatcaaccaggaagtagcgagggggaactacgagctcggaaggctgaggatgcaccaggcgaaggcggttaagctcctgcacgcgcttgaacttcttgaaacccaggggctaactgccctaagggcctacctgaaaaaactcaaagaagacaagaggacgaagtcgagcaaggagctgatggaagacccgcgcatgaggaaagtaatctacctactcgtccaggcgaaggaatctgggttagaccaccccaagatggagaagctgaaggagctcgttaaagagcagctcgggaaaaagccgagctccaagataatagtcttcacgaactaccgcgacaccggaaagaaaatcgttgaggaactgcgctctatggggatcactgctgagaggttcatcgggcaggcgagcaggaaggacgacaggggaatgagccagagggagcagaaggaagtcctcgaccgcttctcaaggggggagttcaacgtcctcgtggctacaagcgtcggggaggagggattggacgttcccgaagttgacctagtggtgttttatgagcctgttccctcagcaataaggagcatccagaggcgcggaagaaccggaagacacaggccgggaagagttgtcattctcatggctaaggggacgagggatgaagcctactactgggcttcccgaagaaaggagaaggggatgttcgatgcgataaagaaaatcgcgagggagcttgagaagttgcagagggccaggataaaagcccaaggggaggaaggtaaaatacacgcgggtgttgaaaagtcgaaggggagtgtcgatgtgtccaaggggaagattgccccgctggatgctttcctgaagcctaaaaaggtcgaaaataccgaaattagagagagcaaagcggtcgggaaagccgctccccaggcatcggaagaaaaatcagccgaaaagccgaaagaaacgaccgaagagcttccgataaagcccatctttgtgagaaagccgaagggcatagtggtctacgtcgattcccgcgagctgaggagcggtgttccgaagcacctcagggagctgggcgccgaggtcgaggtgagaaccctcgacgttgcagactacgttgtgagcgaagaggtgggcatagagcggaagagcgccaacgacttcatccagtcgataattgacgggaggctctttgaccaggttgagaggctgaagagggcctacgagaagccggtaatcatcattgagggggagctgtacggcataaggaacgtccaccccaacgcaatacggggagcgatagcggcggtgacccttgactggggagttccaatattgttctcatcagggccggaagagaccgcccagtttatctacctcatggcaaagcgcgagcaggaggagaggaagaaggaagtccggttgaggagcgagaagaaggcgctgactctagcggagaggcagaggctcatagtcgagggccttccaaacgtctcggcgacgctggctaagaggcttttaaagcactttggaaacgtcgagagggtcttcacggcaacggaggaggagctgaaggaagttgagggaatcggaccaaagaaggcgagggagataaggagggtcatcacaggcaccctacgttgaggaagaggataaggcttaagttttcaaaaattgtagtagagaccgcccccgggaaaccgcgggggatgagcgcctcggcgagccgtgattccccttcgctccccgggggcacacttcagccgaacacggccctaacgccagttgcggcaaatatcaggagttctatcatcttgtaggcctcttccacgctgtttgtctcaaattcgacagtcttgccgtctattcttctgaccaaggggcaaagctcggctgcgtcggcaaagccgctgttcaggaagcgcacccctactttaacgggcttttccacgctcaggggctttatagctccttctttccagcgctttacagcctcttttgtgccttttatgaggagcttatttattgcttccattgaggggctgatcgcggagtaccttgagaagctctccttgaggggaacaccaacggtcttcggaagtgcatctctcacgtcactttcaagcagtgccctatcaccagcgactagaatgacggggacgccccattctccgagcaggtaagcgttcagaagggtctcgctgacgggtctcccgttcacggttatccagtctattgtggagccactgtaggtgtggtcaaaagtcgccctccccactccactcctggcatggtagcccaagaagagtgcaacgtcgctccccttactccctgccaccatgctcatcggcctcgggaagcctctaacgagcttcacaaagccgggcatctcctcggggatgatgttcaccatggggccgtgactgtcggcgacaacgacttcctcaaagccaagctcgtggagtgtcattgctgtgatcttaacaacctctgtcgctattttcctagcttcgccatagagcgccttctttacgctcaggtgttcgggactgacgacgtggggcaggccctcaaggtcgagggatatgaaagctctcatcggtaccaccttttttctgcaaggatcgggacaataaatcccttttgatcgagggataactaccgggaatatcccgcgggcaacccaacaactgccgcttatgaaaaaggttttatatgccttccttcataaaatagagtggtgatacgtatgcaaatcgtcgaaatagacataaagctcccctacaaggagaggggggtcatactgtcgaagatcgtttccaagtttggtggcaggataaaggacatacacttccacccgcccgatccaaagggcatcggagaagttagagttgagctggaagtagaaaacggaaagagcataatctcagagcttaagaggctcctgaaaggtggtagattctccttcaggatactcagcgaggcttgatttctgcctttcttatctctccggttcaagttttcgagttccggatttttgccactaagctcaacggcagcagtgacagcaacgccagaactccaactccacatataccctcattcttggacgttgatgaactactgctttcagtcttcttggtcgtggagctggagtaatcagtgtaattcgtctccctgggagtggaagttgtagaagattcagaagattccacagtccagttctcgtgaaccgccggacaggaacagcagtgaacgtcccggtatttgacgggagcaggaataaccgttaccccctcctcggacacgtgaatcagcgggagttctctaagggtgttgttctcgtagaggtatattgaaacgttcatcggtctcggagggtattttttagtaaggtacggggggctaaatatgaatctataatctccgctgtgaaacgtgtagttatcctccacccacatgctcccgttgaaataggctatccctctcccaggaggcacgatcaaaagtccatctcccatggttatcgcacaggagtcgttgaccggctgaagtcttgacttcaactcttcctccaaggggattctgtactttgacgaaacgacgatccagtcaccctcaattttcaggggcagacacttccggttcctgagagtgaagaaatcaaacggtagcaagttatgcaaccaggcatcgtaagggctgaacttgtcctcaaggctcaagttcttctcgttcccaacggccaccaacttaatggattcatccaccctgtacaggcttctgtttcctatgggatactcgtaaatcagaacgtaaggcattgaaatgttaagatccccctgctggggcacttctccaatcttctggattgcaccgttgcagtagcggattaccgttaaatgatcagcgcagggaggatgcttcattggaaaactcgtgttggtggaggctggaaggaaaagatacagccagcccttataaaaagccaggggtggcagctcgaaccccgaaaaagccatgtaatcaacgtagtaggcaccgctctcattgacatagaagatgaaataagtccaaaggtcaatgggcatgagagttacggggtcgtactctgtagtgagaccggcttcttcgtaataatcgtattcgactcccacaagggctcctttggagtcagcgtagatcacgaagggctggagcgaaatcccccagggatagttggagtactcctgggcggatacattctggagggacaagacaagaagaaggaaaatggaaagcgctccagctggctttagcttagacataatcgcacaccccgttcaggtattccagggcttccacccttacatcataataataggcccttcttggaggctttcctagaacctggacgtagtcgcaggccctctggcggtacacagggttgttgaggactgccccatcgcattcaaactcgtaatagatgttgtcaacgcctctgtaattgcggaggttctctttggcatcgtcaacatacatcttccactgttttagtgtgtcactgttggctgggagaagctctcccttgtagtaattgggttgtagaaacacccaatcgaagtagtatgcggcgtggtggttgtatgaatcttttttaaataccctcttcccttctatttctgatttagtagtataatgcatgtaaggtatccatatgaactcaaagccggcttcgtgtatcctgttggccagttcagagatcacggtctcccaggaagctcccactgctttggcctcgaacatcattgggcactcgtaattccagtagaaccctctgaggttgtagtctgaggagattacgaacacatcaatccatcgcttccagtagtccggtccccttggagtgtccgatctgtacttgtagtagggtatctcaacgtagtaaggcatggtcacgttctcgctcagaaattccgagagggtgtatgcatcttctccggggtcaccggtgtagatcatggacttaccctctatgccccaaccggtatcgaggataacaaggctgtcaatccccacttccctcagcttctcctgcacggtgctcatggtggtgtctccgtgatacttcatgaggctcctgaagtctcttccatcccacttaaggtaccacaatccaaacgttctcccgtatcccattttacaacctccagatggtcttcagaattacatacacaaattgaacttataacgttttctattctgattttgcatacacttctaaatagtaagcaaaacttgaaaatgccaagggaagaaaagggctatcccttaacgcccctgttcagctcttccagcttttctctggctttttcaacggagcctgccttctctattgcggtccccgtgacaataatatcggctccagcctttacggcagccctcgcctgctcctccgttctgataccgccgcccactatcagtggaacatcaataacgcgcttcacaaggcctatcatctcgggcggaactggctgaggtgcaccgcttcccgcttcgaggtagacgagtctcatcccgaggtactggccggctaaagcgtaggctgctgctattttcggcttgtgccttgggatgggctttgcgtccccgacccagcccacggtttctcccggctcaatgatcagataggccatcgggatcggctctatgccgtatcgcttgacctgaaaagctcccagcgcctgggctcccgttatgaagaacgggttccgcgagttgagaaggctcatgaagaaaatcgcatcggcgtacttacttatcccgccgtgtgaacccggaaacagaattacgggaaggttcgagctttcctttatggccctaacaacgctgtcgaggacttccccctcggccccagttgagccgccaaccattatcgcatcaacgccaacttcttcgctcatactcgccagctctcctgcaagttcgggggaaacgtcgtctggatcgaggagaacgaagtggagcttttccctttccagcttctcgtggatgtaggtttcgacttttccaagcttgagcatacttacacccccataaactttctgatgtcatcttcacccgtggattcgtcaattaagagacagtgcacgccaagactatcagcatgggcacacataggtttatcacgggttattagagagtatcccctctcaagggcaagggccaggaaataagtatcaaatccagagggagcctcggcagacgctatggtcttagcggtgtcagataatttctcttcaccaataatctcaaaggagttctcaacggcattcccaagtctcattgcgaatttttggtcgccgcttagtcttttggcaacactaataacttccacaacagcaactctggggactgcgactttcttgtccttagaaagggccagcacaaggcggcacttatcaagaattccccttctctgcttcaattgaggatgattcgaattgtaaaaaaaggctcctataatgacgtttgtatcaataacgaaccctctttctccctctaacatcgtccagcacttcctcgatatctgtgttaacgggaattccctcaacactctccattaagtcccaaattgtttctccaacaataactttaaccttggctcccttggggagattaactttcttgaggggcctaaacttctccccatcatagacggcctcgataactgtccccataggtttccaccttattccaatatttcctcggcacttttaacggttttccagctgaggccaagtctggtaagaactccgactaggattttgtcaggctcctcttcgaagcggtagaggtttgtgctaactctgacgtctccagctccgaagccttccaccggctctccaaacttcgagacctccagcgaaagcctctcctcaagtctttcttcgctcggaattagataggctctcaaaagttccgcctctttgaggaggtagtcaatgtgccagtggagcttcttgtcctctctgaagtgcctttccaccctcttttcgagcgagttcatagcggagccgacgtagacgtagtagcccgcctttaagggaaactccctggctttagtgcggatgactttgtcgttctccaggaggattacgagaaagtaggaacccttcataggtggcagtttgctgcagggtttataaagagttccaccgagtcctaaacaaaggtgttgatcatggtcgaagacaaaaaaagagaggtcaaaaagcgccccgttgatgagttcgcgtggcaggaatacgaccttgaagaatttaaaagaacttttccagcccttgcgagagagcttgaggaggaacctggcctgagcatagacgcctacaggacttccgaggaggaagccctcgaagaggaagagcttgaactccaggacttctccggctacaacccgacgataatcgacttcctgaggcggtgcgaaaccgacgatgaggctctggagataatcaactggatggaggaaagaggcgagataacccacgagatggcgaaggagcttaggatagtcctggccaaaaagggagtaagggccttcgggccgaaaaaggagtggggctggtacgagagacacggcaggcattgagatatcttgttcttcctgttttctatgggattgtcagcgcccgcaaccctttaaaaggcattttcccagtcctgcccggtggtgagaatgccaaggatagcggtcatcgattacgacaagtgcaatccggataagtgcggtcacttcctctgtgagagagtctgccccgtgaacaggatgggcggagaggctatcataatagacgaggagaactaccgcccgataattcaggaggcgagctgtacgggctgtggaatctgcgttcacaagtgcccgttcaacgcgataacgatagtgaaccttccggaggagcttgaggaaggctgcgtccaccgctacggaataaacgccttcgtcctctaccgcttaccggtagtcaaggagggtatggtcgtcggtgtcctcggtccaaacggaaccggtaagacgacggccgttaaaatactctcgggccagctcattccgaacctctgcggaaacaacgataactgggacaacgtcataaaggcattccgcggcaacgagctccagaactactttgagaagctcaagaagggcgagataagacctatagtcaagccgcagtacgttgacctcatcccaaaggccgtgaagggcaaagttagagacctgctcaagaaggctgacgagaccggaaagttcgacgaagtcgtcaaggagcttgagcttgagaatatcttggatagggaaatccagcagttatcgggtggtgaactgcagagggttgcgatagcagcggcccttctcaggaatgcccacttctacttcttcgatgagccctcaagctacctcgacataaggcagaggctcaggatagcgaagactatcaggaggctcgccgagagtggaaagaacgttctcacagtcgagcacgatttagccctgctcgactacatgagcgacataatccacgtcgtctacggtaaaccgggagcctacggtatcttctcccagcccaaatcaacgagaaacggaataaatgagttccttaggggctacctgagggacgagaacgtccgcttcaggcccttcgagataactttcaccaagacgggtgagagaaaggcccaggagggcgagatactcgtccagtacccgaggctcgtaaaggagtatgaaaacggctccttcaggcttgaggtcgagggaggagagctctacgttggagaagttgttggtatcgtcgggccgaacggtatcggaaagacgaccttcgtgaagatgctcgccggagttgagaaacccacagagggagaagttgactggtcgctcaccgtcagctacaagccccagtacatcaagacggactacgagggaactgtcttcgaccttctgagcaagatagacgcctcgaagctcatgagcaacttctacaagactgaactgctcaacccgctcggtattcccgacctctacgacagacaggtcaacgagctctccggtggcgagttgcagagagtagccataaccgcctgcctgatcagggatgccgacatttacctcatcgacgagccttcagcccatctcgacgtcgagcagaggctggcagtatcaaaggccatccgctcgctcatggccaagaacgagaagacagcgctgatagtcgagcacgacgtcatgatggtggactacctcagcgaccgcctcatagtcttcgagggcgagccaggaaagtacggaagagcactcccgccgatgggcatgagggagggaatgaaccgctttttagccaacatcgggataaccttcaggcgcgaccccgacacaggaaggccgagggccaacaaagagggctcagttaaggacagggagcagaaggagaggggtgagtactactacctctcagcctgaattcactctttttctgccttttattatctccatcttgcgaaacctataaattcccccagacattctccagaaggggatgaaaaatgcttccaccaggaaaactacctcccgaggcccttgagaggctttttaccaaacttggcgcgagcgacccccgggttctgctcggcccgggtaaaggaatagattttggagccgttgacttcggcgagaaagccttagttgcctcaaccgatccgataactggggcggtcgaggacatcggcttctacgcggttcatgtcaacgccaatgacgtcgccgttgcgggagcgaggccaaagtggtttttaatcacgatactcctgcccgaagggtctgacgagagactcccggagaggataatggacgagattgacagagaggcaaagaagctcggtgtagcgattatcgggggccacaccgaagtaacccctggtctggataggccaatagtcattggaacaatgcttggtgaagttgagagggaaaagcttgtcaggcccgatggggcaaagcccggtgacgcgatagtcatgacgaagtgggccgggctggaggggacttcaataatagcccgcgagaagagggaagagctaatcggggtattcgggaaggacctagttgagagggcagcctcgcttatagactacatcagcgtcgttcctgaggcgatcctggcggcggactttggtgtcaacgccatgcacgacccaacggagggaggaatagccaacggcctctacgagatggcggattcagccggtttgggcttcagagtttttcccgacaaaattcctatacgggatgagacgaaggctatctgcaggtactacagcctgaacccactagctctcgtcggttctggttccctccttatagcggtgagcagggaccgtgcaaaggccctcgttgagatactcctttcgagggggataaacgcggccatcatcggtgagttcctagcggaggagaaaagggtcgcagtcgtaaacggggaagaaaggcccttccagaggccagaaacagacgaactttggagaatctttgatgagtagctatcttatctcaacttcaacctcttttacttccccgttttcaagtgtccaggcacgaaactctcctgaaggagtcactatgagccagacgtttcgccacaggttcatgcccctgaggtctttttctgaagggattggcgggcacttaaggtgggagtgaaatactccaacgatttcaagccccttcttttcagcctcgtccagaacctctgcaatttcaaggggatctatctcaaattccaccggtgagttgagcctgtttcgggtcttcctagcttcttccacgattaggacattccctgcttttctgccaaggaggaatccgcaaacttctatggggcttttcttggcaagttcaatgatcctctggacgtcctttcgagtcataaagagcttcataactccaccgccagcttgaggccttcgtcctcttcgatccccctgagaattgtgagtatcttttcttcgggaatctctgtactgctcaggaactttttcacctttttgatttcttcggcctttctcccctctgagcgggcctcaaggtagtctaaaacagccagaaggatgcctttaagcgttctatccccaagagggacgggcttccatccgttttcataaatgtaaagggccttcacaacttccccgccgcttaaggctgaaacaggcaataaagctggccccctcgcctgcaggtagtggaggagggaatctcccgaaaaaccctcggagacaagcgtgctgtacgctgcttccagggctttcaagagggtcgccagcttctcaacctttggcagattctcctttgagagcatggagagcttgagaacggccctctccaggggttcctcctcaaggttcacgacgaagagaaccctgtctttcagcgaagtcccctcggcgaaggccttcagggctatccagactgctccgttgctcagtattccgtatttaacgcccctgctgaagcaataccttgcaagctgtctcagtggttcgtcccgcttcagaatgttaacgccgaggtttttagcctcaaggaacgcaaccgtctcaccgttcagaaagagcgcataatccgctctcccgtcctcggttctctcttccggtcgaacttcctcagggttgttccactcccagccgagggccgtcattatctccccgatgaggtgctgtttgacggcctcctcatttttctcatagagggagcggtgtttgccaatgcgggacattacagtaagcactgcactctcaagccctagcatcatagcccaggctcgtttcatgacctaaaagcttttgtggtctaatgccgtaaaatatacggtgagtgagaatatgtgcaggatactctttgcccgcggtattggacaggaagttgcacccctttttgatgccctgataaaatccgcacaaaacgacccgtaccgggagaagaggaacaagaagacccagcaccccgacggctgggggtacgtccttctgagggaagaaaacgttacccactacagatcggttttaccaatattcaacgatcccaatgctgagaacctgcttaattccctcacggaagaggattcccaagtcgtgctgatggcacacgcccgggccgcttcgcagggtggaaagaccctcttcaacgttcagccgttccagttctccacaagacacggtttctccttctggttcatgcacaacggcgatctggacaaagaagcgctcatctggaaagcggggtttaagggagaagagctagtcaatgcctctgacagctacgtattcgcggcgtatctctccaaaaccatagacaatatcacacccgaagagatttccaggaggttcgtgcttgggctggaaactaccagaaccacgctgaacacgggaacactgtttttactgcccgatggaagctggagcgcgtttataactgcctacatggtgaacaagtatacaaacagcctcgatgactggaactatgccaggctcatagagctcaaagccaatgacctgtacgcagtggcttcgtccacgctggagctgtaccacgaagcccggtggagaactctcaacaacgggactgcgatttcaataagcggggataaaatcgaacgcttctccctgggtgatgcctgtggaccttagggcgcccatacgggtgtatatgactaaaaagctgattggagtgaagcccgacgacacggtgaagagggcaggggaggtaatggtcgagttcgacataggctccctcgtggtcgttgatgaaaacggcgacgtcgtgggcttcctgacaaagggagacatcataaggcggatggtcattcccggcctgccaaacaccactcccgtgaaggagataatgacgaaagacctcgtaaccgtgccctcaacggccccgctgggggaagtcctcgatctgctctcaaagaagggcatcaagcacgtcctcgtggaggaggaaggaaaaatagtgggcatattctcgataagcgacctccttgaggcgagcaggagaaggcttgaaacggccatagccgcggagtgatgggtatgatacggatagcccacataagcgacacccacatcaccaacgagggagcattcaagggctacgccttcgatctcatcgtcgaggagataaacaggggcaacttcgacttcgtcatccacacaggggacatcaccaaccagggcctccgcgaggagtacgagcaggcggcttatcagctcaagaaaatccaaaagccgctcgttgttctgccgggcaaccacgacgttaggaacgtcggttacaagctctttgaggacttcataggacctctcaacggcgtctatgagttcagggacggcgtcgttatctgggtggactcgactattccagatctgagcgatggaaggataggcggccacaagttccgctggcttaaggagagacttgaggagtattccgacaggaggttcaagatcgtcgctgcccaccaccacctcgtcccgcttcccgacactggaagggagagaaacgtcctgttcaacgcgggagatgttttagacctcctcttaaggcacggggttacactatacacctgcggccacaagcacgtgccaaacgtctaccgcgttgaagacctcataatagacaacgcgggatgtacctcatgcaaaaagaccaggaagggtgatgtaaacagctacaacataatagagctctacgacgacggcagggtcagggtgaccataaggcgcgtcacgggggatgagatcacaaaggagcacaagcccgtgaagcccaagatattcgtgccctcgggaaggaggctcttcaggatagtccagatgagcgagagcaacgtctccgacagggtttacttcaggagaaagacccttgagaacgtcgtcaggatgatcaacgagaggctcaggcctgacctggtggtgcacaacggcgacatggtggatgcggggattgaaaggtactatgagagggcctacgagtactacaagctcgttaagccgcagaaaatcctcgttccaggccacaacgacataacttacctaggacacgagctcttccaggagtactttggggagccagaagtccttgaacttggggacatcgtcataattcccgtcctcagcgcgcagtatgagacaccgataggtgtcgtcggaaggatgggccagaagaagctcaggaacacgctcagagaatacgaaggcaagttcagaatagtggtcatgcaccacaatgtcattccagtaccgaagagcagggagataggcttcctggaggatgctggggacgttttgaaggttctgaccgatgagggaacggagctggttcttacgggccacggcggaaacgccttcggggtgaagatagagaacactccaatagtcaatgccggttcagtcagctgggagctccacaggaacccgtttggaaacagctttaacctcgtggacatctacactgatatggtggtcgtctgggaggttcagtccacctggggcagcaggaagctgcttgggatatggaagaggaagaagcactaaactcccatctcttccagctttttcatcatgtccgcaagaatcgtggaaacggtgctttccagttccacgttctcaataacagggattccatgttcccttgcccgctcaacaaggtaatcctggatgcgcattatcctgtccacgtgtttaacgtacttctctgcatccctctgggagtatcgggcacgctcgtagaagtgggctatgaggtagtctttcttgggcaccgcgattacgtacatgaactcgtcttctctcggctcgacgaaacctgggactacatggatgccctctatcagggtgtttaagccctctcttctagccctctcaaggacggcctttattccaactgaaacgtgcttaacctgggtctcaaagccatagatgagcgggtcagagttcttgggggcttttactaccctctctgcaaggaatgaagagacgtggatgtcggggagaagttccttggctattatctttctcataacctctcttatcgtatcggttccgattatgctccgtattccaagcctgaaggccagctcggtcgctatcgtggactttccaactccagtcgctccgcctaggaggacggttagcctgacctttctcctcctcagctcgcgccagaataggtatctctttgcttcttccctaagtcctttttctaggagcttctggtacgttagctcccttatttcctcggttgttaccgacttcttccccttccattcgagctctttctggacttcagtcgcgatggcgtaggctatgcccacgtctatcccagcgagtgttatggagcgggtgagtattccccttgaaaacgggagccttatcttcctctcgctgtcggtcactatgatcatgctctcctccccagaactctttttccaagctctagaactgattttctcaggtctttgccgtctatatttactggttcgttgtcaagatatataacctcgatgcccctctccagcgcccactttgtaaccacatcaacggccgccgccttaagctccaccgccacggcatcgatacctctaaacttctccaggtcttctctcagcttcggcctgttcgaaaggttccctgaagttgcaacgacctctgctccaagcccctcaaggtgctccttggccttgggtagagcgctctgagatgtcattacgaggccgagttttttgcctgagatgttgcccaggggcctcgggcggaacgccgtgaagtgaaggtcggctttcgggtttatttcctccacgatttttctgatttcggctctcttctcagggtttatctcgtccgacattgtgacgattatcaggtctgccagggctatcctgaaggggccgaagtagccccgcaggaaatccgttttctgccttccgccgatgatgaggatgtatgcatcagttctataagctggaaacgttgccccgcttccctcgaggattattaggtcatggggaaggctctcagcgagctcaacacctttgtccacaacgtcaaaaaagggaaagcccgccattccaccgccacatcttcggcaaccgatggtcgtcacccttgaagtcagggcgtcctcaaagtgatccgaggcagcgtgcttaccctctttggccaccttgagaaggaactgaggtgttagctcaattttctcgccctctatgagttcaggctcttcaggcccacctctgcccattgtcacgaccaccgggcgtgcaacctccttaagggttctcgccacaaaaccgctgactgctgttttcccaaccctctttccagtaccgatgattgatatgctcggctttttggtcttctttagcggctttggagtgaacgtaaaatcggctcccctgtaggtaactcccaggagcatgcagagggaggctatcctaaaccggtcttcgtacgttaggacgggttcgtcgcttaagtcaacgacctcttcgacgtcgttttcaaggactgccctctttagcgcatcgagatagttgggggaatgatagaggggaacgccaatcttatcctcaagggcctttaaactccctatcttctcagttccccctaagaaaaccgcacagcagacatccccgagcttatgaattgcccatttggtaacatccgggtagtgttcgccgtctatgagcacaaccctcatccgctcaccgggataagtactccctaatctgatttaatcttttctgggggctcagaagaggaagagttataaaggtcaaaggtgcacagttatcggcctcaaaggccaataaggaggtgttagccatggctgagatgcttgttaagtccaaggtcaaggagttcgttaagagcgtcgaccccgagatgagggtcagcccggagttctacgacgccctcgaggctgaggtcaaggccctcgtcgagaaggccatcaagagggcccaggccgagggtaggaagaccctctacgccaggcacgtttgaattttctgccatctttcagtttttccttacccgattttagcttttgaaagccttgaatgattctgttgtcatcagcttggattttgataagtgcccgtgtgcatctcactattttctcacgataaaatcgctggcctaaaccgataaatttttatatactcatcacactagttgggtacagaaaattgtactacaaaactctgtacccggtggtagcatggacgatttgagaacccagctggaagagctgaaaaaaaggctggaggtgcttgaggagagcattgatcccgttgacgagctaatgctctctataaaggctcgcctcaaaaaacgacttgagggaggggccctacctgggatagacgaggaaaaggccgcgaaaaccctcaaggccctcgctaaccccgacaggataaggatactaaaaatgctggcggaggggccaatgggcttcaaggagatcaaggagaccctgggagtcgagagtccaaccgtttctcaccacctcaagctcctcgtgaagactggaatggtgaagaagggggagaagtacgagctttcgtctaacgggcgtttgtttttgcgcctgcttgagatcatcacggtacttgacgaggtggaggaatgatgtacggatttggctttggtgaagagagaagcttaaggtttaggatcgcagaatacatgaaggccctcgcagcgctcctgataatcgtctggctcttcaaggggccgctgaagcttgaggcctacaacgactacatggtgtacgcgataatcgcgctcatcttcgcctttgagctcctgagcgtcggcaagtggttcggggtaacgataagcggaattgtctttgcgctggccaagggtgctttctggacgagcgtcttcctgttcttcgggaagtggctcggactttcggagacgtttactggcgagaacgccacgataacagcgggcacgatgtttgcctacgcggtcgttctcacaatagcgggtctcctcttatccaagttcgacgagagaaggattgattggaaggttgagaagaaggcctacgagttcaacggagcttccttcggagaggtcaagctcaatggaagcggcaaggcctatcccgtgaagttcgggagaaaacttgtgggttgggtcattgacggagacctaacggtggaagcggaaaccccaataggaaaggtcacaagaaagctcctctctcccgttgcggtatggacttcggaaaagattgccgtaaagaagacttcccctgatcctggcttcgtcaagagggcgaacgagctcatcaacccggaggggctctaccgcgacaagaacaaggcgagcgtcgttgacctcggagtggtgaaggtctacgagggcaacggcttcgagtacgtgaaggtgccctttgtggaagtcatcagcactccagcgggggaggaagtgaaaataggccccatgaggttgcgcgacggccgtgtttggaagcccaggggagagatgctcaccatcagggagctcaccaacggcttccagctcaccagagttggtgaaagactaaccatccagactgaggagtacacgatagaggtttcaggtgacagggtgacctacaggagcggcgatgaagtgctgagcctcggcgagaccgtttccctccgctcgggcgatatctccgtaacggtgggaaggggaagggccaagctgaggattgaggacgttgtaatctcggcccgcgacgggacggtgagaatccgcgttgggggcaagacccacacaattgagagcagagaggcctgcaacctcgtcctgaggaaggcgaaggagatagtggaggagcagggcgttgagatggtggagggcctcggcatagacagggccaaactcaacgcgcgcgttaaggagctcatagacgagctcatgaggtatctggggtgatgggcttggaacctggcccggagagaagggaagaagaatacacggggggcgagaggcccctctttgactttgtttcggaggggtggctgtgagttcgagggcggaaagcactccttaaggcttgtggcccaaaagggaggagttgttaggataagaatgtgtgaaggtgatggccatgatctttgaaaacgtgaagatggttgagatatccgccgtgaacggaaaggcggagatcgagggctgggagaacgaccacgcagaggtaagctacaccctacacggcgaagccgaggtggaagtcgagcagaggggagagaagctcatcatcagggaagagccaaagaagaggttcttcaaccttctcggaaagagcggctgggccgagattaccgtaaaggtgccgaggaaagccaccgttagggcctccaccgtgaacggcgagataatggcaaggaacgtctccttcgagaaggtctccacggtgaacggcaggatagagcttgaaaactgtgaggcgggggaaataagcaacgtgaacgggagggtgagagcctacttagcgctcgcaaaatctctgaaagcgagcagcgtcaacggcccgatcgagcttgagatagaggaacttgagggagacgcgaaaataagcaatgtaaacgggagcattgctcttgccctctcggacttctgtgacgcgagggtaaaggcgagccgcgtgaacggagctataaccttcgagggaattgacccggagaacccggtcatcggcacgggcgagttcgaggtgaaggtcagcacggtaaacgggaacattgttgtgaggaggatttaggtttcttttttgctcacctctgcgcggaaggtagaagggaagtgagcaggcaagagatgctggataagtcggagagagggaggagagaccatgagatttaacagggacttctggctcttcgcggtgggacgctttgtttcccagctcggctgggcggtgcaggatgtagctttgccgctctacgtgctagacaagacccacagcgggagcatgatgacggcgttcatcttagctgagatgattcccgctctgatagtcatgccctttgcgggggttgtgggcgaccgctacaaccgaaagaagttgatggtctggttcgatatcgcgaggggaattctcctcttcggcgttctggcattcaacctgctggaactgcaccagttgatagtcgttcaggtcataatggccgtcatgggcacgttctttggctcggcaacgagtgcgatgtttcccgacttggtagagcctgacgagcttgagagagcaaactcgataactgcatcgatgaacattttggcaaggctaattggccccgccctcggcggcttcatctatgcaataggtggaattagactggccattctcatcaacgcggtcagcttcttcggctcgggtctgtttgaaatcctcataaagtacgagtggaaaacgagggaacttgagagtttctcccaggtagttgaggatctgaaggagggaatctcctacctgctctcgaacaggtatctgagaactctcatgttctttgccctgttcatgatagcctttggacagccctttggggccgttctcatgccctactccttcagggaggttctgaagttctcaagctaccagtttggcctcctggaaagtgctttcatgctcggcgccctcgccgggaacatgctggttggtataaaattcggcagaaaagccgggagatacctcttccacgccctcctcctggatggagtcatgatactcctcttcacgtgggcaataagtccgctatcctccctaaacaaggcgggggcgtttctcttcctggcaacgataaacgtcctctggggggcaatagacggcctttttcaaccgtccccgctaacacgctaacgatacagccgcgcccgtccccgagccgacgctccacgggcggacggcggtgttcctccgcgcccactgggccgcgtctattgactagcactgcatttccagggcacccccctcgcgaccctgactcggcgacgtctcgggcccactccctcgcacagcgtttcccggccctgcaacagttgccctcggcctctggaccgggatggggattgtagttgcctatttctgggcgaggcacagggacgtcttgctggccgacgtgggagctggagacggaaaggagacgaatagaagccaagggattacttgacctcttttagttttccttcccttttctctatggccctagccattatgaagagaaggtcactgagccttgttgaggtagacgagtgcgttctggccgaagccgtagtcgagaacaagcttcgccactcttctctcggccctcctcgctatcgccctgcagacgtcgagcttggcgctggctattgtagagccaggcaggacgaaggacttgagctggacttcttcctcgtatttatggatgaacccctcgagccacttaacatcttcctcgctgaccttcgagtacttgcccttgctggcgagctcagccataaggtcgtagagctgaacctggattctttcgagggtttctgccatctcttcagggacgtagtgctttgcttccccgataaagctgtccagctcgtctatcgtcccgtttgcttccataatcggcgagaactttgccacgcggtcgccggtgaagagacccgtcaaacccttatctccggtttttgttgttatagacattttttcaacaccgcatcatcatacgttgccacgccttttagaatttacctgtcgaattgttccaaaaattgactggaaaggtaggaaaaacttatttatacacccctgccgtttttaactcggtgatccaccaatgaaacggtctgcgctagtgttgatagtgctgttgctcttgagtataatcccagcgtgggcgattaaaccagtgacggcggtgcaggaaacgactagtgcagttatctccgagaaaatatatgcatctgaggacacttggatagacgaagatggttacgttgattccaaaaactatcgcctacgagtaggtgtacactacggaagcgaggagagagcatacctaaagtttgatctctcgacattgcccgaaaacgccatcatagtgcgggcaactctaacccttcacgcctattaccactctggctctaggtcccataacatcactgtctacggagtattggatgactcatggagcgaggacacattaacctggaacaatcaacccacagattatacaggagttctaaactggactattgtcgagcttccaaatggaaacgttgattcaaatgtatcttgggatgtcactgactttgtcaaatctcagttcgaagaagacaaagtcgttagcttttatctccactcaaatctcagcgacttaaacgtgaatgattacatatacttcaactcaaaagagagtagtcacggaaatcatccatgtctcgaaatcgtctatgaagtttcagagccgcctcagattcccgttgtcccaatccaagaaatccagagcaacaccaccgatggagacgcatcagcctacgtaggtcaaaccgtccagaccgagggcgttgttacaacagtcaccagcagaggattcttcatacagaacggtactggcccttggagtgggatctacgtttatacaggatctacccctgatgtttccattggcgacctcgttcaagttacagggaaagtaaacgagcacaagacgaagaatgataataaaggtctcaccgagattgacgtcaacagtatggaagacattgtcaagctcggaaccgcggaagttcctgaccctgttctccttccaacgggcaacgtttcccaggagcggtgggagagcgtcctggtgagagtggaaaacgccatcgtgaccaacaccagtttgggatacggagagtgggaagcggacgacggaagcgggcccgttagaatagacgacatgatatacaagtacgacctaccgaaggtgggggacgttttcaggtacatcgtaggagttgtgtactattcatatggcgacttcaagatagagccgagagacgcggatgacatggctctcgcggttccagagatactgaatctcaacgtgaacccgaagtacgttgatgagagcatgataaacgtaaccgtcaggaacaactacgaccacgacgtttctgtaaccctcaacctgacgatctccgacggcacggccgtgagcaggcaactgaccctcggcccgcagaacaccagcaccgtgagctacgagtggaacccagccaagccagggaagtacacaatcgaggtgaagctgtacgacgattcaggcaggttgctcgactccaagaacacgaccgttgaagtttcctttggtttcggcatagcctcgtacagcgttccggaagtcgtcctggtggaggagccgcagatcctaaacttcacgatagccagcaactactccaccgccaaaaaggccgccttcactgtaaccatgaacggtaccgtcatctaccagaacgacagcctggaggttcccgccggtggtgagattaaggtcgctatcccgtggagcgccccgagatacggcacctacgagatgcacgccgtactgaagatgacgaacagcctgggagagaacgtgacagttaaagagctcacaaagaccatcttcgcccagtacaatgtcacccccgtggctacggaagagatcatcccaactgaggacgcttacagctactactacaacggtacagagttcagctggaaagattaccacccgtacaatgagaagagagagctcgcgattggaaactcctctaaatactccaaacagagagcgtacttcaagttcgagatcccagagctctcaggggataccgagataatctcagcagaatttgaagtctacgtgccctatatcggggacttggatgtacccatggacgtcggcgtttacaaaacaaccacggattggaacgagagcaaaacgccctccgaaccgcccattccagatactctccttgcccatggagaactctcaaagggatgggtttcatggaacataaccgagttcgtccggaacaacactggaaaaactgttgccctactcctcaaactgacggacgagagcatagacaactacgcgtggatttactccaaggagaaccaagacctgaagccccacctcaagattacatacaggatacccctgaatatcgaagaagtcggaaacacgacggttgcggtggtaggaaacgctaccgtggagaagaacgagagcttcttcgtcgttgaggtcggcggaaagaactacaccttcaacgtcaccgcggggaacctcatagttgacaccgagaacatcaaaccagacaccccatcactggtggcctactggaaggccaagatctctggtgttgaaacgaaaacgggagaataccgcgtcaagcagaacctcaaagtcgagagacacgtcatccagacaaacgtaacagttcatctggctatggaagacccctccgtggccgttctcctggtaccctggatgggtgacaccgttagggatgtagtcgtcaccaagggcagccagaacatcaccctcgaagaaaacgacacaaccgacgagctcggatactactacatcacctcagatgcagtcgttgtggttcttaagaaggacccaaccgacgtcaccgtcgttttcgagagctccagcacagttacaaagactctagcatcggaagtcttctacagaatggcactgttctacacctactacctcagaaaccacaacgaagagctcgaagatgcctacgcccagttccagaacctcaccagcgagctagaggctaggggagttgacctgaagaacgtacccgtggatgagataaacagcagaatgcagggataccgtgagagctttgcccggctgccggaaatcaccgatatagtctccaaccagggaggactcggaataatcacggcgttcagggtttcgaggcaggcttttgtcctgtacaagagcttgatggatgagctggcctactggaacaaagtactctcaaacgccctcactgcggctgagaacaaccagagcgttgttataatcccaagaaacgtctccgtactgatagacctttcccacgaccagtactatggcagtaaggtagggataaacgggctggtcagcaggatcacaaaggagttcggctggaacgttgagatgaaccacgagccaatcacgtacgacaagctgaagaactacaacgttgttataatactgaacccaaagatcgacttatccagcgaggaaatcgccgcccttaggaagtacgtcgaagaaggtggggggctgataatagcgggagactggtacaagtacgtgaacccgagcctcaatgagctcctgagcggctacggcatcactctcgagaagactgagctcatggacgacgaccacaacagcggaaagccatactatccgtacgtcggagcgtacaacaggaacactcctataaccaagttcatcccagatggatggatgacctactatcacggcgacactttgacagtagaaggaaacgccgtatgggtcatcaaggcctttgaaacctcctacgccgttgacgccgacggaaacgttgtaaacgaaaagggcagccagcccgtcgtcgccgcggcagtcgaggtcggaaagggaaggatcatcgtctatggctcgagcagggccttcagtgacagctactatggcaagtacatagccagcaattggccattcataaagggcgctctgctctggctcgttggagagatttgaggtttttcttttccttatatttctctcggaggaacgagaattccaagttccgttattatccccctcacgtacttccagggggtaacgtcaaagagaacgtttctaaccctgtggccgttccttgcatagggccgttctaccaattcaacgtccccgctattcagctcaggatggaacttgaagctctccgcggcggcatagaaaggaacaccgttgtcatagcaggccagagccagagggtaggtaccagctttgtttacgactgcaccgtcgcgcgttacgttgtcggcaccaaccagcgccagcgttgcctccttcgaaaacaacccgacttgagcgtcggttatcacctcatagctgatgccaagggctgaaagctcgttcgcaagtgccagaccctcaaaatctggggcactttcagtgaggataactttgaacgagcgccccttcctcttcgcggaggtgaacacttcgagaaccgcggaggaaaaggagtgggttatcacgatgtccccattgtcaatcagctcacttccaatgttgccaatctctttttttgcctcatttataagcctcaaaaactcctcagcccgggattttagaagaccagggtcatcggttattggaatgaacataacaagattgtaaagggatgccatcgttgggttaaccttgggaagttcttccctcatttcttgaagggcgttcttcagctcgttcccttcaagcagatcagccagaagaaggtacgcttctgcccctttctgcgccatccagctggcgccccgaattctctcaaccctcatgtcctcaagaagagaccttatttcaggagggagcatgtaaatccctcagagtgccgatttgtcggggtaaacgaccattccgttttcagttatctcatatgggcgtataacgttgtcaaaaccgcttcccctgaacttggttattttaagcgccctttcaagccgcccttctttctggaagagttcaagctctattactccattgaccaggtactcctcgatgtccgcttgttccccctctgcggtaattagaactgttgttctaagccgcatcatggttttgataaatgagagaaacgccttcctgtactcgagttcatccgaggacgtgaacttgagcatggttatcggatccacaacaaccctggaatagcgctttgtcttaaactgctctttaattgcatcggtgagcttgttgaggttctttgcaaatgactcaaaaaagtcctcgacgaggacgtagtgctcggtggtgggagtggcatctatcagcgtgaagttctcattgtaaacgtcgaagcccatcctgctgaaatcctgctttatgttctcccccggctcctcaagggtaatgtagagaacgctttctccattggaaatcccggccatggcaaaatgcatcgcaagggttgtcttgccagttccaggtgccccctttaccaaatacgtcctgcctggaatcaatccgccattgagcattatatccagccctggtatccccgtggatatcctggcagttatcattgtatactcccactggagtatttagttagtcaattataagaacttttcggagttactccaattacacaagtctgccctcgaaccagtgctcaccgcaggatatacataaatatgcatgttaatagccaggattaataacccaccgtaattcttttaacgcgaagtccttataaggtgagggattaaccgcgagaggtggttaaaatggtcaggtacatggttacatctgcgttgccttacgctaacgggccgattcacgctggacatctagctggagcgtacctgccggctgacatcttcgtgcgctatctccgcctaaagggcgaggaagttctcttcatctgcggaacggacgaacacggaacgccgataacattccgcgcgctcaaggaagggagaagcccgagggagatcgtcgacgaattccacgagcacataaagaccaccttcgagagggcaaagataagcttcgacttcttcggcagaacggagcttcccgtccactacaggctgagtcaggagttcttcctcaaggcccttgagaacggccaccttgtcaaaaaggtcaccaagcaggcctactgcgagcatgacaagatgttcctcccggacaggtacgtcatcggcacctgcccctactgcggcgccgaaaaccagaggggagaccagtgtgaggtctgcgggcacccgctaacgcccgaaatcctcatcaacccgcgctgcaatatctgtggcaacccaataaccttcaaggattcagcgcactactacatccgcatgcaggacttcgaggaaaggcttaagaagtgggttgaaagccaggagcactggaagcccaatgttagaaacaccgtcctcggctggataaacgaggggcttgaggagagagctataacgcgcgacctcgactggggtattcccgttcctctggatgatgaggacgtgaagggaaaggtcctctacgtctggttcgaggctccgataggatacatcagcataaccatcgagcacctaaagagggaaggaaaggagaacgagtggaagaagttctggctcaacctcgacggcgaaacaaaggtcattcacttcatcggcaaggacaacatcccgttccacgcgatattctggcccgccttcctaatggcctacggcaagtacagagatgaggaagtcgaggccgagtggaacctgccctacgacatccccgcgaacgagtacctcaaccttgagggcaagaagttctcaacgagcaggaactgggcgatatgggttcacgagttcctcgacgtctggcccgctgactacctgaggtactacctcaccgccataatgcccgagacgagggacagcgacttctcctttgaggacttcaagaagaagatcaacgaggagcttgtgaacaacctcggtaacttcgttcacagggccatgaccttcgttaacaggtactttgacggcgtcgtcccggagagaggagagctgaacgacctcgacaggcaagccctcgaagagatagagaaagccttcaaggagactggagagctaatctccaactaccgcttcaaagacgctttaaagagggtcatggagctggccatattcggaaaccgctacttcgactaccagaagccgtggaagaccgctaaggagaaccgcgagaggacggcaacgaccgtcaacgtctcgctccagatcgtcaaggcccttggaatactcctcgagccgttcctgccagatgccagcgagaagatatggcacctcctaaacctcgaggaagtcaagaagtggagctttgaagagctcccagccgggcacagggtaaggaaggccttcccgatgttcaggaaggtaactgacggggagataatatacttcatagtgaactacatcggcaggggcaacccggacagcgcgaagattctcctaaacaagtactacaagcaggaagacgtcgttaaggtcacccttgagcgcttcggagagaagaggaaggacgaagctctagcgctccttaagtcaatctacggtgatgagttcaagggcgaaaagcccgaaaaggccggtaaggccgagaaaaaggagaaggttaaggagggtaaaaagatggagtacgtgagttttgacgagttcgccaagctggatttgagggttggaaagataatagaggtcaatgaccacccgaacgcggacaggctctacgttgtcaaggttgaccttggggacgaggtcaggcagctcgtagccgggcttaagaagtattacaagcccgaagagcttctcggccactacgtcgtcatcatagccaacctcgaacccaagaagctccgcggcgtggagagccaggggatgctgctggcagcggacgacggcgagcgcgttgccctgctcatgccggacaaagaggtaaagctcggggcaaggataaggtaaaaaatcagagggtcagctcgacccagttttctcttccctttttgtacacccttacgagtccctgcttctcaagccgctggaacatcctccaggcggttgtctttggtattccaagctcgttcctgacgtcagactgtctggccacgcccccgcggtcgtagatgtagagaagggctttcttttcttcgtcgttgaggttcattgagtcaagctttttctcaagctcctctctgtttattttttgtactatgctagtggtatcatcgctgttttcattgccgcctgtcttgcccttgaaataccacagagcccccactaccacagctaacagcacaacaaggacacctatcaatactaggctcgagctaccacctttgctggaagttgtggaggattcactgacgcctgccgtagttgtggaagaagtactcgattgactttgaggcgttgtctgggtggatgttgatgttgacgtctctgtctcggttggaggaggtaagatataggagacgcttatgtttcctgggggcataactaaatattcgtccgttatttcaactgggatctcgctcaggtcaactataatcgccccctcggggagaactatcttaaccggaacgtccgaactgaaagcaacagtccagacttcccccgatttcgaggtaatggacgcggtatagtaggttatgttagcaactgttgcactgcccattatttcaagagtggatccattgacgttgtagaataggggctcaccgtttttgtcaagaaccagaagggcatcaaccttatcggagaggagcgggacaacgttaacaacagaatagttatcgagggcaacgagttcctcgaccctgacgtacccggttgggtcaactgttacttccagcgaaacaacctcctgggccttcacaaatgaggagattaaaaatagaaacacaaatagggctactgccactcttttcaccttttcatccctcccgaaaaaggtagtaaaaagggattatagtctttacggcctttcagagctgtgggctttgtcgtgtcctctgccagggttgggggtaatcggtggcttccacggcaggttgcccattctcatgttcttcatcagtagtattctaatttccataagttttctgttgatttcgacgaggagctcctggactctctcacgatcgccccgtagggaggcttgttcgagttcccttctgagtgcctttagttcctgtatcttttccgtcaagtttgctatgacgttcctgttctctcttatcctggacatattctcgataacagcctcgtttattcccatcagcttaggcatcagctcgtcgagcgctttgagctgcctgccaacggccttaactgcctgaaccttgaaagtccgcgaagtcaccaggattatctgcctgtggagttccgctctagcctgtaccagttctggaaagtcctcttttagaagggtgaagttgccactcgtcaggtcttcttcaactttctccacaagggttttagtcaggttgtatgccgagacgaactcgggggtaacgttggtgcggttcattatcagctcggcgtacttaagctccctcactgccatctcaagctgcactctcacggcattctggagcttccacatctccattccaggtgaaatctctttttcctcttccccggcagccgcaccttgcttcagcgtcattatgacctctttatagaggtgcatggcctcaatggcgtacctgaccgtttcagtgtgatttcctaacctgtaagcttcccaggccttttccctgagctcgtttgccctgttgtaaaccgagagtgtctcattgctcacgttggatgtgctgatccgttgcgcagtgtagttggcgagcctgtccacgaccttcagcaggccgagagttgagtttgctgtactgttggtctcattgttaacatcatctctgagaacttcactctcaccgctgctggatgttacactgtccgccagtaccacggcgcccgttgatgccagcatgatcataaccataaagagggcaactactttctccttcatatcccatcaccatattcaagtgtgccccataaggttattaggaattcgggagaaacgaggtgtttaaacgtttccaaatgttccagccagcgaaaacaaagatcacaatgctcatcagacttttccatgcttttctagttccctaacaagcaaagcgacgttgcagatgccttctagtatgcttccaaaaccggggttctcaccgaactgggcgaagaggcttccgaaattggggtgccaggcatcaacctgctttctgcccttggccgtaatgatgtagattacccagcctttatcttctagcatctccaccagtttccaggcattggtcatgtctttctcgtcctttacctcaatcccaaattcctcgcggactttttcaaacagctcgttcattttacatcaccccgcctcaaaccaccagagtttgtctaaaggagcattctaaccgccactatcgcaagtagcgcggcaaatcctgctctcagtgaccttgggttgacccttgaaacggtctttgcgccaagtctcgcccccataatcagtcccggggccaaaaagagaacgatgttgggctgaacatgacccaggcgccagtgttcgaaagttccggccagggcagtgaagagcagtgcgagactcgacgttccaaccgcatatttgatcggaatcccgacaagggtgtggaagagcgggacgttcaagatacccccactgacacccaacagtcccgaaaccagtcccgaaaccagcccgaccagggggacgttcctgtactctattttgcccttctccatttcacagtctcctttctttgagcggagcattgcgactgcgagatacaagagaagcactccaaaaacaaccctcaaaagtcgttcagggagatgtgaagaaagataagcgcctaggatagcggaggggatggaaaacatctccttgaggagaacgactcggtaaagaacccttccactcctaaggtgagtgtaagccgaggccagagcacttatggagatgcaggccaggctcgtacctattgccttgtggattggaacgccgaggattaccagggagggcaccaggaggaagcccccaccaacaccgaaaagtccagcgacaaagcctatcacaagccccaggatcaaataagtaatcaaacccacttttctgttaccccccgcgatattttagcactacaaaccccctgtaatccatgaccttaacgaagcccctcctgaggtagtactcgtaggcctcaaggttggggaacgttatgatgtacggatcctttccgaggtttttaagtctctctattgcgaagcccaaaagctttgaaccgtagccctttcccttgtaatcagggtgaaccataaagaactcaatgaggcccgtcttttcgtcctttatctcctcaggtacccaccatacgtctttgccttcaaggttgtaaacgagggcaacggttcccgcgatctttccatcgttatccctgagaacgtagagctcgtcgaattcctttccgagcctgaactcaaggaatggttcataaaccttcttaaagccatcaaaatcgtcgggagaaggcttattttccacccattcaagggccggataggccccatttgttgactggtaaaccctgaagacgaacttcaggagctcgtccttgagggagagcgggtttttgaccctttcaattctcatggtatcacctctgccattttcgcactactttaaaagaggcttttggttcgaagggaaagcttaaatattaggaaaacctaactaatctggtgataaccatgaactatctggagataaaagtgctcgatgagaacggtgaggggaagcccctgaaggacttcgtcctcggaaggtggacggttctctacttctacccaaaggacaacactcccggctgcaccacagaggcaaaggagttcagcgagctcattgaagagtttgaaaagctcggcgtccaagtcatcggtgtctcccgtgattcccccgggagccacaggaagtttagggagaagcataacctcaaggtcaagctcctgagcgacccgaacgcagagctacataaggcactcggagcttggggcaagaagaagaggtatgggaaggagtacgagggggcgataaggagcacattcattctaaatccagaaggagagatcgtctggaagaaaataaacgtgagggcaaaaggacacgcggccaaggttctcgaagaagtcaaaaagctaatagggagtgaggagtaaagtaaggtggtgatatcatgaacgagcttgaagccctagccctggcccttgaggtcgagaagaacgagcttaagttctacctgaagctcgcaagaaaaacaaccgatgagagggccagaaagatgttcctctttctggcgaaggaagaggccgagcactgggacctctttgaggagaagttcgttgagaggctcattgagaagtgcgaactccctcctgtggacaaagagctcgcccaaaagctgatcgtcgaggagcccgagaccctcagcgaggtcgaggcagtgaagatcggcatggaacaggagaagctcacctgggagttctacgagaaggccgcgaaggaggccgaacacgagagcgtcaggagactctttgaagagctggccaaggtggagaagggccactacgagcttctgaaggcccagtacgactctgtcatgcagacgggcatatggatggactaccaggacttcagccttgaggtggactgatctatctttcaacgagcacgttaacgagctttacttcttttcccagcttcctttttagtgcctcaatgatctcggggtcgttaacgtcgatgaccctttcatcctcgatgatgtttatgtggggttccgtgttgatttcaactctcgtttctcccccaacggagaacagctcaacaagaccgagttctttaagggttaggatattggaataaagcgttgagaagctaacggtcggaaaatcctctctaattctctcaagaaggtgttaagcgagggatgctcgcttccaatctcgtttaagacttcaatcagcttcaacctctggggcgtcatcttgtagcccttcttccgaagcatttcaacggctttttccttccacatgtttgggggatatgcccctccagtttataagccttcctaattagaaattatttctaaatagaaaagtttatctggtgaaaccaatgtcagaacacaacagaaggctcgtcgagaaggcaggcatagatgtggagaagcttttggacatgcttctgagggcggccgcggcggagtttacaacatactactattacaccgtcatgagaaatcacgcgaccggtcttgaaggagagaccataaaggagatcgttgaggacgctcgtcttgaggacagaaaccacttcgaggccctcgttccaagaatatacgaactcggcggagaacttccgagagacatcgtgaacttctcgaagatggcctggtgctgcgatgcctaccttcccgaggagccgacgattgagaacgtcctgaaggttcttcttgaggctgagaggtgcgccgttggggtttatacagagatatgcaactatacattcgacaaagacccaagaacctacgacctggctctggcgatcctccacgaggagatagagcacgaggcatggtttgaggagcttttgaccgggaagccgagcggccacttcaggagaagcaagcccggagaaagcccctacgtatccaagttcttgaggtaaagggttattaagtctgagctcgatatttgtgtggtggtaccatgctcgcgaaatacccatttgaactcccgaaggacaggccccttacaaagagggagatagcccaggccctccgctgggcaatcgaggccgaactcgacgccataaacatctacgaacagcttgctgctggaattgaggacgagaaaataaagcatatcttcctcgatgtggcaaacgaggagaaagagcactttggggagttcctcgcggctctcttcgaggttgacgaggagctggccaagtacatgaaagagggcttcaaggaagttgaggaggagaccgggataaaggtcaagctctgaccctgccggtttctcaacgttttttgttttgatttcatattcttgttaaacacgcctatgagactgaaaagaaggccccctccagctacacagacggtcttgctaggatacggggccaaggactccggtacaccaaggtcgaggagatagtcggcaggatagcaattgacaccatcatccacaagcacctcatggaggcccatcctcaacgcccagaaggagcttgagaagcttgctggtgagggtcccattgaggaagttaaagatgttgagctttctccggagcagaaggcccttgtgaagcgcttcgccgagatgcaccttgagatagagaaggacatgatacagacttaccagaagatggccgtgaagatgacccacccgcccttcaagggcctggctgaggccatagtggaaaacgagagggagcaccataggctcctggcggagctgatagctaagtacaaggagtgaatttagcaggacatttatttttctttcagctctttgagtatttcaaactcgccctttaaccgctcgtagtgagaaccttccacggccgcgaggctcaggtagacttttttgagctcttcccttttctcttcctctgcaaggcgctcgtatatcctcttcgccagcagttcactctccattgcaagctggagcacttcaaaaacgtcttcagctctctcaaatttctccaggagcggtgcgacctcgataggtggaatatcgggtggagtgggctcttccccgtaattccggaggaacatctttctgagcgtgtctccgtgctctttagactcctttgagaggcagatgaatgtctcaatgagggattccgaaaggccgagttctcttgccctccggaccagctctctgtacatgtcggcctcatcgtactcccccttgatccagtaggccagaagtgacttctcgtccagctttttaagttcgtgcattattgactcaaggtcgttggggctaaaggctccacccccaatgctaccacctttgggagtttgtttcttctgactttaacttttccgtttccgttcgaagaactgactaacaatgatttaagtcatgagcaagcgttaaataacacaaacgcaaattattggaggtgatcagtgatgtttgaccttgataagccgctcccctacgtgggagtgaagccggttcaggtgataactgcgatagcagtactgatagtgggctacatcgtggcaaagatcgtcgtcagcatgttcaagaagggcctgaagaagacgaagctccctgcgctcgtcgtggagttcctcgcgaggttcctaagtgccctcctctacgtggcagtgatactgctggccgtgagggcgctgggcatcgaagtcggttcagtggttatcggcctgtcggcggtcataggcctgatcttgggcttcggtatgcaggacacgctaacaaacctggcagccggggtctggattgcagccctcagaccgattgacatgggtgaggtcgttgaggtagctggaaaggtaggtaaggtcaacgccgtcggcataatgagcactgaactcttaactcccgacaacgtgctcataacgatccccaacaagctcgtctggggcaacgtaataaccaactacaccaggatgccaactagaagggttgacgtcaacgtcggcgtcgcctacggaacggacctcgacaaggccattaagatcgccatggacctcatgcagaaccacccgaaggttctcaaagacccggctccgacggtggttataactgagctcgcagactcgtcaataaacctccagctcagggcgtgggctaagaccgaagactactggacggttaaaggcgacctcaccaagggcatctacgaggcctacatgaaggagggcatcgagataccgttcccgcagatggacgtccacatcaaggagatgccgaagtaaagctttaattagatttttctctttttgtttattcaaaacttcaaccttgtcgaagtttttaaaagggacattcgtttaagagccacgaaacacaaagagagcacctccaaagaggagaagaacgagaaacctctcagaagaacttcccgaacatgtactgtggaatcgggcactggactatccttctcgaccagaggcagtcggcacagctcggctcgttgccccagcagtctatatcggtcgtcttgacgaagtcgcaagcttcccttaggtcacagtcggtgcaggaggggtacatgtagttcttcatcgtgaagcggaaccatgtgtacttctcgctcgtccagatgtcggctaaactctgctccttgacgttgccgaaggagtaggcgttgaccttcttctccctgccgaagatgtactccttataggtgtggaggaagcggtagcagggagcaacctcaccgtcccacctgacaactgcgacgttgttctcgtcgaagtcgcactgtctctccgtcctgagttcgaactttggtagctttatgtagagaccgttgtgggcgatcttgtacagctcgtccagtatgggcgtcatatcaacgctcccatcatagactatgtcatcgacctgttccggggtgagcgggagcaggttcgagacgagcatggcatcgaccttcatatcgagcagaaacttagccatctcaggaagctgttggtagttctcctttgtaaccacgacctcgacgcctatgctcggcctatgggttccgtactcctcgcggtaccttacgagctttcttattttatccgctgtcacggcggacgttatgtgaccgagggttatggcgttctgggcagttggaaccgtgtccatggagaagtaaattaggtcaaccccaagcttcgcgaactccctcatcatttcatcggtgagaagggtcccgttggtgcttatcccaagggcgaagccgcgcctcttgacttccctgaccatgtccataaagcgtggatgaaccgttggctcaccaatgccgccgaagtaaatcattctaagctcggggaaagcctcagcgtcgtcgagtatcttcaggaagagattccagtccatatctccttcagtgtcctcccagtactgcttgaagcacatctcacacttcaggttgcagcggctggtgatctctacgtagagatacttcatgtcgagcttcggcttaactatgaccttcccgtcccagagggtaaaggtgtactccttgtttggagcgaactttattgccacctcaaccgcctcccgccggcgggaatatgcttacggtgtcgtcttccttcaaaggagtgtcgagaccctgaaggtgctcgatgttctttccgttgacgaggattatgtagccttgttcaagctctttcttgaaccccgggaacattctgtcaagttcattgagaagctctctcaccgtcttcgggccgcttatttcaagctttctctttccagtgaactcgatgagggtcgcgaacagcttaaccagcacgtgaaccaccttaaagcgagttctcaacatagggacataaaagagttattggacaaaaatgtgaaaatgaaatcagaggaactcggcgatgccgagctcttccgctttctcccttgggatccttccgtcctctgtccagccgcgcagcttgtagtagcgcggcagcatctccttaagcctgacgacgtggcccttgttcggcccttcgggcatcggctcctcaaggaacctcttaggcagggtctcgtccttagcagggtctaggcccgccttgaggttgaatagcctttcagcgttccatattctctctccaatcttgaggtaatcctcagtggagaagtcccagccgagagcggcattgagcatgtcgcggtagtcgtccgctccaaggccgaaggtcgtgaagagacagagaccggcggcgtcaatgagcgcactgagatcctggaagaggatgagcattttcaccttctcgtcgcttatgtcgtgcgggtccatcttgtatgggtagccgaggatctcggggcttatcatgtagttcttgatgtggcagccgccgcggttgttggtggcatagccgagaccatgtccttcggctccacgcgggtcgtaggcaggaagctcaagcttcttgacgctcattgagaactccgggtggccgtacatctcagcgaagcggtagcttccctctgccagcttgtcaccgagatccttcctgtaggctatcttctctatgtagtagtgaagaacctcggtgttgccccacctgaagggcggagcgtccccaagctcatcgtccgtgaggtagcccttctcgtagagctccatagccgctgcaagcgttccaccagtcgagatagtgtcaagaccgaactcgtcgcactggtggttggcctctatgatgctcgcgaggtcgtttatgccgaggttggcaccgagcgcccagatgctctcgtactctggcccttccgtcacgccgagggtcgggagcttgttaaccctgccacaaccgatcggacaggcgtagcacggctggttccttatgaggtacttggcagtcatcgcctcaccgctctgctcataggcgtgctcaaagacaccggtctggaagtttctagttggatagaggccgttctcgttgattatgttgaccagaacagccgtaccgtacttcggaagtccgcctccagcaacggggtcattcctaagcttgttgattttctccctcacaaccagcatgaacttctgcttgtccgctattggaacgcgcttgcttccctcaacggcaatggccttgagcttcttgcttcccataacggctccaacgccagccctaccagcggcgcggtggccgtcgttcataatagctgcgaacttaacgaggttctcaccggccgggccgatactcgctatgtggagcttgttgcttccaatctccttctttatcgcagcctcagtctcgctcaccaccttgccccagaggtgggaggcatcgcgtatctcaacgtggtcatccttgatgtaaatgtaaacgggcttctcggactggccctcaacgacgatagcatcccagccagcgaacttaagctccgcaccgaagtatccgccagagttcgccatggttatgaagcccgtctgcgggctcttcgtaacgacgttgtatctgcccccagtgggggcgctcgtaccagttagcgggccaggggttataatcagcttgttctctggcccaagcgggtctgccttcgggtccatctccttcaggaggaggtagatggccagacccctgctcccgagccacttcttggcaagctcttcaccgtactcctcaactttgacctctcctgtggagaggttcacgcgcagaaatcttccccagttgccgtacataaaaacacctcggaacatataagtacatcgaagtatataagagtttaggaaaacacaatttgatactttcttggatgatgtaaaacggattagttatccaaattgccaagagcaaaaatttaaacgagcccctgtgtaacagaaccataatgacagagctcttcaactcaaaactctgcgccatatgcaagggcaggaagctcctctgcgggagaccgacatgtccgatactagagcggttcagggtagcccaaagcgtggagaaaaaactcaacaaaagacatctcttcggctcttctccgccgagcattttcgttggggaacatggctacccaaaggtcaggatagggccgcttgtgccgccgatcgagggcaacacgagccatctggacagcccgctcaagtgggaaaacaaaacgataaaggacatcctctactaccgctcccttctggtgatgggggaaacgagggcagacgtcagcgtcagaaagagcggaagagttttaggcgagattcaagagctggcgatgagcataaggccagtggacagcgaagttatcctgaaaaggaagcccgtcgtcaaggtcgttccgagcgagttcgctccgccgctcgggccgagggcagagctccttgattttgagctaacggagaacccaaagataccgcgcagaactgactacgttgtgggtgacgagctaaaggccgaacaggccataatgaggctctacaactggggctttgacgagtactacatcataaggctcctctccgctggactgcttgggattgacagaaagctggttccaacgagatggagcatcacagcagttcaggacacgatcgggaagaacctgagaagggaaatcctgggctatccagagatcaactcctacgaggtgtacttccacgagttcctcgggaaccgctatgcggtccttttgatgccccaaagctacgcctttgagctccttgaggtctggctgaagggctcgctcttcgggagtgccgaaccccaagtcatccacgactacgaggacttcaggggaatcaaaggttatgccaaggagacgactggagcatactacgcggccaggcttagcgttcttgaacacctgaggaagagaaggaggcaggcgaggataatcgtcttccgcgaggtaacgccagcatactacgcacccgtcggggtgtggcagataagggtgggtgttaaaaaggcccttgagaacccagttggaaggtttgagatactcaacgaggccctagaggccgtgaggaagctcctcgaacacccgcttgagaggtacctccaaaggagctacatcctcggccacctcgcgaagcagaaaactttagaccaatggctgggaaaggttttaacgtgatcacccaaccggatgatgagccttccatcccgccgatcgatgaggagtgcacgtcagtctgacggtggtggaaatgagtgaaagcctctcaaaggttatggtggagataatgaagatcgagaagaagctggaggaaatagaaaagaaactggaagagctaatcgaagacaacgagaggtacggcatcatgaagctttcggaggaatctctgtgggagttccttgagtctgagccagatatttacagcgagaacgacgtaaaggtgaagctcagatgaacttaaaaggcaagtttgtccttgttccatttccttttactaacctaaaggccacaaaacttcggccagcgttggttctttatgagggcaaagaagatgtcgtcgttgccttcgtttcctctcggatagatacgtttgatcctggcaccgatgtaaggatagagacttcccacccccaatttaggggtatcggacttaaagtcccttcaattataaagctaacaaagatcgccacgcttcacaagggtttgttaattggggttctaggtgagttgccggaggatttagttcaagaagtgaactcaaagctgtgctccaatcttaggataggacgtgattaagatggacgagaacattaaagagctcaaaagaatggccgaagaagtgagaaagctgagggaagagcttgagagactcagtaagacccttgaaaagatcgagaaagcacagaaggaggaggaagagtgaggaaaaagctcaccctcataagcctcgacggaaacggagtctacaacctcaagcacatgcccttcctaagcgagctcgccgaaaacggggagtttgcggtcgtcgattcaatattcccaacgctgacagatttagtccacacgagcgtcatgaccggtgtatggccaagggatcacggcgtcgtcgagaacggctactacgacaggatagccgacaggaaggtgaacttctacgaatacgaggtggcttttaatccccataaggtcatcaaagcccccacgatagttgacatcctgaggggaaaaggtgttaggactgcgtcagtttcgggctacacgatgccgcccttcagtggcactgacgttaggatattcccgccattcttcgcgagcaacgagatgtacaggaagcacgggcgggactggaggaaggacgtttgggttctcaactcggcgctctacctctacgaggagtgcaaaccggacctcctgctcgttcacttcgcctcaatagacggaatgcagcacgatcacgggcctctaagcgagggggcgatgaaggccgtcgagacggtagatacggccgtgagaaccctctgggagaggctgaaagatgagtacgtcttcataatcttcgccgaccacgggcaggaagaggtgcacacgtgggtgaacctgaagacataccttaaagagagggggattgacgttctgagagtctcctctggtggaggcgtccacgtctacctcaaagaccccaatcaaagcgaagaagccttcgaagccctcagacgggcgcctggggtcaaggaagttttcttcagggaggagcttccgcacttagacaatccaaacagcggcgagctcatagtttcggcgaagcccggctactggttttgctctcacaggatgtgcagaggggttaaaggagcgagccactgggtaagagggatgcacggctcgatgaacgagcccgtgatgaaggttccgctcgtactctggggctttgagaacgttgaacttgatgaaccgagccttatggacattgcacctacggttctgaagttctttgggattgagaagccgatgaatatggttgggaagagtttgataagatgaaattaacccagtctcgtactttttgctgttagacttttcgatcattttcctgctcaaagcgttaagatgacgtaagatgccataacaattgcattgttgatggtaaactccgactaagggagaagggttatatatcgagtgggccataggctaagttggaggaagcattatggacatttcagaagagattgagaaacatatcaaaatcgcagaggaagactctcctcggcatacctcttactggaaaacggaaagctcagagattccataagcagagcatactattcaatgttccatgctgctaaagccctacttctcctgaaaggaattaacccgcggaagcattctggagttatcaggatgtttggccttcactttgttgatagtggttttattgaaaggccttatgcaaaataccttacctacgcattctcgctcagatcaaaagctgactacgatgtttattacgaaccaactcacgaggaagcggaaaacgtagttgagaccgccgaacgtttcttggagagaattaaaagtgttctggaggagatcaaaaatggacaagaaagcccaggcccttaacgagtttttaaggcttttaaaggaacgatttggaagctcaatagaggaggtctttctattcggttcctatgccaggggagattacgatgaggagagcgacattgatgtcctgatagtcggggaaattgattttgacgaggtgattgagctggtaacggatgtgctcctcagatacggagaactaataagcccagtactcctcaagccggatgaattcaaaaagagaaacgacagctttataaaaacggtaaaagccgaaggtatacctcttgagatttaaccagttccccctccaatatccaagtacggccccctcttcatcctcctgagctggcggaagtaggcatcttcctcaagccactcctctatcagttcatcgagcttcatcgtgagagatgtcggcgttgtcgtcgcgtagataactcccttaaagccgagggacttcatctttcccagcgcttccctgacttcatcgttgcttaaatcgtgcatgaggaagaacttcctctcgtgccagttcccacttcctttgagcgagtccgctttctccactatctccttaagaacccaatcgcggcagtagctcggtatctcgtagacggggacaccgttaaaggtctctctgattaggtttacctcatcctcagagaaccctatcaggaatatcatcttaccaccagtgggactcagttttgagacttaaaaagcgtttggaaatgctaaagccactctatcctcaccttgtcctcgacagtcttaaactcctcatcgcccgttaccaaagtggcgttgtagagctccagcttaccgttctcagcttctttgaacatgtccctgatcttctctgcacccctttcgtgaagaagataggcaaggacagcgtagctgtcgagcactactctccccattttctggcctccagttcccgttcctcctccctcacttccctcatgacatccttgaggggcttgtcaaactttagaatccccataaggtcaacgttctttttcacgggcactataacaatctcatcgccaaagtctagcacctcaacctcgtctcccgggttgatgcccagcttctcgcggatggatttgggtaaaactatctgcccttttgaggaaacttttacagtaaccatcttactttcaccagaatagttttacctctgggccataaaaacatttcccagagcgataggctagatgtagaaaaggcacaaacaaggggagaagagaaagcctccagccctcagcgtgaggactgggcgatcctctcgatctcttccttcttgctgtaggcgaagctcttcgggtccttgttggctgcagctattatttcctcggcgagggcctgggcgtaggtggtcttgttcctgtagcactttatgctggcgccaagggcgatgttcttgagggctatgtcgagcctcctgagcggggagacgtcaacggacatgtggtagcggattccaccgaaggcgatggttgtagtgtcctccctcggggcggagttctcgatggccttgacgagaacctggatcgggttctgcttggttctcctctcgatgatcatgaaggcctccttgacgacctcgtaggccttcatcttcttgctcattatcgagcggtgctcacgcctcatgaagtgaccgccggccttgtagtggctggcaccgctcctcatgaccttgttgatcaggcgctcaacgatgtggacgttggcctttccaaagggcttcttggcgtaccttccgtggctgtgggggagaatcctggcgtcaaggttgatgtagggcttgagtgatggatcttcgacggtaacgtcctcaacgctccacctgcccatgaccttgacttccttcgggatgaagaacctctcggtaagcggcttggccattcacttcacctcctcggcttctccttccttcccttgacgagctccttgagggagaccctgttgaccttgacgaccttgtacctgattcccggaatatcacccatggaaccaccctttggaccaccgatgccctctatgatgacctcgtcgtgctcatcgatgtggttgatagcaccgtcaccgggggtgaaagctgtaacgaccttaccgttcttaatgagctgaaccctgacagccttacgcatagccgagttgggctgcttagcctcgactgctatcttctcaaggacgatacctctggcctgcggagcaccttcaagcgggtcgctcttctccttaaggcggaggactctcctcttgtagcggatgtcgctccagcggaacttctttctcttaagtttgagcttccttccagcgaactctccatacggggccttcttaccagccatgatcatcacctcagattatcacgacatcctcaatgccgtggtgtctctccatcaactccttaacgaggttgatgttctggccgccccttcctatggccctcggcttgtcgcgcgggccgacatcgaggagggcgaccttcttaccatccctcttttcggtgatgtggacctttttaaccttaactccaaggctcttataaatgttcctcaggaactcttcggggttctcggagtgctcgatgagctctatctccttcccgagcatgccctggactctcttgacgttggctcccttcttcccgagggcgaggcccatctcacccttcttgatgacgtatatgagcctgttcctgttcgtgtctatgaggcagtcgagcactgtggctcccgtcatgctctcgaagagtgctatgtacttgatctgatcagtgttgagcttgagtggcatcactccttacccccagcgagggcgagtatcttgctctcgcccggatcgatcacagcgagggccgaaacggtgtgaggcctaccgaggagagttccgagctcgacgctcgtgccctcgaactcgtaaaccggaattccgctgagcttggcgtagtagtagatgtcctccttgatgtccggcctggcgtttcttgccactattatcagcttggccccaccgacctttgccaagtggatggacttcttggcacccataactatcttcccagtgtcctggactttcctcagttcgaaagcgaagtcaaccattcactacacctccctactcccttttcggtctcagggggagactcatggccagcttgacgattcccgtaccgactggcacgggctggcctatgaggacgttctcaaccacaccgttgagaggatccacctctcccctctcagccgcggcaaacaggtgctgggtggttatctcgaaggcggccctagctaagacgctcgccttctcaccaactataccgtgcctaccgattggtcttatgacgccgtcgagcgtcatcatatcggcgacgagcatgatgtgcctgacatcaacctcgagaccctgctcgcgcatcgtgctgacgatttcgtctatgatggcgtttctggcagcctcaatgccgagcacttctgcgatctcccagatattgttggtcctcgtcctcgttgggtcaacgcctggaaccttgaggacctgcttgaagttcgagccctcggtgtatatcacgtactcgtcgccttccttccttatgatggtcttcccaacgccagagagacccttaaggcggtgctttttaaccttttcggcaatctttctcaggtcggagagcttcgttaccttcttgggcctcacgacgagcgtgtacccttcagcttcgaactcagcgctcttgaatgagccagtgagcttccttacaaccttctccatgtcgaggccggccttctccagcctctcggggtcgatctcgaccacgtactccatgttgagtatgtctatcgtctcctccctggccaggttctcaagggtcgttccctcaatcctcctggcgacctcaagggccttgtccctgtcgtagcggtgctcctcgtcaaggtaaacggtcatgatcggcgttgaagggttctttctggcatcaacaatctcgatgattctcgggagaccgagggtaacgttgatctcagcgacacccgcgtagtggaaggtgttgagggtcatctgggtcgaaggctcacctatggactgggccgccaccgttccgacggcctctcctggttctatgagggctttctggtattccctgactgtctcgtctattatcgcctgaatctcgtccttcttgagcttgtacttctcgttatactcgataagcttagcgtagagctcttccttgatgttgtccgggagctctgccttgctgaccatgctcttgatggtcttctctgcgaccatttcactcacctcctcccctcatcttaagcagggttctcacgatgaccctatcaacatcaacggtcttgccctgccagctcttcatcgggtcaacgccgtcctcaccgtacttaaactgaacgatgattcccgttgggtccctcaccgttccgtcgtagtccaccttgaggtcctggagggcgtttatgagcctcctctgcatgtaaccgctctgggcagttctaactgcagtatcaacgagaccttccctaccacccatggcgtggaagaagtactcctgcggtgttagaccgctcttatatgagttcgtgacgaatccccttgccctagcaccgaggtcacctggcttgaagtgagtgagaactcttccgcggtagccgcggtagagacgctttccacgaatggactgctgaccgagcattgccgccatctgggtaatgttgagtatcttacccctagctccggtcttggccatgataaccgcgtggttattcataccgaggtagcgctcggcgaccttaccggcgttgtcacgggcctcggcgaggactgccataatcttgctctcaagggtctcctcaagggttttacctggcagaggctcaagctctcccctcttgtaggcctctatgagtctctggaccttctcctccgcctcgcggataatctcgtgtatcctgtctattgcttcctgcggaaggtcttcgtcgtcaattgcagtggtgaagcccttgtgggttattacccagatggtcagcttggtaacctggtcgaggaactgcctggccctctcgacgccgtactccctgactatgatgtcgaggagctttccatcctcccttccgtaggccttcttgtctaccgctccgctcaggagctttccgttctgaatgtagacgaaaccgtcgtaggcaagctttctcacttcctccgggtcggggatgagcttctcctcgatgagcttttcaagggcctcacacctttcaggctcgtcgcagagcttgttcctgtaccagatcgtcaggtcgtccggaaggaggagagagaatatcgtctttccgctccagagcggctcaccgttctcgtacttgtcaggttcgggcagttcgttaacgtccatgcctgcgaacatgagcatctgctcgacctcatagcgggtgaagtagtgcgccctccctggtgaggaggtagcctccagagatgtggtcctgaattcccgcgatgagcggaccaccgtacctcggggaaatgatgtggttctgaacttccatgagtatcttggcttctgcctgcgcctcctcagtctgcgggacgtggaggttcatctcgtcaccgtcgaagtcagcgttgtacggcggacagactggcaggttgaggcggaaggtcctgtatggcattaccctgacgcggtgggccatgatggacatcctgtggagcgatggctgacggttgaagagaacaacgtcaccgtcctcaaggtgtctctcaacggtccaaccgatgtcgagcttctccgctataagctcgcggttgctctccatcaggcgaattctccttccctcaggatcaataacgtagttggcaccaggatacttctcgggcccgttgagaaccctctgcttgagcttctcgtagttgaactcggtgaccttctcggggacggtgagctccatggcgaccgcgagaggtacgccgacctcgttgatgcttatcatcgggtcgggactgatgactgtacgggcggagaagttgacacgcttaccgctgaggtttccacggaagcgaccctccttacccttgagacgctgggcgagggtcttaagcggccttccgctcttgtgcttcgcaggtggaacgccagaggtctcgttgttgatgtaggtagtgacgtggtactggaggaggtcccagaggtcttcgataatcagctgcggtgctcctgcctcgatgttggacttgaggcggttgttgatacggatgatgtcgacgagcttgtgggtgaggtcgtcctcggcgcggatgccgctttcgagcgtgattgagggcctcatagtaacgggcgggactggaaggacggtgagaaccatccattcgggcctggacttctcggggtggagtccgaggagaggcaggtccttgtcgggtatcttctcgagcctatcgcggacctcactcggcatcatcctgtgcttgtactcgttgccctcctcgtccttcctgagctcccagtagatagtcggcctctcgaacttgatggggaactgcggtgctccacagtgcgggcagaccattctctccttggccttcttgtgaatctccttaatgagcttgtcaacggcccctttcctgtcgcccattacctcgaacttctgcatgtactcctctatctcctcgtcggtgagctttatccttccgcactcgcggcacgtgctctccaggacgcgatggatggtcttggcaaagccgacgtgaataaccggtcttgcgagctcaatgtggccgaagtgacccggacactcacctgcccttgctccacatgtctcacagcggagacctgggtcgatgacgccaaggcgcttgtccatcagtccgccttctatcgggtaaccgtcatcgtcgtaggtatccggaacggttatctcggcggcactcatctttctgatttcctgaggtgagaggataccgaactcaatactcccgatgacctttttcatcgactgcatggctctcacaccctatccttcagcctgagagacggcctaataaccatcgccttcagctcatccagcaacagtttgaaggcgtagctcatctcgaccttgcttatcctctcgtcctcaccacagacagggcagtagacttttcctctgcgcttgtcctctagtgcgaggtgtccacagctctcacagacccagacctctgtcttgtcgctttcctcaaggagacgctcgatgagcagcatggcagcgccgtggccgatgaggacgtcacgctccatctcaccgaacctgagaccgccttccctggcccttccctcggtcggctgcttggtgagaacctgaaccggacccctgcttctcgcgtgcatcttgtccgctaccatgtggtggagcctctggtagtagatgacgccgatgaagatgtccgcctcaagtcttcttccggttatgccgtcgtacataatttctcttccgctgtgcttgaagccgagctcctcaagctccttcctgagcttctcctcaggctctccgatgaaggcagtaccgtcaacgcgcctgcccgttagtgaagctacctttccacctatggcctcaatcagctgtccgacggtcatacggctcgggataccgtgcgggttgacgatgaggtctggaacgattccgctctcggtccagggcatatcctcctgcgggacgatgagacctatgacacccttctgaccgtgccttgatgcgaacttgtcacccagctcaggtatgcggaggtctctcacggtgaccttgaccagcttcgttccgtcgccggtctcggtgactatgaccttgtcaaccacacccttctcgctcggcctgacggtgacgctcgtttccctccttccctggagaaccattgagccgaggctgctctgctcctcaatgaacctcggcggggaggtccttccaacgaggacgtccttgccctcgacctttgactcggggaagatgagaccgtcctcgtcgaggtggcggtagtacttctcgccgagatatccctggatgttcggtgacggaacctcgaagttgtccttctgaccaccgaggtagcgcttctcctcggcctcgtaggttctgaagaaggttgacctcgccagtccgcgctctatcgaggccttgttaatgatgacggcatcctccatgttgtatccgtggtagctgaggacagccaccacgaagttctgaccagcgggcctgtcctcgaatccaacggccttcattatcctcgagttgacgagcggaacctgcgggtagtgcatgaggtgaccgcgggtgtcaactctgatcctgaagttggcccagccgagaccgaggctctgcttggccatacccgctccgtaggtgttacgcggggcggcgttgtgctccggatacgggacgagtgaagcggggataccgaggatggcagcgggcatgagctcgaggtgagtgtgctcctcggtcacttcccagggccaggttgccacgtaggcgttctcctcttcctcagcgtcgaggtactcgatgacgcccattctgatgaggtcgctccaggtaagggtgccgttctttatgccctcaacgtgctccctcgtgagctttggctttccgttctcgacgacgatgaggggtcttctcaccctaccgtcatcgctgtttatgtagacttccttgacttcctcgtcctcgtagagggcaacgttgatgacgtcgcttatctttccagcccttctatcggcccttatcctctcaacaagctttctgccgtcttcaacagttccaataaggacaccgttaaggtaaacgcgatacaggccaggcgcgggccttctctcctctatggggactacgcccatcttcattaggtattccctaacttccctctcgggaattcctgtggttatctgggacatgagggcaaggttcttaacgagaccacagttcggaccttctggagtctctgtcggacagattctaccccagtgggttccgtgaaggtcacgggcctcgaagtgcggctgatccctgctgagcggggaggtaacgcgcctgaggtgtgaaagggttgacatgtagttggtcctgtcgaggagctggctgacacccgtccttccgcccggccaggagccggtagccaatgcgtgttcaatcctctcgctcaggacgtcgggccttatggagttcctgacaaagcgctggatgttctcaaaggtgtacctctcgcccttcctctggtaggtcttggtcatctggtactgcatgtccttgacgagctgaccaaaggcgacgcggaagaggtctttgaggaggtctccagcgagcttgagcctcttgttggcgtagtggtccttatcgtcttcaccgcggagaccaagtgaaagttcgagaaccttgagggccatcatgccgagatagtaggctttggcgcgcctgttttcgggatcaacacccatatgggggagaaggttgttgtctatgatgtgctcggccctcctgagcctgtactccttgggttgtcctgggagggcgagcctgccgatgtagtcaagggcctcctcctgggtgcttatgtcgctcgcgtcctcgaggttgtcaaagagtacctgctgtatcctcgggtcgtcgctgactgcctcgactatctccttatctgtgaggagaccgagggcgcgcatcacatagacgaacttgacaggctttggaacgttgggtatcgtaacgtagagaatgccgtccttctttctttcaacggtaatgagcgctctgtaaccgtgtctgtacgagaagaccttggcaacaaccttgttctgtctctcatccctctcaacgagggtcttgttcggggcgaggtcttcgatagaaactataaccctctcagaaccgttgatgatgaagtatcctccagggtccttcgggtcctcgccgagcttgatgagttcctcgtcgctcaaaccgtagagcctgcaggccttggacttgagcattatcgggagctctccaatcctgacctcgacgggctcctgctcaatcccgttcacgacgggtatcatctcaaggtagagcggggcggaatatgtcaagttccttatcctggcgtccatcgggtagaggggtctcctctggccctgggcctcctggaactcgggctgtcctatgcggatcttcccgaacttgaccttgaagttcggtatgtctggaacgacttccccgaactcgtttacaacatcctgaaggccgtgatcgatgaaagcgttgtacgagtcaagatgctgcctgacgaatcccttctccttccagtaggactccataacaagccagagctcatcaggagttagagtgggctcggttacggtaactcccctgctcataacgtctcaccccaaaatcagtcctccacaacaaggcggtagtagtaataatagcccgccgtgggactctttcttttgatctcaataacgtcgccaggctttgcgccgagagcaacgacggcaggatcagaggcctttatctgcgggagctgggatatccttatcctgtacttcttgagaagctcctctttctcctcttcgctgaggattctatgctcgggaactaacacgtgatcgaatatgttaaactcttttttcgccgccaccgagaattgcccccttaacgttttttacagaacgattcactaccccccacctgagacttcctatatataagcttttcgagtggtatctggatgaaagaggtttatatcggttgcgcaaagtttaagaacccttgtgaggccgttttgagtcccatgatggactaaagtgtacataagggaagatataaagggaagaaatcactcgagggcagcgaggagcttctcaaggaacatcttctcgggataagctccctcaaactgaaccttgtcctcgccgtccacctgaatgactatcttcgggacggccatgacgctgtactggtcggcccactcggggtactctatcgcctcgaccatgtcgccgagtatcttgccctttccggcaagggtgttctcgatggcgaacttgtgggccatcctgaccgcgagcgggcagtacgggcaggtcggagtaacgaagacgagtatcctgacgtccttatcaacaccgtggattgcctccttggtgtccggagcgaggtcggttgtgccgttgctgacgtcaacgatgtcctcaaggaaggctccgaactcgtggccggctggaaggccgaagtacctgacgcccatgtccttgccgtcctgggttatggtggtggcgggagcgcggtcgatcctgtactgctcggccagcttcttgccctcctcagtgtcgaagtcaacgacctcgtagctcagcttgtcggtgagctcggaaagctcctggacgagctgcttgagctggtcgcagtactggcagtgctccttcccgacgaatactatgagcttgaccgggttagtcatctttgagaagaactcctccttaattaccttcttgtcagcatcgctaatgagtcccataccaaacacctccatctaaaggtttataaccagccgtgtgaaaccatcttcagcctggaatccccaggtttgcaacctaaggttgaatgttcactatataaaccttacgtcacagatttgggcaggtgttggccatgtctgaaccagacatcttttacatactggggaacaaggtgaggagagatttactaagccacctcacctgtactgagtgctacttcagctttctcagcaacaagatgagcgtttcctcgacggcagtcgcaaagcaccttaaaatcatggagcgcgaagggattttgaagtcctacgaaaaagaaggcccgtttctcggaccagcgaggaagtactataacatcgatatagccaaaacttacgtcgccacaataacaccaaacatcttctggtaccgcggccttgacctcggcgacgagaggagtggagaagtggaaataaacctcgaccttctgaaggagaatcccgagagccttcttgagatggtagagctgtttatgagggtaaccaaagagcttgagaaagttcttgaagcccttagggctatcgaaagcagaagggacgaactcatgaaaacgataaaggacacttaccttaatgagatcggcgacatgacccagctggcgatcctccactacgttcttctgaatggaagggcgacggtagatgagctctccgacaggctcaacctgaaggagagggaagtcctgcagaaggccgaagagctggacagattcgtaccgttaagaataaaagacggcgtaattgagattgatgaggaaaggctgaaggcgaagctgggtggtgaaaccgatgccggagaagattaaagtggtcgtgaacgaagatagatgctatctctgcggcggttgtgccggtgtctgcccgacactcgcgatagaggtgcactcaacaggctgggagttccttcaagacaagtgcataagctgcaggatatgcatcaacgcctgccccgttggagccctgagcgctaaacccctggaggtgagcgaatgacctggaagtacgacgtcgttgttgtcggttctggtatcgctggccccatagttgccaggaacgtcgctaaagctggtttctccgtccttctcatcgataagaagtgggctataggtactccaaagcagtgcgccgaggcaataagcattaaggtcttcgacaagtacgacatcccctacgacaagcgcttcatcaaccgcgagatttacggtgctaagctctactccccgagcggctacgagctcgaaatgcgctacaaggaagtcagcggagtgatccttgagaggaaggtcttcgacaagatgctagcttattatgcagccaaagcaggcgccgatgttctcgcgaggaccgaggcgctcgatgtcataagaaaggacggcaagatagttggaatcaaagccaagcatgaggacgagccggtcgagatttacgccgatatcatagttgcggccgacggcgttgagagcaccatagcgaggaaagcgggcataaacacctacgctccgccgcatgagttcgactcaggctacgagtacgagatgctcatagagggctttgatccagacttgattcatctctggttcggcaacgaggttgctcccaggggctacgtctgggtcttcccgaaggacgaagacagggccaacgtcggcattggcatcaactcggacaatccaaagacagctaaatactacctcgacaagtggctcgaggaaaacaacattccagcaaagaagctccttgaaataaatgtcggactcatacccgttggaggctttgtcaaagaactcgctaaagataacgtggtcgttgtaggggatgccgctagacaggtaaaccccatgcacggcggcggaatggccgaggcgatggaggctgggacgatagctagcaagtggattgtcaaggccctcgaagaggagaacctctcactcctccagaactacacaaaggagtggtgggagaccgacggaaagcggctcgaaaaggttctcaaggtcaggcgcgttaccgagaagctcacggatgaggacctcgacctcttcatacagatcctcagcggtgcagatgccgagaagatagccagcggagattacgccgaggtcatcaaggccctattgaagcacccgaaggttctgatgagcaagaggaggctcagcctcctcaaggagcttctttaaccagtctgaaccccttcttcttttcctttgagaacactattatttcaaccggctcccccatcgtgagccttccccagggagcgtccaggtgtttcttgtttttgaagcgatagtaaagcccaacatcgcccgaactcaccacttcgaagttctcaacgtccccaatggatgtaatctcctcacagagaccatctttacaggacagtttagagggttcaagcccaagctccatctcaaggtataaaagtctagatagggcctcgattgtcggaggattcatcccgtagatccgcctaacggctttcaagaggagtggaaacttccggtcatcctttgacattccgtagccaagctccctaaggggatcgcgcggaaaaacaccgtgaagagcattacgcagcttgattatcctgttcacccacacctgcatctcctttgggcttccgagcattgaaagccgtctgtcgagggaaaaaccgcgctcgacatccaaatttttcagagtacctaactgaagatcaagatcagggttgctcactaagaggccgttcttcttcagcagggaatacccttcgcgaaagatcttgtaggattcctcaacgacgtcgtccatgtttaatgcgaaagcgtagagactggcatctccgagtccaaggacgaagagtgactggatgtccaggaggaaggctagtgtaacgttgttctcggaaacccgggttttaagttcatttagaacactcttagagttttccagcaacgttctggcagtacgttcctcatctagcatgtttgtaagtagcgcttctccagataaacgttttccctttgaggccacaaaggtttaatgtccaaaattccaaaagtaaagaggtggtaccatgcacggagcactcggtcttggattgctggcaatcgggatagcgggtttaatagccctactcatcgcactggtcatagcgggcttcgttctgtacctcggtacagagctagcagggatcaaaaaagcgagccttgggaaatcaatagtggccgtcgttggcggtggaatcctggcagggatcctgttcataatcccagtgctcggttggatacttgggatagtagcctacatctgggtgataaaggtcgtgtttgacacggattggctgagggctacactggctttcttaatggccataataatcgaagtcatagtgctgtggctcttcaagctcctcctcggaatctccctgctggcggcgctttaattcatttctttttccagtccttgcagttcatatcgaggcatatctcgtactccctgcccttctcacgtatcttaacgactggtgcaccgttgcagcaggtcttttcagtggggataacctgaccgcgctggaggattgggtaagtgacatcgcacttcggccagttggagcagccgacgaacctcttcccagtctttctgttgtagcggatgaccagatcgccgccgcactttgggcacttgcccacgacgaggggcttcctctcggcttttggagtagttccctccccagccttgccgtcagatttttcttcgtcgttggcatctttaaccgcccccgttttctttgcggcctctttgctcgtagttacaccggttccagtgctctcgaggagcattttaccgatatccagctccttttccttgaagacctggagtatctttatcagctgctccttgctctcctcgatgacctggtctttgtccgcttttcctgccattatctcctccatcttctcctcaaaggcacgggtaagctcgacgctgactatatccggtacgttcttttcgagagcctcaacgaccctcatgccgagcggcgtcaccttgatcttcttcttgccctcgatgtagcccctctggtagagagtctcgagaatctgggcgcgagtggcttttgttccaatgccgagatcttccatcttctttatgaccgccgctggagaatatcttgctggaggcttcgtcttctttttctcgcgctttatctggatgacctttacgggttcaccctccttaaaggccgggaggataacctcgtcgaacttgacgtactttccatagaccttcagccagccctctttgagagtccttgcaccgctcaagatgaagcggtggttgttggagtttattaccaccttcatggtttcccttacggctggctccatgaagagcgccaggaagcgcctcactatgaggtcgtagaggttcccctcgtccttggtcagctcgccgggcttcggaagctcgcccgttggatatatcgccgggtgggctgggtcgtccttcttgccctcaaccggcttgaggctttccttacccaaaagctcgtgggcgaagggcttgtactctggtagcttggctagattctggattatcgatcggaagttcaggttcttggggagcttttgggaggaagttcttggataagagcagttgtgaaccacaacgccgttggcaatgaagttgtgatattgatcaactacgaggtcgtacaccttaccgcggtagtggaatttctcaatggatcttataccaagaacgtacacatcgcccattgctattctgcgcagatcagtgtccgtgagatagtccactatccgctggagcttgtcgaggcttattcctctgccgtgtgcggtttggttagacatatcgaactttttccaaagaacgttgctggattttatctttccttcccagcttttgacgttaagaacgctgtagtggtgcgagtacgcttttcttttcctaatggcaacttcctttacgtgttccaaatcctttcttttgatccggaggtgatttttcatcacttcatagaacctccaagcatcgcgggagtataccttaagctcgtaggccatgaagttcccgtttctgtctttcttttcccacagatacgttccgaccccaagaagctgccacatctgtttaacagtatatatggccatgcggtttttggacgtgagaactatctgcggagaatgagatttcttcccaccggttggtttcgttcctatgtggccgtctgcatcgtaataaccggccagaaacgccgccatccactctggcttagccattatctctcctgggatcctgaagatttcggtcttattgccatatggacaaccgagcaattcgaaaagcctcgttagcgacttgctacgaaggattatcatcttgtacttttcgtcaaaggcaaaaggaacttgaagagagttcgctatctctttaacagccttcacggtgtcctcagttctgtcctttgctggtatcgttatcgctcccttctttgcgagatgaccgtctcccgccacgagtccaaagaggtaccagaactcctcgctgaattcaaaggaaataggggtcagtgatgtgctgtaggagaatcccctaaatacttccctcagctcttcgatggatacaacaccctcctccagcaggaacctaactatcggaacgggcatcttgcccctcaggtatttgtaataggtcggctccctaatcctgaagcgccacagaatctcagtttttaaaccggcgtcttttattctgttcctcaggacgccgccaaattctgggtcatagaggatgtaatccttcattgaagtggcattttcaagaaggaagcccaagagcgtcggagattcggttcttggggagtactcgcttctgtttataaaaagaacgacctgatcattctctctcagttcttctgccgggacaaagatcaactggtcatcccggtataccaggacgggatgatccgccgtgaggtatagctccgtcctgtcacttaaggtaaccttgtacatcggctcatccgcatccctttcaaggagtctgtatctggcccttgagagttttaggtcaaagtcaagcgcaaagacctctcctttctctggaagctcctttattctcttaaccccctggggagttggtattagtgaatctggatgcaggcaataacccttttcgtacagcttctgcgcgatgtctagagtcttcttcggggaatagccgaacgcagagtaggcctccctctggagggttccgagatcgaagggaacgggcgggttcctgttctgctgttttacttcaactttctcgacgaaagctggccccttcttggcttcttccactatcttcttggcctcttcctcgtcccacaccttctccttttcatagaccgctgtatactgtcccccgttcttttcgaggagcatcttgatgacccagtagggcttcggctcaaagttctgtatctccttctccctctcgacgaggaactttaaggtcgggccctgaacccttccggtcgagagaaccatccactttccgctcgcgcgctttatggcggaagttaaagccctcgaaaggttaacgccccagtaccagtcgaggacgtggcgggctattccagcatcggccatcccgaagtttatcgtcggctccatgttgtaccaggccttgaggaggtcctttttggttagggcagagaacttcatgcgcttcgcctttgatggatcaacgccgcaggcgtacttcagggccgtgtaacctatcacttcaccctcagtatcataatcacaggcaacgacaaactcatctgcctgcttagcgagggtcgcaagggctttgatgtagtccttcgcgtagctcttccccttttcagcaacatagacggggacccattcgatatcgaaaaccgggtagccgtaggtcttggtttttggagcaagggagaaaaggtgtcccacggctggggcgactataaccttctttccgtcccgcgtgaactcgtaatagctaaccttgccgattgtcttcctcacgggctttccttcagctaaagcataggctatcttcctagcgacgttgggcttctcggctatgatgagcgtgaccataggcctctcagggaattggatgtgaggtataaaaattctccgaatgatttataaccctgcaccatagatgatgaacgatggcgatgatcagcgtcgggggcgttggggtactcttcgaaggggagcttgacgacggttttgaggacggctttcggacaacctttgccaggcgctatcttccggatgttctgcgtggtgatgcacgcccaaacgtaatcatcgaacgcttcaagggcgagaagttcagggtcttcagttctctctacgatgtcaattcaaaggactactacaagctcgaatccgccgtcccgcaggcgtacaaaaacgaggcccccgtgttcttcctcctccaggcaaccgcgagggccggtgcaaggaaaggcaggattttcatcacggattctgtcagtgttataaacgaaaacggaaaagccgttctctttgttgggtatccccacaccggaaagagcacgatttccgccctggccctttctgagggtcttccccttctgagcacagaaaacaccgttgtggacgtaagggacgggaggattttcgtcataggaggcaccgacgtcctagtgtacgacccgaagatagaggagatctatgggataaaggtggaataccaagacaccacgaggagcggatacaggatcgtggacatatcgagctccgagaggaggattgcactgagaaggggcgtggaaatcgagaagataatcgtccttcacgcggcttttggcggtggagacgcgagcttttctccagtgaggggcaggaagatcaaaaagaccctctggtacttctcaacttccctcctcaagggaatggactactacgagccggctccgctctacatgccgatgagcgacgagataaactcgaacctgaacaggctcctcgacctggccgttgaaagctactcgggggcgatgttcgaggcctttggaaaccacagggacgttttcaggaggacactcctcttctattagagaaacccttttattcacacgctcaaagccagaacaggtggtgagggatgataagggtcaaagtcctcggaaggggaatagaaaaggagatagagtggcagaagggggttactgtcgctgacgtgctcagggctgtgggcttcaacaccgagagcgccatagcgagggtgaacggaagggttgccctggaggaagaaaaggtagaggacggtgcttacgtcgaggtaatccccgtcgtctctggcggatgaaaaagggaagggagaaatcactccgccagcctctttctcatgaactcttcgaacctgtccattgccttctccagtatctcaaccggcggaaggaagactatgcggaagtgccagtttccagcccttccgaagcccgaaccgtggacgaagaggacgtgggcctcgtggaggacatcgaggacgaactccttgtcactcttccacttggagcgctcgtcaatgcgtgggaagatatagaacgccccctgcggtttctgggtgctaactcctggtatctccgtcaggcgcttgtagatgtagtccctcctctccttgagctttttcatgtactcttccaggtaatccatcgggccagttagacccgctatggccgcgaactgggccggggtactcgggcatatccttatgcgcatgagcttgtcaacggcttccctgacctcggcaagcttgttttcaggatcaacgtagtagaagtagcccaagcgccagcctgtggcgaagtagaccttggagaggccgttcatgactataacgggaacgtcctttgtgagcgagccgggtgagacgtgctccccctcgtaggtcatgaggtcgtaaatctcgtcgctgatgacgggtatgtcgtactcgccggccagatcaaggatttctttcacggtcttcttctcgtatagcgctccggtggggttgttagggttgataacggctatcgctttagtcctctcgtttatgcgcttcctcatgtcgtcaatgtccggctgccagccgttctcctctattgtatcgtactcattgggtattccgccgtagaacttgacgaggccggtgtaaggcggatagctcggacttggaacgaggatgttgtctccagggtcgaggagtgcaccaaagaggagctgaagtgcctcggtgacggcagttgtgacgcggacgtcatcgggggtgatgtccacgccgttcttcctcttctcacgctggacgacggcctccctcatctcggggagaccttcactcggtccgtagtagttgtggccctcttttatggccctgcagtatgcctccttcatgtgttccggcggctggaagtcgtacttcccggggtcgcctatgttgagtctgattacctcgatgccctttttctcaagctccctcgccgggaggacgacatcccttatggcgtactcaacgcccatcgccctttcggaaggtttgatcatgtgaatcaccacccaccattaagacgtccatcataaaaaccttggcacgattttgggtactctggaatcgaacgtttttcaggaagggttttaaagtgtgggctggactttccatgggcaatgacgagtagcaagcattctgaacccggagatgatgacgtgaacaccctccgagcccttcgataattttattaatggcagtcagtttttcaagaccatgaacatcttcgtatttctgcttggaggtctgttaattggctacatcctgaggagaacaggaaaaagggtgaaagttgacacggccataagcgttgctctcctcctgatgatatttttcctgggcgtaaaaactggaaccgttaaagtcagcgccctgtggctcctcgcttcttccctcgtattcgcggttctaacgattctcggaagtttggtgctggctctgggggtgagaacttgaggtttctctaccttgtgctcgggtctcttgtcctcgggctgctcgtcgggcatttcttcagtccggattttggaaacgcctacgaggttatgctcgatctccttatactcctcataggagtcgatctggggatgagcctcaacgcagaggagctgaaaaaactcggaaagaagtccctcctcctgccgacggagacactcttggggtctcttcttggtggggctgttggagcgttggtgcttggaatagacctgaagtggggactcgcaataggtgcagggtgcgggtggtactcaataaccggcccgctgatagcccagtactcggcaatctacggtgctatcgggtttttgggcaacctgttgagggaaatcctgacgataatcctgtaccctgttgtcataaagtgggtatctccagagaaggccgttgtcatgggcggggcaacgaccatggacacaaccctgccgataataacaaaattcgggggaagggaaacagccttagttgccttcgtccacggcttcatccttacggcggtggttccgttcgtggtgtcgtttatcctgagcctctgaagctcatttctcctccgaatacctcttcaacagcccgtcaacaacaactttgtgctgctcctcgttcttcctcgcgctctccgcaaaggcctgtacgaccgggtgaaccgcgttctgctcaaggattctgtagttctcactcattttctcgcagagggccctgagcttttctagcttgtcccttatctccctgagcttctcgggtggaagcgccacgttatccggaaggttcttgagcagctcttcgagggcgtcctcaggcgggattctgcttccaaggagcccgtagggggcgacctggacggccggaattcccggtatcaggacgagaccgctggacacctggttccccggggcagtttcgggcgtctcgggcacgtcaacgtacccgaactcttcgatcagctcaatggcctctttgtaagccttctcaagtgcctctgcaagcctcctgtggagaatggtgtcaacggtcatcctcagaaggaggactctgagatcagagtactccgggctcttcagggttttgagaagggccttgtattccttttcggccttcttttcgacttccttcacgtttgtgactgcctcggcgagcttcatggtctcacctccttcggctctccagaagactttaataacattttgtatttaaacttttccccgcggaaaaacttttttaaagcctttcccataccgatgcctgcaggcgatcatgcctcatggctcgggggtatccgaaggcaagtaggaacccaccgggcctctctcggaggtgagaggaatgaagtacccgaagcagataaggacgtactgcccgttttgtaagagacacaccattcacaaggtcgagaaggtcaagaagaggccgaggagcgagctgagcgcgggccagaggaggttcaggagaaagctcaagggttacacaggtttcccgaggccgaacccggctggaagggagaagccggtcaaaaagctcgacctcaggttccgctgcaccgtctgcggaaaggcccacaccaggggacagggcttccgtgtgaagaagttcgagctggtggaggtgtgatgcgatggccctcccgaagaacctcattccgatgccgaggagcaggttcctccgcgttaagtgcattgactgcggcaacgagcagatagtcttcagccacccggccactcccgtcaggtgcctggtctgcggtgccaccctcgtcgagccgaccggcggaaagggcatcatcaaggccaaggttctcgaagttcttgagtgattcctttccttttcaccaaacttttaaaacctcttctcgttaatcttctcggagagaaaactttgaggtgattgagatgccaaggaaggctaaagagtacccagaggaaggagagtttgtggttgcaaccgttaagaacattcacccttacggagcctttctcacgcttgacgagtaccctggaaaggagggcttcatgcacataagcgaggtcgctcccacatgggtcaagaacataagggactacctcaaagagggacagaagatagtcgccaaggtcatccgcgttgaccccgagaaaggacacatcgacctgagcctaaagagggttaaccagcagcagaggaaggcgaagcttcaggagtacaagagggctcagaaggcagagaacctgctcaaaatggctgccgaaaagctcggaaaggactttgaaacggcctggagagaggtctgggtcccgcttgaggaagagtacggcgaggtttatgctgcctttgaggacgcggcccagaacggtatggacgtcctcaagggactcatcagcgacgagtggattgaggctctaaagccgataatcgaggcctacgtcgagattccgacggtcacgatagatgcggagtttgagataaccgttccgaagcccaacggcatcgagataatcaaggaggcgctcataaaggcccgcgacagggccaaccaggagaaggacatcgaggtcaagttctcctaccagggcgctccgaggtacaggatcgacatcaccgctccagactactacaaggccgaggaggttctggaagacatagccgaggagatcctccgcgtcatcaaggaagcgggcggagaggcgacgctgataaggaaggagaagaggattaagaaagttaagaagaggggttcctgatgcacttcaggataaggaagtgtcccaactgcgggaggtacacgctgaaggaagtctgcccggtctgtggaagcgagaccaaggtagctcatcccccacgcttctcgccggaagacccgtacggcgagtacaggcggaggctcaagcgtgaactcctcggtattggtaggaggtcttgaagatgaaggaaacgatgatttacctgcttgagaggccccagcttagagatccagtcttcatagagggccttcccgggataggcctcgttggaaagctcgcggctgaccacctcatccaggagcttgaagcagtcaagttcgccgagctatactcaccccacttcatgcaccaggttctcatcaagaagggctcgatagtcgagctgatgaagaacgagttctactactgggttaaccccgacgaggacggcagagacctcatcataataaccggcgaccagcaggttccaccaacagacagccccgggcactatgaggtcgttggaaagatgctcgacctcgttcaggagctcggcgtcagggaaataataaccatgggcggctaccaggtgcctgagctccagggcgaaccgagggttctggcggcggtaactcatgaagagctcgtcgagtactacaagaagaagcttgagggctgttcggtcgaggtcatctggagggaggacgagggtggagcgatcgtaggagcggcgggccttctcctcggcatgggcaagcttcgctcaatgtacggggtaagcctcctcggtgagagcctcggctacatagttgaccccaaggccgccaaggcagtcctgagcgcagtaaccaagatactcggcatcgaggttgacatgaccgccctcgaagagcgcgccaaggagacggaggagatactccagaaagttcaggagatgcagagggcgatgctggagcagggaatgccccagtcaacgcaggaagaggaggacaggggctacctctgaactccgcctcttctgttttcccaaattcttgctttttccttggtgtttacaccagtttcaaaccttaggttggtaatacgcggttttaaaaacgcttttatttgatgctactttttttgataatgatagcacgattagaataggaggtgtcccagttgcacattcctgacggactgttaagcacgcccgtgatagtggtgacgtacgcgataacgatactggctgttgcgtactcttccagaaagctgaaggaggttccagaagagaaaatccctctcctcgggctcttcgcggccggcatattcgcggcgcagatggttaacttcccgataatcggcggggtcagcggacatctgctcggtgcaacgctggtagcggttctcctcggctcctacgcggcagtgattgtcatgacatcagtcctcctcatccagactctcctcttcggcgacggcggaataaccgcgataggtgccaacatcctcaacatgggactcatcggggccttcatcggctactgggtttacagcaggctcaagagcatccacgagggctttgcgatgggactcgccgcctggctctccgttgtgctcggtgcggcgctggcttcagttgagataggcctcagccacagcctccccttcacgaaggttctttccttgatggtcggctaccacgccctcatcgggattggtgaggccgttctaacggttctgatagtttattcaatcaaggcgaggcttcccgagatagagggggtgcctgcatgaaggccgtgataaagggtctaatgataatagccgttgtgctggccatcgtccttccccttgcatcgagcaaccctgacggccttgaggcaacgatggagaaggtcggactcgaagagaagcccatctatgaggcaccgctcgactacggcgaaacgtgggggcagagcttcgcgatgggactcctcggaatagccctaacctttggagtggcctacgcgctgagcagagccctgaagggtgtctgaggtgtacctgccctttatttttctctacgcttttggggtcgtaacgaggaagagcctgggcgagttagtctacttcttcctgcttttcgcggcggtcgtcgtagcattccgcccggagaaaagcactctcaaaaagctcactttcctcctcggctttgagggatttcttttccttctcgcgctcttcaaccctggagagactattttgagcactccatttggggatgtgacgagagaaggactgaactcgttcttcctccttctggggaaggcctttctctcggctggtacagctctgatcgtcgttgaatcggtgggttttacgaggattctagccgaaatggaggccctgagggtcccaagggttctcatcctcacactcgccttcacctaccgctacctcgacctcttcgttgaggaaactaccaggatgaagcgggccctcgattccagagccttcggtgtgggaagggccgaatactacaggaagctcgcttctctctttggagaggtcttcgtgagggcctacctgaggagtggaagggtttacagggccatgctcgcgaggggctttggagagtttccggtttttgaggagccgaggccaacacccggaacggtcgtcctgatggcactcgccgcagggggactgatactgtgattgagatcaaaggccttcacttctcatacggcgggagagaagtcctgaggggcgtgaacctgaggatcaagaaaggcgaagcctttggcctccttgggccgaacggggcagggaagagcaccctcatcctgcacctcaacggactgctaaagccgaagaagggtgaagtgattataaacgggatcaacccagttaaaaagcccgggaaagcaaggaagattgttgggctcgtcttccaagatccaaacgaccagctcttctctccaacggtgttcgaggacgttgccttcggcccatacaatctcggtctgaggggtaaagagctcagaaagcgtgttgaagaggctctcgggagagttgggatgctcgactacatcaaccgggagacgaaggcgcttagcttcggcgaaaagaagaggatagcgatagcaactgttttggctatggaacctgaagtaatcgtctttgacgagcccttcgcgaacctcgactttaagggcaagaaggcagtcagggagattatactcgggctgaagcgggaggggaagacagtcatcctcgcaagccacgaggcagaatacctcttcctctgcgacaggatagcgctgatggacgggggtaaaatcgtgaaagttggttctcctgaagaagtgctcggaaaccctgaacttcttagggggcacaacctcgacgtaccgccgctcgtggagcttttcctgaggctcggcctgaaggttccgcggagcgtggaagaaggggttgagctgctgaaaatgtggaaggtctccgacttggattgacattttgctgtgaaccaactcctttcttatcctcattaatagccaaaaactttaaaaatacttttgatcttaattattttagtgactcctaatgagaaggattttaaaaatgctcagcatactaatattaacagcactcttgataggaacaggcgtatcggcggaatggatgccaccagacggaggaattagagtagtattgactgacgagaacggaaagatgctgaggggcttttcaggagactatgaaatccaggttcaaattgacgttgccacgccctccggcattaagaccctcggccactaccggatcaagcgctctgggttctggaagttcgacacgacgaggagtgtcttgaaagttgaggacatccggaagttcctatcgagcataagcgaggagaagcgctacggaatcagggtctcggtatgggtgatagacagagaaaacggccagctctacagggggatcggctcggacttcctctcggcggaagacctgaggggagctaccaagagggtatcggttgagctcctcgaaaaagaacctctcccaaaacctgctcgcgaaaggtggtactactacgagtggaggcccgcagatgactcctgggaagcagaagaatacgtaaaggttcccatcctcatcattgacaacaggaacggaaagggggagctccaggggtccgtgtctctggaagcatcgtacaagacggagttctcagcgaccatcgcctacgggattgaccttgagaaaaagttcagaagtggagacccagtaaatgtgctatcatcttcagtagacatatacggaaagaggtgggttcctgttgagggcaactattactttggagatatagtagacgttcccaagggaaggatgggttatatctacatctgggccaaaccctactacagacacgaaaaggagtacctctgcgagggagcaaaatgcagtgaaaccggtagggagaggatagacgtcggtatctacgatgtgaaagctagtaagggagttcatggatacataatagatggcggtgcatctattggaagtcccggtttcgactggacattcttcaaatttaccaaggagggcatattacatccacttgaggagaacaaaggaataactctgaaataccttttgaagggcaccagtggggactgcggcgtcaaatttggaatcggaatccctgtgggagccattgccgttgcgttcggagcaccagctcccgtcgcgggcctcacagcttcactccagtacgagaatgcaggaagcatctccatagatggcacaataaaagaaaatgggcctacaataacgatcaacgccacaaaaagctcccagaagtacaagttcaagacgggatggttcagctcatgctcagcggaaattccgatgggcttctacataaagagcggctgaaagcttttaattttcttttttttttgctggcggaaggaaaaatatagaggatgggagcttcagcccttaagcgcttcttcaagcaacttaatcccaagctcaaggtactcccttgccttttcctcgctcttggcctcgctgaagattctgattatcggctcggttccgcttgccctcacgagaacccagccgtcgtcgaagattatcttagtcccgtcggtggtgtctatcttgtagcctttcttctctgcaagctctgccactttggcaactatagccttcctgtcaccctcaacgtgcctcttcgtcttgaactggtagtactttggcagctcgtctatcagctcgctgaactttttcccgctcttggcaaagatttcaactatcttcgccgttgtcatcgccccgtccctgccgagcacgaagtccgggaagataacgccgccgttctcctcgccgcctatggtgccgttgttttcgaggagagccctggcaacgattaaatcacccacctttgttctcataactttggctccgttcctcttcgctatgtcgtcgaggaggttggaagtcgctatggtcgtaactaaaagcccgccgccgttttccctgaggactgcgtcggctaccagcgcgaacgtcttatcgccctggatgaagcggccgttctcgtcgatgaaaaccgccctgtcagcgtctccatcctgagcaacgccgaagtcagctccaagagctttaacgatctccatgaaacccttgaggttctcctcgttcggttcgggattcctggcagggaagtggccgtctggatgagcattaacggaaacaaccttacagccgagctctctcaatagatagggcagggttagactgccagcgccgttggaggtgtcaacgacgacgaagggtctcctcttctttatcgcctccacatctaccctgttctttatcgcctcgatgtagggcttgattatgtcctccttcctcagctcaccaatctcgttccatttagccctgtggaagtcctcactgaagaacagctcctcaacgatggcttccctttccttcttcaaccccatgccgttcggttcaaggagctttatgccgttgtactcgggcgggttgtgggaggcggttatgaccgctccaccgtcggcattgaagtgattggtggcccactggattgcaggggttggagctatcccaacgtctatgacgtcgcaaccggtactcaaaagtccgctgatgagggcgtccttgagcatttcaccgctcaccctcgtatccctgccgacaacgacgagcggcctttctctaccttccctcttgaggagtgttccaaaggccatgccgattttaagggcgaactctggggttatctcctcgttcgctatccccctaacgccaaacgttccaaagagctttcccattgcaaccacccctatcactgagagtgataaataaattaaaaggttaatcccttccaaagtcgtcgacgaagcggactatgtcgtcctcgccaaggtattccccaatctgagtctctataacctctagaacgacctttccagggttttcaaggcggtgtttgactccagctgggataaaggtgctctcgccggggcggaggagaagctccctatcaccgacgattactttggcagttcccctaacgacgacccagtgctcgctcctgtggtagtgcatctgaagggaaagcttcttgcccggcaggaccgttaggcgctttatcttgtagcggtcgccttcctcaaggactgtgtagcttccccaaggcctgtaggcggttctatgcacgatagccctctcgtcgttcatctctctgagtgccctgtagatctctttgaccttctgcgtctcccccctgtgggcaacgagaagggcatcgccggtgtctataataacaaggtcgctgacgccgaccgttgcggtgagcctctcagtcattatcagattgttcttcgagttcacgccgatgtggtagcccttcttaccacgaatttggactgcgtttccagcatcgtccttttcaaggacttcgtaaatcgcgtcgaagcttccaaggtcgctccacttaacgttgagcggcacgaccgctgccttctcagtcttctccattacaccgtagtctatgcttatctctggggctttctcgtaggcctcctcaatgctcgagctagactcaaaggcctccaagacttcaggcgcgtgcttttcaacttcctcaaggaagagggacgtcgagaacgcgaacatgccgctgttccagtagtatccactttccacgtacctttttgcagtttcgaggtcgggcttctccttgaactcgtcaaccctgtagccgaggagccttccgccttcttcgattctctcaccgggctttatgtagccgtagcccgtgtggggtctgttgggctttattccaaacgtcaccaggaacttatcagcaagcctctcagcgttctcgaaggctctttcgtaggcttcacctgtctctatcaggtggtcgctcggaagaacggcaacctttgaaggtccaaacttctcctcaatcttaagaaccgcccagactatagcggggagggtgtttttaccgacgggttcaagcagaatgttgtccgcgggcaactctatcctaatctccctgaggtcgtccataaccctgaagcggtagtccttgttggtcacaacgaatatctccgatggctttgagaaaagcagtgccctctcaactgttttttggaagaggctctcatcgtcgaggaagcggacgaactgcttcggcatcagctccctgctgagcggccagagcctcgtccccttcccacccgcgaggagtacagtcttcatgattcccaccggagcaagttgacagcacttcttataactcttaaggataaagaaaggggttaacgaagagcgaactcgcccacaaaggccgagcttgatattgtgtccccaattccaacggtgctcttcggcttggcgacgatcttcgtcggaatgaatgcaagctggtagccgttaacctccgcaataccgttctccatgccgtactctttagtgagggcctcttcaacgccctttgccttctcgttcacagggacgtccatcgccttcacgacgtcgtctatgttcctgacgtcgcccagtttggccttcgcagccgccgctaaggccgcgaacaggagagcgtccctcacgaactcgccgcggtagtcggttaaagccaggtagtatccgtaggtgtggaagtgtattctccttactcccgtcttctcggcgagcttaagcatggccttcgtgaccactattgggtcaaccgggtcgtgggcaaggagcttttcagcgagggtcttctcacccatcacgtccattatcgaggccagctcgacttcgttcaggccaacgctccagaacttgccgagaactccaaggatttcctttctcacggtctcgtcgggagtgaaggcgaactcaaggtgggcgggaatgcccttcccctcgaggacgtcaaggtgctcctttatcgtctcgaagggctcgcggtagttcccttcagttagggcctgaagtccgcttattatcgccagctcggtcttttcagctatctccccaaaatgctcctcaaactctggccttataacaacgttggtgttgtagtcgtcggcagagcctatgaatctgttctccctcggcgcctcgaagtcaaaaactctgaacccgcgcgggaactcgtagatgtagtggatgcagttctcttcgtcggccttaaactccttcgggtggacgagtttaagcttcccaccctcaaccttcggcacgtaaatcggcccatccttgaagagttctgcctgaaggcgtgagagctgcggaacgtgggctatgacagggacaccgtaaacaccgccgaggaggttcgccattatgcccacctggccgcccatcctcagctcgtcccagccccagcgcctcatgtaaaagcgcgttgaacagctctcaacgaagagctcagcagctttgcccctcctgatgctccagagaattgagcctagaagttgaggaacgctctctatcctcttggggagcttctctgaataaggaaggacttcttctctgccagctgctccgatcctcctctcaaggtcttccctctcaaggtactttattgcgtcgatgttggtgttgtatgccagaagtacgtttccaaccttgcctatgttgtcgcgaatcctctcaaatgcagaagcgtaaagcccatcccagttcacatgtatcaccaagagtgaaaaaagagataggactaataaggatttcgggctactccttccagcgcgggttgtcgacgaccttgacttccccatcttcctcaatgactatcttcgagaagcccttctctttaatcgagccgtagtcgtggccggcgtctgctgggtatatcgcaaggaagatgaagggctcgtttccggtgttcacagtcctgtgcgcccagtagggcgggacgtagaccacggttccgggccccatcggaatccattccgcttcgccttcaggcgtctggaggagcattccccccttccctttgatgccatagtatatctcggccctgtcgggcttggcgtggaagtggccctttgtgaagaagaactctttaccgaccttgcctggataaagaaccgtggtggcgaagttgaggtcgccctccttctcctcctgctcgattgcgtagacctcatagacaaccgggtcttccttgaggagctcgttgtaggcctcttcatcaaggaaatagcccttgaggtcgctgagcctcctgacgagctttttagcgccgggaatcactccggtctcaaggtcaatatcaagaccaatagggcgcttgtactccatggtatcaccgttaaaaaaagggagtgtgggtatttaacctttagcctctttatcaccctgagtgatatcactctgcaggcctgacctcgatcttcttgccgatgacgagctcggcggccttcacagcggcaccgccgctcccgacggcaatcctgactttatcagcgggaacgtagacaactatcttgtcgtcggcctcttcgatcctgattatctccacgttgagcatcttctcaagcctctccttcatggctggccctccaaaggttcttgacgtttcagaatataaaagtaacgggttcagtctttcctctgttcagaatgcgttctatcccgggcttgtgtcccagacccaccaccgccacaaccttcggacgttgtactcccccagcgagcagtgaatcgactatcatcataaggtttctggccattacctcgttcctctcctccaccaggacgcggtaaaggtacggatacctcctcctgaactccagcatcatccagcggtattcctcaaaagggtcgccgatgtcaacggccttgatgggaaggaagacccccagggattccagcgccatgaggagcttttccctcactggtgcgcgggatatcttggcgagaataagacctatgtcctcgtctatgaggtagagaggtactccaatggcgcgggcggcctctatcgctgccttcatctcctcacccggagccattccgaacgtctcaccgagcttctcctcgaccttggcgaggacgtagtttatcacgccctttcttccgagcctgagggagtcagagagggtcatttctattttctgctgcattccgataaatcgagccctgtcaagttcaacggcaacggcgtgcggtctctcctttaatatcgtcctgaagacctcgtccctgctctttggcgaaacgtgcatcgttcctattattttgacgtaacgtaggtagttcattctctctcctccagaaggtttctaagctcccacgtgcccgatttgaaagttatgacatcgaagtctctcgggactactgccctaactccaaggctttcgcatatcttgagggcttcttcaacgtagtcttcataactgtagcgaaaggccctgtggaacagtgcaagtagcttcaccttagcccttcttgcagtgtcgcaggcctcttcgacggttgagtggtagctgtctcccctgtctccagggttcaggtaagtcgcctcatggatgagcaggtctgctctctcggaaaagagtttcactctctcacagggctccgtgtcgccggtgtaaacaatctttaaacctttccttcttggccctgtcacgtcttcaagccggattatcctgccgttccactctattttgccctccctctcaagctttccaagtatcgggccctcctcaagcccgtactccctcagtttctccttcaggaacttcccccttctgtccttttccttgaagacgtagccgagggcaggaataccgtgctcgaccttgaagctccatatctcgtagtctccaaacttcagcctcgtctctccaagctcgtggacgtggatatcaaagcccggcctgaaaaagccgctgttcaaaaggttctggacaaactggaaggtgtacttcggcccgtagatgtggaggggcttctgcctgtcccacaggttcatagtctggatcaacgcgggaattcctaggtagtggtcgccgtggaagtgggttatgaagattttatccaccttcatcgggctgagctttgccgtgttcatctgtcttatcgtaccttctccggcgtcgaagaggattatctcgcccttgtagcggagagctatggctgggacgtttctttcgcgcgtcggcattatgccgccggtaccgaggaagaagacttcaagcatggtctatagtttcagccaggggttaaaaacctaagccaaagcgttaaatattctgagggctaaccagatatggtgaaaaacatggaagagctgatgaaagccatccaggagaaaaactgtggggaactcaagagggttctctactacagggtggacgacctgagcgatgaacagctcaaagaagtccttgaaaaggccgaggagatcgccaaggagtgcaacgactgggagctatacaagctggtgctctactactaccacgagatactgggaatcgacaagataagcgagttcgagaagctcgcaaaggagaaggatgaattcgagcttaaattccaccttgccgacctgtactacctcataggagagcttgaaaagagcctggagctgttcagggggcttcttgaggaagaggttgccaagggtaacgttgagcacgctgcaaggatatactacagcatggccatgatacacgaggagattcaggagtacgagaaggccctggaactcatcgagaaggcagaggaactgtacgagaagatgggggacgaaagggagcttctcaggctcagaatatacaagggctacgtaaccttcgaggcaggggacacttacaggggcaaagccataatcgcaggtgtcctgccgaagatactcgaagacagagagctcctcgttgaggctcacctgagctttgaggaaatcttcgaggagtacgaagattatgaggcggcactccaggagtgcctgtacgccctggtctatggcaggggcactgactacgaagacatagccttcggggcgcttatggatgtcttgtggcagctcttcctcgacgacgacttcgagacggtttacctgaacatagacatgttcataaatgcgttcccggagtgggcagactttttcgaggcagtcaaggccctggcgctcttcaaggacggcaagatcgaagatgaggaagttaagaaggccatcgagaaagtgaaagacccacgcctcctcgagatgctcgaactgctcggggaagccgagctctgatgttccatttttgccacttaatttttatactcaacttctttttggtcctgcgggaagctcttaaaaaactacagagtagtgaggggcatgaagattcaaggaaagatttgggacttaagcgaggatgggctgggcatactgaggcgggaagagaaacccctctacgttccatttgcatatccttatgattttgtaaaggccagaagagtaaaacgccgctttggaaggagaattgttacggattttgaactcctcgatccttccccactccgccagcgcccgaggtgcagacacttcggattctgcgggggatgcctctggcaggggttgaagtacaaggagcagttgcggctcaaagtcgagctttttgaaaagatcactgggataagtgccgatataaagggctctccaaaagtttggggcttcagaaacgttagcaacttcatcgtttcaacgacaggcattggacttaaaaagtatggaaatcctttcgacgtggaagatctctttgagtgtcccgttttctcagaaaaaacgctagattatctacgtgctctgagaagctttctcgccgagactggcttgaagccctgggatttgaagagaaaaactggagacgttcactacctccaggtgagggaggggaagttcacgagagagataatggtaaacttgatatcccactcccctccttcccccaacacgacggaggcgttcttaggatacttctcattcgcagattctctatactggagcgtcaagaccgataagagagacgacccaaggggtgagccccaactaatcggcggatcgccttacatccacgagagaattggggaagtcacgtaccttattcatcccaacagcttcttccagaccaacagctatgcccttccgcttctcattaaggccgtcgagaattttgcctccggggagatgattttagacctgtacgctggagttgggacgtttggagtgtggctggcaaagagaagattccaggttgaaggcattgaactcaacccgttcgccgttgagatagccaataagaacgccgagattaacaatgttgatgcaaccttcaaagttgggagggcggaggagaccccgatagggaagtacgacacggtggtcgttgatcccccgagaaaggggctaaaggaggtagcggaaaccctcgcgagaagtgagataggaaaagtcgtctacgtctcctgcaacccgaaggccttcaagctagactatgagaaccacctgaagaaggcatacaccatagaggatgcagtattaatagatatgtttccccacacgccgcacgttgaagccgtgataagcttaaaaaggaagcattaatgttccgctctaactcggctttttcctgatatcttgtgctcgtcgttgcccaatggagtcatttcccaagggaaagctccctagcctttacgactattgcagtctcagacagctcaacttcgccccgggttattatcagcgccccatcgtaggtcgtcatggtaagcttgaccttcttgaatccccccgtttcaccgactatgacaaggggcctctccttcagctccagaaacttcttgaatgtttcaggctcgacgaagaccaggacgccaccagctataacgcggtttgcatcaacggtcatcccacggcccataggtctcacccaaactgaatagtatccctacccacagattagcctttcggtaagaaagttttatttacttcggttctaattcaccactggtgggggaagtggagaaaactggatatgtagccctcaaccgagagtggcgggctaaaatggacgagctcagagcaagagcaagagcgaaccttgatgacgtcctccaacgggcttttggctccataaagtccgagaagtcctggcgcgagctggaggctgagctctatgaggagctttctagttgatagtaatgtgttcattgaagcccttaaaggcgatactaccgcagaaaacctcctcacgaagctgtttcactcaaactggcgggttttcataaacgacgttgttttcagcgaggttttttaccattatctccgcattaaggtcggcccttactggaaggccaaaaagaaacccgaactcgttaaatctgccgtgcaggagtttgaggaggttgttctacctctccttgcaatacccgactttcttgaggttaattatgatgtagccactattgccgttaggctgtcttctgagtacagtctgctgcctaacgatgctcttctgcttgccactgcagaatactacggaatagaggccttagtatctcttgattcagatttctcagatgcttgtaacagagaaggcatattactagtgtcatatctaaatgagctggaggtgcagccatgaaatcccgcgtcgtcgagcgcttcaagtttgaggcagcccatgcggtcatcatagatggtcaagcagaggagatacatggtcataccttccggctggaggtcgccgttgaaggcccgcttaagaacggctatgtaatggactttctggagcttcggagaattgtggagaacataataaaggaactcgaccacaaaaacctcaactccctctttaagaacccgacaacagagaacatcgccctctggatagcagaagagattcaggagaaacttcctggaggagtgcagctcaagcgcatagtcctctgggagggcgacgagaacggagtcgagtttgagttctaaacctcattggcttttacttctttaacgctttcaaccattgcaatactgtttttggagccgtttaagtttatttttcctggaattagcgacttgactggaactgccttctccctttcttcggtaggcgtccagcttattaagtccccttcctccacctcaagggttcttatcagcccaacggggccttcgattatgtactgggcggctttcttcggagtgtagagacgccacttctttgcagtcttaaagtccactactctcctggaggagtcaagccagataacgtcgatgtcgctcagcatgaaaaacatgtggattgaagcgtttgcccgcgtttcagctgggaggacgaaaaccagtgcatggttaacgtttttgaccagcataagccccctaaaccgtttgaggaaggtatccgcgagcttaacttttccgtgccatgctttccccttagtctcgttgattatcatgatgatgcgttcaagaccatctttaataagccttaccaaaaaacttttaaataccaaaagttattttaacaatgggtaagaaaaagtttgagggggtgatgggaatggccgaggagaagaagaccagaacccttgagcagattcaggacgagattaggagctacctcggtgagattgagtacctcaggagccaggtcggcgttattgacgctaccataactgacctcaggacggttgacgcgaccctggcctacctcaaggagaagggcaagggcaaagaaatctacatcccgctcggaagcggtgtggcaatcaggggtaagatcgagaatccggacgatgtcatcatggacgttggagcgggaatactcgttggggcaaccgttgacgaggccagggaaaacatcgagaagaggatcaaggccctcatggacctccgcctggccctgctgaggaagattgaggaggacaccaggaaggtcaacgagctcctcaaggagctccaggagatgcagcctgagaagagagagtgactcccatcacccctttttatttggaggtggtttctatggaggccgttagggcctacgaacttcagctagagctccagcagataagaaccctcaggcagagccttgagctgaaaatgaaggagcttgaatacgccgaagggataataacttccctgaaatccgagaggagaatctacagagccttcagcgatcttctggttgagataaccagagatgaagccatagagcacatcgagaggagcaggctcgtctacaagagagagatcgagaagctcaagaaaagggagaaggaaataatggaagagctgtcaaaactcaaagctcccctctcttagccttctctccgagttcaaaccctttgtgaagggccctcaggttgatctgctccgtcccctttggaacggcatcgaggacggccttttctatcgcttccctgctcactatctcagtccaggcagtcaggacgccaagggcgaggatgttcatcgtcaggctcaggccggtggtctcctccgctatctcagtgagcgggagcgccaaaacatcgagattcttctcgaactcaaggtccctgtgcgggacgaggtctttctctacgatgacctttgcaccctctttgacggtgtggagatacttggtgtaggcctcctgggagaagaagaccgcgtagtcggggctgagggtcttggggtagtctatcggctcgtcgctgatgacaacctcggccttgctagcgccaccccttgattctggcccataggcctgggtctggacagcgtagagaccctcataaacagctgctgcccttccgaggatgacgctcgcgaggatgacaccctgacctccaaagccgctgaagaggacttccttcctcattcttcccaccccatcatcttcttggccctctttatgtactcacggtactccctaacgagccccggcctgtccctgtcggcgaactcgccaatgactatcttgccctcaagctcctctggggacattttcttggcctttgccagcgggacggttatcttctggtaccagcggatgagctccggggcggtcttcatcctgttccttcttccgaagctgatcggacatggcgagaggaactccacgagcgtgaagccctccttctggagcgccttctttatgctgtttatgccctggaggtagttgaagaccgtccacctggccacgtagttggccccggcagaaaccgcgagctgggctatgtcaaacgggttctcgaactggccgtagggagctgtcgtccccttgagacccttgagtgccgtcggggcgacctggccgccggtcattccgtaggtgaagttgttgatgaggataacggtgacgtcgaggttcctccttatggcgtggatgaggtggtttccgccgatagctgctgcgtctccgtctcccatgaaggctattatcttgaggtccgggttggtcagctttattcccgttgcgaacgctaaagcccttccgtgagtcgtgtgaaggccgtcgaagttaacaaaacctggaacacgggaggaacagccgataccgctcacccagactatctcgtcctggttcaggccgagatcgtctattgccctgagcgtgaactggaggactgagcctataccacagcctggacagaatatcgtcgggagcatgtcctttctgaggtacttctcacgtatctcgtaagcggacttcaggtacatcatcccaccaccctctcgactatctccattggagtgtgaacctcgccgcctatcttgcttatcagttcgacctcggccttcccattcgctccttccttgacgaggtggtagagctgtcccatgttcatctctggaacgaagattttcttcacctgctcggccagctcctccatcatgtcgaagtcgaagggccatatcgtgttgagcttgagcagtccggccttgatgcccttctcgcggaggattttgacggccctgatggcggatcgggagacgatacctgtagagactatcgcaacatccgcatcgtcgagctcaaacttttcataactgattatgtcgtgcttgttgttctctatcttgccgatgatcctctttatgagcctctcgtggacttccgcatcaacggtcttcggccttccgcgctcgtcgtgggtcagtcccgtgacgtacgtccggtagccctttccgaagatcggcatcggcggaattccatcgccgtgtggatcgccgaagggaagctttgcttcttcctcgttctgcgggagtttgcggtaaacgagttcgatatcgtccgggttcgggatgtaaacgcgctccctcatgtgggccacttccgcgtcggtgagaagaacaaccggagtcctgtacttctcggctaggttgaatgcccttatcgtgaagtcgaaggcctcctggacggtagatggagaaagcactatgagggtgtggtcgccgtgggtgccccagatcgactgcattatgtcgccctgggcggcaagcgttggctgacccgtgctcggtccacccctctggacgtctacgaccacaattggagtctcggtcatcacagcgtagccaatgttctcctgcatgagtgagaaccccggcccggaagtagctgtcatcgccttcgctccggcccaggaggctccgatgatggccgctatgctcgctatctcgtcctccatctgtatgctcacgccgtcaacgagcggcatgtagagggccatcgcctcgaatatctcgctggcgggtgttatcgggtagccagcgtagaagcggcatccggctaagatggccgccctcgctatggcctcatcgccttggataaagtcagcctttccaacgggaaacgggtatctcatttcaatccctcctcataacctgccctgaaggcgcggaggtttatctcctcggttcccttcgggacgcgcctccttatggcctcttcaacgttttcctttttcacaacgcctgtcttcgcaacaaggtaacctaaggccaccatgttgaccgtcagagcaagtcccgtcgtttcctccgcgagcctcgtgaagggagcaccgatgtagtccctatcgggcttaacgaggtcggtgtcgataatgagaaggccgtcctctttgagggagtccttaacggtgtcgtagccgagctggtggagggccaccagaacgtctgcctcggtgaccatcacgtcgtagatgggttctttagagattatcacgtcggctatcgagtggccgcccctgctggccgagctgtagtcctgcgtctgaaggacgttgaggccctcaatagctgctgcttcaccgaggatgacaccggccaggacgacgccctggccgcctataccagcgagtctaatctgcatcgttcttaccctccagataagattttgtgaaagccaaaaactcctcagcatacctcaaaacttctctcgcgtccctttcagtgtactcgacgaaagcatcgtaatcggcagtgtggcgcatgttgagggcttttgagtagcccgtgtaaagcctcgcgggcatttccccggtcttcacgaactcttttccgagctgggcatgaactccagcgtggctcttcggcgttatgcccttggagaggagaagcgctctcgcgcagtagaacataacgtagtaggcgcttgagatggcgaaggcgtagtggcccctctcaaaaagctcccttgaagcagcgagcctctcttcggcttttctgagaagcgccctgatctcatccgcgttcatactgcgattccctccgtttttgccgtgttgtagaggctgtccttcttggaagtgtggggcattatcatgaccgagatcccgagctcgagggtgagctccgcactcagctttcctatctcgtcccagtcctcagcctttatctcatctttgaggacgagaagaacgtcgaggtcgctgtcttctctgtggtcccctctaacccttgaaccgaagatgattacttcctcaaccctgtcaccaaaggcctccctcagccttctgccgatggcctcaaactccatcatcttcacccttaagcccaaagtgctcttgaacttcatctatcagcttgttgagctcgctaacgaactccggcctctccctgttcacgaactccccgatgacgaacttgtcctcaagttcttctggcgacatcttcttcgccttgcttatgggaactgaattcttgaggaaccagcggagcatctcggcgggttccttcatcctgttcctccttccgaactggacgggacactgggagacaacttcaacgagcgagaatcccttaacctgaagggccttctttatgctctcaatgagctggtaaacgtgggccgttgtccagcgggcgacgtaggaggccccagcggcggcaacagtttcgcttatctgaagcgggtgttctatgttgcggtagggagttgtcgtagtctttgcaccgaagggtgtcgttggggcaacctggccaccggtcattccgtatatcatattattaactaagatgaccgttatgtcgatgttcctcctcgcggcgtggatgaggtggttcccgcctatgctggccagatcaccgtccccacttattacgacgaccttcttgtcgggaagtccgaccttaacgccggttgcaaaggctatggcccttccgtgagtagtgtgaagagtgtcggcgaggaaatacggtgaggctatccaggcggaacagccgataccgctgacaacaacgaggtctttcgggtctatcctgagctggtcaacggcgtttgcgaaggcattgaggacggttccacccccacagcctgggcagagggcagtgggaagtgcctcctttctcaagtatttgaccataggatagcgtgagtagatttcctttgccatcaggcaacaccccttatctcgcggagaatctcgttaaccgttagagggactccgcctatcttgttcacgcccttgaggagaacgtcgtcgttgacatacctctgaacctccagtatcatctggccgaggttcatctccgggacgagtacggcccggactttctttccgagcgccctcatccgctcccccgggaacgggtggacggtcttgggtacgaatagcccggctttgattccctcttccctcgcctttagaactgccccgagggccggccttgccgttacaccccagctgacgacgagaatttccgcgtcgtccgtgaagtactcctcgtacttttcatagacgtgcctgttctgctcgatcttcctgtgaagtctcctcacgagcctgtcgtggacttcgggggtgtagacatcacgaaggccattctccttgtgcgttgaacccgtgacgtgggtgaagtagccgtggccgaagaggggcatcggcggaacaccgtcaccgtgcgggtctccaaagggaagcctggcctcttcttcattctgcgggagcttgcggtaggtaatttcaacttcttccacatcgggtatcttgacgagctccctcgtgtgggcgagaacgccgtcgaagagcatgacaactggcgtcctgagcctctcggctatgttgaacgccctgattatctcccagaaggcatcctgcccgctcgtcggcgagagggctattatcggatgatcgccgtgggttccccagcgggcctggaagaagtccccctgcgctcccttggtcgcctgaccggttgatgggccgctcctctggacatcaacgagaactaaaggtgtttcagtcatgaccgcgtatccaaggttctcctgcatgagcgagaagcccgggcctgcggttgccgtcatgaccttgaggcccgtccaggatgcgccgaccatcgccgctatgctccctatctcatcctccatctggagatagtagccaccgagctttggaagctctctcgccatcgtctcggctatctcgcttgagggggttataggatagcctgcgtagaagcggcagccggcgaagatagctccataggcaacggcctcgttgccctgcatgaagtagttgccaggtttgtagagcttcttgatgagcctgatctgctcaggctcgtcgccgcggattatcatgcgtcaccaccttaccgctatggcgaagtccgggcagagcagctcacagagcttgcacttgacgcacttttcagcgttgacgggaacaggataatggacgcccttttcgctcagctccttgctccattcgaagacctttctcgggcacatctcgacgcagattccgcatcccttgcacagaaaagtatcgatgtcaatctcaactattccctcggctttgccgataacgaggtatccttccttttcaacggttgtcttggtttcgacatctgccataatcatcacccgcgatttgctaaccccgtttacgtttgtcaacatttaaagctttcgtgagagaacattaatgtccataaaagatgtactggttgggtttatacaccccaagaaaaagcaagaggacatggagcagaaaagagaagaaaattcatcacgtcaataacaatcgcaggcacataggttcaaagttcctcatgggcccacggtattttgaatcgataagagttgtaaataattactaaatatcataatcatgaaatggaaaatcttatatctactcacaacttattatattacagtagtacattgtgacccaactgagtaaatccacatggttaattccaaagtggaggtgagcaaatgaagccccgctctctcctttatctcttcctcttccccgcatgggagttcctactcatgattttgctcccttcagaatactacgtcggagcttcttgcctccagattcgtcctcatccgatctgtgccttccactttagtccatcagcaactttcgttctcctcgtaacggcgccgttcctaatctcaattatccttggcctctggaaggaatggggtgaacttgtagcatttggaatcccttcgcttgccgttgtactggtaacgctccttctcttagacctcttcgaaaagtcatggattcccccggctggggccggaataacctctgcggtcttgtatagtgttccaggcatgggtataagactgaattactctacaaaaagagtggagagactggtatgggcaaccacatcattcatagtttcgtttatcatttgtgttatggtatggggtggaacatctgtggcggtgtgaagtaggatacagcaccaatataagtcctaataccgatgaaaaagagggatcattttacgatagacaaccataatgtttttaagaaagatgccgtactcacaacatacggaggagagttcaatgagaggaccccatgttgccttcatattgctggttgttatatgggcactgattgctgtggaagtctcccaaccttctgagaaaatccattgtttctccaaggtgccggtgaacgtgagcggcatcaaacctcctattgtcagcggtccgggcttccctccagaggcagggtttaagggaataaccctcgacgaggttgtaaatggaagtccgaggcacgtactcgtcggcttcttcaacttcaagcccttaaactggaccgaaaaaaagccgaagtgctactttaagaggctggagggcttttcagagaactggatcggctttgttctgccaggagcttccacagagagcatcacactctccagtaaggtttatttagccctctatgtatatcccaaggagacctccgtcgtgatctcgaagattgagtatgcggagaatcctgaggattcaaaaatagtggaagcttttcgcctcgaataccccaagaaccccgaggagtacgttgcggagtacctagactctctcgaaaaagccggctacaccaaagttagagagctcaagaagggagcgatctttgagagagatgacgataccctgctcgctctggaaattgaagacgatgctaacttctacttaatactagtgaaggggagtcatgaggacgttttaagagttgcggaaatcctgagtgaggggtgatggattcccatgaagttccgagatttcctcatacatctttccattctcggtttggctaccgtttgggagatttttcttgcctaccagcgctggctggagaaatactacatcagaggcgagagtattaagctctgggacaggatctttacgtgccatatatggtactcgccaactccaatcttcgtcatcctcgttctcctcccggccatagtcatccttgcattgtatgtctatcttaggagccctatcctcaaaaaatctggtttgtcaataggagcgccaatactcacagtggtgctgatgcccattttttctgatgagactactaaatggctgtgggggatcctcatcgtctccatcctgagcggcattgttctcggagagggaaagctggagaaagtcctattggcagtccagggcttcttcccagcgttgatggttctcatgatcataagcacaggacttcacgtcacgtgttgagttttgaaacagagaaagagaagaccaaacatgtcctgagagcttcaccacgtaaccagctgccagtcgaggaggccgttctcgactatgtactcccatctatctctgcattctggcttcaggttctctatatagcttaagtcctgcgtggctgaaaacttctttatggccttgccgatgactctgtcgtagtcggtgaggcagttgtgaggtccgcgcttcgagcctgcaccaacgggatcgctcaggattctcttgttgggaaacttcctcttcgcccagatgagaacctccaccgcgctccagagccagggcgggcggtattccttcttctcccagagcctctcgtagagcgtccccttctggatgtccgttatgttgatggagaaggtgtccgtgtagggttctgccttgattatgctctctttagcgtcctctactccatcgcgctcggagaggaatatcggcttgaggagaaggtaagtcttgaccttggcgccggccttgtgtgttatctcagccgccttcacaaagtcggcaaaggtgttccccttgtttatggaaacgtcagcaacgtcgtcgttggcagtctcaagaccgatggcaacttcaaaatgtttatccgggactatctcggcaagctctttaacggcttcatacctaacaagctcgctcctgctctcgatgacgatctcctcgacgttatccatctccgcaaggatttcgaagatttttctcctcgtttcaggcttaagctcaccgttgtcgaggaatgaacccgaggtaaacattctaaccgcgaacggcccctccgttccctctatcttctcgagggcctccttcacgtagttcactatcgcttcctgagtccactttaccttaggcgcggcagttggataggagcacatgtagcacgcctgacctatacggtagcggtagcatcctatcgtaggcaggattatgaagagcgccgtccccggctttccggccacgttgtcctcgctcgtccagtaagtcattctctcacctgaggcgggcttggaaccagggtttttaaatgtgagggctaatagatgtccttctcaatgacaacgtacgcactcacgaaccttccggacactcctgcggcatgggcttccgactcagcgccttttatggcctccttaactgcttcaactatctgaacgtccgagagcgacttcgacgttctgttgattcccaacgcgaggctgtagttgccaccactgccggttaccttaacccagttcagagttattcccttaatgctggaaagcttggataccaagcttctttccaggagaccggctgattcgctcttttcttctttctttgtcagctccaaaagctcctctgaaagccccgcctcctgaaggatcttctccacttccttctgcagtttatccatgtcaacctttactgaacccttggttgtggagagcggaacttccaagactcttccacccctgaagttcactttcctgcgttggaaccttacgagcgggagcttctttactctctgaatacccagctcggatattgaaaccgtagtcctgaatccaagttccctctcgatgtgctccttgagggagtccgcaatgacttcaggcccaacctcaccaagggagtacccttcaacggcaactctaaggactagcaggttcgtcccagtaaagccctgtctcacacgtccctttccatgaaccacacttaaggccacggattttttctggaagagatgtttaactgcttctattacaccattctcgattggaagagcaaactctgggggaacctcaaggttgatatccagctgaactatcctgggggcttcggaaagagtgtcctgggactgggtttcactctgagcatcgcctggctgagtatcgtttggaagtttcaggtctccgtgtagaaagtcgagggcctctagtttgtctagggagtagatcgagacgtttctaattacctcgggcaactcaaaattggctgatactggctgtccgttcgagaacagcacgggttttatgttctcagagacaacaagaatgaatccactagcactattaacataacttaaaagttcatttttagtcatcagtggtcttgatttcagtagctccacgtatatcaccctcagtgaacattaccaagtgggagtataaaaatgttgcttttctccttctaccacttgggcaagactaaaaaggacaaagagcagatactcaaccatgcgaatcctcgtaacaaacgacgacgggatatattcaaacggcattcgtgctgccgtaaaagcgctctcaagtcttggagaagtctatgtggttgccccgctcttccagagaagcgccagtggaagggccatgactctccacaggcctataagagcaaggctcgtggacgtccctggggcaaaggttgcctacgggatagacggaactcccacggacagcgttatatttgccctggccaggtttggggactttgatttagctgtcagcggtataaaccttggcgagaacctcagcaccgagataacggtttcagggactgcatcggcagctatcgaagcggcaacccatgaggtcccaagtatagctataagccttgaggtagactggaaaaagaccctcggggaaggagagggcattgacttctcagttgcttcacatttccttaaaaggataacaagggcagtacttgagaagggtctcccagagggagtcgacatgcttaacgtcaacgtaccaagcaacgcaactccagagacggaaattgcaataacccgcctagcaaggaagcgctactgtccaacgattgaagaaagggtagatcccagagggcatccctactactggatagttggacagaagagggaagagtttgagcccggaaccgacgcttacgctcttaagatcgagagaaaggtcagcgtaacaccgataaacattgatatgactgccagggtgaatttcgaggaagtaagaaaggtgctgtttgcacaaccgtgaacgttgccaacatatgggggggcccgatggggttaatatggagcatggtcagagcggccaaaaaacttaaaaaccctccctggctcatataagctgggcgtcgaatgccgcggtagcctagcctggtagggcgccggcctgctaagccggtgggcggtgcccaccggggttcaaatccccgccgcggcgccagcttactttcttcgggttcaatgccgggatagcctagaggcgaggcgagggactgcagatccctttcacccgggttcaaatcccggtcccggctccaatcttcttcataaccttttcccacaggaaaacgatataaggttcaggatacaaatcgttagggtggtctaatgtcaatagtaccgagacagaagaaagagctcacaccccttgagaacaccgcactcaagtggatgaacttcgccttcgacctagttgtgatagtcctagccctccttacgatggcatacgttctctacgccatctacgatctggctgaaatcatgctccagggatttgacattgaagaaacccttcatgagttcctgctcgtgatcatactcctagagctgtttgaactcctaaccctctatataaaggagcaccacgtaagtatgcgccgcgttgcagaacttggcgtcgtggcactggttaggaaactcgttattaccatagattacaaagctttgggctgggaactgctgatcggaatggccgccctcatcttcgtcttgggctggatatacgttcaggaaaggcggagaatttccgaggaggaaaagttcatcatcgagcgcggactgaacacgcaataactgcaactcccaacattaaaatcaccgatctggctaatacgatccatattcccgagcccacatctcgtactttttgattaatgcaggcgtaattggactctttattctccgcaatccgtatctaaaatcttccatctcaattgggcgtacagtgagctccttccctactagagatgggataagctgaggctccgaaagttcggggttcatgtcactcagcattttggttatggccagtctggcaaggtttgcgagatcccttcccgagtatctccgtctcacggcttccttagctacggctctcagattagccttaaccctaaagccggataaatgtatcctcagtatttcaaccgcggaactttcgtcggggagcggtacgtataccctaagaggaaacctggaaaggatggcatcatcaagatcccacggccgattcgttgccgcgagggtaacaacacgctcattggtgtctgaacgcttaaaaccgtcaatctcaacgagaaaagtcgaaagaacccttctggcagcatcctcgagggaggagcgcttcatggccagcgcatcgaactcatctataaagactatgctaggacttttctccctggcgaggtggtaaatggaggcaacaagcttggacgactctccgaaatatttactcagaacgtcgctgaccttaacgttcagaaacgtcgccccgaggcttcccgccactgcactcgccagaaggcttttgccagtgccgggtggcccgaacaagagaatacccttccagggttcgaacttcccaggaaccctggcgaggtgaagacctatagtcctcgatagtactttttttgcttcccatagcccacctacatcgtcccaggcaaccctcgatgtctgcacaacgttgggcagattaacggactttctctgggaatatctatggccgttctccagctcccccgctcttttctcccattgcttggccatctccaggtagtagtcggagaactccaggtttagagaagcgagttctcggaacaagccggcgcatttaatagcaagtacccttgcccttgaaaattctcccctctccacagcgtcccaatacgctctctcgtattttgaaatcaatatctcatgggatctctgcatcttattctgattctcgcggcttcttataggaattttgtgtaggtggttatgtatgtggtatcacccaaaaaccttttttataggtagacccttctcagttgaggtggagaacatgcttgacataaagctcatccgcgaaaacccagagatagtaaagagggatttgataaagcgcggtgaaaccgaaaagctgaagtggatagatgaaatcctcgaactcgacaagaagtggcgcgagaacctgaagaagatcaaccagctcaggaaggagcgcaaccagctggcggtgcagataggcaagaggaagaaggccggagagccgatagacgacctcctgaagaggagcaacgagatagtgaagcagatagaggagctggagaaggagaacgaggagctgaagaagaagatcgactactacctctggcgcttgcccaacatcacccacgagagcgtccccgttggtgagagcgacgaggacaacgtcccgataaggttctggggcaaggccaaggtctgggagggcttcctcgaaaccttcaaggagcagagccttgggaagatggaatacgaggttctcagctggagaccgaggctccacgttgacatgctcgaactcctccgcggtgctgacctcgagagggccgctaaggtgagcggtgccaggttctactacctcctcaacgagctcgttatccttgaccttgccttgatacgcttcgctctggataagctcatcgagaagggctttactccagtaatccccccatacatggttaggcgtttcgttgaagaaggtgcaaccaccttcgatgacttcgaagacgttatctacaaggtcgagggtgaggacctttacctcatcccgaccgctgagcacccgctcgctggcatgcacgccaacgaaatccttgacggaaaggacttaccgctcctctacgtcggcgtaagcccgtgcttcaggaaggaggcaggaactgcaggaaaggacacgaagggaatcttccgcgtacatcagttccacaaggtcgagcagttcgtttattcaaggccggaggagagctgggagtggcatgaaaggatcattgccaacgccgaggagatattccaggcacttgagattccctaccgcgtcgtgaacatttgtactggagatctaggctacgtagcagccaagaagtacgacatagaggcctggatggctggccagggcaagttcagggaagtggtttcggcgagcaactgtaccgactggcaggcgagaaggcttaacatccgcttccgcgacaagacccacgagaagcccaggttcgtccacacgctcaactcaactgccatagcaacctcaagagccatcgttgctatcctcgaaaaccaccagacggaagaaggtgtagtaaagctcccgaaggccctctggaagtacactggcttcaaggagatactgccagcacacatgaaagagaaatgttgtcaggactgagggtatctcttctatttcctctttgaagattaaagaagagaccaaaggaaaacctcaatatcatctccttgtgggctttctagcattccctttgatatcctcgtcagttacaaggcccttcgcgtaggggcagaactctctcagcggacattcttcgcacttggggtttatcggccggcagatactccttccgtggtcaaccatggcgtggttgacgtatatccacttctccttcgggatgagtgcagttaggtactcttcgaccttttcaggggcaaccctcggcggtgccaggcccaaccttttgcttatcctgttaacatgcgtatccactgggatagcctgttttccaaagccgtatgccagaacgatgttcgcacacttcctcccgattcccgggagcttcataagctcgtgaatgtcatccgggacttttcccccgtacctctcaaggattatcttggaggccttaactatccactcgcccttcgtcttccagaggccaactccctgctttcttagaaactcctgcatctcctcgacgggggtgttcgctattgtctcaatgtccttatacttcttaaacagctcttcccagacgcggtaggttacctcatcgcgcatcctttgggagattatgcagtggacgagcgttcggtaggggtcgccgattaggagcttttccctcgggtgggtcttcatgaggatttcaactatcttctcggcccgctttttcttttcctcccagctctcctcaaaggtgaagccctcaaggctcaatgaccgtgactttgcttccatggactaccaccaccttcccttctgccaccctaacttctttcagttcctcgaactccctgctataaatcttttgcccgctccagttgtagattcgaacttcgttttcgaggacgatgacgagaccttttgagaaggggagcacctcccgaacttcttcatcgaattcgagagttatctccttcacctcgcttctcgttatctcgattcgggtgtttttcgagaccttcatcgggcttggatcggcgaggacaactttgtaggccaaaggcctcccgaggaggtctatctcaaccgtctcgccagtttttacttctctgcccactaatttcgaacggataatctcctcaaagccagccgggagctcagcgtcgaagaggggtttgagtactatcttcatagtccccacctaaccgtgagttagggcggagggtaataagcgttcctaagaaagctttataaactcgacatatcaaacgatatatcggtgaaagaaatggagaagccgaagttcaggggacacctcaaactcctcgttttgaaactccttgaggaaggtccgctccacgggtacggcgtaatggcggagcttgagaagaggtacggcatgccccagccgagccctggggctatataccccatcctagcctccctgaagaggtcaggcctcattgaggtcgcaggtgagggaaaaagggagaagaagctctaccgcataaccgagaagggaagagagtacctcaaagagcatgaatacgaggtgaatgaagccattgagaccgcagagcgctttagggagttcgcccgtctcggcggcagggagctggcggaggttctcaaagagacattcaactcgatcaacgaattgggtgaagagcagagaagggccctcgcgaaggaatttgcagagttcacgaagagggttaggttaattcttttgggtgagataaaggagggaacggaatgagcgaagcattagttgttgagaacctcgttaagaagtacggggactttgaggccgttaaaggggtctcctttaaggttaagaggggagagatattcgccttcctcgggccgaacggggcagggaaaacaaccaccgtgcacgttctcacgacgcttttgaggccgacctcgggaagggcgatcgtcgctggccacgacgtggttgaggagccgatggaggtgaggaagaggataggcatagtctttcaggatccgagcctcgacagggagcttaccgcgtgggagaacatgtacatccacgggagaatatacgggctgaaggggagcgaactgagggagaagatagagcgcctcctcaagttcgtcgagctctgggagttcaaggacaaaccagtcaagaccttcagcggcgggatgcagaggaggcttgagatagcgcgctctctcctccacgagcccgaggttctcttccttgatgaacccacgataggcctcgatccgcagacgagggcgcacatctgggactacattcgcgccatgaaggaggagcacaatatgacgattttcctcacgactcactacatggacgaggcggagatgttagcggacaggatagccatcatagaccacggaaagataattgccgagggcaccgcggagaagctcaaaaagctcgtcggaaacgacgtgatctattttaaactcgacgctcccgaagagctcaagtgcctcgaaagtggcttcatcaggggctgtaaggttcttcccgacggcagggtggcgcttgaggtggaaaacgctgccgaagcgctcccgggactcttcgagctcgcaaatgagaggggcatcagaatcctcgaggtcacctaccacagacccacgctcaacgacgtcttcctccacctgactggcagggagataagggacgaagggccggagaacccgatggcttccttcgtgagaatgaggatgaggaggaggtgagaggatggaggcactaaccacaatggcctacaggcagctcaagaggttcagcagggcgaggtcgagggtaatcgggatgataatcaacccgctcatctggctcgtcttcttcggcctcgggtggagcaaggtcttcgacaaccccatgacgaagatgatctttgggggagtggactacttaacgttcctcgcgccaggtatctttgccatgacggtcttcaacatgagcttcatagcaggagtaagcgttatctgggacaagcagttcggctttctcaaggaagtccttgttgctcccgcatcgaggagggggagcatcctggggaggataatcggtgactcactcgtgacgctcgctcagggaacgataatcctcaccctcacctacccgctcgcggagagcctcaagctgagcggattccttccggccctcggagtcggcttcctgctctcgatggccttctcgggctttggcgtcagcctggctttgaagatggagagcatggagggcttccagatggtgatgatggtcctcatgctcccgctgaccttcctgagcggcgcgatatacccaatagacaccatgccaggctggatgaaggccttagcttacatcaacccgttaacttacgccgttgacggcgcgaggcacttcctcgtgggggccaacgttgccaagttctcgctcgccgttgatttaggtgttctgaccgtcctggcggccctcctggtggggctggccatggttgagttcgagagggcaacgataggttgaaggggagggctccctcattcttttaccctgtctttgaacctttcgtagcttatcttcagcgccttcaggacggggagttcctctcccgcgaagaagctcagcatggccccaccgcccgttgatatatggcttattccagtgatgttgtacctgtagatgcttgctattgaatggccaccgcccaccaccgagaaggcggggctttcgccgatggccctgaaaacaccgaccgtaccaaccgcaaattcttccctctcaaagacgcccatcgggccgttagccactattatctttgcacctatcagtatctcgcggtacttctccacggtccttgagcctatgtcaaggatgggatactggtcaaacagcctcttttcgccgcccaggagatcaacctcaaggcgctcgcctttgtaatcaatggcaaagtccacaggcgttctgacatagggatagaactcgtcgagtatcttctccgcccagtccacaagctcaaggagacctttcctgtgaaggaactctatgttggcatccccgaggtcaaagcccttagcgagcgtgaatatctgcccgacgagaccaccagtgaggatgagatccgctttccccttccgcaggacgttctcggcaacgcggagggagtcatctacctttgcaccgcccaggacgtaaactctcggcctctcctcgctctcgtaagctttgctcagtgcatcaacctccgtctccataagcttccccattatcatcggcttaaggcgggcgaagccgacgagggagggctggctcctgtgggcagttgcaaaggcatcgttaacgacgtagtctattaacggcgcaagctttctcacgaagaacgtcttttcgcactcctcaattgacctgttgaatacctcttcagctgagaagcggaggttttcgagaattatagcctcccctggcttcagggagcttattctctccctggcgtatttcccaaagatgtcctcgacgtattcaacttcctggccgagaagtctgctcaggatttgggcgtgctcctcggtggttatgtagtcccccttgtagggtctgctctggtgggtcgctatcacgagtttcgccccgttgtcgaggaggtgttgaatcgttggtaaaaccgcccgaaagcgggcgtcgctcgttatccgtcctttttcaacgggggagttaaggtcagccctcagaaaaacggtctttccctcgtaggtgaaatctgtgattctgaacatcacatcaccgagaaagtgttaaatagaggttttaataaaagtttatttgaacactcttggtggttacaatccagagtacatgaggacggtgagaggatgccttggactcaggacatcgtgaggatgctgtcccgcgaggatatcattgagtacttagcagaagtccttgataagatgggattcagaaaccatgagaaggttgcagatcggagcaggtggggtgttgacatagtagcggtaagggatgatccgttggcgggcaccgaaaagcttctgataaaggttcataccggatcgctggcatcttctaaagaagttagcgtttttggcgatcttattgacagatacaaagccgatagagggattcttatatctcccctgggatttacaaaggacgcgagaacagttgttgctaaagagtatagggcgaggattatactctgggacgccgaaaagctcgcgaaaacgttttccaactacgggatcaaagttcccgaaatcaaaccccaagaatccgaggaaaaagcggaagaaactcccctcaccaagtttgagctggacgcgcctctcctgtttgagttttcgccagaaggggtcctcaaagccatagccagggaagccagcagaaaatatcccataaagcccgaggacataaagatctccttcctcaaagtgtatctctcgacggcatacataatttcctggtcagcgagagagggggagagcgaagaaaagggaaaagccctggtgttctcggaagaaaaaatagtttcccaagctcagtcagaccccaaactggcaacacccgttaaaaaagcccttctaaacgacaggtctgagatatacgcaactgagagagaaattgaatcctccctcagtcccagcgaatccgttcttgtgcttaagaacaccctttcggagaagctcggcgttccagagagcaatataacgatccacgagcggaaaaaagtgtacgtgcccacaaaagcggaggccgagcttaaggtgggtgccaacagggcgagggctgtggtggatccgaataccaacgaagtccagcttgatgtgtccgaattgcccgacgagtacttcctgcagaccgttacagaaattctcatggatagaatcggcgaggagcccctggagtcaaagattgaaaggaacaacgggaaggtgaaggtttttggcaaaaccgagcgcttcaacttcgagttcaagttcaacgggtataccggtgccgtggtatatgaagaatcccttatcaccgatgaggccctcagggagctcataagcaacaagtatccagccggaaccattttggacatcgagaagggcaagaaggttgcgattgttgaggttgggctcaaagagggcatagtaatcctcgaggtcaaccttgagaacggagagttgaaagagattaccacgcttccttcgccggaggaggccttcaaaaaggcaaagccgataatagagaacaacttcccagtgaagaacctgaagctggtctccagcagagtcctcgaacacaagttcttagagataacaatggaaggagaaggtggaaaggcgaccgcaaaaatagacggggatacaaaggacgtccttgactacttcgtcgagattacacctcagaaggcagaagagcttgtactcgccaaatatccaggctacagaacacttggcgtatcagaatcggacgaggtttacacggtagaaatagaaaacgacaagcataaagttaccgtgaaggcaaccaaggacgggaagatcctcgaagaggcagacagggttctgaaaaaagaagtcgccgagaaaatagcggaggagaaagttaaggacatagacgaaaccgcagagataaaggggataaggctagacggagattgggtcgttgagttccagggaggcagcaaggtcggaaagctcgtactcgacagaaaaacgggtgaggtaaaggaagaaaacgtcaggtttacagagctggcgcttgaagaggctttccacgaacacctgaagaagctttacggagagaccgagttgaagacggagaggctcacgcactacaaggaggaagggtacatccacataaaggtcgcaggaaagaacagcctttactatgcgagaatagacacgaaaaccgggaaaatactgagcgaggacagagcgccgataaaaggaataactgcaaagctgaagcagctccagctggagagcaagtacaagtgactaggccatcagcatgttctctatcatttttattgcttccactatcttcctctcgggcttctcctcgttctttggtatctcaaggtttatgacgagcctctcttccttgctgtcctcgaagtcgtagatttcaagctcctcgacctcaacgtcctcgaagatgctctccagttcggggctaagcacctttttgtcgttgccgtaaacctcaacgcggactatatcgtcagtcgttgaggccacaacaactatctcgtaggggccaaccttcttggtgaagcggaaagcgtttccatagccctcaacgtcctctttaaacccaagctgaagcatcgtgctccttatggcttcggtcttgctctttatcctgtttaaaactctctcacggagcttgtagctctcctcaagggccttctttataccctcacccgctttctcaaccgggccttcccatatgccgatgatcttgatacctgaagaagtcggcttaagctcaatcttaagggaatcaacgtcaaagtctcgcaggtcgtctatcttaagctcgccgagggtgagtatatcaaactcaatcctcacgacgtttccaaaggctttacctttgaacttcacccccatcaccaagagcggcttgaagcgtcggtttaaaaaccttctgtgtgatgagggcgaaaaattttcacaaatgtggtggcctgcaaaagtcgtagaaattgagggagaaaaagaaagccttcagaatatcagcggagccctgtactcgccccagacttccctaaggacgtcagtgacctcaccgagcgtggcaaggtgtctgtgggcctcgatgatgtagggcatgaggttctcgtcttcggtttcggctgccttcctgagcttgtcgagggactcctcaactttcttgctgtccctcgttgagcggagcttcttgagcctctcgatctgcttgtccctgatgctcgggtcgactttgagtatctcaacatcaaggggctcgtcaacgacgaactcgttcacaccgactatgatgcgcttcttctcctcgacttccttctggtacttgtatgccgagtcagctatctccttctggatgtagccgcgctcgattgccctcatcatgcctcccatcttctgaatcttctcgatgtacttgagggcctcttcgtagatgtggtctgtgagccactcgatgtagtaggcgcctccgagcgggtcaacggtgtcaacgacgccgctctcgtaggctattatctgctgggttctcagggctatcctcacgctcttctcggtcgggagtgagagcgcctcgtcgtatgagttggtgtggagggactgtgtaccgccgagaacggccgcgagggcctgaatcgcaacacggactatgttgttctcgggctgctgggcggtgagggttgagccggcggtctgggtgtggaagcgaagcatcattgagcgcgggttctttgcgtggaaccactccttcatgatgtatgcccagagccttctagcggctctaaactttgctatctcctcgaggaagttgttgtgggcgttgaagaagaagctcagcctcggggcgaacttgtcaacgtccatgcccctctctatgactgccttaacgtactcgataccgtcagcgagtgtgaaagcgacctcttgaacggcgtttgctccagcctccctgatgtggtagccgcttatcgaaattgaattccacttcggcacgttctcagcacagtacatgatgatgtccgtggtgagcctcatgctcggctggggcgggaagatgtaggtacccctcgctatgtactccttcaggatgtcgttctggactgttcctctcagaacgttctgcgggacgccctgcttttcagccacgaggatgtacatggccagaaggttggccgcggtggcgttgattgtcatgctcgttgagaccttgtcgagcgggattccatcgaagagtatctccatgtcccagagggagtctatagctacaccgacctttccgacctcgccctcggccatcgggtggtcgctgtcgtaacccatctgggtcggcaggtcaaaggcgacgctcaaaccagtctgtccctggctgaggaggtacttgtagcgcttgttactctcctcggccgttccaaagccggcgtactgcctcatcgtccagaagcggccgcggtacatggtggcgtaaacgccgcgggtaaatggatactcaccagggaagccgagcttctcaaggtagtcccagtcctcgccgaggtcagcgggagtgtagaggcgctttatctcgaagccgtcatcagtcatgaacttctcctttctctcgggagccttctcgaggaacttcttaacggtggtctcgttccagcgctcctcttcctcgcggatcttcttgagcttttccttatcgaacgtcattcctgatcacctgaccctaattgggcactggagtataaaaaccttttacatagctcaagtttcaccttgctattggataaattgtccatcagccgaggcgccgttcgagagcaatgaccaccaccaacaggagggccaggagagccactgttagctcgccggagtacttcccaatgccgctcactgaaacgggaacttccttcgctgtcatagttagagaaacgttccctgtgccaattatggatatggctacgaaatcctcgtatggccttagaggaacttctcccgacacatgctcccctttacctctgaaagcccccttgaaatcagcggagagcgggtcaaagtcttccctctccctgttgagggtgaagtaatagaccctaacctcaaccggccgatcagcgttaacatcaagggcaagcttcttcccgcggagcgatgtagcgtttaggatgaacgtcttaattccctctccgaactgctttggaaggagctcaaagctgatgttctcaggcttcctgaggtaatccgcaacaagaagaacggcgtcgaacctgtcgccctcgagcataagcatgaaatcagactcgttgaacactacaaaatctggccttcccttcccctggcttgaggagtgcagaatctccccactcgaagagagaacgtgaagggtgatgtccagccctgagcggacgtaattgccgtatgagaaggctatcttctccccaggatagtgttcgaactgaatcggtggggtcagagacttagcggcgactcggtatggaattcctacaaagtgcgtctcggcggtaaagttcatcttcgccagccagttgtcgccgtaaacgggcaggaacgccagaccgtatgcctcgaactccagagggattacatgcaggtttccattctcgtccctgactgttacgttgaatccgactggcacaccaacggagaatcccctgggcagagagggcacgtcaataaccagaaccacctgggccgagccgtccacgttaagctcctcgacctcgctttccccggagtagaacttccagccaaccgactccggaaggccttcgacgccaagcttcaccctgcccgaaccggagagaacgagtgcatagctgccctttccaccgagggggacttttatactcgttgagagcgcctcgaccgagatgccggaagcgccagcctcggccgtgaaggagaaagttcccgagtcggaggaagctaggatggttggatacctaacctcctcgggaaccttgaaggtcagcgagacgctctcccctggccctatggagacctctgaatatgttggacttcccaccacaacgccgttttgggtcacgctgacgaaacccctgaaaggagactcccccgtgtttttgaggacaaccctgagatgctccccctccctggagatgttttcgagaaccagaagcgccggcctgaagtagaaggtctgctggattacttttccgtaatcaaccactaccgctccctggtttataaagttggagaactccacccagctggttccccgctggagcaggattttcttcgactccaaaaccatgttactgctgtaaaggaggctgaaggtggcgttaaccgggtcgcctttgttaagaacctttaccttaacacctttactgcccgttatttcctcgatttcaacctgaggctctaaggttccaaggaaaacatcctttgagatgcccttctcctttagactaaagaccagcgtctggcccgggtttggaaccttgaaaactatctcttcgcctggtgcaaggttcagctccacttcctttaggacagtgcttgaggaaatgggaaaagcgccttgagaagacgacgaaacagaaagagtgtcgttgagcggataaaagcccgtgtttttaatctttaccttggcgtaggtgtcgaaggcttctatgacctcaacaccgaagtcgtacttcttcataactctcacgcttgtatagttgccgagtatgtgagcggtgagcctctggttctggcggtcgtatgagccgatgacgtaagtcacgttgcccactgtgatgttttcgccgaaagcgagaacggaatacgtttcttctccatgactcgaaacgctcacgaggaacctgtccccgctctggccggggtcaaaggtaaagacctggccgtccactatgaggacttcatcgattcctacttcaatggaaagagctgtagcctgcccggccagcaggatgaggaggaagaccgcgaaagtgagggttttcacgcgcgccatcgttctcatcccctgtactcccttctgtaaagcccgaggatcgcaagcatcaggctcaggagcatgaccgatgcgaagaacaccagcgtcgttgacgggtcgcccttgtagacgtcaagccccgtgtggagcgtgaacctgtccctcaagagaactccgagctggtagttgagcgtgaacctctcggggtcgtcgaagaaaggcaactgcgggaggatgaactgggcgacgaatatcactccaaagctcgccagagaggcgtagaggggcctcgaaagaaccactgagagggccattgcgaacgctcctagagagccgagcaggaggatggtcacctcaagggagtagagcaggtcaccgaacgtcgccctaaggccggtgaaaccttgcttgtaaagcagaaccatataaatctgcatgaccaggtagggcagtccgaagaccaccaacattcccgtaagcccgccgaggaactttccgatgacgagttcgctctttctaacgggtttcgtcaggagaacccttatcgtacccttgtctatctcgcttccaaggagttcgctcatcaggattatgaccacgagctggcctatgacgctcgcccagaagttgacgaggtaagtggagaagttaacctggaaggatatcctgagcgcgcgcgtgctgtactcggtgatctcttcgtgggtgaagaagtagacgacaactgggaggaacatcaggagggtcatgagcttgaggcggcgggagcgcagtaaccttttcacttccatcccgtatattatcccgagccgcgattcaaaggaaaagtgagaatctttcaaacttcacacctcctcgcccactccaaacttctccatcaggattctctcaagcggactcgtgtgcggcctgaagagcttcagtctgatgccgttttccacgaggtacttcggaaaggccaggaagaactcgtcaagaaagcgcggatcaactttgaccctgaggattccctcctcttcccaggcctcacggatgtagggcttctcacgcaggaacgccatcgcctttccattgtcgctggtcagaacgtcgtagtcgtcctcctcaatgctcgcaagctccctgaccctgccctgggcgagcatcgtaccgcggtttatcagcccgacgtagttgcacattttctcgacctcgctgactatgtgggagcttatgaagatcgtcttgcctgccttggcgagctggatgaccttcccaataaactccattctcccgagggggtcgaggttcgctgttggttcatccagtatgaggagctctgggtttcccatcagcgccgcggcgaagctcgccctctgcttctgaccggaggaaagctccccaatcctgttcatggccagcttaccaattccagcgtactccataagctccttcgcctgctccatggcgtcttccttcttcataccagccaggcggcccatatagaccagaaactcgaaaatcgtcatgtcttcataagctatcggcacctcgggcatgtatccgacccgcttcatgatctcaaccctgtcgttgggcatcctcaggccaaaaatccgtatctcgccgtaggtaggcctcagtgccccggtcagcatctttatagtggtcgtttttcccgcaccgtttggcccgaggaagccgtaaacgacccccttaggcactttgaggttgaggtggtacactacgttcctcttgccgaagaacttggtgagcttgtttgtttctatgacgtaagttcccatctcaacacccaaaggaacatcgaaacgaaattagttaaaggtttcggcattactctctaaccgatgatgcttagaaacatcggtctggacagttcggcacggtttgcctttcagagccacgcccacacggatcactttgtcagcggtgaagttatcttcgcaacaaaggcgaccaaatatctcagtcatctcaggaaggggggcttctatcgggaagtggagtttgcaaaaactttctacatcggcgatttcaaagcgaagctctatccagcgggccacatgctcggctcggccggaataaagctctggctcgaaaacgggacgctgttctacactggagataccaagtggttcaagctgagaacggcggagaaaagccgctttcccaaagccgacgttctcataatcgaggccaccttcggcgttccgagcttcacgtttccatcccccagggaagctgagaaaaaactggtcgcattcgttgaagaggctcttgacaggggaaagcgcccaaccctctatgtgaaccagatggggaaggcgcaggaagttatgaaaatcctggacgttcacgggatcacggtgaggccaagcagagagatgctgaaagtggcgagggtttattcaaaatttggggtcaaatttggaaacatcacccatgaaggggacgtagttttaaggtcgtaccgctcccccaaggtcgaaaactcactctctccctgggagcttaccgtttccggctttggaaggctcaagctgagcaaccacgcggacttttgggagctgatgaaaatcatagagaaggtaaagcccgaaaggatcttcacggtgtacggcttctccagggaattttccaggattttgaccgggcttggatacgaagcccatccaattgacaaggactccgatatatacggactacttttttgaacaactgttaaacagactgccaaaaacctaataaacttctaaaattgaaggttattttcgaacaagcttcacatattcgaagtgctgtttagttattttgaacacggaggtggtggaatgcagaggctgaggaagaaaccgaagtgggtgacaggactcaggcccagacttgagacactcttcagtgaaagggccatcggggagggactgttggtaggtcgaggaacgataagaggcgacatggtggaggttacccagctcaagttctccggcgggcgggttaaaaagccgatagttgaagtcgagggcaacgagctgaggttcatatacccgatcaagaacggtgagagccttgaggggatatactactctctaatgggctttctgagcagggtttgagtttttcagagttctcaaaccccaaactttttgccattttggtaactttcggagagaaaaatttttaaagggctattctttaataacaattggtgagaaaaaggcggggggtgagaaagatggtctggaggagggaccgctactgggacccgttcgacatcatgagggaaatccaggaggagattgatgcaatattccgcgacttcatgcgcggcccgaggctctggagctaccgcgagccaggtgagagaatagaggtcagcgagacctggagggagccgttcgcagacatcttcgacaggggcgaccgctttgttatcaccgtcgagctcccaggtgttaggaaggaggacatcaagctccgcgttacagaggacaccgtttacatcgaggcccagatgaggcgcgagaaggagctcgagcaggagggtgccataaggatcgagcgctactacagcggctacaggagggtcatcaggcttccagaggaggtcatcccggagaaggccaaggcccgctacaacaacggcgtcctagagatcgagattccgaagaagaagcccaccaaacccgagaaggagggcgttgaggtcaagatcgagtgattttgagtttttctgatttttctgctttactctctgcaacagccggattctgccaattggatggggcttgaatgggtacctagcagagtattgccggttcttagtttgaaatcacctgctgctcgcaaagtgctttttcagatccttcatcaggtcgtacactatgtttaagaacagctccatgtcgttgccgaacagcctgcgggtgtcggcgatgacctccgggtatgtcttcagcccatagggcttgccgtctatgattgccacgaggtcaccgtctatgaggtacgcctcgtgaaggtcgaggtagtgtaggagttgcttgagcttctgcctgacccactcaaagggcaacggctcggcataggtttcgaagagggcaaaggcgacccggttgagatcttcaggaaagctggcgagaatctcactttcgccgtccttgggcctgatgacgtagaaccccttcgggccgagcgctaccacaaccggcatcacgtcggagagagttgtttgggcttttcctaccatttggtaccacctccagagttcttaaaattggaaaaacgaaaatttcccgggacaaaaacggtttttgtacggtagtgttggcggtacttttggcatcagcaaaaaagcaacaggaagttggtgttttggtggtgttggtgggtgttggttgtggtgtttgggtttggggtagtagtggtgtctccatacataagaaaaccataaacaaaaatgcaaaatttttgcaagcacatttttgtactccaaaaacattgactcattgatccagcccaatctcttcttagtctattctgcctctacgcacgcctttcattaccgcgatgcaggggccacattttggtaacctcacttaagaaaaatcgaaaagtttataaagggtttgtcctttagtaacttacggtaaccaaaaactaagaggtgatgctcatgagtgagaggagagaggtcaagctcaaggttgcctctgcctaccagagggacgttggcagggggatcgtgaggattgacaggaaagccatgcgcgagcttggcgtccagtcaggtgacatagtcgagatcataggtaccaagaacaccgctgcagttgtctggccagcctatccagaggacgaggggcttggcatcataaggatggacggtacgatcaggaagaacgccggtgttggtctcggcgacgaggtcaccgtgagaaaggccgacgtcaaggaggcaaagaaggtcatagtcgctccgactgagccgatacgcttcggcgctgacttcgtcgagtggctccacagcaggctcgtcggaaggcccgtagtcaggggagactacatcaagatcggcatactcggccaggagctgacattcgtagttaccgccacaactccagcggggatcgttcagataaccgagttcaccgacttccaggtgagcgagaagccagttaaggaggtcagcaaggcaaccgccctcggagtgacctacgaggacataggtggcctcaaggacgtcatccagaaggttagggagatgatagagctcccgctcaagcacccggagctcttcgagaagctcggcattgagccgcctaagggtgtgctcctctacggaccaccgggaacgggtaagacactcctggctaaggccgttgccaacgaagccaacgctcacttcatagccatcaacggaccggaaataatgagcaagtactacggcgagagcgaggagaggcttagggaggtcttcaaggaggctgaggagaacgcgccggcgataatcttcattgacgagatcgacagcattgcgccgaagagagaggagacccacggtgaggtcgagaagagggttgtcagccagctgctaacgctaatggacggcctcaagagccgcggaaaggtcatagtcatcggtgccaccaacaggccggacgcgattgacccggccctgaggaggcctggaaggttcgacagggaaattgaggtcggcgttcccgacaagcagggcagaaaggagatactccagatccacaccagaggaatgccgatcgagcccgagttcaggagggacaaggtaatcgagatactcgaggagcttgagaagaacgacacctaccgcgaggccgctgagagggctatcatgaaggtcaagaaggccaaagacgaagaggagatcaggaggatcctcagggagaccgacgagaagctctacgaggaggtcagggcgaagcttatcgatgcactcctcgacgagctggctgaggttacgcacggcttcgtcggtgccgacctggcagcactcgccagggaggctgcaatggcagctctcaggaggctcatcaacgagggcaagatcgacttcgaggccgagtacataccgaaggaagtcctcgacgagctcaaggtcacgaggagggacttctacgaggccctcaagatggtcgagccgtcagctctcagagaggtgctcctggaggttccaaacgtccgctgggacgacatcggcggccttgaagatgtcaagcaggagctcagagaggcagtcgagtggcctctcaagtatcccgaggcattcatgggtctcggcataacaccgccgaagggaatactcctctacggtccgccgggaaccggtaagactctcctcgccaaggcagtcgccaacgagagcgaggccaacttcatagcaatcaagggtccagaggtgctcagtaagtgggtcggtgagagcgagaagaacatccgcgagatcttcaggaaggctcgccaggccgcaccaaccgtgatattcatcgacgagattgacgccatcgccccgagaagaggaaccgacgtgaacagggtcactgacaggttgatcaaccagctgctcactgagatggacggaatccaggagaacagtggcgtggtcgtcattggtgccaccaacaggccggacattatcgatccagcactcctcaggccaggaaggttcgacaggctgatacttgtaccagctccagacgagaaggccaggctcgaaatattcaaagtccacaccagaagagtaccgcttgcaggtgatgttgaccttagggagctcgccaagaagaccgaaggctacaccggcgcagacatagcggcagtggtcagggaggctgcgatgctcgccatgaggagggccctgcaggagggcatcataagacccggcatgaaggccgacgagataagggggaaggtcaaggtcaccatgaaggacttcgaggaggccctcaagaagatcgggccgtcagtgagcaaggagaccatggagtactacaggaagatccaggagcagttcaaacaggctcgcggatgatccaggggtcgtaacccccatcccctaatttatctctttttgagctcttttgaactcgaccgtggagataacattttaagccttccagttgaaacctttgcggtggtgcttttggagaacctggaacaggtttatgagaggataaaactggccgctaaacaggcctcaaatgaggaggaactgcggcacaacgtttctaaggttcttgatgagattgcgagagaatttggagtatctggcaggctggagaagtcaactcagctccttgaatcaaagaaggtctttaggggcaggatagacgccctctatggcggtgttattatagagtacaagtctccaggaaaactgaaggaaaagcaggcatttaactccgccctcgaccaggtcataaactacatcaaatcagaggccaaaagcgaggagttttatccgtattaccttggagtgctcttcgacggttcaacgatagcgtttgttaggtactggggaggcagtttcaaggtcaacggcccgcttccgttcacgtttgaggcctttgagcacctcgttgatgccctcaggggcctgacgaggaagcccctcgatgcggagatgcttttgagggactttgggccaaaaagccggataacggaagaagtcctcagagcgttctatagcgcccttgagtcgccaaaatcggatagaactgagatgctctttgaggactggaggaggatattctcccaggtctgctcctacaccccggagaagctgaagaagctggccgagttctacgggttcaaggaggccgaccccgagaggctgaccttcgcactgcacacctactacacccttctgatgaagctcatcgtcagcgagatagtcagcgtcctctcggagggcctgactggttccgtactggcgaggctcaacgagagctacctgagcgatgttgagtccttcaggttcgtgctcaccgagcttgaggacgggggactgttcagacagctgggcataaggaacttcctggaagcggactacttcgcctggtaccttgaggagtggagcggagaggtggctagggcagtttatgaaatcactaaggcactcatggactacgaacccgcgacagttgaacaaacccctgagagggtggaagacctcttcaagaggctctaccagaacctcgtcccgagggagataaggcacagcctcggggagtactttacgcccgactggctcgcggagctgacgctggacgaagctggttacgatggaaaccccgaaaagagggttctcgacccggcctgcggctccgggactttcctcgtgctggcgataaagagggcgaaggagtgggggctgaggcactggggaacctctgccgatgcccagctccggctccttgagtcaataacgagcaacatagtcgggatagacctcaacccgctggcagtcctggcggcgaggggcaactatctcatcgccctcgggaagctcatacgctacagggttgacgacatcacgataccagtttatctagccgactcgataacagtaagtacgaaaacatcagccaggggaggcaagaggatagccctcaagacggttgccggtgagttcgaggttcccaaggaggtcatagactcaaagctgatggacaaggttttccaggccatagaggacggcctgaggcggaacatgaagaaggggcagttcatcgtttaccttcacatgaagctcggcggaaagaggcttagcgacgataccattgatgccatctccgttctgtacgagaaactgtggaagcttgagcaggagggcaaggataggatatggacgagggttctgaggaacgccttcgcaccgctcacgatagggaacttcgacttcgtgatcgggaacccgccgtggataaactgggagagcctgccagagaactatcgagagctgacgaaaccgctctgggagtactacgggcttgaaaaaggctcgggtaagggtatgggcagggtaaagagggacatgagcatgctcttcgtcgcgaggacattcgaccgctacctcaagcccggcgggaggctggcctttcttgttcccttcacgctcttcaaaacgcaggcgggagcgggattcagaaggttcctcacctacggaagaagacgggagccgaggatacccgttaagctcctgaaggttcacgacctcgttacactttaccccttcgagggggccaccacgaggactggcctattggtcatcgagaagaccgagaagaccgagttcccggttccgttgattgtctggaactggccggacaccaggggggcggacgttgaggcaacccttgaagaagtgaaggaaaaggcggcgattcaccagctcgtcttcatgccgatcgaggaggggaagccagagagcccgtggatgatgacgacggtgaaggcctacgaggggcttaagaaagctttggggagctcggagtatagggcctatgctggagtttttacaggattagatggagcttactgggttgaaattattcgtgaagttgccccagggagagtactaattcagaatgtcggtaaaaccatgaaaaagtctatcaaaagagtccagaaagttgtagaaacagatcttatatttccagttctacgcggaaagaatgcaaaaaaatggtactgcaacccagaagggtggatactcctgccaatagacaaaaacggtgatatcattccaccttcagagctcaaactcaagtatccactgacatatgatttctttacagcgctcctagatgaactcataagcagaaatgcagaaccctttaaaacaaagttaagaatttacaaggaaaagccaattgaaatagcagaaagatcaggaatgcctttctatgcagtccttaactcacaagtctcaatagctccatacaaagttggttggaaacatatatccggagctataagcggaaaagcccaattggatgttttcgtgataccaactttacaggacaaaccaatgattccaactcatggcattatgcacattcccacatcctcagaagacgaagcccactacatcgcctcgatactcaactccacaatagcccgctttatcgttgccagctatggcctcgaggtccacataacaactgacgttccaaagagaatttacattccgaccttcgacccatctaaccaactccacctcgaactcgcggagctttcaaagaaggcgcacgaaatagcgaaggaaaagtacgaactccttgaccggataaagtccctcaagaagtccctgaagggcaccagaggcgaggagaggaagagaataaaggacgagattagggaactcgaagaagaactcgccgaggttgagaagaagcttggggaagtcgagaaggagatagacgagaaagtcgccgagctgtacggcataacctgggaggagcttgaggagatagagcggctctacaccgtgctcatgaacgccgaaccctgataaatagggcagagagcagcgaagccgagaaaaacagtatgaaaaccggaaactagcgactgcctttttcttttgttctgatttgagcaatcggaggaggggaggagcgtcaggcgacccactcaacctcataatcaactgccctaaagtccctcatcttctttcttgctatttcctctgccttcccagggtcgttggtcacgactatgacttcctcggggagggaatcggttctgtagtaaacgatcctcgcgagcatgatatcacctccagttaatcactccgagtgaaaagcatcagtttcaatttaaaagccttactgaataataaaagacatcaatgaacgaaaattttgctgattttggcaggatggatgtacataaatgtagtaatggctcaagatgcacatcagaagaatcgaagtaaaaacgtaatgatgcataaattaaagagcttatgcaaaaatttttaaattcttcgatttctactgaaagacgtggtactatgaaaaataagaacaatgacctagaaataatactgagcatgataaacgtactaattggagcctttggaatcataaccattcctgcaatggtctcgcagctttacctgtattatgtgctagagaaaggaggaagagagttcacaagagagggcgtcctcggcggatttatagcgctcaacggactgctggcattggcggtacgctcgaatgatgggatgttctcagaggtggcaatcctcgcgactgcgatggcaaccatcgcgtttttattgtacgcggtgcatcttgaagtggtgtggaaccatgaagttcgcggggatcagcctcaacgagccgaggataatgggagtgataaacatctctccagagagcttctacaagggaagcgtcagaaacgatgaagaaaagctgatagaaactgctctgagaatggtggaagagggagcgagcttcattgacattggggcaaagtccacggctccctatctagagacccagataccggttgaagaagagattagaagggcggtctgggcagtgaaaacgatccgcaaccacgttgacgttcccataagcattgacacaacaaacgcgaaggtcgcggaagaggccataaaagctggcgctgatataatcaacgacgtaactggcctgaaaggggatcccgagatgcccaaagtcgccgctgactacggtacccccgttgtcctctgcgcccacggtgaggtaaggaacctcagcgatccggttcgcaccgtcatggacttccttcaggaaagcctcaggatagccgaaagacacgggattgaagacgttgcagttgatcctgccatcggctttctacgccccgaatggccgccgtggtacgtctgggactcaaaggtcatagccaacctcaacctgcttaagtcccttgggaagccaattctggtaggtgtctcgagaaagtctttcatcggtgcaataacaggaaggcaagacccctcggagagactggcaggtagtctatctgcaacggccatagcggtgctgaaaggggcagacataatacgcacccatgatgtcaaggagacaatagatacagttaaggtcgccagcttcatcaggaagttctctccttgatttccttccactcttctacgagggtcttcagaaggccgagtgagacgggaccgattattatcccaacgaacccaaaggctatgtatccgccgatgaaacccaggaggcttatgatagcgtttactccccacttcaaacggcttatcttatccctcagcaggatatcaggaaggggcgaaacaagggagaacccaagaaccgccagaaggacacctgaaaggatgtggccctgattgatcagataggcaacaccaccaacccaaacgatccagccgccaacgacgggaagaagctcgattaccaccgttaggattccagcggcaacggcaccacccacgtcagagattccgaagaccctgaaaaacagggccattaatatgcccttcccaacaccgacgagcagccagcccctaagaactatgtggagcgtttctgccccactgtctatcagttttctggcaaggtccctgttggttgggggaattaaagagtaaacctcctgttttatggcgtcggcgttcacaaggatgccgtagaacgagaacacagtaacgataacctgcagaagcagtgtggggagtgagtaggtgtacccaaggacgtagctgttaaacctctgggagatgccgagtgaaattctctggaggacttcgtaggcggatgggggcaggtttaagccaagaagccagccaacaaaggtgtcaacgtagttcgccagggagtatttaacgtcgtttatgaggagggcgaagccaaagacaaacagaagggaaaccactgtcaaaatccccgttagggtaagtgccgaccaccgtcccccaatttttccttcaaggcgctcatggacgggatagaggatgtaggctgtagtcgcggctattataattggtgagagaattgggctgatcgtttcccacgtcaggtaaagaaccccgagggagacggcaacccacactgcagtttcaactctcatcaagcatccccatgtatttcagtatcagttctcttaccgagggcttgttgaaaatgaacaggtaaccccgctcatcgagtatgaagttcttcccaagggcgaggaggccctttccaagctttgcaacctcggccttttcaaagtctatgagctctttaacctccgcaggagcatctatctcagagaggactttttcgagcctgttgaggatgctctggttaaggaacttcacgggggcaaggcgaggttcttcaccgcgtatctccgaggcatccatatagattccccagaactccttggcacattcaaagggatagacgtagtcttctccgtagtcagggagatagagctcgcgtataactgcgaggagaagcctcctggcgtcctttccatagtactctatcctgaggttgaacttcccgtcctcaaagccgttttcaaacacctcaagcttctcctcgcacagcattcaaccacccccaatgaggggagtgaggtagcgagggtctatgtagagggcagtgctcccgtagaccccaaactcctcgggggtctcaaggtccttgtacaccacaacctttgcaccgctaacgttcattaacttttcgaggacatctatggcagtgtccatacccccaagctcgtcgacgagggctccagtaacgttctcagcgaaccacgtctctcctgttgagaagtttttgacttcatcaatggtcatgttgcgcccctcgctcactgcgctgataaacgcctggaagtaagtgttcaccatctccgttatcttctcgcgttcttctggcgttaaatctctccactcggcccccatgtccttgtgtttaccagttttgaatacatttacctttatcccattcatctcgtagttcttctccaggtcgtagtgaacgtagataactccgatgcttccgacctcagccagcgggctggccactatcttctgagccccaactgctatgtagtatccccctgatgctatgatatccccgctgtaagcgacgactggtttaactaaagacaactttttgatttcggagtgtatgttaataacaggcccaactacgccaccgggactttcaatccagaggagaaccccaccaacggactcgttcatggccaggttcctcaaaagcgggatgacctggagggccgtgtagtcgtctatgattccaaatattggaaccacggcgatggttgtgccgccctggttagatgaaacgagtctctgcaggaaagcgatttgatccctcagctcggcaacttcggtgctggtagtgttaacactgccttcacacacgagcgtaaagtttgagggagtttctatgacaaagcccgtttgattggcaggaacagcggggggattgacctggtagtagagaaccgcgacgctcacgattgatagggccagcagaagcgttagaacggccgagacgtacttccatatccgatcgtccattttcccaccctcaagttgtgcacgcgtgaacttttaaacctgtcccagaacggacaaacttttatatccattctggcgacttcagagttaggtgatacccgtggagataggagtgaccatctacccgcacttcatcacaaaggacaagagcctcgcatcgattctggcggacataaaaatcaaggactacgacttcgtttcactgttcccgcacactctaggcctgataaagaacggtgttgtagttgagaagaagctccgcagccttgaaaccaccctcaaaggagtgggaataaactacatcatcaggatgcccacctcaatgaacctcagggaccacgtctaccacagcaggcacttcagggtggcaagggcggttgcagacgtagccataaagctcggtgcaaaggtcatcgtcatgcagagcggaaaaactggaaggctggacctcgaaatagaggcccttcagagcctcgccgacatgctgaagcccttcgacatcaagatagcccttgagaacaccttcagcgtcaaggacacgctctacgtcgtcgaaaacgtgaacagggacaacgttggctttgcccttgatgttgcccacgcattcttgagcgcccagggcaacgaggagaagctcctcgacgacgtcaagctcggaacggacaaaacgataatcctcatggtgcacgacaactttggaaagctcttcccgcaggtcgagccggaggatgccctggcgtacggagtcggtgacctccacctccttcctggagaaggcaagatacccttcggaaaggttctgaagctcttcggcgacgtgccgatactcctgaaggtcaaagaccccgagaagttcccgaagataccgacgaagcagggtctcatagacctgctcctcagtctttgagtccaagtctctttcctatttcttcgtacaggacggcaaaggcctttcctattgtctctttctttctcgtgaagtgcgtgacgtcatcatcgaggttctggctgagtatctcaactgcctcctcgattgttatcttcttctccagccaggcgtaggcaaagagggcctcggcaatgtctcccttgccgtgtttgtccgttctggggggtatgatgtgcctgagtcctgccatctcaagcgcgatggcgagggatgcgtttggaacccgctctcccgtgggcttaccgaggtactcacttaaggcaagagaaaagacgaggttgatgagggagtcgccgagcttggcgagccccttgtcggtgaagtccctcgtgtaggagatcaactccatcactctatagccgctttccaggcctcaaggacttctctggccctgtcaaatatcttctgcgccgcctcttcgagggccttctcgggcgttatttttccgtcggtaacgaccttgaagcgcggcttcctggccatcgttatcgggtgctcgatggtgtatcctgcaaaggtaacgtgctcgttctcgtggagggtctcggtgagcaggttggcaaaggtgtgatcctctccctcaagatagaactcaaggaggttctcttcacgccttatgacctcaatcctcattctcatcaccttcaagggctttcagcaactcttcaagcgcctgctccttgttcttcacgagttcgtatttaaacttatcttccttccactcggccagacccagctcaacgagcctctcaagaacttcctcggggtcaaggtcgtaggctattgcaacgggcaggacgacctcccttatctgcctggtcgtctgaagggctatctccgctaaagcctctccgaggcgggaagttacttccacagcctcctcccagggcattgaggtaacaatctcgtcgtcctttagctcaaccctttcgcctaagagctcaagggttttgacgattatgggagttgagacgctggttccagcctcccggagcaggtcgtccaccttgtagcggtagagacccattctgtcgggatagagctttgccctgaccctcgtgtggatttctcgtatcttctgaatggcctccctgatctcgtccttcgtgccctggacgtttatcttgagcgagtccagcttgccgtgaacgtagatgaacgctggaagacggagcctctggagttccctcatgaactcctccttctccctgtcgtccctaacgtggatcgttataaccctcttggccctcatagagacaccttcagttttctatacagtgatgaaagctttctcgtctcgacgtttccacagcgcgggcagataagcttgtcgccgcgccttatcagcggcgtcctgcagcgggagcagagggcatagacgacacccagatcaggacccttcgtactcagctgtatcggactcttctcgttggcgattaccctcgcccttattacgtccccaatcttaaactccttggtgatgtcctcgacgaagccctcctttatctcggagatgtgtatccctgctagctttgaagtggctatctccctgtcgttctccctgccctcaatgctgatgatctggactattacggcctgaggcttcacctcaacgaccctacctatgaccacgtctccaaccctgggaagcggcgggacgtcggttacgggttcaacgcttatctccattttgtcggagtctattcttactttaccagccctagtggcgtaaagctcaccgttctcctccctgacaccatctccaggaaggaactcctcgataacaccaagataatccccgggcagtacgaggtcgccgttcttcacggtctttttctcatccatcctcccacctccgaaaagtttccagcgaggattttttaagccttccctttgggaaaacttttagtaatctgccgacgatgtcttggtggtggttaagaatgagaatgctccttatacactcggactacctcgagtacgaggtcaaggacaaggccctgaagaacccagagcctataagcgacgagcagaagacgggaaggctcgacgaggttctggcggtctttatcagcgttgagaaggttgatgagacaaaccccgacgaagttgtcgagaaggccgttaaggagatagaggacgttgcttcccagataaaggccgaaaggatattcgtctatccatttgcccacctcagcagtgagctcgccaagcctgacgtagccctcgaagttctccgcaagatcgaggaaaaactgagggagaagggctacgaggtcaagcgcgctcccttcggctactacaaggccttcaagttaagctgcaagggacacccgcttgctgagctcagcaggacgatagttccggagaaagcggtaagcaaggaggagcgcaacatagccctcgaaaaggaggagaaggagctcaagagctactggtacatcctcacgcccgaaggcgagctgattgacgttgacaagttcgatttcaccggccacgagaacctgaagaagttcgtgaactacgagatagccaagaacagggtcgccgatagggagccgccccacgtcaggctcatgcttgagcaggagcttgtggactacgagccgggaagcgacgccggaaacctccgctactatccaaagggcaggctcataaaatcactcctggagcagtacgtcaccgagaaggtcatcgagtacggtgctatggaagtcgagacgccgatcatgtacgacttcgagcaccctgcgcttgagaagtacctgaatcgcttccccgccaggcagtacgtcgtcaagagcggggacaagaagttcttcctcaggtttgcggcctgcttcggccagttcctcataaagaaggacgccacgataagctaccgcaacctcccgctgaggatgtacgagctgacgaggtactccttcaggcgcgagaagagcggtgagctttctggcctcaggaggctcagggccttcacgatgcccgatatgcacacggtagctagagacctcaagcaggccatggacgagttcaagaagcagtacaagctcagcatggaagtcctcaagggcgttggactaactccagaggattacgaggttgcaataaggttcacgcgcgacttctgggagcagaacagggacttcatcgtcgagctggccaagataataggcaagcccgtcctcatcgagatgtgggaccagaggttcttctacttcatcctcaagttcgagttcaacttcgttgacaacctcgacaaggctgcagctctgagcaccgtccagatagacgtcgagaacgccgagcgcttcggcataaagtactacgacgaggagggcaaggagagaaccccgctcatactccactgctcgcctagcggagcaatcgagagggtcatgtacgctatcctcgagaagcaggccaagctccaggagaagggcatcaaaccgatgtacccgctctggctcagcccgatacaggttcgcgttatcccggtcagcgacgaggtaatggactacgccctctacgtggcaggtaagctcgagggcgccaagataagggttgacgtggacgacacgggcgacaggctcaacaagaagataaggaaggcggagaaggagtggattccgtacatcatcgtcgttggaaggaacgagaaggagcagaacaccgtcaccgtcagaaggaggagcgacggaaggcaggtcgagatgcagctcgaagacctgatcagggagataaaggggcagacagaggggttcccgtacaagccgaggcccctaccactgctcctcagcagaaggccgaagttcagaggttgagagcttttcgaggtgtatcctttcttctccctttctgatttccagggagtacacgcccggttcaaagtcaatgttcacggatttaaccgtatagaggagttctcttatgccctcttccgtgactttggaggagacaaaaatagcgtagtcactaaggctaactgtccatgccaggaagctcctgctcaccacgtccgagttcagggctatcaatagcacggactcgggagttgtaacgctcttctcggctattgtctggttcagcaactttattgtcctgccctcgtcaaacattacggccacaccatcgagggtgtatatcatcctgaacagtctcgggcctttctcctccacgagctttgagtagattgcatctatttttggattaatggtctccggctcggcactgtccaagtagaaaaccccaggaagctctacatgaaccggtgagtacctggaaccgaagacatcaatcacggccattctacctttttttagctccttcatcatgtccaagccaacgctcctggctcggcggacgaggccgctgaaagaactgctgtagttggagattaccggaaaataacccatttcgagagaatgcctcaaaaaggagaaaggggatctgccaagcggaggagtatgtgtcgtatattaccgataccacggagccggcgagagtttctgcgttgagggcgtctagtatggccctcatgattatcctccctggtgtcctccggagaggacttcctttatgaactccctggcctcgctgctgaacttatccatgggcacttccccgccgaacttatcgaagaccttgccctccctgaagttcagctcaaagacctcatagtgttcctcgctcttctcgtggagcttgatgccgtgttccctgaggtgggcttcaaggttctcgatgtcaacgtactttccgcactcctcgcacttgtagaactgccagaagatgtagtcctgaccggcgagggcgttgttctttatgtggttcacgagcgcggcgccgagatactcataaacgtcctcctggacgagcttcccgttatcttcaacgaccttaaagccgctccagactatgtggtcgtttatatcagcgagagtggccttgaggtagcggtatgtgaggacaaagctgccgttcttgatgtagaaaactccgttgtctggaatagccacgatgtgaattccattgacgtcctttcctgcgagtgagtctgcctcctccctgttctttgcgacgtctatgactaccttaacgttgctcttcttgtgaatcccggttatcgtgctcccctctatctcccagtggtagtcgtcgagatagcgaacctgcgtgtacaccttcttggttcctggactcagctcagcgtacattctctcaccaccggagaaggtttgcttcgaagttaataagctttagcggaaaaatttaaaaactaccttccaaagcgccgctgtctcttctggaactcacggattatcctaagaaagtctatcttcctgaactcgggaaagtaaacgtcaacgaagaaaagctcgctgtaggcgatctgatagaggaggaagttgcttattctcacctcgccgccagtcctgatgacgatgtcgggatcgggcatgttgggatagtagaggtagcgctttatggcctcctcatcgatgtcctccggcttaatctttccttcaaggacgtccctaactatttccctgacggcgtccgctatctcgctcctaccgccgtatgcgagggctatgttgaggttgtagttggagtactttctcgttgctctctccgcctcttcagcggcctttctcacgttttcgggaagcatgtccttcctgccgaggacgttcaccctgatgccgtagcgatgaaccctttcatcctgaacgagttccttgaacttctcctcgaagaggttcatgagggcctcaacttcctcctttgagcgcttgaagttctcggttgagaaggcatagacagtaagcgtccttatgtttagctccctgcaccactcaaggatttcttcgagcttctttgatccgaataggtggccgtaccaggggggcttttcaagcttcctggcccaccttctgttgccgtccattattatggcaacgtgcttagggatgttcccagatttaaccttctccaggaggtagctttcataagcgtcatagaccggcttaaaaagaatgtgagggatgtgggagaccaatctgtatagcatttgccctcactctatcttcttcctcttgaggtgcttctccgccagctccatgtatatctcggcgtttttcttcgtccactcaatttcctcctcgctgagctgcctgacgacctttccgggaacgccgacgacgaggctgtagtcgggtatctccttgcccggcgggacgagggcacctgcaccgattatgacgtgctttccaatcttcgcaccgtcgaggattatcgcacccatacctattatcgtgtagtcgtcaacggtggcaccgtgaacgacggcgttgtggccgatggtgacgtacttccctatcttcgtcggaaggccgtgagatgtatgaatgctgacgttgtcctggacgttggagcagcagccgatgtatatctgctctatgtccccgcgaagaacggcggagggccaaacgctcgttttttcctcaagaacaacgtctccaattattgaggcggtttcatcaacaaaagccgtcgggtgtatcttgggctttttaccctctatctcgtaaaccggcatgagtatcaccgagttatcctcccggggagagcttataaatgtaaccagagaatatctgtgagggtgcgcaatgaggtacagacgcggcgccagtgcggagagggagcttgtaaagctcctcgaaagtaaaggattcgcagtcctccgttcagcggggagccacaaaatagacctggtggccggaaacgggaaggaatacctctgcatagaggtcaagagcacgaggagcaggaagctctaccttcccatcgaggacgttgaaaagcttgttgagtttgccggacgttttggcggtaggcccgtccttgcggttaaattcgtgaacgtagggtggcgcttttacggccccaatagattggagcacggggagaagagctataagatcgacctcgaaacgcctttcatgactcttgatgggctcttggggaaacagagaacccttgagggggtgctgtagttgaggaaaaagcctgttttaggactgctaattttactagtcattctgatggggatcaaacctgtctcctccgaagggaatgtgggagggatttccctctcgataaccgttctgaacaatgagttcactgcccttccaggcgacacccttgtgattccattttcaataaagaacacgggtaacacgacgataaccaacatgacagtctacataacgggccccacgactggatttcaatacagcggaaaggccattcggataccccttcttccaaacgatacctacaacgataccctaattctgaaagttctgaaccaggaacctgggcagtatctccttcgcattatagctcgcgttggggaccagtactttgaggccccggttatagttaccgtcaaggcgctcatcgactacgacctgactataacggcccaggatagatacatctacggcaggtcagtggaaatctacctgaccctgacttcaaagtcaaacactgtgatatctgggagaataggatactacctagttgggaacaggacaataattaaccagaccacgataacttatgtaaagcccgactccccctgggaaaagaagctggagttcaaaacactgccgctcggaaactacactgtggtgctctgggcgaacatgagcggagtctacaaggaagtttcaaagaattttgaagtctataggagggcgctaaactactcaatcagctttgagcacggtgcaatccggatttttgtctacgaccgttccggaaggggagttccagatatcactgtcactgtaaacggagtagaactaaaaactgaccccaacggtgcggtgacatactccgtgagcacgcctggagtatatcgggtcacattgaaccttgatggaaaaatcgtttcaaaagaactggtcgtaaagtccctccacataagcagcatccaggaaggggagaggctgatagttcaggtcaccgatggaaagaaagaggttcccaacgtcacggtaactgtggagggccccaaagggaaggactttggaataacgaactccactggctttgcactcttcaacctttcaaaggttggctatgggacactaattgtgaaggctgaaagcgcatcgtatcttcccgccgagacaatcatcaccactgtcagccctccctcaccaacgaaaacatcaaccacgacgcccaaaacctcaaacacgatgacaactattccaaccactacgactacccagtatcccccaaccagctcagaaccctccaaaaagtcgggaattagtacagagacggccttaattctcgtaatatcaggcattctgctagctgcgacctcttacttcgcgcttgcaatgcccacagtccacgaggagaccctcgacaggtactacttcgtaaaagtccgtgcaccgcgccttagacccctaaaggactacaaactcgagaggcctgtgaaagcggtagaggttcgggtcactaagggtaaagcgacgctgaatgacgacggaataacctgggagcttgaccttgaacccggggaggaggcctatcttcaggccattctgggctgaaattttcttttccctatttttggcagcaaagcttattaagaaattcgaaaacatttagacggacatctaaaggaggcgattgagatggttgacatagagttgctcaagagggttgttgaagcccctggcgtttctggatttgagttcctcggcataagggacgtcgtaatagaggcactgaaggactacgtggacgagataaaggtcgacaagctcggcaacgtcatagcccacaagaaggggaacgggccaaaggtcatggtagcggcccatatggacaagatcggcctcatggtaaaccacattgacaatgaaggctacctccacgtcgtcccgatagggggagttgacccgaggacgctcgtggcccagaggataaggttcttcaccgacaagggcgagcgctacggtgtcgtcggacacatcccaccccacctccagaagcctgaggacagaaagaaggccgccgactgggacaccatagtggttgatgtcggtgcagacagcaaggaagaggcagaggaaatgggcttccgcgttggaaccgtcggcgagttcgcaccagccttcaccaagctcaccgagaacaggatagccaccccctaccttgacgaccgcgtctgcctctacgccatgatcgaggctgccagggcacttgagaaccacgaggcggacatatacttcgtcgcatcagtccaggaggaggtcgggctgaggggagcgcgcgtcgctagctacgcaatagacccggagatcggcatagcgatggacgtaaccttcgccaagcaggtcggcgacaagggcaagatcgttccaaagctcggcggcgggccagttatggacgaggtcggccccaacatccaccccaaggtcaggcgcttcgccgatgaagtcgccaagaagtacgacatcccgctccaggtcgaggcaagcccgaggccgacgggaaccgacgccaacataatgcagatcaacagggagggcgtggcaactgcagttctcagcataccgataaggtacatgcacagccaggtcgaaacggccgacctcagggacatcgaccttaccataaagttcgccaagcacttcctcgaggagctcaggccgatggacctaaccccatgagcaaaaggtttatttcaaccttttcttaatctctttttgggtgtgcgcgtgatactcatagtccccatcggctacatcccggaatggctcataaaggatgtggctgaattcgtggattcctactactcacgaaggggagtttccgttaaagctggcgattccctaagcgagagcctgtttctatcagcgtatcatccattccggcgtcagttcctaggtggtgcgtttctacccacgctttccgagattggaaggagagcaggagcgctggccacagtgggcatcacaaaggttgacctctacgaaaagggcatgaacttcgtctttggtgtagccagtgaaaagttgaggagtgccgttgtttcaatccaccggctaaggcccgagttctatggaaggccaagcaacgacgagctcctcatagagaggactgtaaaggaagtcatgcacgagctcggccacgtttttgggctttctcactgtccaaacgtccgctgtgttatgcacttctcaaactcggtcgatgatacggatatcaaactcccctactactgcccaaactgtgagcggaaactcttgaggaatctggaggtggttttgtgatagaggtagaactgaagggatacgccagtgatgaaatcttccagagggtacgggacgagttcgagttcataaggaaggagtaccacgaggatacctactatcagcacccgtgcagggacttttcggagaccgatgaggcacttagaatcagaataaggcggtttaacggccactttgaggcctttatgacatacaagggtccaaaaattgatgagcattcaaaaacacggaaggaaatcgaagtcccgctcagcgatcccgacaaacacgctgagatattagaaagccttggattcgtggaggttctcacggtttccaaggtgagggagaagtactacgtcgagaaagggataataatagccctggacgaggttgcggggcttgggaagtttatacagatagaggcgatgacggacagaactgaagacgttccacagcttatagacaagttgagggcaatactgactgaactcggcgttgagaggttcgaacgcagatcctatctggaacttctgctggaaaaggagggagcaaatggggaagcttgacgagttctttggttcttttattggtggacggccagacacggaggtactcacggagatagaagacaggctcctagtggacgacatacccggggcaattgcccttcttgaagaactaaagaaagagcagaaccttgtcatagcggtacggctgattttaagaaagataacccagatgctggagaaaggagatggtcaatcattcagggcacttcccctcataaaacagctcctccctcacatcaacgggataaaaaatgagcgctaccgcgccctccttctaggggagatttccattgggttttacctcgctggctccgagcttgaaggggatttcacattaaagaccgcgataaaccttgcccttcagcatccagacatactgagggacattctcttttccctgattaaggcaggtcttctccaaaaggctgcctacgcaatgaaattcgtaaaagacccggaaaagctagacgttgtcctgtcatatctggcggaggtgttctacgagaggggagacatcgaaaaggcgcttgcaataataagccacataacgagcaacttccacagggccgttgcgctgatgcacctggcacagcttgaggagaaccgcgatagggggaaagcgctccagttcatagagtcagcgataaagatagcggaaagaatagaagatcctgaaaccagatttgagctgatgctgaagcttcacgaccttaaacacgagataatgggcgaaccgctcagcgttggtgagttactctcggctgaaactcctctggagaaagaagcggcggaaggccaagacggtgggagagtataagggagtgcggcagtttaattccaagccccaaaagttccccgacccttctggcgacttccctaggcgtgccctctaaaaacactcttccgtccttgagcacaactattctgtctgcgtttctgaagaggaagcggtaatcgtgttcgacgattattaccgttaccccctcttttctcagcctaagtatcacgttctcgacttctttcttacccccaggatcgacctgagaagttgtctcgtccatgacgataatcgtcgtcttcatgcccagaactgatgctatgcccaacctctgtttctccccaccgctgaggtttggcgggaactcctcccgctttccttccagaccgacgaccctcagcgcccagctgaccctctcttctatctcttcccttggaaggcccaggttttcaagggcgaaggccacttcatcctccaccgtcatattgaacagctggctttcggggttctggagcacgagacccaccactgtggagagcttagaaactggtgtttccagagttctcaattcctctccagtcgagggatttctgaccagaacctccccagagaaatcgcccctgatggagtgggggattaccccgttgaacgtcagaacaagggtcgattttccgcttccgctcggcccgattatcccaaccatctccccccttctaactgacagattcacaccattgagggccggctttttcgagcgcgggtactggaagcgcaggttcctgacctccagaacgttcaccttctcagccccctagggagaaggaagaacacgcttattatgaacacgagcgtcgagaatatctcaagcctgcctatccacatgaggagtatgtagacgaacttaaggtcagctggcatcgccggggatgttataccaacgctgagaccgacgttgccctgggcggaggccacctcaaagagagcatccgcgaggttggcgtggactctaagcattgtgtagaggactcccgcaagcaagaacgcgacgtacgtcatcgtaaagctcattacctcctgtatatcctcctcactgaagacgtagtttccgacctttctcttgataacggcgcccttcgggagtatggcgctttcgatcgtccacttgaggctctcgtacatcagggttatccttatcagctttattccgcccgcagtgcttccggcaccgccgccgataaccatcagcaccgccaggagaaactttccaacctccggatacttggagaggtcggatatctggaatccagtacagcttatagctgaaaccgcatggaaaacagcgtcctggagcgcctgggcgagggaatccccaacctggactagtccataggcgatgagggaaaccgcagggattaggaagaagaacatgtacctgacctgaatgtccgcgaagaacggtttgagagacctgtccttgaagaccctgtagtggactgtgaaattaacggcacccattatcatgaggaagatcgtcacggcgtttatagccggactgtggaagaaccctatgctctcgtcgtgggtgctcataccacctgtgccaagacctgtcatggagtgtgtgagcgcatcaaagaggcccatcccgttgatgtagtacaggtagacaccaacaagcgtcaggacgaggtatatttcaaatatgaccttggccgtgttcaccaggtttggaaggattctctcgctccttgcctcagccctgtagagcctggccgcggcaacacctggccgaataaggacggtgagggcaaccagtactataccaattccacctaaccactgcatccaggccctccagaacagcagcatcttgggatagctctgcaggttgctcatcatggtgagaccagtgcctgtccaagcgctcatacattcaaaataggaatccagcaggggcatgtgagcgatcttcacaaaggggacaacgctgacgagtgaagcgaggagccaggtaaatgcagcagcaaccatcgcctgtctgaggtttacatcctcaatcttgctggagtgtctgctgagccaggccccgaacaggattgaggccattccgggcagggcgaagtatggcacatattttatctcctcgggatagacccacaccagcagcgcgggaacaaggtaagctacccccacaccctcaagtattgatccagtgaggtttctaacgacgaagaagtcatcggagacgttgatgtgcttcctgaagtctaacattccctcaccttcctggactatgggggtggaaataaaaggtttttcgtaaggtttaagggcagcctaacactaaggaagttggtggtcaaaagtggacgagagagaagcactcataaaggcaggagagatcgcaagacaggtcaagaaagaggtagtcgatctgataaaacccggtgcaaagctctacgacatagcggagttcgtggagagaaggatagttgagctgggcggtaaacctgctttcccgtgcaacctctcaataaacgagattgccgcacactataccccctacaaaggagacgggacggttctaaaggaaggggactacctgaagctcgacattggcgttcacgttgatgggtacatcgcggacactgccgtcacttttagggtgggaatggaagaggatgagcttatggaagcggcaagggaagcacttgaaaacgcgatagcaacggttagagcaggggtaatgataagggacgtcgccagagccattgaggagaccatccgggggaagggctttaacccaatagtgaacctgagcggccacaaggttgagcgctacaagctccacgcgggcgtcagcgtgcccaatgtctacagggaggccgacacctacgtcctccaggagggcgacgtcttcgcaatagagcccttcgcgacaactggagccgggcaggtcatcgaggttccgcccgcgctcatcttcatgtacctccgcgatagacccgtgaggatgctccaggctaggaggcttttgatgcacataaagaagaactacaagaccttacccttcgcctaccgctggctccaggactttttacctgagggacagctcaaactcgccctggcccagcttgagaaggccggcgccatctatgcctacccgatcctcagggaagtccggggtgggatggttgcccagttcgagcacaccgtcatagtagaaaaggagggtgcttacataactacataattcaccttttctgttttcatattttgtttcatgcaggattaaacaaaccaaactgaggagagcctgccctgtgaaagtttaccctcagaagagccattggtgaatttaaggatagaggaggaaagacccggagggccaggcccttgaatggcgccggggcagggatttgaaccctggtgggcggacgcccacgggatctcgagtcccgcgccttcccaggctaggctaccccggcgctcttaaccatcaacactccccgcgagagactttataaatttttttagtcccttatctctgaaagaagaaccgccacacaaaatctggatcaatggacgatgaaattaggacatacttagttggttttagtctcgtcaggtttaagagttgaactcatagttggggttaatcttaagagaaagaagacgaaggtaaagagggtgggaaaagtggtcataaaaagtactgatgacaagaccaatggactcagaattcgtggggcacttgaaatccggctctcgccggagatttagtggatttggtgaaatctggtgagatagatatcagtaagattgagcagaggcctcttaaacttaagcgataccagaagtttgactattgaccaaacagatactaccaaagtttggattataactgtggagtcgatcacagcctttctgtaaaaacgtcttgtttgcggctcttttttagtcattgagccgaaaggtatattttctccaaaatccacaatctcaagctccccgcctttctttttctcttttgaaaaccctgccctttaggatagaaggagtcagctttctcaacttcaagagactatagaaacaccactcaaacctactagaggatttaaatggcattgagttagaagggaggaagcatatgaaagaaaagttaataatccagatttcccaaacatctcaaggtgttaagtatggccgtgagtgtgaagaattcggagggaataaaacttctcattgaggaggttgcgaaggccgttggtgtttcaccaaaagagcttatcgagtattatgagtggaaggctaaccgggagaagctaaagaaaatgaaacccacgaggatgactaaaaaggaggctaaaaacttcatactctcccagaagggaaagaggaagataagcgaggaagaggccattaaactctattatgaagctgaggaggagatcaagaaatgggagaaaatcgaaagaaaactaaagaaactcggcttagagtagttattgatacttcagtattattctctggtgcaatctccactcgaggttatgcttttgaggttctcgaactcttagctacggggaaaataacaaactacatttcctcaaaaactctcaaggaatatgaagagaagctttattcaaaaaaggcgctgaggtatatttcccttgaggaagctaaggggtatattcaatcaatgaaggcattatcaaaaagggttcaaattaagcgttcattccagaagtctaaaactattcttgagaaagtccgtgatccgaaggatattccgtttctggacgttgtgtataacgctaaggccgacgtgctgataacctatgaccgtaagcatttgttgagaatcaggaacaaagagaagaagtttaagctcggaagacatgagttctatatcctcacgccgaaagagttcatagaattctacaaaaagtaataattccatgataaaattttagctcttcactgggcgctgggcgaaagatttattaacctaacgttacttaaattctgacggggcctagcaaaggtttatatcatatgccgccctaataataactgaaaaggaggtgacagcatggtcggaatccaggtgcaagaggtaatgaccgacaacttccagaagatcgacatcaatgccccgctttctgaggccataggaatcttcgagaaggaagaccccgatctcattctcgtgttcgatgggaacctgtacaagggtgtattgacccaggacttgatcatacgctcccacctcaagtgggatccaaccaaggccaaggttagggacgtttacaagcccgctcccgttatcaagcccgatgaggatctgagcaaggccgccaaactcatgattgaggttgatctccgctcgctcccagttggggagagcaaggccgagataatcggcgttgtaaacgatatggccgtccttgagagagttgcccaggagaagttcggcaaaggtaaagttgaggagtacatgaccaaggacgtcataacactcaagccgagcgacaccgtcgccaaagccctggctgtaatgcgcgaccacgcgatttcaaggatacccatagtcaacgacgagggcaagcttgagggactggttaccctccacgacctcataatcaggttcatcaagccgcgcttcagggcccaggctggagaggttgcgggcgagaagataccgcccttcagcatgcccctcagggacgtcatgataaggggagtcataaccatactgcccgacgcaaccgtaagggaagccgtcgcaaccatgaaggacaacgacatcgacggccttgtcgttgtcaacgaggacaacaaggtagtcggaatcctcacggtcaaggacctcctcctgccgatatcaaaaatgaccgagaaggaggcaaggttctacctccagctcggcggtgatgcttcaatactcagcgacttcacgagggagcgcataatacaggacataaaacgcttcgttgatggatacgaggatctccttggacaggagggcatcatctacctctacatccgccgcttccctgagaagctcaggggagttcacctctaccaggccaggatgagggtcgtcaccgacaggggaacctttgtggccacgggcgagacctggggtgccatccaggcagttcacgacgccctcagggccattgagagacagctcctccagaaggccgagcttgaaaaagatgtaaggtacgcgaaacgcttcatcgagaagcttggccttgcctgaaggtctcgaactccctttctatcattcctttctgtttttcatctagcgtttcttcgttgatcacgagtatcataaggccattggcgtttagcgtcatatccttaaggtttaggagaaacttcatggtccgctcaaagccgttctcaatgatgagatactcaaccgagtcaatgtaaactgttctgtatccttttcgaagggcatttgccacgaggtccgtcagtatgtctatgctggttggactcacggcataaacctggggagtctcggagatgacgccctcttttgcccgggtcacccagaacaccagcgatccagggtgaatcttactcataacgtccatgatgttttccctggtgataataacggtacccggccttgaccacacatccccaatggcctgaactacctcttccttgcccttgaacataaaggagcccttgattggttcgctcgcaccagagactgaaactgccctcataggataaaagacgtacttaaccgcaccgaccgcagccataaacctgaacagcgcccccaggaggaaacctatgggtgcaaaccagtcaataaaccgggtcacaggatacgtgaggttgagggctcccagaaggattaggccgtaggggaagagcctctcgattgactttggcattgttgcctctaaaagaacgtatccaaagtatatcatggacaacccaaagatcagatagggaagggaatatgccactgtgagattctcaaagagcttaatgtcagacgcaactaggaatatccatatgtaagatactacgacaaagattgccacgtacgcaacatctttgaagtcggtcttcccatactttatatgaagcgctccccacaagaacagtatcgccacggcaaaggttgaaacaactgatgcaactagataagcattctccttgaaagttatcccaagtgggtcgagcacatagctctccatgtccaaagcatctatcaaaaaggc

SEQ ID NO: 1 - DNA, 2089378 bp, Thermococcus kodakaraensis KOD1 (residues 1,044,690-2,089,378 of 2,089,378)
  CDS (1)..(5016): DNA polymerase elongation subunit (family B)
  CDS (5134)..(5733): Predicted metal-dependent hydrolase
  CDS (6586)..(7014): Predicted CoA-binding protein
  CDS (16696)..(17697): ABC-type sulfate/molybdate transport systems
  CDS (23947)..(24834): Zn-dependent hydrolases
  CDS (27565)..(28620): ATPase involved in DNA repair
  CDS (29782)..(30681): Uncharacterized proteins of WD40-like repeat family
  CDS (31102)..(31266): Uncharacterized ArCR
  CDS (31414)..(32235): SAM-dependent methyltransferases COG0500 SmtA
  CDS (36553)..(37380): Archaeal flagellins
  CDS (39760)..(40332): Putative archaeal flagellar protein G
  CDS (40360)..(41070): Predicted ATPases involved in biogenesis of archaeal flagella
  CDS (47317)..(47799): Phosphoserine phosphatase
  CDS (49393)..(49731): Serine/threonine protein kinases
  CDS (54169)..(55020): Uncharacterized ACR
  CDS (56674)..(57267): Nicotinamide mononucleotide adenylyltransferase
  CDS (58855)..(59703): Predicted methyltransferase
  CDS (62830)..(63723): Integrase
  CDS (67399)..(68973): Subtilisin-like serine proteases
  CDS (69583)..(69795)
  CDS (70504)..(71112): Phytoene dehydrogenase and related proteins
  CDS (73336)..(74643): Zn-dependent hydrolases
  CDS (83431)..(83628): Fe-S  oxidoreductases
  CDS (83908)..(84267): Serine proteases of the peptidase family S9A
  CDS (87211)..(87663): Mn-dependent transcriptional regulator
  CDS (90079)..(90267): Predicted Zn-ribbon RNA-binding protein with a function in transl ation
  CDS (91363)..(92979): Na+/proline
  CDS (94552)..(95712): Glycine/D-amino acid oxidases (deaminating)
  CDS (104398)..(106101): Uncharacterized ACR
  CDS (106210)..(106779): Transcription initiation factor TFIID (TATA-binding protein)
  CDS (106834)..(107454): RecA-superfamily ATPases implicated in signal transduction
  CDS (122431)..(122667)
  CDS (122668)..(123594): Triphosphoribosyl-dephospho-CoA synthetase
  CDS (132745)..(133890): L-aminopeptidase/D-esterase COG3191 DmpA
  CDS (188074)..(189315): Nucleoside-diphosphate-sugar pyrophosphorylases involved in lipop olysaccharide biosynthesis/translation initiation factor eIF2B su bunits COG1208 GCD1
  CDS (189865)..(190278): Uncharacterized ACR
  CDS (192535)..(192981): Fimbrial assembly protein
  CDS (195097)..(195405): ABC-type multidrug transport system
  CDS (201067)..(201738): Predicted amidohydrolase
  CDS (204472)..(205083): ATP phosphoribosyltransferase (histidine biosynthesis)
  CDS (209476)..(210486): Histidinol-phosphate aminotransferase/Tyrosine aminotransferase
  CDS (212938)..(214239): Anthranilate/para-aminobenzoate synthases component I COG0147 Trp E
  CDS (214807)..(215433): Phosphoribosylanthranilate isomerase
  CDS (244591)..(245055): Uncharacterized ACR
  CDS (251161)..(251265)
  CDS (251557)..(251760): Phosphoglycerate mutase 1
  CDS (270052)..(270306): Uncharacterized ArCR
  CDS (276688)..(277758): Aldehyde:ferredoxin oxidoreductase
  CDS (277759)..(278526): ABC-type thiamine transport system
  CDS (281104)..(282072): Putative periplasmic protein kinase ArgK and related GTPases of G 3E family
  CDS (286543)..(287079): Predicted nucleic acid-binding protein
  CDS (294346)..(294663)
  CDS (298699)..(300825): Predicted membrane protein
  CDS (306190)..(306858): Glycosyltransferases involved in cell wall biogenesis
  CDS (312637)..(312903)
  CDS (320239)..(320928): Integrase
  CDS (321508)..(321696): Predicted nucleic acid-binding protein
  CDS (322012)..(322365): Uncharacterized protein involved in cysteine biosynthesis
  CDS (327013)..(327282): Cation transport ATPases
  CDS (328333)..(328815): Uncharacterized BCR
  CDS (329290)..(330090): Chromosome segregation ATPases
  CDS (332449)..(332736)
  CDS (335068)..(335664): Uncharacterized CBS domain-containing proteins
  CDS (337045)..(337260): Glycosyl transferases
  CDS (342397)..(343461): Transcriptional regulators
  CDS (343888)..(344076): CTP synthase (UTP-ammonia lyase)
  CDS (346174)..(346356): TPR-repeat-containing proteins
  CDS (346528)..(346881): Replication factor A large subunit and related ssDNA-binding prot eins
  CDS (351592)..(352155): Riboflavin synthase alpha chain
  CDS (353923)..(354102): Transcriptional regulator
  CDS (355393)..(355872): Riboflavin synthase beta-chain
  CDS (359407)..(360171): Flavoproteins
  CDS (374488)..(374550)
  CDS (376000)..(376092)
  CDS (394894)..(398109): Methyl-accepting chemotaxis protein
  CDS (408052)..(408807): Cell division GTPase
  CDS (409459)..(409647): Nucleoside-diphosphate-sugar epimerases COG0451 WcaG
  CDS (413926)..(414252): Parvulin-like peptidyl-prolyl isomerase
  misc_feature (414542)..(414542): n is a or c or g or t.
  CDS (414877)..(415209): Arginyl-tRNA synthetase
  CDS (417109)..(417270): Proline dehydrogenase
  CDS (418636)..(419175): Uncharacterized proteins of WD40-like repeat family
  CDS (426547)..(426711)
  CDS (432397)..(432738): Uncharacterized ACR
  CDS (432751)..(433449): Aspartate racemase
  CDS (434530)..(435735): Predicted GTPase
  CDS (440578)..(441444): Uncharacterized ArCR
  CDS (441511)..(441882): Integral membrane protein possibly involved in chromosome condens ation
  CDS (444220)..(444681): Cation transport ATPases
  CDS (450481)..(450996): Rubrerythrin
  CDS (452770)..(453123): ATPases involved in chromosome partitioning
  CDS (455338)..(455502): Cellobiose phosphorylase
  CDS (456838)..(457587): DNA polymerase III beta subunit
  CDS (457618)..(458184): Uncharacterized ArCR
  CDS (458476)..(459126): Peroxiredoxin
  CDS (459718)..(460674): Predicted transcriptional regulators
  CDS (466975)..(467631): Predicted phosphoesterases
  CDS (475702)..(477042): Predicted DNA-binding protein containing a Zn-ribbon domain
  CDS (477049)..(477657): Uncharacterized ACR
  CDS (481315)..(482679): Adenylosuccinate lyase
  CDS (484981)..(485445): 6-pyruvoyl-tetrahydropterin synthase
  CDS (490744)..(491844): ABC-type dipeptide/oligopeptide/nickel transport systems
  CDS (493561)..(495408): ABC-type thiamine transport system
  CDS (527689)..(528324): Protein containing the IMP4 domain present in small nuclear ribon ucleoproteins; implicated in RNA processing
  CDS (528364)..(528969): Multisubunit Na+/H+ antiporter
  CDS (529978)..(530385): Multisubunit Na+/H+ antiporter
  CDS (530659)..(532146): Formate hydrogenlyase subunit 3/Multisubunit Na+/H+ antiporter
  CDS (532615)..(533754): Kef-type K+ transport systems
  CDS (536998)..(537846): Methylase of chemotaxis methyl-accepting proteins COG1352 CheR
  CDS (537847)..(538209): CheY-like receiver domains
  CDS (545191)..(545688): Chemotaxis protein; stimulates methylation of MCP proteins COG187 1 CheD
  CDS (548218)..(548553): Predicted oxidoreductases (related to aryl-alcohol dehydrogenases )
  CDS (563371)..(564303): Uncharacterized ABC-type transport system
  CDS (568711)..(570129): Acyl-CoA synthetase (NDP forming)
  CDS (570898)..(570957)
  CDS (577750)..(578565): Dehydrogenases with different specificities (related to short-cha in alcohol dehydrogenases) COG1028 FabG
  CDS (593914)..(594495): Uncharacterized ACR
  CDS (605506)..(605823): Predicted pyrophosphatase
  CDS (611281)..(612924): ABC-type Fe3+-siderophores transport systems
  CDS (613855)..(614616): ABC-type cobalamin/Fe3+-siderophores transport systems
  CDS (615379)..(616116): Uncharacterized ACR
  CDS (632617)..(633099): Predicted nucleic acid-binding protein
  CDS (633112)..(633933): Metal-dependent hydrolases of the beta-lactamase superfamily II
  CDS (633964)..(634764): Dehydrogenases with different specificities (related to short-cha in alcohol dehydrogenases) COG1028 FabG
  CDS (639553)..(639651)
  CDS (650587)..(651087): Uncharacterized ACR
  CDS (664498)..(665586): Glyceraldehyde-3-phosphate dehydrogenase/erythrose-4-phosphate de hydrogenase
  CDS (667123)..(667176)
  CDS (682717)..(684711): Rad3-related DNA helicases
  CDS (688516)..(689571): Glycerol dehydrogenase and related enzymes
  CDS (711859)..(712440): DNA-directed RNA polymerase specialized sigma subunits
  CDS (721789)..(722304): Uncharacterized ACR
  CDS (725704)..(726249): Predicted membrane protein
  CDS (729844)..(730989): Phosphoribosylaminoimidazole carboxylase (NCAIR synthetase)
  CDS (740584)..(741294): Uncharacterized ACR
  CDS (742684)..(743376): Predicted transposases
  CDS (745369)..(746826): Cobyric acid synthase
  CDS (751954)..(752967): Histidinol-phosphate aminotransferase/Tyrosine aminotransferase
  CDS (753046)..(754110): ABC-type Fe3+-siderophores transport systems
  CDS (758689)..(759645): Ornithine carbamoyltransferase
  CDS (763396)..(764058): Uncharacterized ACR
  CDS (765637)..(766047): Translation elongation factor P/translation initiation factor eIF -5A
  CDS (766138)..(766683): Uncharacterized ACR
  CDS (769459)..(769962): CBS domains
  CDS (771820)..(773541): Chloride channel protein EriC
  CDS (774838)..(775089): Regulators of stationary/sporulation gene expression
  CDS (782329)..(783108): Gamma-glutamyltranspeptidase
  misc_feature (786890)..(786890): n is a or c or g or t.
  misc_feature (786907)..(786907): n is a or c or g or t.
  misc_feature (786944)..(786946): n is a or c or g or t.
  CDS (790672)..(790737)
  CDS (792505)..(792675): Uncharacterized ArCR
  CDS (793111)..(795000): Archaeal Glu-tRNAGln amidotransferase subunit E (contains GAD dom ain)
  CDS (802669)..(802890): Predicted RNA-binding protein (contains KH domains)
  CDS (812635)..(813648): Predicted periplasmic binding protein
  CDS (813652)..(814113): Helicase subunit of the DNA excision repair complex
  CDS (816754)..(817728): Predicted archaeal sugar kinases
  CDS (818623)..(819468): ABC-type transport system involved in multi-copper enzyme maturat ion
  CDS (819475)..(820395): ABC-type multidrug transport system
  CDS (830551)..(832368): ATPases of the PilT family
  misc_feature (839139)..(839139): n is a or c or g or t.
  CDS (840097)..(840471): UDP-N-acetylmuramyl pentapeptide phosphotransferase/UDP-N- acetyl glucosamine-1-phosphate transferase
  CDS (842275)..(842628): Predicted nucleotidyltransferases
  CDS (845725)..(846387): Predicted hydrolases of the HAD superfamily
  CDS (860080)..(860340): Membrane carboxypeptidase (penicillin-binding protein)
  CDS (865387)..(866304): DhnA-type fructose-1
  CDS (868444)..(870222): Carbon starvation protein
  CDS (870532)..(870840): ABC-type dipeptide/oligopeptide/nickel transport system
  CDS (871942)..(872775): Chromosome segregation ATPases
  CDS (872833)..(873117): Regulators of stationary/sporulation gene expression
  CDS (879211)..(880500)
  CDS (887275)..(887487): Uncharacterized ArCR
  CDS (896626)..(899040): ERCC4-like helicases
  CDS (906982)..(907974): Hydrogenase maturation factor
  CDS (909301)..(910116): Predicted glutamine amidotransferase
  CDS (910513)..(912024): Predicted phosphohydrolases
  CDS (914305)..(914493): Histones H3 and H4
  CDS (915118)..(916428): Uncharacterized ArCR
  CDS (931594)..(932070): Uncharacterized ACR
  CDS (934564)..(935379): Small-conductance mechanosensitive channel
  CDS (954301)..(955020): Predicted transcriptional regulators
  CDS (955204)..(956391): Dehydrogenases (flavoproteins)
  CDS (964168)..(964827): Uncharacterized membrane protein
  CDS (966166)..(967002): Translation initiation factor eIF2alpha
  CDS (968134)..(968757): Cobalamin biosynthesis protein CbiM
  CDS (968995)..(969663): ABC-type cobalt transport system
  CDS (970555)..(971892): Subtilisin-like serine proteases
  CDS (995047)..(995112)
  CDS (995380)..(995844): Predicted membrane protein
  CDS (1013371)..(1013883): Molecular chaperone (small heat shock protein)
  CDS (1014829)..(1017228): ATPases of the AAA+ class
  CDS (1017331)..(1020711): Type II restriction enzyme
  CDS (1027657)..(1029558): Threonyl-tRNA synthetase
  CDS (1032406)..(1032792): Holliday junction resolvase - archaeal type
  CDS (1032841)..(1034373): Predicted membrane protein
  CDS (1034458)..(1035498): Cellulase M and related proteins
  CDS (1035541)..(1036101): Predicted Zn-dependent proteases
  CDS (1036636)..(1037469): TPR-repeat-containing proteins
  CDS (1047016)..(1048092): Predicted GTPase
  CDS (1053859)..(1055274): DNA helicase TIP49
  CDS (1060582)..(1061310): Cytochrome c biogenesis protein
  CDS (1061878)..(1063221): PLP-dependent aminotransferases
  CDS (1089160)..(1089210)
  CDS (1096375)..(1096839): Ribosomal protein S15P/S13E
  CDS (1096870)..(1098303): Single-stranded DNA-specific exonuclease
  CDS (1099468)..(1099908): Predicted nucleic acid-binding protein
  CDS (1099954)..(1100991): Uncharacterized protein sharing a conserved domain with thiamine biosynthesis protein ThiI
  CDS (1123810)..(1124472): Predicted subunit of tRNA(5-methylaminomethyl-2-thiouridylate) me thyltransferase
  CDS (1125727)..(1126902): Predicted GTPase
  misc_feature (1128488)..(1128488): n is a or c or g or t.
  misc_feature (1128499)..(1128499): n is a or c or g or t.
  misc_feature (1128505)..(1128506): n is a or c or g or t.
  misc_feature (1128517)..(1128518): n is a or c or g or t.
  misc_feature (1128539)..(1128540): n is a or c or g or t.
  CDS (1144054)..(1145121): Predicted butyrate kinase
  CDS (1146553)..(1148040): Kef-type K+ transport systems
  CDS (1148086)..(1149231): Uncharacterized ACR
  CDS (1150093)..(1151094): Asparagine synthase (glutamine-hydrolyzing)
  CDS (1167001)..(1167234): Ribosomal protein L20A (L18A)
  CDS (1172047)..(1172277): Amino acid transporters
  CDS (1178296)..(1178862): Dephospho-CoA kinase
  CDS (1210174)..(1210893): Uncharacterized membrane protein
  CDS (1211128)..(1211787): Integrase
  CDS (1217374)..(1217490): CBS domains
  CDS (1222282)..(1223655)
  CDS (1223758)..(1225113)
  CDS (1230580)..(1233081): Glucan phosphorylase
  CDS (1254304)..(1255470): Archaeal adenylate kinase
  CDS (1258972)..(1259079): Parvulin-like peptidyl-prolyl isomerase
  CDS (1265593)..(1266390): Sugar-binding periplasmic proteins/domains
  CDS (1284667)..(1285869): Uncharacterized archaeal coiled-coil domain
  CDS (1285975)..(1289823): Type II restriction enzyme
  CDS (1290019)..(1292922): Leucyl-tRNA synthetase
  CDS (1316410)..(1317765): Signal recognition particle GTPase
  CDS (1318585)..(1319298): Adenine/guanine phosphoribosyltransferases and related PRPP-bindi ng proteins
  CDS (1319308)..(1319637): Superfamily II DNA and RNA helicases COG0513 SrmB
  CDS (1365589)..(1366155): CBS domains
  CDS (1366195)..(1367346): Kef-type K+ transport systems
  CDS (1371847)..(1372125): Uncharacterized archaeal coiled-coil domain
  CDS (1373902)..(1376664): Alanyl-tRNA synthetase
  CDS (1382767)..(1384572): ELP3 component of the RNA polymerase II complex
  CDS (1388485)..(1388589): Uncharacterized ArCR
  CDS (1390108)..(1390617): Predicted Fe-S-cluster oxidoreductase
  CDS (1398271)..(1399176): Preprotein translocase subunit SecF
  CDS (1401502)..(1401813): Archaeal/vacuolar-type H+-ATPase subunit H
  CDS (1403824)..(1404309): F0F1-type ATP synthase c subunit/Archaeal/vacuolar-type H+-ATPase subunit K
  CDS (1404349)..(1404960): Archaeal/vacuolar-type H+-ATPase subunit E
  CDS (1407475)..(1408257): Archaeal/vacuolar-type H+-ATPase subunit A
  CDS (1409674)..(1410327): Archaeal/vacuolar-type H+-ATPase subunit D
  CDS (1413235)..(1413960): Cystathionine beta-lyases/cystathionine gamma-synthases
  CDS (1422217)..(1422759): ATPase involved in DNA repair
  CDS (1424266)..(1424787): Uncharacterized CBS domain-containing proteins
  CDS (1434874)..(1435398): Periplasmic ligand-binding sensor domain
  CDS (1442602)..(1444524): Pyruvate:ferredoxin oxidoreductase and related 2-oxoacid:ferredox in oxidoreductases
  CDS (1447018)..(1447827): Predicted permease
  CDS (1451362)..(1452348): L-asparaginase/archaeal Glu-tRNAGln amidotransferase subunit D CO G0252 AnsB
  CDS (1467655)..(1467744)
  CDS (1467769)..(1467906)
  CDS (1471870)..(1472673): Dehydrogenases with different specificities (related to short-cha in alcohol dehydrogenases) COG1028 FabG
  CDS (1484422)..(1486413): Subtilisin-like serine proteases
  CDS (1489417)..(1490157): Uncharacterized ATPases of the PP-loop superfamily
  CDS (1490896)..(1491087): Ferredoxin 1
  CDS (1501234)..(1501755): Uncharacterized ACR
  CDS (1502782)..(1504029): Membrane protein involved in the export of O-antigen and teichoic acid
  CDS (1506454)..(1507683): Putative glycosyl/glycerophosphate transferases involved in teich oic acid biosynthesis TagF/TagB/EpsJ/RodC
  CDS (1513756)..(1514835): Predicted glycosyltransferases
  CDS (1515877)..(1516842): Predicted glycosyltransferases
  CDS (1519816)..(1521600): Outer membrane lipoprotein-sorting protein
  CDS (1525075)..(1526076): Predicted archaeal membrane protein
  CDS (1536298)..(1536771): Predicted phosphoribosyltransferases
  CDS (1536811)..(1537365): 2'-5' RNA ligase
  CDS (1546165)..(1549362): Isoleucyl-tRNA synthetase
  CDS (1552330)..(1553088): Cytochrome b subunit of the bc complex
  misc_feature (1561400)..(1561400): n is a or c or g or t.
  misc_feature (1561477)..(1561477): n is a or c or g or t.
  misc_feature (1561545)..(1561545): n is a or c or g or t.
  CDS (1564489)..(1564938): Predicted nucleic acid-binding protein
  CDS (1570858)..(1571220): RNase P subunit P14 and its archaeal orthologs
  CDS (1578037)..(1579284): Sugar permeases
  CDS (1579294)..(1582596): Alpha-amylase/alpha-mannosidase
  CDS (1584289)..(1585641): Phosphomannomutase
  CDS (1588597)..(1588962): Transcriptional regulator
  CDS (1590298)..(1591578): Threonyl-tRNA synthetase
  CDS (1595017)..(1595325): Predicted phosphate-binding enzymes
  CDS (1599886)..(1600935): Eukaryotic-type DNA primase
  CDS (1616860)..(1617561): 2-polyprenylphenol hydroxylase and related flavodoxin oxidoreduct ases~ COG0543 UbiB
  CDS (1633129)..(1633257): Isoleucyl-tRNA synthetase
  CDS (1634125)..(1634739): Arabinose efflux permease
  CDS (1652842)..(1653462): Predicted site-specific integrase-resolvase
  CDS (1661293)..(1661439)
  CDS (1668871)..(1669944): Predicted GTPases
  CDS (1678705)..(1679553): ABC-type phosphate transport system
  CDS (1680367)..(1681128): ABC-type phosphate transport system
  CDS (1682428)..(1682817): Glycosyltransferases involved in cell wall biogenesis
  CDS (1706986)..(1707378): Uncharacterized ACR
  CDS (1733473)..(1734267): Predicted amidohydrolase
  CDS (1736419)..(1736520)
  CDS (1745650)..(1746300): Predicted RNA methylase
  CDS (1763590)..(1764141): Predicted GTPases
  CDS (1765840)..(1766682): 4-hydroxybenzoate polyprenyltransferase
  misc_feature (1767941)..(1767941): n is a or c or g or t.
  CDS (1770892)..(1772169): Malic enzyme
  CDS (1776586)..(1777293): rRNA methylase
  CDS (1787485)..(1788669): Pyruvate:ferredoxin oxidoreductase and related 2-oxoacid:ferredox in oxidoreductases
  CDS (1789714)..(1790697): Predicted hydrolases or acyltransferases (alpha/beta hydrolase su perfamily)
  CDS (1792792)..(1793328): NADPH:quinone reductase and related Zn-dependent oxidoreductases COG0604 Qor
  CDS (1794964)..(1796124)
  CDS (1816999)..(1817745): ABC-type cobalamin/Fe3+-siderophores transport systems
  CDS (1822105)..(1823073): ABC-type multidrug transport system
  CDS (1823857)..(1824675): ABC-type multidrug transport system
  CDS (1825648)..(1826151): Predicted regulator of amino acid metabolism (contains the ACT do main)
  CDS (1826572)..(1826886): Uncharacterized protein involved in tolerance to divalent cations
  CDS (1829731)..(1830558): Permeases of the drug/metabolite transporter (DMT) superfamily CO G0697 RhaT
  CDS (1831699)..(1832772): TPR-repeat-containing proteins
  CDS (1835581)..(1836201): Sugar permeases
  CDS (1844947)..(1845273): Permeases of the drug/metabolite transporter (DMT) superfamily CO G0697 RhaT
  CDS (1865656)..(1866711): NADPH-dependent glutamate synthase beta chain and related oxidore ductases COG0493 GltD
  CDS (1869643)..(1870143): Fe-S-cluster-containing hydrogenase components 1
  CDS (1872808)..(1873179): Multisubunit Na+/H+ antiporter
  CDS (1873732)..(1874181): Multisubunit Na+/H+ antiporter
  CDS (1876465)..(1876995): Ni
  CDS (1884157)..(1885149): Thioredoxin reductase
  CDS (1886671)..(1887270): Nitrate/nitrite transporter
  CDS (1890634)..(1894026): Predicted drug exporters of the RND superfamily
  CDS (1894318)..(1894365)
  CDS (1896886)..(1897806): Transcriptional regulators
  CDS (1904431)..(1905462): Predicted integral membrane protein
  CDS (1910023)..(1910727): Triosephosphate isomerase
  CDS (1912651)..(1912902): Uncharacterized ArCR
  CDS (1916521)..(1917351): ATPases involved in chromosome partitioning
  CDS (1930573)..(1930920): Putative effector of murein hydrolase LrgA
  CDS (1932193)..(1932927): Uncharacterized ACR
  CDS (1933306)..(1933578): Uncharacterized ACR
  CDS (1947328)..(1948446): Acetylornithine deacetylase/Succinyl-diaminopimelate desuccinylas e and related deacylases
  CDS (1951825)..(1953192): Predicted Zn-dependent proteases and their inactivated homologs
  CDS (1954540)..(1955208): Inorganic pyrophosphatase/exopolyphosphatase
  CDS (1962226)..(1962360)
  CDS (1969396)..(1970652): Subtilisin-like serine proteases
  CDS (1971328)..(1971672): Branched-chain amino acid aminotransferase/4-amino-4-deoxychorism ate lyase COG0115 IlvE
  CDS (1971682)..(1972395): Methionyl-tRNA synthetase
  CDS (1979866)..(1980489): Uncharacterized membrane protein
  CDS (2006536)..(2009136): Inteins
  CDS (2010697)..(2012013): Uncharacterized ATPases of the AAA superfamily
  CDS (2017378)..(2018802): Ribonucleases G and E
  CDS (2025340)..(2025417)
  CDS (2028631)..(2028912): Sensory transduction histidine kinases
  CDS (2038219)..(2039394)
  CDS (2052295)..(2053014): Predicted ATPase (PP-loop superfamily)
  CDS (2066863)..(2067558): Predicted ATPases of PP-loop superfamily
  CDS (2068384)..(2069838): Predicted permease
  CDS (2074012)..(2075424): Ribulose 1
  CDS (2075557)..(2076162): Predicted transcriptional regulators
  CDS (2082376)..(2082897): Pyruvate-formate lyase-activating enzyme
  CDS (2088670)..(2088921): DNA-directed RNA polymerase specialized sigma subunit
agccgacagcagtacccagcctttctcccgggtctttttggcctggtatgtggaggctataaacagcgcccatcgcgagataaaattgaggattgggataataaggtcataaagagcgttcataactccttcaccaccttttcctgttttacaactacgagagtcctcggaggtacgttcttatcaactataactcccggcccaataagggagccgctccctatcttcctgcccgggtagattgtaacgtttatgcccgtcttgacgttgtggccgatgattgctccgagcttgtgcctgccactgtcttcaagctttccctttatttccaccttgatgttgcccctgtcgtgtctcaggttggcggttatggttcccgctccgaggttgcagttttcccctataattgagtccccaacgtagttcaggtgcggcgcgttggagttgtccattattatggaattcttcacctcgacggcgtttcccacgtggcagttgtcgccaatgctagtgtagggccttatgaagcagttcggcccgatgcgtgagttcttcccaatcttcacaggcccaattatataggcaccgctccttatgactgtaccctcacctatctcaacgggcggtatgaggaccgcgccctcttcaacggtgcccctgacttcgtgcttcagcttggtctttaggaggtactcgttcagctcaaggaggttccagggtcttccaatgtcgttccagtagccggaataagcggcgtaggcaaccttctttccggcttcaatcattaggtttatggtatccgtaatctcgtactcacccctctcgctcaggggagtgcgttcaatgaacccgaaaacttccggcttaaagatatacactccgaggtttgcataaccggggacttttccgggcttttcggtaaccctcttgacgagacttccctcaacctcgatctttccaaagtggcttaggtcttcaaaatgcttaacgagaagagccgcatcggccttttctctcctaaaaacagcaacaagctccctaacaccctcttcctcgaagtatatgtccccgttggccactatgaactcctcatctccaacgtgctccctcgcgctctctatagcctttgcggtcccatccccaggaagctgttcaacgtacgttattggcttgccgttgaactcatcgccgagaacctcgatcagcttctccttctgatacctgactattatcacgaactcatccacaaacgggtcgagattctcaagcacgtactctattatcggcctgtttgccacttttagaacgacctttggcctgtcatcagtcagcggcctcagtctttcccctttaccagcggcgagtattacacccttcatatcagcacccccagatttaacaacacccctattagtccaaagagcgttaaaaacctcctcgttccaagatgttgtgctgtccttaccaaaacttccataatcccaaggctaacaaaaaacgccgtaacagcagtgataaagcccaagagagtgtctccctcgtaggcaccaaggtaaagcagccttattaggtggtaagcaggagcaatcaaaaacccccattcaagcacgttctccgctttgtgtccaggaaggacgagagccagtgtcacgagtcctgtccttgaggctccacctgtggaggagaaactctggaacactccagcaagcactgcatcaagaaaactcggtttggagggtatcctgtcctccgcacctttaagaacggtaagtcctggccatgtcaagccgaagaatgttattaagaacgccaagatcaaattgaagacatcgaaggcagcattatgagccgttaacggcttcgccaagggaaggccaagcaggagggttaagagaaacccgagtacaaagtactggagctccgatgtctcagcgccccgaagggccatcaatggctccttggatagcctttccctatagcggtagagcacagagaacataatgccagcataagcgggcacaagaaaggcagtataactaatcacaccgtctataaggcgaccaaagcttccctctggggacatgggaagccacgacgtaagtgctgccaggattcccgaaagcagtgcgtccgctataccctgaaacatagccatacacccgaaggacattcaaggatattttagacactttgtacctatgaaccttacggttagaggcggagtacccagccccaaactgaatctgaaaatatacttccaggtcaggcacctttttaaacccagccgaaaactcttctcccgcgagaaatacgttgaggtgagaccatgaagaacccgtttgagaagatgccaacagtccttaccgctgatgaactcatcgacaaggccttcaggagggccgagaaggccgcttctgcattcacccctcagggagggaaagttgccaaagcccgtcagagggaggagctgagagtcagaaccgtctccaacgtggtaagggacaacctcaggaagatactcgacagaacacctggagtatccaccctgccgaagttctaccgggagctcgttgatacccttgtcgaccgcgaccagttccaccgctcgctggcgagggtcaactgggccataaagacgataagaaacctagagcagaggtacgtggagaagatacgctacgagagagacccaatcgagatagccaagctcaggaggcagttctacggcagagtggcggacatacttaaggacattggcgacgaccttgagtacctcaacagggcaagggacgttctgaaggagcttcccgtggttgaccttgagcttccaactgtggttatagccggccatcccaacgtcggcaagagcacccttttgagggcgctgacaaatgcgaagccagaggtggcaagctatccgttcaccaccaagggaataaacgtcggccagttcgaggagcactacctcaagtaccaggtaatagatacgccgggactacttgacagacctctaagcgaaaggaacgaggttgaaaagcaggcaatcctcgctttgaaacatctcggagacgttatcgtctacatcttcgacccgagtgagtactgtggcttcccgatagaggagcagatgcatctgttcgaggagatatactcagagttcggagagttcccgttcatcgtcgtcctcaacaaggccgacatagccgacgaggagaagatgaaaacgatcgaggagtttgttaaatccaagggacttgaacccctcaggatatccgcccttacaggcgaaggtctcgacgagctcaagaagagggtcatcgagatagtgaagcccaaggctgaagagttcgccagaaagatcatggaaaaggagctgagaaagttcagagaggaagcgttttagtttcctttcatcagtttctttagttttttgattcacgaattcttttcacgacagccaacaacagatgcaaacagaaaacacgaaagcctcagaatacagagggaagaaaaaagagttcaggcgttctcttccttgatgaggacggcgttaacgaccccgtcctggcccggcctgctggtaacgatggcctttccaatctcagtctctattattgcacccttggtgatgatgtttctcctcgcgtactgcctgttggccgggttctcgacgacgttgagtatcttgaccttcttgccctttccaccctcgaagacgttggcgtagagggcctcaacgaggcgaaccttcctgttgccgccgtaagtcctgatgatcttcctcttctccctgtcctcgccgaccttggtgttggccggctcccttccgagctccctcttcctcttcttcctcgcgaggatgatcctaccacctgagggtttcttgagtgatcttccctgccagatagccattacactcacctcaattagcttatgaacccaacgccacttcgggtagttcgtttataagcttttctgggtcttcaaaagatttttaagtcttctctattactcccatcggtggtggtatgggcgcatttgaggcattctccagaacgatcactctcatcacgcgcgcgaagaagctctacatcctagctctccttctggccctgctggccgctccatttcaggcctatctggcaccagcggacttcagcgttctcgaaaaccaaacatccacaacccagggaaacgtcataatggaggagcacggactttcagaggaacaggtctcggatataatgggttcaatggagaaccttggaaagctcttcgttattctcctgctcctcggctctctgttccagtatggaatcgtcaaaggcgccctcgtgtatggagaaggaagcgaggtaagtctggtagagcttatcagggagagcatactgcacttcccaggcgtactcttgataaacctcttctacgggttcatcgggctggttttcatcgtcgtttcaatgataccaatcggtatcggcctcctgacccttcctgcgggcggtattctggtgcttataggaataggcctcatcatactcactgcggcaatgctgactaccatgtcggtgctcgcagttccgctgtacgctgacagagaagacctcggagccgcgtttgaagcctttggagccgtcctaaaaaaccttccatccagcgtgggcttcggatttctcctttggatcggcgttttggtgataggtctcatatcgggtacggtttccctcgtatcactggcgttccctgagaatattgccggttatgtgtcggcctttctgggtgcgccctttgaggcggttgtgtatgagctgttgtggataggcggcgtcgagttctacagggagcttaagagaaaagaggagctgaaaaaattcgaagaagaaatgaaggaactcggaattgagctttagcttccatacttctttttctttgccgcttcaacgagacccctgaagactggagctggcctcatcggtctcgacttgaactccggatggaactgggtggctatgaagtagctgtgtcccggaagttcgagtatctccatccttctctcgtcgtctccggctatgccgctgaagacaagcccagcctcctcgaacttctcaacgtagtccgggttaacctcccagcggtggcggtgcctttcgtagactatctccctgccgtaaagccttctcgcgagggtgttcggcttgatgtggactggatatgccccaagcctcatggtgccgccgagcctgtcaaggtccctctgctccggcatcaggtcaacaaccggatagggtgtctgagggtctatctcagttgaatgtgccccctcaagtccgaggacgttgcgggcgaactcaacaacggtaagctggaagccgaagcagatgccgaggaacgggatgttattttctctcgcgtaccttatcgccatcatcttgccctctgtacccctagccccgaagcctccgggcacgattatcccatcaacgccctcaaggagcttaactccctgcctctcaacgtcttcggcctcaatccaccttatctttaccttgacgtcgttcgccacgctggagtgcttcagcgcctccttgatgctcaggtaggagtcagccagcttgacgtacttgccgactatcgctatctcgaccgtgtcggtgagggacttgtacttctccaccatctcgcgccaggcttccaagtcgggttctctctcgggaaggccgagcctcctggcgaggtaagcgggcaggccctccttttcgagcatcagagggacttcataagtatcttcgacatcgtaggcgcttatgacggcctcttctgggacgttggtgaacaggcttatcttcctcctcgctgaatcttccagcggatcctctgagcgggccacaatggcgtcaggctgtattccgagagagcgcagctccttgacgctgtgctgggttggctttgtcttctgctcgccgacgaccctcagcctggggacgtaggtaacgtggacgaaggcgacgttctccctgccctcctctatctgcatctgtctagctgcctcaaggaagggcatgctctcgatgtcgccgaccgttccacctatctcgaccacaacaacgtcgtagtccctggctattctccttatgcgctccttgatctcgttggttatgtgcggtatgacctggacagtggctccgaggtactctcctttacgctccttctcgatgactgcagaatagacctttccggtggttatgttgtggtcgaagctcaaactggtgtccaaaaagcgctcgtagttgccgaggtcgaggtcaacctctcccccgtcgtcgaggacgaagacttcaccgtgctggtaggggttcatcgtccccgcgtcgtagttgaggtaggggtctatcttgatgttcgtcgtcctgaagccgcgagccttgaagagcatgcctatagaagcgctggtgatgccctttccgagaccgctaacaacaccacccgtgacaaatatgaacttcgtcatggcaaaacctccaccggttatgtcggtggttgattggggagtgcttaaaagtttttgtttgcgatatggagacaccacattaaaaagtacaaaaaagttaactacgatgtcaaacgtcctccccgttcagctcctccgcctcgatcccgttttctccgtcgtgttcaagctctcttatctcaaacaccttcaggggcactttctttagggccttacccacaacggccttggcaatcctctcagcgtgctcgatgctctgggcgttgtagaccttgagcgtcaagtacatcccgacgaggccgacgcttcctatgacgaaggcgctctcgaagtgcgccccgcagaccggacactgggagtagcctatttccacccgcacaaagtcgagcttctccttgttgagggccttggtgactttgctcactgcgacgtttatagcgtcttcgctcgtctcaacgtcctttacgattatcggtgcctcaagaacgaccacgtagtctcccatttccatcacccaaaggcgaaaagcctgtcgtcttcacccttaaacactccgagcctcactccagcgtcaataaacccgtgggcataattgagagcggcgaaagcggtcacgtagtcgcccttctcgtagtagtacttggcgtcctcaaaatagctcctcgccatggttaaaaagtcgcgggcgacgctcataagaaggctcttctcgtggacggctatttcaagcctctcaagggcctcttcggttattttgaaatacttctggagcttctcatccgttatctcgcgccccaccggtctcgcctcgtcagaccttttacaagtctcttataaaccttacttcaaaggggggcagtagggatgtcgcccccctgggggtcccgacgtcatcgcaacccaatactcgtcgggcacttggggttatcgcgcgaccaaataaaaggcttgcccattccaaacccttataacccctccagcccttctcccaccggtgcgaggtatggctggaacagtgagcaggatagtccactttgaggatgaggagaagtttatagacgacattgactttgcccttgagcgcttttcatacttggcgagcagatacggccacaatcccatcaaaggcgtcgtcctgtgggactacatagctatagaggacaatgaagatgtcaaggtcttccgcgtcggcgagttccccttcgtggagggtatgcttaagctcgacctcgaaaagatacggacgcttgagggatactttgacgagatggagagcaagtgggacgagctgacggttgaggagataaacgcctacgtggaaatgatgaacgaggcattgggcgagaggagggtcttttacgatgcatactccctcggcctcgacaggaacacggcgtacataatcatagacatacacgcgctccactaccttgctggaatcctcgagggcgaggaaaaggagcttttagatgaggccgctgaagtcctgctcaggtacatttgattgcctaattatgtaattacgtaattgttggattaaacaactaaagctttggtggtcgccatgctgttcaagaagaggggcgtctttaccgaggaagacgccaaaaaagtcgtggagtggatgggcgcccatcccgaggagaaggagctcatagtgatggcagaggtcgttgaaaacaccgcgaagagaaggttatgggactttgccagggcggtgaagctcatggccgacatgaccggtgaggaaagggaagtgagagtggaaatacttgaggggttcgtcagcgaaaaggtaaagggaattgacgttgaggagctgtgaggtgtcagaatgagggtgataatggccgaggtcttcaacagctggcagggagaaggagggagcgtcgaaggctctgccttcggaaggaggcagattttcgtccgcttcgccggctgcgaccttcattgtgcctggtgcgactcaagggaatacatagatgcctcacgagtttccagctggaggtacgaggtcaagcccttcacggggcgatttgaatacaggccgaacccagcgagcgttgaagaagtggttgaagctgttctcaggctcgatactggggatatacactcgataagctataccggcggagagccgacgctccaggtgaagcctctaatggccctgatggagaggatgaaagagctcggcttcgacaacttcctagagacccatggcggccttccagagctgattagagatgtagcaccgctgacggactacgcgagcgtcgacataaaggacgagagcgcgaaggcaacggaagactggaaaggcctcgtcctcagagaagttgagagcatcagaatcctgaaggaagctggagcgaagacctacgcaaagctcgtcgttaccagcgagacgaaagtagagaacgttcagtggtacgcctcacttctaaagggcctcgctcctctcgtcatccagccgagggaacccatagaggtttctcaggcaaagctcatggagttctaccgtgaggcggcaaggataatgggcaggaagaacgtcggtctcagcttccaggttcacaagtacctgaacgtgctttgagagagtttttaaggcccccaaccaaacccttccggcaatgatgagattggcctttggggtcatggatgcccgggatcgacggcctgagcctccgtcaaatttttaagcccccctcttttagtaaccttcggtattctaaaggagctgggggtgagaaaatgccagtgatcgaggaggtggccaccaagagcttcgagaggattggaatgcactcccacataaggggccttggcctcgacgagaacggaaaggcgaagttcatggccgacggaatggtcggacagataaaggcaagggaagcggccggaatagccgttgagctcataaagcgcggcaagctcgcgggaaagggaatccttctcgttggcccaaccggaagcggtaagacggcgatagccatgggaatcgcgagggagctcggtgaggacgtccccttcgtccagatagcgggcagtgagatctactccgcggaggtcaacaagacggagttcctcaagcaggccatgaggagggctataggcgtcaggataagcgaggagagaaaggtctacgagggcgaggtaaagtccatcgaggtcaggaagacgaggcaccccttcaacccgtacgtcgagattccggagagcgtcatcataaccctccgcacgaaggacgacgagaagacgataagggcgggaagggagatagcctaccagctcatggagatgggcgtcgaagagggcgacgttatccagatagacgctgagacaggtagaatatcgaaggtaggaaccacgaaggaggaagaggggctcttcttcaagaaaaaggtcaaccttccgagcgggccagttctgaaaatcaaggagttcacctacacggtcaccctacacgacctcgacgttgccaacgccaggggcaacatcttcggtctgctcttcagcaccggtgcggagataagcgatgaagtgaggcagagagttgatgagaccgttaagaagtggatcgaggagggcagggccacactcgttcccggtgttctgttcatagacgaggttcacatgctcgacatcgaggcgttctcgttcctcgccagggccatggagagcgagctcgcgccgatactaatcctggctaccaaccggggcagaacgaaaataaggggcaccgacatcgaggcgccacacggaatcccgattgacatgctcgacaggctcctcataatcaacaccgagccgtacaagaaggaggagatcagggagatagtcaagataagggcgaaggaggagaagatagaggtcagcgaggaggcgatagagtacctcgcggagcttggggaaaagaccagcctaaggtatgcagtccagcttctcgcaccggcgagcgttttagctaagggtggcagggtcgagaaggagcacgtcgagagggccaaggagtacttcgccgacataaagaggagcatccagttcgttgagaagcttgagggcatgctgcagtgagtttcctcctctccttttatggtttttagccaggcagaagaatttttataaggagttacgttttaactctgtccggtggtagtatgaggcggctctattacgcgcttcccttcttgctcatcgcgacgggttatgtgctctggaacgtcagaataacacccggaataatagcactcttcaactggctgacgtttttcctggagcttaggtacggcggagaatcaaaagaaggggaagagcttgttactatgagcatagccgtgagttctttacttgggcttggcaagggtactctagcgtccattggtgagtttctagcgctcttcacattcatactcgagcttacagccctgatgattaaagtcagaactccatcaagggccaggtgacgccaaaaactttttatggcctaattgttacttcagtatgagatgataacaatgcggactaaagattggaagtcaataagcgggacaatcctcgtactcattgcggtagctttagtggtaatctcggcgggatgttcaaaaggcccgaacaccgaaaacacacccacgagcacgagtgttgagaacacaagtatgtcctctacccaagacagcacactcatgttgaaactcaacggcacgttctcgggccagcttagcgttccagcatcactagccgaggaagtcagggagtacttcgagaagagcaacaccaccctgtactccttcgaagttgaagttgtgaatgataacggcaagccccaggcgagcattacactgtatctcctgaaaatcgtgccgccgtttgagccgaaagactttgaagttctcattaatggcaaacccgtttccagagaaacatacgtacctgtctacgaggatgttcccgtggtcattgagtactctggaaaacagtaccccagacagttgactgcaaaagtcaaagagaagtcccgtgcaaggttcacagccaaaaagtccgaacttgataagcatcccggcgagaccattaaactaggaacagtggagggttttgccctgctcgctcacgtgaacgatgccgggaactacaccttcatagttaaggggagaaacggcgaagagcttgcaacaggcggacttgttgttggttaaccttccataattttctccagcttcctgcacaggttcagatggaagagaaactccctttgaagctccccattcctgaagataagcttgagctcgttcagcctcttcttccctccgaactcgccgtaaaccagtgtcccgttcacctcaaccagccccaaaaccgccgcgaggttgaagatgagcgtcctgagctggtaggcggagacctcgtgggtgccgagccttgcagttggatattcaaagtagaagtattcgagaccctctattctagcaacgtcggttatggcaaggtcggccgtcagaaagaccaccatcgccgggctcatctcgtcgtagtgcttgagggtcttcactatgcgctcgtcgttgttgtgaccctctccgtagcgctcaacaacgattatcctatccctcagggcctcaaactcctttagggctatgtacgcggcttttctggccttcttcgtcctcctgttgctcagctcacgcaggagatggccgtttttgactgtgctcataatctcgtgaaggtagtttgagcggtacttgtagttcatggcgctctctatctcgtttttgacgtcctcggcgacgacgatctggtatccatcgaggggacgatagttggatataaagcggtggtagaatatgttggtgtcgggagagaacacaacaccttttctaaggatacggtacagctccagcatttccttaaagtcctctatgttgtcgtacgtgatcactcccgaggagataaacgcctcgtagaagtcggagtatgaaggcagttctgggtgcctgacatggaagtcccgcttttcagcctggacttccagcagatagcccctctctgtggggctggctgtaaagagaagcgtgccgtagattggaaaactcacccggattttttcccgttcttggaggaggttgatgagtatctgaagttcgggcttttcgataaccacttcacccgccatttccgtcacccaggaagttcttgagaacctgcatgtgcgttgggagcatcatgtaaggcctgttcgggaactggacgtcgagaagggccatgtagagtatctccctaacgttcgactcccggctgtggattatcgcggcggcaaccagcgccttcctcccggaggtcatgttgaggacgatgtcgccgtccttctccttcagcttggagaagaggtttttcagaaccttatctgcctccttgaagtcgtcatctggtatgacgagggtcttcacttcgggagagaagccgtatgcctctgagatcgtctttattgcctccgttattttcggcaggctgtgggagtatctcctttcggttacgatataaacttcctttgggcgttctcccctcataacggaggcgtagtatgtgttcaccagcgcccagggcgttctcccgagcagagctatgtggacgctcattcgaccatcaccatcccgtagaggacgctttccgagaagtctatctcaaccagtgagcttatctcaattccaatagcgtctatgctcggcctcaccttctcaggcatcctgcatggctcaccgtgctcaaatggacagtcgtcgcagaggttgcagttgcctgggaaaagggccattgcgtagagcttcccctgtttaaagagctctgcttccttcttcaaaagccacaggagaaccttcctcttctcgttttcgaagtcgttcatatcgacctcaaacttcacgagaagggcttttttgaaggatctgacccactcttttgcttccttccagtcgggggcgtatggcggacagctcggcctctttccgtacatcggacaggtcctgcacttccagacaggcctcggtgagacggttatcttctccgccggaatttccttctcccacaccacgcgcatcgtgctcacaaaaagatgttaggacgaagaaggttaaaacgtttccccgtcggatttccaacagttgattatttctcggtgcaactatcctttgagatgccactaactacggaaacttcaccccagctcgactttggcatatcccttcagaattttgaccttttccaaaacctttttaccctcaatgacgtaactaaaaccatgaagaggccgctcccgttactgctggccttgctggttgccactgcagggtgcatgtccgaagggggtgtaaagatggaaaagacccttgaggtgggctccgtcttccacgacggggagttcataccgaaggaatacacctgtgagggcgacgatacgaacccgccgatttacatcggcaacatcccggccgaggccaaaagtttggtcattatcgtagatgaccccgacgcgccagctggaacctttacccactggatagcctggaacataccgcccgttggggagataccttcatgggtgcctaggaaacccgaaaccgacgagccgttccacatcgtccagggaaagaacgacttcgggaggataggatacaacggcccctgcccgccgaggggacacggggttcaccactaccacttcaaggtctacgcccttgacacggaacttaaactcgaacccggctcctcaagaaaagagttagaaaaggccatggaaggccacgtgatagcctggggagaggtcgttgggctctacgagaggaagtgaggtttacttttccataagcttaaccacgaggtttatggcgctctggaaagccgagaggaagttcagcgtgaagaatatccagtcgcctattatccaggagtatatcgtcagcagggtcgccgccgtgacgtaaatcactatgaacttcatgttgagggggcacttcctcgtttttaccgtttcccatgtctggggaacccacgcgctcaccagcaggagcattccaagaagtccgattatctctccgccgttcatttttctcaccgggcccagaaaaggaaagccctaaaaaagccttgtggagggattcttgtaaaattcatccagccaaatgtgaatctttgaaaaaagaaagttaaagcttgttcgcgagccttgaggtcgcccaggtcttaacgtcctcatcgaggatgttctctattatctccatggcctgtgcaacctcacctttctcggccagcttcagggcaacctccgcctcgacctttgccctgttcgataagtcggaaatgtactcggctattttcagggcgtcgtcaaccattcccagctcaaggaggtcaaaggccagccccatcagcgtcttggtgctctcgttctggccggtgacgttcatagcggcctctattgccctggtgagtgctttagaataatcctctccagctttgacgagctcgacaacaatctggttcagggccattgacttgaccttgttatctggaatcttttcaacgagttcaagggcctcatcaaacctgtgggactttacgagcttcatgaccccatcgtaaagtgcccgagagcggtaccattcctgcatgggagtcccccacaattattaacgcccaaagtttataacgtctttcccgagctaataatggtggtaaacgtgaaaaaaactggaatactgctgatgctcctggtcttggtggggtttgcctccgcctgtctgagttctgattcaaatacctccagccagacgtccacagaatctccaaaatacgtggacgtgaatggaacgagaatttacctggatcagatacatttttacatgtacggtatgaagacctgtcctcactgcaggcatatgaaagagtggattcctgaagaatttggggcagattcactcacgtattatgagcttgtaaatgacgagactaactcagagctttttggacagcttgcacagctaacaggcataaccggtgttcccgctatcgcaataacttacaacggtactatacaggcaatatttgagggggagttcaacgtctctgcaacacctgagattgttgcaactgctatgaatgcaaatggagttatccttttcattgggggtgaatggtatcttttggcccgggataatccaaggtcagagacgctcatcgatgcccttcagacgattttcgtagagcacgaaagcgtcgatgttcagagcgttctgacaaagctgaagtctaactcaacgggttgaaacctcttgttctcaactttttgttttagaaatccagaaaaaggaccgttccgagcataccatcatgaggggagaaattaaactgctgtcagtaatcctagtgctgtccttcggaatcagcgcacttgctctatacctgctgggaatcccctggttcatcccccagttctatgccctatcaatgagcgactccataaacccctgtacctttgtaatatacacaatgctcctgatagcgctgtcagttagaaaagttgagaagaagcagctttacatcgttggctccgcgttcatcctggccgtctacatctcatactaccttctcggagtcggtctcctgtaccttggacagtacatccccctctggttcgcgggcttcctggcaatagcgtttggagtttacaccattgttaccggtatcatggaaaagtcgaggatagctgacaagaagggcattaggaagaagatgttcagtacagaggcaacttttatgagctctttcttcctcggtgtcgtggtctcgaccacgctacttccgtgctccgcgggaagttatctcgtctatgcaacgattatatcccacggcagcagggcgctcgccttccttctcctggccctctacaacgtaattttcgtcctgccgttggtgctcatcctgctcactatgggaagcatctcggagagcaagcgcttctcccaggccctcgtcaggcacagcagggagctttcggtcgtcgctggaatactcctgataggaattggagtgtgggttctcatggggggctcggtttagaacaccctcgcgtagccccacttcctgacactggtcagtattgaggtctccgtgctctttatcccatctatgctccccagcttctcgattaagaagtcttcaagctccttcaaatccctaactgtgacctgcatcagtatgtcgtgagcccccgtggcaataccgagaacatccacctctgggagcttgctcagtctctctacagcctccttcaccttacccggctcggcatcgaccgctatgaaagccactattgaatagcctgccttaaacgggtttatgagggccgcaaactttcgtataactcctttttctacgagcctcttgaccctgagcctgacggtggattccggaactcctattctccgcgcaatctcggagtagctcgcccgtccgtcctcctggaggatacggagtattgacctgtcgagtgcatcaagctcttctgtattcgccattatttgcccaccattttgactaatttagcatttagttcataagtatttctactaaattcgcaatttttaggcgaaaatgctattagtttcaaacgcatataacagttaggtgagaaccggcatgactcctgaagaggtcgttgagaggtattcacaggtcatctcccgggcgtcccacgttacgtacgtgcccattgttccgtcccgggccgaaaacgccctcgtgtgggacattgaagggagggcatacatagacttccttgcagatgccgccgtccagaacgttggacacaacaaccccagggttgttgaggctgtgaagaaaactgccgatagattgctccacttcacgttcatttatgggttcccggtcgagcctcttcttctcgccgagaagttaagggagatagcgccgctcgagggggcaaaggtcgcctttggcctgagcgggagcgacgcaaacgacggtgcgataaagttcgccagggcctacactggcaggcgttcgatcatcggatatcttaggagctattacggttccacctacggtgcaatgagcgttacaggcctcgacttcgaagtgcgctcaaaggtgggacagctcagcgatgtccacttcataccttttccaaactgctatcgctgtccgtttggcaaagaaccgggaaaatgcaggatggaatgcgtctccttcctaaaggaaaaatttgagggagaagtgcacgccgaaggaactgccgcgctgatagcggaggcaattcagggcgacgcgggaatggtggtgccacctgaaaactacttcaagaaactcaaaaggatacttgatgaacacggcatactgctcgtcgttgatgaggttcagagcggtctgggaaggactggaaagtggttcgccatagagcacttcggcgtcgagcccgagatcataacactcgcaaagcccctgggcggcggacttcccataagcgcaatagtcggtagaggggagataatggactcgttacccccactgggacatgcgttcacgatgtcgggcaacccggttgcgagcgccgccgctctggcagtaatcgaggagatagaagagaaagagctgctcaaaagggctcaaatacttggagagagggcaaagagaagactggagaaaatgaaaaagaaacacgagctgataggtgatgtccgcggactgggcctcatgttgggtgttgacctcgtgaaggatagggaaacaaaggaaagggcatacgatgaggccaaaaaggttgtctggagggcctacgagctgggcctgattgtggcctttctccagggcaacgtccttaggattgaaccacctctgaccatcgaggaagaagtgcttgatgagggattagacaagctcgaggaggcaatagaggacgttgaagaaggtcgcgtacctgatgaagtcattgagaaagtgcagggatggtaattaacaatttcctgtttattcttacctcatccgaaaactttttaaacaaaaaccaacacagcccgagcgggctttaatggagaatgtcgaagttgttgagaagccggttctgaaagttggaatagaggaaaaggtcgagcctgcgaaggctttcgtttttgggcttcagcacgtccttgcaatgttcggagccacagttacagtgccgctggtcgtcggcggagcagttgggctcagcggagaccagatagccatgatgatacaggcggttcttttagctatgggcatagcgacgctccttcagactatcatcggaacccgctacccaatagtccagggatcgagcttcgccttcattcccgggctgatatcgataggttcgaccatcggcatggctgccgttcaaggtgcactgatagtcggcggactgatagaagggcttgtgggctggctcggcatcataggtaaggtcagaaaacttttcacgccgctcgtcactggggtaacaataaccctcataggcttcagcctcgccaacgtcgcgctgatgaacttcttcaacgcgtacgcagacccgaacggcacaaacgtctggaaggcagtgctcgtagccacggtcacgttcctcacgaccgtcttcgtggcactcaaagcgaagggaagcctaaaggccatgcctgtggtcgtgggcgcggctgtaggatacttaatcagcattccactcgggcttaccaacttcagcctcatcgagagccttcctatgctcagcatccccaagccgtttccatggggagcgcctgtctttgatacagctgcaatagccatactgctcttcgcattcatggtcagcataatcgagagcgtcggtgactaccacgccatagcgaccgtaacgggcgcggagataacggagaagcacatcggaaggggcataggaacagaagggctggcgtgctcgatagctggctttctcggtgcctgcggaacaacgagctattccgagaatataggtgtagtcgctttaacgaaagtgggtagcaggcacgtggttcaggttggggctataatactgatattcctctccctgttcccgaagttcgcgggattgctcgcctcgatgccggctccggtgctcggcggcctgaccctggcactctacgggatgataagcgtcactggccttaggctgataaaggaaaaggtggagttcactgacaggaacgtcctcattctagcagcggcgctgatagcgggcctcggcgcaccccagctcccagagagtctgttccacgctctaccaagaatactctccagcatactcgagtccgggatggccgttggggcgataacggcgataattcttgagagaattctctaatccttttcttcttttgcatctttaccactctaaaagccaaaaaggaatgaaaaacctcaataaacaactatccgagtatcgtactctggcttctggcctttcggctccagttcatccggaagctttgagaaggcaattatctggaatacttgtgctatcaggagcagaaggacgccaacgaggattatcagggttatagcgccccatttgagaaacgttgcgacctggttgaactcctcaacgccggttatttcgtaggtcgcgcgccaggcctgaatctgaaggtacaccgccagaatcacgaccaaaagtatcagaagcactccagatatcgccattattagcccggagatacccagatggttgtggatattcctgaaagctatcattgaattggacacaaaaaatacgcccaccacaagaaggaccagtgccaaaaccattcctattatgataacgaccgtggagtagaggtagtatctgaatggtctgtcgtcattgagcttggtgctgatgccgtggagtgccaggagaacaaggataaacccaatgaatgaaaccaagttcgagaaagcaacaaccggccatgttttaattgctccgtcacccaaacctcccagcagagttagaatcgagccgaggaggccgagtgtcttttcggttcttaaatcaacgggcataataccaccggtattaatacgatgcttggcttaaaaatactatcgccagaagttgtaagaatagaggccgcggaaaagaaaatggggaagtcactccttcttctcctcagccttgggcccttcctttttctccgcgggtttggccgcgggcttcgccggcggcttcggcggccggaggccgtagccgagtatcttgaactgtatcgttgagccgtcgcggaggtagtaggttacctccctcgtctctttgttgaactttatcctctcaaccgggaagcggtagtcgttgaacttctcgttgagctctctaaccttgtcggggtggatcgggacccagtcgtaaagctccagatcttcttcaaggccgccagtggtcaagtagtagttctcgctgaagccgagcgctcccgtcggacagacgtcaacgcagaactggcagaaagtacacctgccgtagtccaccttcgggtgaggcctggtggcgatgtggccgttcacttctatccaagtcatctctattgcccttgccgggcatatctggccgcagaagttacagcccacacacttcttccagtcgagtgtgtggaagcccctgtactttggtgccggctctatcttctcgtagggtatctttattgtgacgggcttcttgaagaggtacttgatgcccatccagggcttgatgaaggacttcttgagcttgaccttttcctcaccaacgactctcgcgggcatcttcatcacctgtctatgtccggcggacagttgtcaagggtcttcaatatgaccgggacatcagcgaggcgcgctcccttcaggagctcttcaagtaccgtaacaccgtggctctggcttggccccctgacgtggacgcggtagggcttgtgtgttccgtcgctgacaacgaaggccccaaagtcgcccttggtgctctctacgtgggcgtaggcctccccagctggaggcttgaacctcgggagggccttaaggcgggcgtcctgaaccatgtaaggcccgctcggcggccccatgtcgaggagctgttcgagtatgtagaggtcctgctccatctcgtaccttctgacgagaaccctcgcgaggctgtccccttccttgaggactggaacctcgaagtcgagctggtcgtagaggtagtacgggtcgtccttcctgacgtcgtagggaacgccgactgctctgaggttcggcccggttaccgcgtgcttaagggcgaacttcttgtccataacaccgactccctcagtcctctcgaacatgatgtagttgtcaaagagtatctcgtcgaaatccttgagcttgccctttaggtactcgacggtgtccctgagctggcggagccacttgtctccaggtatgtccctcctcacgccgcctggaacggtgtagatgtggtagactctgcctccggtgagttcttcgtacagacgcatgaacctctcacggtaggctgccgcccactggccggcggtgtagaggcctatctcgtttccaaagcccattatccagaacatccatgcgctgagccttgccatttccaagacgaccgtccttatccagatggccctctctggaacctcccagccgacgatctcgtcaacggccattgagtagatgttctctgggacatcgctctcgggaacacagatacggaggagcagggcgatgttggtgaagtatggcctctgctcggcgagcttctcaaaacccctgtggaggaagcctggattgactatagctttctcgaccctgttgccgtccatcttcaggattatgctgaagttctccgttgccatgtgctgtggaccaaagaacagctcgtaggtgtccttgtctatcgggtgcaggtacatgtcgtgggccttcgcctcttccctaagctctctcggaacttccaaattagccatgatcatcacctcatatcacgtagttagtcttgctctcgtcatacctatcgaagtcctcaccgtagatttccttcacgtaggagagcatgttgaagtccttcctgagcgggtgcttctcgtactccctcggctccaggatgaacggcccaagtctcggattgccctcgaagattattccgaagaactcatgtgcctccctctcgtaggtctcagcaaccggccagatgtccatgaccgtcgggagcttcgcctcgtcccttggaacccttgtcttcacgaacgcgtgaacgctctcgcttacgctccagagctggtagttgacctcgaactggccctccttgagccagtccacgacgcttatctgcatgagcatctcgaacttctcgcttgctagctcaaggaattcgtgtattctatccgctggaacgatgaacttgatgcgtctctcgcggattacctctccctcggcgtagggggccttttcaaggagcgccttcacgagctttccttcctttgtgtccggaagggtcggcttctcctccacggttgcctcctcctgaaccttctcctcgactttgggcttctcgttcatatccatgcgagccacctccttgcatccttctcacgccatccttcgccgaacagctcatcctggttcttcttgtaccactcgtagttctccttgtacctcttccagccgtcggcttcaccgttctcaatcttgcgcattatctccattattccgtccatgacagcttccggccgcggcatgcagccggctatggcaacgtcaatcggtatgtacttgtcgagctgtttaaccacgttgtaggagtcccagtagacgccaccgtttatcggacaggagccgtgggcgagtacgtacttcggatcctgcatcatctcgtaggttatgattatcctcttgagtgtcttcggcgtgacgtagcccgtgatgaggaagaggtctgccatcctgggggctgggttgggcattattccgaaacgctcgaagtcgtacctggcggtggctaacggcggcatctcgataccgccacagccggtacagaaggccactatccagaggctcttctttctagcccacctgaagaggggctcgaagagctggaactccttcagttcgtagtgtattacatcaccgttctgcatctcgctcatcaccatcacctcacatcgtcaggaggacggctattattccgattatcgtgggccacttccagaagaacttcgccgcttggtcaatggtgaacctcgggtagatgctggctatgaaaatcgatatgaacagcactgcaatctgcttgatgaggagttcgaggaggttgctcgctccaccgaggaacagcacagcgaagaacgctgtttcagcaaagagctgaactgcgtgctgggtgaagagcagtgccgcgtgctttccaccgtactcaaccatcggacccatggagatttccgccggtgctggaatgatgtcaaacggctcgagacctagcattgcctggaagactatgtcaaagactatcagcgctaggagcagtgctgggaccgttatgctccatccatgggcctgctggagagcaactatatcgttcagcttgaaggttccccagtgctggatgagggctatcagagctaggccgtatgggagctgcatggcaaccattgtgaggagtccacgctggacaccgaccgctgaatacgggtttcctgagctcattgcaccgagcattattccgagcatcgggacctcaaggaggtaggcaacgacgatgaggtctgcgttggtgctgaacagctggaagttggctattggtatgaagaggagcgctgctatgctggctccgagggcaaacacggggccgaagtcatagatgaagccgtggctgacgctctccttcttgccgagcagtttaagggtgtctatgatgggctggtatatcgggggtccaacccttctctgtatcctcgccatcgcctttctctcgatacccatgaagatgaagcccatgaaagtcgcgtagatgagtatcccaatcgtctcaagtatgagcttccagtctatcattcacagcaccccccagagagccaggattacgagtactatggccagataccatgagtaggcctgcacgttcccgttgtagaacccttccctcagtgtgtcagcgaagtcctcgctgagctgggcaatcctctcgtagaatttgtcgaagctgtacctgagccagaacgctaaggcttctttgagcggaaggtagaagttcctccttatgctgaggttgaattcctcggttacggggttacccgactggtatgtgttggtaaccggtattctccttgccttcgcgccgtagaggtagatgagaccagctatggccaggccaaccacgagcaggagggcaacggtcagggcgttgtaggttccggtctgagtaacgagcttgtagtagttgccgcccacgacctctccaccgagggccttgttgaggtagttcgtgacaagtcccggagctattccgaagacgatgttcgggattgctagtattgccatcgctatgaggagcggtagcggggcttccttcacatcttcaaggtcgctgggcctctggccgaaccacaccgcgtagaggaacctgacgacgtaggcaaaggccagcgcgcttccgaggaatatggctccagctacaaggggcatgtgggcgctgatagcggcctcgtagattagccacttgctggcgaaaccagccatcggcggtattcctgcgaggctgaggactgctatgagtcccatcgcgaaggtaaagggcatcttctcagctaatccgccgaagtccttgaactgagtcttgcctgtctggaggattatagcggctgtgacgagccagaagagacccttgaagacggcgtggctgaggacgtggaagagacctccagcgaagccaagccccgtgccaagtccgaaggcgaggaggatgtagccaacctgaccgactgacgagtacgcgaagagcttccttatgtcctcctgcagaacggctaagaagctggcgacgacgaccgttatagctcctatccacgctattatgtacgcaaaggtgaggtggccgtggaaggttccgagggcgtagtagagcttggcacccatcaggatgtagaggagcaggaatccataggcccctgccttgctgagggcgccgctgaagaaggtcgtgtagctctggtcggtctcgctgtaagctcctggtgcccagacgtggagcggccaggcaccagccttaacgccgaacgccgtgaggaacagaacgaagattagagcggtctcacccttgctgattgagccgagcatcgcgtccatgtagagggcctgccttattgagtcaaagtcgagggcccctgtcttagcgtagataagcgctattgccagaagcatagcgtaggctccgataacgctcagcacgaagtacttgagggactcgtgcctgttcctcttgagaaccatcatgaagctggcgaaggtcataagctcccagagcaggaagaagctgacgaagtcccagctgaggaagacgccaaggactccagtgtagctcataagggcgaagagccagtcgtagccgttcttgcttgttgagaccatgccgaatgccatagccaggccgactagggaagctatggcggcaaagtaccagttcagcattcccagagtgaaggttaccttaaacccgctcacggtcatctggtaagttatcgggttgttcggattgttgacgatagtcgggtagagcttggcgaggaacgccaatggagtggctgcaccgatgactccgataagctcgcggactcccttcacgttaatcagccaggcgagcactccagcaaggagaggagtaaagaggataatcggtatttcgttcatgctcccacccccattagaggaacgttcttgatgtagttggccacgttaaagatgtcctgaccggccttttggacgatagtccagacgtcgttcgggtaaacgcctatgactattatcaatgcagcgaggaagattgctatgacgcctatggcgaagttctccctgaccctctcgccgccttcgacgaaccatatcgtatggatcagcctgaggtaataaaccgcctcgacgacgctggcaccgaggatgagggcgacgctccaggagtagccagcctcgacaccggcgaggagtatcctgaccttgctccagaagatgttgaagagcggtattccgacggcggcgagggaacctatggtgagtgttaaagccgttaaaggcatcctcttgccgagtccctggaagttctcgatggtggtcccgccgagggcaacgccgacgtatccgaccgtgaggaagagaagggccttaacgatggcgtggttgaccatgtgaaagactcccgcgtcaacgcctgcctgagtgccgagggcgagggcaaaggcaatcattcccacctgactgatcgaggagtaggctatcatcctcttgacgtccttctgtctcagtgccgagaactcggcaacgactactgtcaaggtggccattattatgaccagcttaaggacgccgctccatccgtttgcgttctggagtatgtagaggagccttgctatcgcgtagaggccagctttgacgacgaaggctgagaacataacggttatcgggtgcggtgcggcctggtaggcatccggcgcccaggcattgagcgggaacagttcagcctcgactgccaggccgaagattatcagtgcgaggccgacctgtgcaacagtcgggtcaatagctcccgcaagctgagcgaggtgagccatgttgagggttccagtcgccccatagatgagggcaacgccgatgaggaagaagcttgagcctattccaccgaggacgatgtacttcattgaggcttcagccgcttcgccggtcttgttgtaggcggtgagggcgtaggcagttattgaggttatctccatgaagacgaacaggttgaagaggtctcccgtcgctatcattcccgtcgcaccgagcatcagcaggaggaagagcatggcgtacttgtcaaccggttcgacggtgactgctctgaagctgaagaacgccatgaagaagctgattactgctattatgaacacgaagagcgccgcaaagtggccgatgtaaaggttaatgccgactggcggcttccagccacctgccatgactattatcggcttccctgtggaatagacctcgtttgccacccagccggctattgcagtctggagtgcggtgatgagcactaggtagcccatcacggccttccttccaagtccctttatcagcgggacgaagaatgcgctgatgagcggtaaagctatgaggagtgaagcgtactgaccgttcatcctctcaacctccttatttcctcaacgttaagggttccgtacttctcatagatcaaaatggcagcgctaagggccatagcagttgtggcaacaccgataactattgccgtgaggacgagagcctgcgggattgggtcaacggcctggttccactttattccctcgctcagaatgggtgcgctcttccctgagacgtagccaacgcttatcaggagaaggttgacgccggtctccatgatgctcaggctgatgagtatcttcatgaggttcttcttgacgaggaccccgtagaggcctatgaggacgagtgctatcgcgccgaagtagtagactgaaatcattctctcacctcctccttgagcatgttgtcaacgataccgctgagctccgttccgaccttgatgccgattatcgtgtagattatcggtatgaagccgccgctgaagagtctgccgatgttgtcagtgccccagtgccaggtctgccatatccagtcgaagaggaagtagccgccgattgcaagcccgatgaggccgacgaggacgtagctcattccagctagaccttcgaccttttcaaaggccttgtggggaatctcgtagatcgtgaacgccatgtacagcagcaagaatgccgtggctatcgtcgctccacctgggaaacctccaccaggggtgaggtgtccgtggatgaatatgtaggcaccgaacatgactatgaacgggaagagaagctccgcaccagttgtgaggacgacggaaccctcgaccttagctgttctctccctcttcttcctccagagaagggcagcgacaccagtcgaggctatgaagagaacggtgacctcaccgagggtatcgaaaccacggtagttaacgactatcgccgttaccgcgttaacggctcccgtctgttccttaacgtgctggaggtagtaatggccaacgagcatcttgtcctcgccgaatgggactccagcgaggccctgggccagccagtagccaactatcaggagtgtgattatcgcgagcgacctcttgagtatgctcaccatctcacccaccaccctggcttctcctcttcctcagtctcaaagcgctgggttctcttaacggcgaagataactatagcgccgctcagtgcggcacctatggcagcttcggtcattgccacatcgggagcctgaagcatgaagaacaggatcgacgcgaacaggctcaccgcggccataccgactgctgcagcaagcagatccctccactcaactgcgagtattgccgatatgatcatgagggcaactactatgtattcaatacaggttatacagttcattcctcaccaccctcctttgaggcttcggtttcggctttttccttggcctccaggtgctcgcggtacttgtcaaccacactgccctgccaaagcgggattccgctcttgtaggctgctctgataagcgcgtgggcgcttatcgggttggtcagcagaaggaagagcgctatgacgacgctcttggtgaaccaagaccacgagaggccgtcgccaaccgcccagaggccgactcccaccatgacgccgagggatccgagggtggcgctcttcgttgatgtctgcatcctgttgtaaacgtctggcattctgatgagacccagggctgagaggaagtagaagaacgttccaattaaaaccagagcttcaccaagtgctgagagcacgttcatagacctccctccatgtagcgtgcgaacgctatgacaccgccgaaggccaggattgcataaaccagagcaacgtcgaggaagatgatgcgcttgtagtagagcgcgaagagcaccatcagtcccgttgttatcgtggtcatgatgtccactgccaccagcctgtcgggggtcgttgggccgaccatgaagcggtacatgctgagcagtgttgctatcgctatgagtgccagataaacacctatccctatcatccgaagatcaccttcaggaatttttcaaagggtcttgtgatgttctcggaggccttctcaacgtgaacctcctcgctttcagcgtggagaacctcgtccggaacccatatccagtggatgaagtagtcgtccccatcgacgtcgagggttatcgtacccggcgtgagggttattgagtttgccagtgagagtttcccagggtttgttttgaggatggtcttgcagtgaactatccccggccttatcggcctcttggggtggagaaccctgtaggcaacgtctaagtttgccatgatcatcgcccacaggaagtagggagcgtaggctatcgcgtaggcgaccctcttcggatggaggttcgccagtcctctcgttgtgaatattgggtatgttatcgccgccactatcgctgagagaacgaagccgaagataagctcctgctggtcgaggcttgccgtcagtgccagccatattaaaaacaggattatcagggtgtataggtacctgctaatcttactcgcttcctccattcatcaaccctccagagagtctcagcagttctggactgctaaccgagggtttctaacgataccttataaacgttatctgcaaagaacaaaggtttagaacttttggttaaaatggaggtatctaatttgtccagcagtccaaaaaagcgggcatcaaagtcccttcccgtcgaaaagccccaaaatcttctaaaaatcttagtaatgagaataggaaaagaagcagaaacttcgactaatatatggatattctcttgacaccttcgagcttggagagctcgtttattaagtctcccggtatgggcctctcagtgattatcgtaagggtagcctcagggtagagttcaggatcttctgcgactacctgtatgatgtttatgtcatgctccgctatcttctgggctatcttcgcgagtattcccactgccctcggttcgggttctatctcgatgacgccgtagccaacgtgcctgccgacgtacttcatgtggacggtcggctcgaggttcgtgtatatgtccctcagctcgggaactttgagaatcattccaacggtctctttaacgactctcctgtcaacatcgagggccttggctatcttggtgtacgggacttcaatgtccccggcctttatcttcatatcatcggagaccctaagaccatacttcaggagggttttcgctatgagtttcctcacaggatattcgtcaaagtagtgctcgatccttccccacatcctgcatcacccacttaagttcaccactatactttttgcatcattgatattaaaatgtttccatgtccgcataatgacaatctcaggggtttaaaaattttgaggatggataaaacctccatcgtcgagtttttaaaagcggatgaaaacccgtggacatgattgaagtctcactgccccacgtgacctttgaagatgtcggcgatagcataaggctggtatggagagagacactttacgcggacttcgacaaaaaagagctgatcagagtaatcaagcgtaagtaccgcgtaaagcccgagttaattataaaagatgggagacttttcattgacactgattatcctggaattgaaaagtacattgcaatctacattcagaacaatctaggagcccttctcaggaacagatacaccaaacggaaagttctttacatccacgagggcctcgatgtccctctcctcggctacaacgcctttggcctgatcgacaggggaactaacctgattcaggtcaggggagtgagcggctgcaatctcagctgcgttttctgttccgttgacgagggtccctattcaagaacaaggaagctcgactacgttgttgacatagactatctgatgaagtggtttgatgaggttgcccggataaaaggaaagggccttgaggcccacctcgacggtcagggcgaacctctcatatatcccttccgtgtagagctcgtccaggccctccgcgagcacccaaacgtctcggttatttcaatgcagagcaacgggacgctcctgaacgacaagctggttgaggagctggccgaggctggcctcgacagggtaaacctctcgatccattccctcgacccagacaaggcgaaaatgctgatgggcaggaaagactacgatctccagcacgtcctcgacatggcggaggcccttgtgaacgcaggaatagacgttctcattgcacccgttatcattttcggggtgaacgacaacgaggctgaggccttcatagagttcgccagaaagatcggcgccggaaagcgctggcccgcgctgggcttccagaactacgttccctacaagttcggtcgaaaccctgtcatagccaaggtcaagcccttcaaggaattctatgcctggcttagggcccttgaagaaaagactggaatgaagcccctcgttctaaagcccgaacacttcgggatggagaagagggagttcattccccttgcattcagaccgggagaggtcgttaaggcagaggtagttctcccaggcaggatagagggagagatgatagcaaaagccagaaacagactcatcgaagtcataaataccagagcggaagttggggacaggataagggttagaatagtgagaaccaggcatggaatatacatcgggacccccgtgtagttcaagatgctccaacattccagacaagatttgtaacattgtgagcaatccaaactaattgggcgaacatttgtaaaatttccaataaaatacctttctaatagcataatccttaaatacgatgaaaagtttaactacaattgggggaggggaatgaaaagggccataatttcgatagttatgttaattttgctcataatggtgtacactaacgtaatgtctgcacttggttctatctccaacgtgctcaacggaatcaccgaccccctccaagacccggacaagctcgtcaacggcatcaatgtggggaaaaacaacatgccccagttaaaccccgctggcaaccagatagaatatctagcggagaacacaccgcttccaggatcgggggtgtatactgtagatcagatgaacgagagtctcctcagggaagtcctagacccaaccgactggtacgtgggaaacacctccctcagctcagactacgcgtacagagtgtacaacgacactctgaaggtcgtgaagaactcgaccgaaacatcgaagtcaataatagagaagtttcttggggtcttcaaaatcggcacagacaacaacgaaactcaaaatggacttggacaactactggaggatgccctggaaaaagttcagaacatcaccgaatcaaccgaggactacatcaactccgtatttggagataaacagtgatcgccgtacattacttccccatctatactgcttaagagtattgccatgaaaggttagttcttgaaaagcgatgaaaaagaataatcagatgaagcgggagcttttaactttcagctcccctttttcatatagcccaaccaggatttttgcaatcttctctccggcttttccgtccccgaacgggttaggtgcctttgccattttctcatagaagtctctgtcctcaatcagcctttgcaggtagcggagaaccctctccctttcaaggcccactaagatattgcccccagctttgactgtttccggcctttcagtattgtaacggagggtcaggcagggcacgtcgagaattatcgcctcctcctgaacacctcccgagtcggtcattacggcgaaggcgttcttctccagcctcagaaagtcgaggtaaccgagcggtttggtgagtataaggttctctatcgaggcaacccgttcccagagaccaaacctcttgagcctgccctctgtcctcggatggatagggtaaacggccatcatcggaagactttcgaggatttcaacaagcctggtaaggttctcccagctgtcggtgttctcggcgcggtgggccgttatgaggatgtactctttgggcttaaggtcaagcctctcgaggacgtcgctctttttctccgccaccagggagttctggagtacggcgtcaactattgtattccccacaacatagacgttttccgttatgccctcccgctcgaggtttttcctggcttcttcggtcggagggaacaggacttcgctcgcatggtcagctaggattctgtttatctcctcgggcatcgtccgatcaaagctcctcagcccagcctcaacgtgggcgacgggtatcttcagcttcacgctcgccagagcacccgctagaacggtgttggtgtcgccctgtactaaagtaacgtcgggtctctcctccatcaagactttctcgattttaatcatggccttccccgtctgctccgcctgagttccagagcctacttcgaggtggtagtctatcggcggaagctcaagttcctcaaggaaaatcctactcatctcgtagtcgtagtgctggccggtatgaatgagcaacggcttaattcccatttcaaggaaagcccttacgacgggggccagcttgatgatttcgggcctggtcccaaacacaagggcgggtttcaatattcacccctccctatgcccttaaagaggaagcctctcggaggtttgtctatgatgtgtctgccgtctatcagaatcttcgtcctcataagcttcccaagctcctcccagttgaggttcttaaaggccgtgtggtcagtggcgataaccgccgcgtcggcacccctcagagcctcctccaggctttcagcgcttcccccaacaaacgggtcatagcttctgacttccctgacgtcgtcctttatggcgtctataaaagctatggcaggggagttcctcgtgtcgtcgctgtttcccttgtaagccagcccaaggacggcaaccacggcctcttcaggtggaacgttaagctgcttaaacgcagaaaacagaaggtctttcgtgaagagcggcattgagtcgtttatctccctggcggttcttatgaggccaaaatcttccttagccggccagaggagaaggtggggatccttaggaaggcagtggccgccgacaccgattcccggaaggtgaatgttcacgcgcgggtgtgtattggccagttctatcgcctcaaagacgtttaccccgtactggtgggcgaggaaggcgaactcgttcgccaaggcaatgttcacatcgcggaaggtgttctccatgagcttcacgacctcgctaacggtggaacttgtcttgaaagtctgccccttcacaaaggagcggtagagcttttcagctatctctgagctctctggggttatcccgccaaagattctggagttatagacaagttccttgaatatcctgccaggcataaccctctcgggcgcgtgcaccatgtagaaatcctcgcctgccttgaatccccttatctcctcgatgagcttcgccattttgacagtcgtcagcggggggactgtgctctctatcacgacaagggaaccctttttcatccgctctgcgactgttctgaccgcgctttcaaggtagctcaggtcgggggttttgtcttcctttaggggggtctggacgcagattatataggcgtctttgttccttatctcctcagggtcagaagtcgcccgcaggttgccgcttgagacggccttcttcaggagttcgtctatttcgggctctattatgtgagcttttccagagtttatgctcctaacaacgtcttctcgtatctcataaccagtgaccctaaaccctgcattcgcgaacattatcgcagtcggcagcccaatgtatccgagcccgattacggctatttccttcacatctaccaccggggggagctatcctggacggaataaaagccttttccagccaacggttgtgaaaatgttttagggtgtgataagttagttagaaatgccagcctctcaaaaacctgagcggattttgggtgtagttgaaggaagacatttaacagccaatttcatccaaagaaagggttagaaagctttttcaatcaaaagcaagagttgaggacacagaaaaaaacgccttcacaacggttttttggaaacccttataatggacagatgcgtccagttattggatggtggtagaatgaaggtctgggtggatataaccaacgcgcctcacgctcactttttcaagggcttgatacgggagcttgagaagtccggctatgagattataatcaccacgagggagtttgacggcctgaccggaattctcgatatgctcggctttgactactacgtcgtcgggaagcacggaggggctactcttgaaggaaaacttctggcaagctcggagagggtttacaaactcagcaagctcataatagaggaaaagcccgacctggcgatttacaagcactccgcagaagctccaagggttgcatttggcctccaggtacccagcataggcttcattgacaacgagaccgcgattggtcagaacaagctcatagccccgttcacaaaactgctcctgtatccaagagctattgatgcctatgagctgatcaagtgcggtgcagacccgaacggcatgaggcccgttaacggattctccgagctagcccacctctacggctttaagcccgagagaaaggttctgaaagagcttggggtgaagcgcaacgggtacatcgttatgcgcaccgaacccataaaggccaactacttcaacggcgacataaagagcattcttgaggacgtcataccccttcttccagacatcccaatagtcctgttcccgagaactgaagagcagaggaagcgctttgagcgctttgacaacgtcataatgccagaaaagcccgtggacagcttgagccttctttactacgccagactgatgataggagcagggggaacgatgaacagggaggcaatagccctcgggactccaacgatctccacttaccctggaaaactgctcgccgttaccaagtggctcgttgagcttggggtaaagttccactcaacggatcccctggaagttgccacagtggcggaaaggatgatagaaatgaacggcagttacaggaactacatccggagcgttgtttcggggcttgagaacccaatggaggtaatcctgaaggagatagaaacatatgaaaccgagggaactttcctcgtctcatcagaggccggcaacgttgggagttatgtaagcctcgataaacgcagcgattaagagcatcagcaaaaccacaatgtaaagcctcaaggcctggagggcaccctctttgaggccttttcccttatcttctgactccataatcctgcggtaccagcacatacctgccgctccggccaggagtatcgcggggatttctacaatcccgtgtggcacaaggcccaaaatgagagtttttactgggattccttcttccttgagcacgccgacgacaagtccgactatgaacccgttggcaaatatcacaaaaccagaaccaacaccaaaaaagagacccgccacaaccaccagaagcgcaaccctggcgttgttgaggaatatccacacaaaatttctgaacgggttctcggagatacttccaaactgtctggcaagccgctccatatattcgaaggccattcccggctggaacctcacgtatgccagacccgcagctatgccagcgaagagtgccaacagtagatagaggaaatacctgccaattctccccacgggtttcacccttcgagggccttcttcaacgctatcttgaagtcctcgacgtttatataaggcatctcgacgtcaagcctcatggcaaagaactcgtctattatcccctccagctcttcgagcttgtgcccttcaagcctgctttcaagttcatgaacagtctcctcgggatgaatgaagaaatctcccgttatcctgacgttttcagcccttccatccctttcgtcgaactctatccttatgaggcccttcttagctttgtgctcacctacgtggtgcttcatacccatccccttagtaagctcgcgggagaagtttttaaaggttgggttgtagttgggccggtggtgaggatggtttacaaagaagttcaggaaagggtaaggctcgcactgcgtcaagctcttgatgaaatgctccatgaggctggaaaggaatgggacggtgagataacctttgatgacacccccagcatcgagctgggcgactttggaacggcagtgtccttccagctggccagggtattcaggaaggcgccgaagtttatagccgaggaactcgttgggagagtgaaggaaaagctcccagaagaaataagggacgttaaagccgtgaacggctacataaacttctacctcgactacgagttctttggaaaggcccttgtgagggaaatactcgagaagggcgagaagtacggcgagagtgaactcgggagtggaaagaaggtcatagttgagcacacttctgtgaacccgacaaagccgctccacatggggcacgcgaggaacgccgttctcggcgacacgatggcgaggataatgaggaagctcggctacaccgtcgaggttcagaactacattgacgatctcggcgttcagttcgcccaggttctatggggctacctaaacctgaaggaggaatttgagaggattgaagcggagctacgcgagaagggcctgaaggaggacttcatagaccatgtaatgggcctgctctacgttgaggtcaacaagaaacttgaggagaacccagaggttgataaggaagtccgcgagctgatgaagaagctcgaagagggcgacaacgagatagccgaggttggaaggaagctcgccgagcgcgttgtcagggcgcagatgctcaccacttaccgcatggggataacctacgacctcctcagctgggagagcgacataatgaagagcgggatcttcggcgaggcctacgggctgatagagaagaacgagaacttcttctgggcgacggagggcaagtacaagggagccttcgtgatggacttaagaaagctcttccctgatatgaagaacccgttcctcgttctgaggaggagcgacgggacggcaacctataccggcaaggacatagcctaccacctctggaagtttggcaaggtcaaagccgacatgctctacaagctctgggacagggttgaggaccacgagacctggacgacggctcccgacggaaaggagatgcccggaaagttcggaagggctgatatagtaatcaacgtcatcggcgccgagcagaagcacccgcagatggcgataaagtacgcgctccagctccttggctttgaggatgcggctgaaaacttccaccacctggcctacgagcacgtggtaagacctgaaggctcgttctccggaaggaagggaacgtgggtcggcttcaccgtcgatgaagtcctcaacgaggccgtccagagggcaagggagcttgtcgagcagaagaacccgaacctgagcgatgaggagaaagatgagatagccgaggctgttggcgttggggcagtccgctacaacctcgtcaagtacagcccggacaaggtaatcaccttccgctgggaagatgtcctcaacttcgagggagacagcgccccgtacctccagtacgcccatgcaaggtgtgcctctatcctcaggaaggccgaagagagcggagtggagactgactggaatgccctgcttgagaaggcggacttctcaaagctgacaaacagggagaaggagctgataaagttcctcgcgaagttcccggaggttctggagagcgctggcagggacgtcaagccccatctcgttccagcttatctcaacgaactggcctcgctcttcaacaggttctacatggaccacccagtgctcaaggccgaggagggaataagagaggagcgcctgctcctcgtcttggctgtaaagcaggttctcaggaacggacttgatgttctcggaataaaggcgccggagaggatgtgatcagtcctctttaatcactttttccacaaccgggtctataatgtggtagcggccgttttccttctttatccaacccattttctccaggttcacgagaaggctgttgaggcgtgcgttggttatcggaccgcctttggcctcaacatagtcctttatctgagaccaccttgaaagtccaattgagatcgcctttaaaatcaaagcgtagcggggggagcgcttctccaactcaaagagctcctcctttatcatggcctttgccctgttcatggttgtctctatagctttctcaaagcttcccttcttccagtagttgaatccgaactcaacgagccatccggggataccatcgagctcgtcaacagctcttcttatctcatcttcaggaactttaactccaacttctgcaaatcccctcctcaagaattcctctgagagctctctgggaaacgcccttatctcgatctcctctgatattctgccgtagagggggctggaatagtcgtcaattccaacaaagtcgtggaggaggcccacttcggaacctgtgaacacgaagctgatgtttgggagtgaatcgtaggcataagctactcctgcgaggaagtctttaccccctcgtgaaccaaagaaacggaggtactgagcctcgtcgaaggcaatgacgactttctttccagtctttcttccgaactgctccagcctatccagaacatcaacccaggttgattccctgggttttaagtgaaggcctaggaggtttatctcctccaccttaatccccctaaggaaaccaaccctgcccttcccgaggagtatcctggttatctcgtcaacgagcatagctgagcttatactgccgctaccagcggaatagaggcggcgggtgtccatgtaaattccaataccggagtactcgttcagggcgaccttcagcagagaacttttccccactcgtctaattccgatgatgaggcttatcggatattcgttcattccgttaagtatactttcaagttctttctccctgtcaaagatttcctcccttctttctttaggtcttggatcaaacagcattaggtatcgcccccgatactaagtatcggtaccgatacttaaggttttcgtgcaataccaacactaaaatacccttttagacgtactttatcccggtgattccatgcgtggcgttatagtccccattgtcacgcccttcaaagaggactattcaatagacgtaccagctctcgaagagcacctcgactacctccagaaggtcggggttcacggaatattcataaacgcgactaccggggagtttacgagcctcagcaaggaggagagaaggtttttggccgagaagggcagggaacttgtaacttcagcgttctacctcgtggggacggcatcatcgaacaccctcgaggtcattgaacttacaaagcacgcccaggatattggcgcagactacgccgtgatagcgcccccatactactgtcccctcaccgaggaggcactattcaggcactactcaatgatagcggagaaaaccgacatcccaatcatactatacaacatccccgcctgtgcgaactcgctgagcgttccactcgtcaagcgcctcaccatagagtacccaagcattgccggcattaaggccaccctagacagcgtgaactacataagggacattattctcgatgtgaagggagaaaggaaagacttcagggtcttcactggcctcgaccagcacttcctcaacacgctgatcctcggcggcgatggcggaataatggcgtgcgcgaactttgcaccagagcttcatctacgcctctacaaggccttcaacgagaagcgctttgaggaggcctttgaatactcaagaaagctggctaaactctcaaaggtctatgacatcgcctcgtcgtttggatcggctataaagctcgcaatgagagtcaggggcttctcgataaaacccgtcctcaggccgccctacactatggatggaaaggaagttgaagaaaaggtgagggctctcctcttagaggttctgtaagccaagaaaaaagtagtcgaaacataaaaatacctcctgtagataccactagacggtgagagtatggaaaggactactgatgcacgcattgaatatattctctctgaactggagaggctcaaggttcacatccaaagacttgagtctatgctcgttccccttgtgaaggacgaagtccccgaggaggagctcagagagatagaaatggaagcgagaaagttcaaggaggaaagcgaggaatggattgatgccgaagacctcgatgaaatcctggaggatgaagaatgacgttcagagttaaaatcagaaaggaagtcataaaagagctaaagaaaatgccaaagccaatctcaacagatttctggagctgaaggacgttcttcagtatgaagccgttccgagggacaggtttgatatcgcaaagctgaagggttccgatgatctggatatatacagagttagactcggtgaataccgggttatctactcagtaaactgggaagagagagttatactaatccatcggcttaaaagaagaggggaagcgtataaatagctcactgaatcttgtacctcaaaatcgctccgagacctccaaaggccttgtagaactgctggccttcctcggtatcgagggagatgatctcgacgtccgccccgctctcctctgccatctttataagctcctccgctacgtcccacttctcgaaggttatgttctggcttccgcacttgggacagtgagttaactgcttcttgtaaacatggaactccccctcgctcattgtcttgagctcctcccagccgcagttgttgcacttcgccctgacgcgaaccttgtcgtagccctcgctgattaggagcttgtcaacggcgccgagctcaagggccttcctaacttccttctcaccgtaggttatcattcccgtgtccttgacgaggtgcttgaagaactcctggatgagctgacgctccttaactgcctcatggtctttgaggatgtcgctggccttctcaacaagctcccttagaccgtactcaccgtggtagctgatgtcaacaacgccgatgaccttcttcctgagctcgtggtggaggtaatctccctcaacgaactcctccttcgtcggaccaggaccgcctatgattatgcccctgagctcacccttctcaaggaggggcaggaaagccttgttggcgtgctccccaatcctcttcatgaactcgtgggtctcctgctccctgatgcgctcgtaacgcctcgccgactgaccaccggcgcgggtctttccggggacgttggaggtaagctcgtctatgacctcgattctcttcccacggaggagacctatagtcgcctcgttcttctcgacggttataaggccgtaggcgtccttaacgcggagcatctcctcaaggggctcggtaacgaaggtctggtcacatcgatatagcctgacgttgagcggctcgggtggaacgatagcccagagctttatgtcgctcacaccttcctgctcgctcacgtttccgacgaagagagccaggccgttctcgggggtctgtttgtagagcttgagatgctgcatcgctctttcgagtgcaccaaggacgttctttcgagttgacttgctcttgatgttctgagcggtcccgtactcctccctaagctgctgcatgaccttgtttatgtcatagccggccgggatgtagagactgacgagctcggttgcgcggcctcgatagctcttcagctcctcgaccttcttcttgagttcgtacatctcggcagacttgtgagacatgagcatcacccctaacttctctcgctgaaataggcacgaaaagggcctttataaaggtttggagctacagaagggagagcaggattactatgaaaacacccgggattccaccgattgccactatgagaaggttcaagaggttaagctggacgtgagtgacgccgaggaagttgaggaggccgattatcagcaggccagctatcgtgttcagggcgagccacttgattattgccagggtcagcttgatgaggatccatccaactgctataagaaggaaaagaagaactaaaagctccagcatttttcccacctcagagcttttcaagagcttcctttgctatatctccgagcttgacccacttcttgccctcgaagggaagtatcactttgtcctcgacgtccacgaactcccggaccttctctgacagctcgcgcaggccgagttcccctatgatcatgagggcgaatcccttctggtttttgtcccctgtttcgagctgcttcccaagttcctcaacaatccaggccctgtatttgtcgagaagctccggataggttttgacgatagcataagccagcgtcatcgcgttctccctgacgtaggggtttctagattccgtaaggccaaggattttcctgaaggtatcctcgttaaaatgacccttgacaacatcagggttgctttccacgaggttcgttatcgttagcagggcatctccaacaacacccgggttgttcgaggagagaagttcaaagagggcctccctgatcttcttgtcctttactgcctcctggagaaggagttcgaactggctctcctccagcatcttttgaaccttacccttcttggagccgaatgagaggaacgccatcgccaccaccttaaggggatttggagaaaggagatttaaaggtttatcttttctttttgaaagctttgcccttcaaggcgagcgagcttagtgtttgaggttcggggattaaaagaggctgtggatgttggatagtagttgtttgagtgtcggccggtcgagttttccgattagctttccgtttagaacgatgtccttgggaagggtgaacaatttgaacggcttgatgatgcttatgttcctcagccttcccgttccaggcactaggttagagttggagattattatcaccctccttttgagttcaggaggtaggcttagtattcggtagtctttgtggcgggatacctggcaaactataacgtccaagttatctgagttgaatttattctctgagacaattatgacaggccttattttgtcttttaaaacgaatttttggctgttaccctggagttcatagtaaggaaacggtgccgtccatatttcaccttgttccagcatgtttcatcctcctctggcttcaaagaaagtcagtcttccagaagttcgtcaatgaagtagtcgtctattgtccttggttcgggatttagggactttattttctccgcgacgattttgaagtctttttcaagttcagctaggtctctttcctcttcgacgattttcagcactctcagaagcaggaggaggaagtatccgattagttcttctatggtgttgaaatccctgttttccaccattatcccaaggaggttcgcctccagggacaagaatttgtcgaggatttcaaactgcttaacttcctcttcggttaggttgtccttgcttaatgccttttcccatagttttctgttcgattcgttcacctgagcctgaagttccacaatctcggggattaagatattgagcacttcctctttgacttcttctgggtttatgtagctgttttccgcggcctccatgagttcgtccaagaagggggatgtttcagataggataatgttgttgatatcccctattgctctttcgtaggattctttagttgcctcctcgggagtgatctgtagaagtttttgcaggatttcatcggagttttcatctatttgcgcccgtattttcccaaatacgtctgataacgatgtgatgtctgtgaacatgagaagaggaacgtctctgaaaaacctttgccagaatgtatagtactctctcgccgcttgggcgcacacaaggatcaccctcaatagtttctgtctccaatgggtggtatcaacgcaatgcttaaataagttttgcagttatccagctccctagcttcccagcgcgcagattattaccttgcacgcctcatcgttgccgtccatgcagtcgtcataaatctgtcccatgttcttgccgttcacgtcgtagttgatcacaccggaataatcgcctgagtaggaagtcccctggactgtgcaggtggtctttccgttcgaggtcgagagggagacggccttggatttgatgtctttccaggttcccgtggcgttgagctgaacgacgatgtactgggcggagttctggagggaaagagtgccaacctgctcgccagtttgaagtgtctttggaagataaccagaattgtatgcaaaaagagcggcgaatatcatagcaaacgcaaggatgaacatgaacatatactcaatagaagcctgagcacgcatcgctatcaccaaagaaaagagaaaagagtcatgggatcagccaagatcaattaagatatagcaatacttctcatccccagccatacagttgtcatagaccttcttgagagtcaaatcgttgctgattactgatttgtatgtatctgcatgagtagccgttgcgttaactaggggagtagaactatccggttttataacaagagtcttgtttccattgtcaccccaggtcactatatagttgtcattccaagcgtttctgcttataaggttgctcttggcaagctcagcctgggcctgaagctgggcaatgttaccctgttcctgtgcctggcttccactgttgctcacgtacctcacagctatcaggattataaccagggcggccgcgatcatgaagaggtactcgatggcaccctggcccttcctcctattgagtctgaacattcctcaacacctccgaagggttacttcattccatttttcaatccaaaaacccttatatagctttctacccaaatttgagggtgaggccttcaatattgtgtaatcagcaggggtggtggcatgaggttgcttaatttccagcatgaatctgcaagtatcgaggattgtacaagcactgtggttgaattatcaaataaggccctccaatcaacccacggattcatatcatccgcaaagatttccctgagctttggagcttttatgaaccttggagttacggtgctcatagacgacgagaaagatatgttaaagggcatcattgcggaacattcaactggtaagaacagggccgatgccctcaacaaagccctagagattctcaactcgaagctgccgaagaacgctgaggttgtggacttcgaggtcggcacctacgtaacccccgttacgaggagggcctacggcgtcgctgttgccgtttacaacgcccccactgagcagaaacccttcgaggagttcacaatggaagaaaggcggagactcatcgcacgggttctcaaggagttcaactacaacccgaaggtgctgaacatctcggagctcgccagaatgttcggagtgtcgagggactcgatatactacgacatccagcagatactaaaggaaaaataattgaaaggctaagccgtccagagcggcctcggagttgctgtaatcacgaatatcacaagcgccgttagtgctagaactattctgcccttcgagataggactaacctcgtcgagagcccccgggttgccagcggagcctatgaagattatcagtatggcccatatcagccagccgctccagaggtagctcatcccgacgaggagcagagctgcggcgtaggttatcatcttatgcgccttctcgctgataaacgccctaaggatgtggccgccgtcgagctgggcgacggggattaggttgaggaaggtaaccagtattccgacccagccagctatggctactggatgaaggaaaatcacgtaatcgccctgtacgttgagcaccagcctttggagggcctcaaagagcaggttggttccgaagtagagaccgccctccgttgatggcaccatgctcatgggcaccagcacggatagcttcagaccgagcactgtaactggcacggcgacgaggaagcccgctatcggcccgctgacgccgaggtctatggcggcgtttctggtagggagcggtgacttcacccttatcacggctcccaacgtcccgaggatgtttgggaaaggtatgaagtacggcatcgtcgctttaacgccgtggtaggtggccgctatcttgtggccgagttcgtgggtgcctattatggccatcacgctgaccgagaaggagagcgcaattatatacgggtttctaaggcctggaaggccgtagtgttcaagggtggcgatgtagttgagcgccaggtagtagccggcgaagaacgtcgagagtactgtaagcacgaggaaaagccaggggagccacggattgtccgggggtatctttccagcgggaaagacgaagagcacgattctgccgtccctcttcttaagggccgcccagtagccgaggttctcaagctccctgagaaccctctcaaagtttttttcgtagatgtcgagaacctcaaagaccgccacgtgcccatcaaagccgtaaaacctcagagagtagaactcattcagctttgcctcgacctctgggggaagaccgtgaggcgattctctcgggacttcaaccccgggagaaactccactcccctcgggagctgggacttcctccctcccagaacggacgttcggagattctacaccgcttacagcatagcccactagtatcatgtcgccgccgcacttgggacaggccctctcaatcacgggttcggtggaatccagaacttccctgtggccgcagtttacgcactcgtatattcccctcggcattttcacttcccaaaagaaattggggagaaagttaaaaacctactccccatcctcaaggatttcgacctctccgctgtcggcatcgacgcggactttcatcccggtcttgagctttgagacatccacaccgtcaaccattggaatgtctgatataatcgcgcccgtggcaactatagtctcggcttctccgacgattatagccttcggggctttgttgttctttttgagggcgtagatgacgtaggaaccaaccgtggagcccttgcccctcgggaagacgaggatttttcccgctatgctctgacccctgatgtcgctctcggcgtcagtcacgatgcccgtctcgggatcaacgccgccgagaaaggagaggggcttcctggagactataacttctccctccgctttgcccccaacgatcttcctgcccttgagcttcatgttaccacctcacggagcctcctttatcaggttctcaacgtcgtcaagccgtacgctgaagccgaaggaacggaagtagaaggccgactttccgctgttcgtggctatccccctgtaccatccctttatcggcgagacgacgaaacatgaatcgggtatgattttcccgttgtagcgttcgattatctcagtataacccagggcatccgccaaagccttcacggccctgctggcggttatgaagaggggtatcttgaggggcttcccgcgcattctcaggagttctgctatttccttgacctctggcagggaagcgtgcggacagccaatcaggatcatgtctatatcactccaatcgtcctggaaggattctctaacggctttaaggtcagagtcctcaacggttatcgtttccagtttgtcagttatagcctccctgtactcaggggtctctccctcaacgtggtagagggctatcgagccggtagcccccatcgcggcgccgagctccttgaggaactcggtcttttcaggctttaggtttttgaagtaggggacgtcgtttccgagggtcttgccgacgtggtagccgagaaccgagtagtctgcgaaggtctttaccttagctttaacgtcaacgataaccgttgccttcctgttctcatcgaggtggaggccgtagtttggagttttgccgacgatggcagcggcgaggcttgaaggtccaccttccctatttgtcctcgctccaagtatggagttggcgaagctgaccgctgaactctcgctccaggctatatggtccccgaacttggggaggtttgcgccgtagtacggggtgcaggtagatgtgacctcaatgcccatctttctgtaaagctcaaggacttccatctgcttttccatgaactcgtcgtcgcctattcccgccggattgagggttgtgtaaacactgaccttcgctccagcctctacaaagtccctcaggaactcgattccagcatcaccgatgttcttgtaggagactcccgccacctgggcgctctttatcggaatgagcctgtcagcaccgtagatgtcgccgagggcaacgagtatctccatcgccttctggagggcgtagccgtactctcccgctaaaattagctcctcctccttcgtcaggtacattctaccaccggcataatttgacctggaaaagttataaaaccgcctccgcaaaatttataaaccctccactgttcactaactaacgggtcgagcagcggggtggggcagctaggagtgcccgccgggctcataacccggaggtccgaggttcaaatcctcgccccgctaccagtctatttttgtgcatttcttctggtatttgttcccccatgatgtttattgttcagcataattttcgaaaagtttatacatacatcttgctaagtagtaataatgagaaggttgcgagatttatcagtattcgaactcaaagagattatggactatgcaagaactctccgttcagaggggcttagttattcagccatctcatcaaagatcgctgaggcatacgatgttagcgtttcccgacctaccatcagtagatggtgcaagggaacacacgacccattcaacaaaataaacgatgtgaatttgagcccgtccccagctctctcgtacgtgattggtgtttatctgggagacggaagcattcataacaaggataacggaaaataccgaataaagctcaaggttgtagacagggaatttgctgaggcgttttacaatgctctgaagacgctgggattgcatcccgtctttggatttgaaaacgattccacgagagttaatcgtttttatgttgaaggctccagcaaggctttgtatggatttttgaaaaatcccattgaattcctatttgaggtagcagagttgtatcctgcggagtttttgaggggtttctttgacagtgaaggttttccggtggtctctgctggtaaaagatttagagtttatgtggaggctgtgaactcgaatctgaaactgctcgaattttcaaggaagttgctcgagacaaaattcaagataacatccgcgatattcaagatgtattctaaaggtcagagggttgttatacgaggacgggagtataaatcaaatgtggatatgtttggcctgcgaataaccagattaatggacattaaacggttccacgaggaaattggattcactgcagaaagaaaaactcaaaaactgcagtatgcgctctctcttctggaatgctgtcccaacgatgccactatgcgttggaaggagagatacattaaagttggtagggagtatcgggagcggggcaaacctttttaaactcattccgcaacgccgatgcgaaggggcggctggcgggagctggccgtcaccgggaggtgtatgatatggcgaggatacacgcgagaaagaggggtaagtctggttcaaagaggccaccgaggaccgctccgccggcttgggtcgagtacacggcggaggaggtcgaggctctggttgtcaagctcaggaaggaaggctacagcacggccatgataggcacgattctccgcgaccagtacggcattccgagcgtcaagctgataaccggcaagaagataaccaagatactcgaagagaacggcctcgctccggagattccagaggacctcatgttcctcattaggagggccgtcaacctcaggaagcacctcgagcagcacccgaaggacaagcactcaaggaggggccttcagctcatcgagagcaagatcaggaggctcgtcaagtactaccgcaggactggcaagctcccagccaagtggcgctacgacccagagcaggccaagctcctggtccgctgatccctttccttcttcttccggtgatgccgcgtggataaggaggcttttttggagcgcgttagggaaggggccgagctaattaagatgcatatcgagttaggtcacacgataaggctcatctcccacagggacgctgacggcatcacggcaggtgcgattcttgcgaaggccgttgcgagggaagggggaaccttccagctcagcatcgtcaagcaggtgagcgaggagcttatagaccagctggcgagggaaaagagagaaatctacgttttcagcgacctcggaagcggctcaattgaactcatcgaagaaaagctgaactttgccaccgtcgtcgttgccgaccaccacccacccgagaaggactcgttctcaacggactcccacgtccttgttaatccggttccattcggagcaaacagcgttagggacttgagcggctctggggtggcctacttcgtcgcaagggagatgaacagaaagaacagggacatggcctacgtagccatcgtcggcgccgttggggatatgcaggagatagacgggacttttcacggactcaaccttgaaatcatagaggacggaaaggagctgggtattctcgaagtcaggaaagaactcaggctctttggaagggagagcaggccgctctatcagatgctcgcctacgctaccaatcctgaaatcccggagataacgggagacgagaggaaggcaatagaatggctccgcgccaaaggctttgaccctgaaatgaagtactggcagctgagggaagaggaaaagagaaagctccacgaggccctcctcgtccacatgataaagcacggagcaccgaaggaagcaatagacaggctcattggtgacgttgtcataagcccgctctaccctgagggggacgtaagacatgaggcgagggagttcgcaacgctcctcaacgccacaggaaggctgaacgccggaacgctgggagttgctatctgcctgggcgacgaggaagcctacaaagttgccagaaagatgctcgacgactacaaaaaagagcagatagaggcgaggaagttcataatccagaactggaacatggtcgaagagggggagcacgcctacgtcttttacgctggcaagaacatacgggacactctcgttggaatagcagccaacatggccatcaacgcgggtctggctgacccagagaaacccgtggtagttctagccgacagcgacgaggacgagaacctggtaaaaggctctgccagaaccacggagaaggcactggagaagggctaccaccttggggaagcgttgaaagaggttgccgaaaaacttggcggcgagggcggtggacacgccatagccgcgggcatacgcttcccgaagaacaggatagacgagttcattaagctcttcaacgaagccctcgggaggcaggtgaagggcggtggaagtgaaggcgagggttgagatagtctggcactacggcgatgatgccaaggcgagggcaatagctgaagcaatccaggtggacaacgagagcatgcccgaggaactaaagaaaagtttaaatgtgcaaacccgatgggttgatggagacgtcataacaaaggttaaatactcgggtgagattgacaccctcatcaaagcgctcgatgatattgtgttttcggtcaaaatcgccgaagatagcgtagaggtgtgaactggaggtgttaagatggcaagaggtaacccaaggaagagggccgctgcggctaaggataagtggaagatgaaagagtggtacatcgtttacgctcccgacttctttgggagcaaggagataggcctcactcccgctgacgaccctgagaaggttataggcagggttattgaaacgactctgaaggacctcaccggcgacttcaccaagggccacgtcaagctctacttccaggtctacgacgtcaagggtcagaacgcctacaccaagttcaagggccacaccctcgcgaggagctacataaggtccctcgtcaggaggaggaccaccagggttgatggaatattcaacatcaccaccaaggacggctacaagctccgcgtcatgggcatggtcatcgcctacaggaggattcagaccagccaggagagggctatcaggaagatcatccaggacatcatctacaagaaggccgaggagctcaacttcgctgacttcgttctccagtctgtcaacggtcagatagccagcgagatagcgaaggaagcgaggaagatatacccgatcaagcgcgccgaggtcaggaagataaaggttctcgccgagccttccgcctgaaggctttttcaattctcttttggttctattctcggaaacgttatatgcttccatgccgtattcatgttgggtgatagggtcatgggatctgccacaaagcacattcaagccgagatagatgagaggctctacctcatgctgaagtccatttccatccgaactggaaaaccgctcaaagaacttttgcaggaggcgattgagaagtacgtcgagattgaagagaaagagcttaaacaaaaggcgaaaaacgaccccatctggaaaatcgttggaaagggggagcttgaggagaacgccagcgaagacgaggagtgggggcttaccgaatgaaaaggccggtgccagaagttatctaccttgacacgagtgcgctcatagccctcttcaacagaaatgacaagaaccatgaaagggctgtatcttacctgagggaggccctcgagtccgggaacctctttctcctctcaaggccagtgctcatggagtacttaaacggcctatccaagaggtatggaaaggagatcgctaaggaaaactacgatgccctaacctcgagtagcttcgtgtacattgagaacgaaacggaggcagattggagaaaggcttgggagttcttctttaagtatcgcgaccagaggggtattgacctcttcgattccctcagctttgcgatcatggaaaggctcggcctgaaaacagctttcacgtttgactctgactttgaggttcatgggtttaggactgtaccataaccgggaggtgataccttgaagtttctcgtcaagactcagaggggcatggagtccgttgctgggaactacatccgagaagcccttcccaacgctgaagtctgggcttctcccatgggttattcgggtcttgtaatagttgaaaccaacgatgagaacgcggaggagaaaatccttgagatacctgaagtggagcgcgttatacccgtcctcgtcgagacgaatgcggagctgaaggagatagagaaagccgccgatgaaatagccagtctcataagtaaagatgaaaccttcgccgtcaagaccaagaggcgcggaaagcacgacttttcgagcatcgatgtcaaccgcgttttaggtgcgaggatcaaggagataaccgatgcggacgtgaacctgagctggcccgacaaggtggtccaggttgagataataggggatagggcgtatatctcggttcttccaggggaggaataccgaaaatacactccagacaagttcgacgccaggaagctcttttccaaggttacccttgtccagatgccctactggggcgattacaaggcctgcaggaagttcggtgagaagatcggcagggcggcccaggcctttgaggtcaaagaactcatcatagcacctaaggagaaaatggacgcctacgagctgatggagtttctcaggggcatcaagataggacaagaaagcaggtaccagatacagagggaggcctatccctggaaggttgagaaggttcccgtgtctgtgtgggatctctaccaggtcgttagggacaagagaaggaacaaaagactcctgataatcactgatcctaaggggcctactttagcagaggtcaaagagaaactggcaaaggacatgcactacgccaaggaagtagtcatattcattggttcgcgggaaggcatcccgaggggcctcttcaggtttgccgattacgtggttgacctagcaccttacatgacgtttgcgaccgagcacggcataccagcgacgctggtctccctctgggaggtttatgaagagttcctcaggaagagtgaagaaaaagccgaggactcttcctgatctttttatctaaatcggcgtcagaccctaaggtcgtcctcaccgctcgggaatccgccgtagtcatcatccgccggagtcttataacatctcaagagcgtagaagagagcagcaccgattagaccgccaagaaggcttgccagaaagttagtggagttgttgtcagtgattcccttctcctcaagggtcgctccaatgagactgtccagattcacgccaacgaaaccgccaattgtgactgcgagtaacattttccaggtgtgagtggtcagcgggagagcgaagggggctatcatcaaagcaccgatgagggctataacctcaccctggactgatacggcaccattcgttccgggattaacgggtttcaagttggttattagcctaggcttcctaccgaggacttttccaagctcgctcgcgagagtatctccgttcaccgtggctattgaggcaaaagttgccgcccagaagatatcttctttaacagcagcttccaccaggagaaagatcagcacagccagaccgtttccgagaacgttgccgatgcttcttgtgccgttgtttgactgggcgaggcctttcttaactttttctccataccgatacttcgtggccagaactccgaggataaggaaggtcaaaagtgccagaaacgtccacgttccaccaagcacaagaacacctaagcccaaaagggccgcggctatcgagcccttggcatctaaggctcgggagcgatatgccaggaccccgaggaggagcaccgtgattatatcagcaatgatgttcaaagtcatcaccgtcatcttggtagtgctctgaagaaggtttattactttttccccattttgaaaatagaaggagaacagagactagagggtctcaaatttgattgtctcagtgatgaacgttacgtccatgtggtctatcgcgggaactttcttggatatctcagagattatcctttcaagctccctcatgtccttgggcccaattacgtggatcacaaggttgtgggagccaagtgcacgctggatcaccttgacgtgttcgtcttccttaagggcctctatggcatccttgacatttgcaccgggcttcagagtaataccgaggacaacgtgaacgtaaccgagagcatcataatcgggtatcacggtgtactttaaaattacaccgctctgctcaaggcggttcatcctgcgggagattctctgccttgtcgtgccgagaagctcggcgagctccttgtatgtgaggcgagcgttctttgagagaagcttaaggatgcgaaggtcaacgggatttattttatccgccatcacagccaccccctaacgtttgtttgagttgtttacaaatgcatataaaaatgtttcgtttttggatgtacttcggcataatccagttattgatgggtcgccaaaaatcgcggttattgcagcattaaacgttcaaaagtgttataattgcgggagcttactacagaaatacgataataaaaataaaaccatcagcttcgcaaatctctctttcggtatttaagcacggtactgtcaagggcctggaaggcgtcaattccatagtggttggctatacataggagggcgtagagaacgtcgccgagctcctcttcaagtttctctttccccccatgtcccttaatgccctcaaaagcaagcatggcatcggcgagttcaccgacctcctccaccagcgccgcgagcatctggaaagggggccagtagcccccctgcctctggatcagctcatcgaccttcctctgaagttcattcatacccaacgagcaccccttcaactttcttcaagagctcttcaatcctctctgtgttggccttatagaagcgcatcctaccttctctgcgctccttcacaaggtcgagcgtcttcagggtgcggaggtggtggcttatgagggtctggtcctcaccgaggacttcagagagcaggcacacacagagccagttgtcgcgggtgagcttcagaatcttgagccttatcgggttggacagggcctttaagaactcaatgatttctctatcaacttcaggctcaagctccgcttccatctcgggaagtccgcatttctcgtagcacttgaagacgctctttttgggcctttcggggagtttctccactatgtcccttaccttcatgttcatcaccgaggaaaatccgacgaatccctaaataaatctttttcacatgaaatattcaatcaatgatctcaataaggacctcctcccccgaggatgtgtatgccctcacatcgtcctcggtaaagggccagggaattatcaggtggactcccccgaactttgaaaagaacctcagatcggcctcagagggccagaatgctggagagggatgggagtgaacggttccctttatgctctcgtccagagggagcatccagtggttaaaaaataccgagtttctgccgggatactggttgggagctatcagaacctcctcaaaaattccgtccttctccctcaaaaagccagcaaactcgttaggataggcactcctggccaactgaagaaggtattccagaagctccctgcggatttttatcgttctcatggacggcacctcaaaagggaaaaggtcagcgaagcgaagagtcatcaccgctcaggtgtcctcggcgtcatcacgccttctcaaggtacttctcgaggctcttggacgggacgtccagaggaagtcctatcttctcaagggccacgcgaagagcgtagaccctcgcgtgctcaaggaacggttcatcggcgtaggcggaaggctcgaacgcctcgtaggcttccacaaccttcgggatgtcggactttttaacctttttgaacgccgagaactcaccctctataccctcaacgtctatgtgcgcatacgcgggaagctttagggtgaccgtctcgttgatgctggccaaaagcctcgcaacgtcaagcaggggcgttttctcatctatgatgagcctcttgacgactatccactttccgtgcttggcagtaaagttcacgtggtcttcttcatacggaaattctacctcaactccagtaagctcaccttcagggtagttgatgggaacaacaccttcgagcgtcatcctgacgagaactgcctttgcagcatcaaccaagagctttttcagctttttgtcgttctctctgaccagtccgcccagtttcctcgatgttccaggggacttgagcgcgactattgtgtcgctgagggtgtctttcctgacttcttctgccagttttcttatgccatctatgtctatcttttcccccatgtagccgggtatcctggagttcacagagttcgctattcctgcaaggaagtgggcaacgttctcatcctcaagctccgtgagcttcttggcgacccgccagtcgttatgctttgctgtgaatgcaacgtgctcctctatcctcatgctctcaccgaagggagttttgacgttgggcttttagcttttttgtggcgctgcccataccctcaaaaaaggttataaatcgggtcaatccactcagtcctagagctgagagagggaagaaagatggacgaggagtccaccaaggagaggctgattccccgcgagtacggagaaagtcttgatctaggaatcgatttcaagaccaccgaagaaatcccggtaccggaaaagctcatcgatcaggtcatcggtcaggaacacgcagttgaggtcataaagacggccgcaaaccagaggaggcacgttctcctcataggcgagcctggaactggtaagtcaatgctcggccaagcaatggcggagctccttccaacggagaaccttgaggacatcctggtctttccgaatcccgaagacgagaacatgccaaaaataaagactgttccagcatgccagggaaggcgtatcgtggagaactaccgcagaaaagcaaaggaacaggaaggaatcaagaactacctcctcatgttcgtcatattcacggtgatactggcaatcatcatggagccaacggccaccacactcctaatgggaatgttcgtggtgctcctcagcatgatggtgctctccaacatgcgcttcaggaacacggttcttgtgccaaagttactcgttgacaactgtggaaggaagaaggctcccttcgttgacgccacaggagcgcacgctggagcactgctcggtgacgtcaggcacgaccccttccagagcggtggtctgggaacgcccgcccacgagcgcgttgagccgggcatgatacaccgcgcccacaaaggcgtcctgttcatagacgagatagcaacgctctcactcaaaatgcagcagagcctcctcacggcgatgcaggagaagaagttcccaataaccggtcagagcgagatgtcgagcggtgcgatggtgaggacggagcctgtcccatgtgacttcatcctagttgccgccggaaacctggacaccatagacaagatgcacccggctttacgctcccgtatcaggggctacggttacgaggtctacatgaggacaacgatgccagacaccattgagaacaggagaaagctcgtccagttcgtcgctcaggaagtcaagagggacggcaagataccacacttcacaagggaagccgttgaggagatagtgagagaggcccagaagagggcgggaaggaagggccacctcacgctccgcctcagggatctcggtggtatagtcagggcggctggagacatagccatcaaaaagggcaagaagtacgttgagagagaagacgtccttgaggcaatgagaatggcaaaaccgctggagaaacagctcgccgactggtacatagagaacaagaaggagtaccaggtcataaagaccgagggcggtgagataggcagggtaaacggtctcgcagttataggcgagcagagcggtatagtcctgccgatagaggccgtcgttgcccccgcggccagcaaggaggagggcaaaatcatagtcaccggaaagctcggtgagatagcaaaggaagctgtccagaacgtctcggcaataatcaagcgctacaagggtgaggacatcagcaggtacgacatccacgtccagttcctccagacttatgaaggcgtcgaaggtgactcggcgagcataagtgtagcaacggccgttatctcggccctcgaaaacataccgataaggcaggacgttgcgatgacaggctccctcagtgtccgtggagaagtgctcccaataggtggggcgacaccgaagatagaggctgccatagaggcgggcataaagaaggtcataatacccaaggccaacgagaaggacgtgttcctgagtcccgacaaagcagagaagattgaaatctacccggtcgagaccatagaccaggtgctggaaatagcactccaggacgggccggagaaggacgagcttctcaggagaatacgcgaggcccttccgctttacgggtcttcctaacttctttggggtttcattttctttccttgaaccttagaacgaagaagagaactaccatgaaaaccgttacgacctcgctgacctcaaagggcaggatgccgacgactcccagtgtatagagaactgccagaagaattacaatgacaagaagaatgcgataggcctgttttttctccacttcagacaccttccattactccctagatagagtctttccgagtctgaacagatcaaccctagttattatgccaacgatctttccggccttatcctgaacaagaactgcagggtgatcctcaaggaggtacttgacaacctcaaggtcttcatcctcgttaacgattgggaaaggttcttccatgacttccacaaccttgtgcccgtaaatgtcgtcgtactcaaggctctggcgcacgagcgtcctctcggtgattgaaccaacgaccttgtttccagagatgacgggaatctgggatatgttgtgttcattcataagtctgataaccttctccacgctatcgtagggcttgaccgatatgactggagatgacatgacatccctggccttcggctgggcctttttgcactcaaggagggcctggagaattcggttgagggtcgagagcctcgggtcaaccttcccggcttcaagcttggctatgtaggcctgagtcactccagccttcttcgcaagctcttcctgtgttatgccaagctccttgcggattttcctgatctccctggggtctatgggccggggtatggtcaccatcaataaccaccagttattggacggtggtgggtattataaggctttcttgagaagggcatcgaaatgtgggccgggtacagaggcccgcggtcactgctcccgcgggtggatgctcccggccctgtgggctcggcgtgagcacgctccgctcacggaacccgataccttgcggaggcggttgtaccgagccctgcgaggagactgactgtcccctcgctgtcggcgttgtaatgtagtcagagaagtttaaaaacatagctcaacctgtggagattaagataatgcccgcaaccgcaagggcaagcccctcgaatattctcctgttgggtttctcaccgaggaggagcacagccagaagtgatgatataatcgggtttatcgccgaaacgggcgccgctatcggggaaccaacgcttgagacggagtacacaaagaggtactggccgagaataagtccgagcacagcggcaccgcttatcgttagaaattctccgatggtaatgctcctgatttctccatagtatttcggaagaaggattgagatgccaattgccgcaaacatcattctaatgccggcgagttggagtacggggacatcggagctcaggtagtccagcagggttattgccacactccaggatatcggtgccaacagggcgtatataaaaccgagtccatcaacttgctcctcttcttctgcccttctgactattattatggcagttacaacaagcagggccccgataaccacctggggactgacttttctgtccaaaaagagaacagcccacagtattgcccagagtgggtatgtggaggtaatcggtacagtcctcgacactcccatcctttttaaggcagagaagtagaagtaatcgccgattacgaaaccgaactgggcggagatgaacgccactagaagaagccttggggaaagtctaaaaacccccatattgtttgtagcgaggaaaattaccaggaaggtcagtgccgcaacgtagagccgcagaatattcgcacttataggagacagcctttttaagcccattctcacaaggatagtcgctgacgcccatgaaaacgccgaaaccagtgccgcaaggattccaattatcaatgagttcatggtgctcacttgaagagacgccttaaaaaattattggcttagcgtttagatgttcgtagaagagatgttttattagcccctcccgaagagcaatttgaagtgatgagccaggctaggctgaccttagggatgatgaggatcttgagtgctgaacaaaaaaggaatgagtcagcggaggattatgttgagcttcctcaacctgattgagacgctgtactcgctggacacctctttgataaccctgtttatggtctctgcaacatcctgctttattttttcgtccgagattcccgagtatgcaccgaagagacctccaacttcttcctttgcgaagctggcctctatatcaacatacacagtggaaccctgaacctcgtggttgagctttaaccacttaaaggtagcacggggcacaagtttcagctccgcgtgaattctggctttaagggtttcaatcgccggctcaatcctgctcttaagaagcgtctgttccgcttcctttttcttttcttcggtgaggaacgcgagctcgtctattcctgcctcctggagaagcttttccacttctttctcaaggagttctttctttgccaggatttctgaggccttcgctgacgttggtttcacggagggcttagtaggcacaacaccttcaggacgaatcacctcaacagtgacggtgtgaattgaaatgtagcgctctatggccttagagagctcacgagcatggcgagccagcacggctctaacagctctctctgcagtgtccttatcgtattctcccttcacagcaatggagaggtttatctcaaactctcttcttccttttatatcgaagtacgcactctccaccagcattcccgaggtttcaatttccctgataacagtcttggcaaagttactgaaatacggccacatatcctcgagtactgacagccggattttcttgctcttatctatgtagtcagttctctttttgtccttttcagtgatttccctgggtctggcttcttcaccgtcgagaactactcttatatccttgagacggggtttgtactcagagaccctgaatattattggggcgttcttgctcactatgtggaaaatccttctctccgaaatctctatatccctgcggtttttgctttccgagcttccgtatacggtaacgttgagatcaacaacccctccctctgcattgccggtgaattcaatcttttttattttgataccgcggattttttcagagtccctctgtatggcctcagcgtatttcataaaggcctcctcggggattttctcacccctgagctttatggaaatctcaggcccagttgttgtctccgctttcttgggtgcaatctctgggagtttctcagctttcttgggggcggtccgttccctttcaggagcggctgcctttgtaggctgaggcttttcaactatcccaacttttggctcctcactaatctcttcaaagagctcgttgatgggcacttttggggtttctgagtatgtctcaaggttttccgctatagcaagctttagttcaatttcatctaacgaataaacatcaacgatcattggcttgtcgaggagagccttgaatagctcgactgtcttgtcaccgctgtatctctcttttgtatctaccacaataccttcagccgcaaggactttactgctgtcaagcaggagtgttatgtaatatttgttacggctatccttagagaatatcttcaagaataccccacttccttgagagagggcctcttggattaaattactcagttccattttagaggtaacgaccgcgttctctaccatgggagtctttgttggaagctccatgggcaccaccattagctatatatattgcctcgccaacagaaccaaatggcaaattcacttcatagtgtaccagggtaactatttaaacattattgtccgactagggtgatgctgatgaggatactaatacttggagggggcatcctggggcgtctgatagcagaggcactccgcggtgaatttgaggttactatcatagagaaagacgagctaagagctcaaactctgagcgaaggcgggttaaatgtagtccacggagacttctcatacactgccacactactgaaggcaggcatcgacaaagcggacctgctcgtaataactacgatggatctcgaaaccatcaaaaaaactgtttatgtcgtgagaagcaacagcaagaacatcccaatcgttacagttttacccgatggcacaactattgagagcattaaagaggacttaaaagcctctttcgaggccgatttaaacattgactacgcaataacccccatggatgccattagggatgccctcctggctgtcatacaccgcattggtgaaaagaagaacctgaaccttctcctcaaaaagttaagggagcttagagagtccgccgatacactgggaataataatgcacgacaacccggatccagattcaatagcgagcgccacggccctggcagctattgcccagactctcgggtttaaaacaaagattttccacggtggtgagataacccaccacgaaaacagagctttcataaacctacttggaattgaactcaccaaagtttcacggggatcgtatgagataaagaggatgcctttccttgccctcgttgactgccagccaaacggcaatctgaccattctcgaagaagctgaccttgagagaatcaagatagtgatagaccaccaccaggttctccagcatttgagtgagttattgcccgaagatgcgttcacggatatccgtccagaagtaaattcggcatcctctatccttgtagagtacctcaggggcatgaactatcctttgactccggctttagctaccgccctattctacggaatatacgtggacacaaagaagttctccaagctcagcccggttgatttaaaagctatcgagttcctcgcaggaaaggtcgattatgagattctcgataaaatagagcaccccgacataagcaccgaaacagctgaaatactcgcgagggcaatactgaaccgcaggatgtacaagaacgtcgttatcagcaacgttggcttcataaagaacagagacgccctggcagaagcggcggacttcctccttaggctggaagggataacaacagttctggtctttggcatagttgaggactacatagagatgtcggccaggactcgggatgtccgcgttaacatagggaaagtcatgaaagaggcatttggggaaatcggcagcggtggcggccatgcccgcgcagggggcgcaagaattccgctcggacttttcaagctggccaaagacaagaactccctccttaggctcgcagaggaagctataacggaaaaattccttgaggcactgaacataaaggaaggctaaaggaagagagaacaacccttttcatttatttgattccaaggatcactcctcttttgcccttacgagtattatatccccaatggcagtaacgcggtcgtagggaaccccaactttttcaccaggaagcacaagtgccagcaccctgccgcagccctggtctatctctattagaacctcatcaacgtaaccgacgtagttgccctttgtattatatatctgcttgccgtatattgctgaaagcctcatcaccattgcaatcaccagggcaggttagcaatggacgtatttaaacgttgtcttttggaatgcccctaaaccccatcgcatcatagaacccaacaccaagaagagcgccacacgtccactactctttatcaccgagaagaggccgccctcgaccccctgaaaaggctcaaaactcctgaataaaaagagaacaaccgcaaatccgcccgcataattggaaaaacccaacagtgcatcgtttaaatcggagggctttatcacaaaggcagccatcaaagccagaaccgcaagaatgtagtcaaagcttttcactccgcccccataagcccaggaaagtacgagcacggcagtgaaaaccaccccccattaaggaagccgcgggagcgaccctaaatcccgctggcccgaggtacatcccaagcacaacacccacagccgcacccagaagtatggagtaggccatgtaatccctgcttgcagcgtatccaaagaaaacaaccaagaatccaaaaaggccccccaacccagagtaggccagaacagcgttcaaccttgcgttcattggattacctcaagtcttaccctgtccccgtccttaagcttcagcgcctccctcaaattcaccggtgcaattatctcggctatcctggggggatgtatggttcgagaaggaacgactatagcccccttgatcccacctatcataacgggatacgccttaacatcaccaaaagtccggccatctttgacgaagccagggattattaccggcctaatattgcaaactgcatcaagcacagtcttgggaaacagaattttaacgttcaaagtgcctggaaacggcttaaatccaaggtactcctcgataaggggttcgtactgccttacataataagcaccttccccaagtcccgacacgacttcacccactatcactccctttgatagtgcgtttgatattttgtcgcagatatcctgaaggaaatctagaccctttgggagaatctcaatatatgttctccttccctccgtctttcgctctatcagtccctcatcctcaagctccgcaaggagacggagaacagtctggggggacgtattaagggcatcagcaagttctcttatcgtaattcgaacgggtcgtcctatcgcgtttctctcagataattcgatgagcatcaatattttcttcattcttctgccaccgccacaacctctgttgttacgttttaaaatgtttcgtaacaacctagctccaaagttagatgttatccatgagcatgtattttttctctgatcacatgaccatcatagtattcagcaaaaagaaaagcggatttggacttagatctgagggtgaaaatttaatattcgaactatccttcacctcttggtggtctacgtgcacgagctctacacggtgctagctgaatactacgacacaatctacaaaagtagagccgagagggttaaggaagagattgacttcgtcgaggaaatctttagggaggacgcgaagagagaggtaaagcgcgttctcgacctggcctgcgggactgggatcccaacgctcgaacttgccgagaggggctacgaggtcctcggtctcgacctgcacgaggagatgttgagggttgcgaggcggaaggcagaggctcggggtttgaacgtcaagttcatccggggcaacgccctggatataagctttgaggaagagttcgacgctgttacgatgttcttctcttcaatcatgtatttcgatgattctgcaattcgggaattatttaattctgtaaggaggacgctgaggccaggaggggtcttcatagctgacttcccatgctggttctacggcgggaacgatggcccgatagtgtgggacgaaaggaggggagatgaaaggctcgtgataaccgactggcgggaggttgagccggccgttcaaaagctccgcttcaagagactcgtgcaaataatcatgccgaacggagagacaaaggcgtttttcgtcgatgacgaactcaatatctacacgccgagggagatgaggcttctggcagagcagtacttcagcgaggtcaaaatctacgggaacctgaggagggacatcgcccccagcgacaggaggtactggctggtggccgtgaagtgacccaaacttttttaaatacgctggccatttctataccctggtggtgcctatcgtccaccgtaacacctatttcaacccctgaattccaggcgttccgcccttctgggttagctcaagctctggcaccaccgcggctaaggtttttaaaaggcccttctgaggttatcccatcttcagaaaaaccaaagggtgatgcccatgcttcctaaaaactacgaccccaacgagattgagcccaagtggcagaagttctggctcgatgagaagatatacaagtacgagctcgacgaaaagaagccgagctacgcgattgatacgcccccaccgttcacgagcggaacgctccacctcggccacgttctcagccacacctggatcgacatcatagccagatacaagaggatgaccggctacaacgtgctcttcccgcagggcttcgacaaccacggccttccaacagagctgaaggtcgagaaggagttcggcataagcaaggaccagccagagaagttcctccagaagtgtatcgaatggacctggcaggccatagaggcgatgaggaaccagttcataaggataggctattccgccgactgggacctcgagtaccacacgatggacgactggtacaaggcagctgtccagaagtccctcatcgagttctacaagaagggaatgctctaccaggcggagcacccagtctattggtgcccgcgctgcaggacgagtcttgccaaggcagaggtcggctatgtggaagaggatggcttcctctactacatcaagctcccgctcgccgatggaagcggtcacgtgccgatagccaccaccaggccagaactcatgcccgcctgtgtggcagttttcgtccaccctgaggacgagcgctacaagcatgttgtcggcaagaaagtgaagctcccgatattcgagagggaagttcccgttctggccgacgaggacgttgacccgagctttggaactggtgctgtctacaactgtacctacggcgacgagcaggacgtcgtctggcagaagcgctacaaccttccggtcatcatagctatcaacgaggacggaacgatgaacgagaacgccgggccctatgcagggcttaagacagaggaagccaggaagaagatagccgaagaccttgaaaagatgggtctcctctacaagaaggagaagataaggcacagggtcctccgccacaccgagaggagctcctgtatggctcccatcgagctcctgccgaagaagcagtggttcatcaaggtgaaagatttcacggatgaaatcgtcaaggttgccgagcagataaactggtacccaccggacatgttcctccgcctgaaggactgggcggagtcaatggactgggactgggtcatcagcaggcagagggtctttggaacgccgataccattctgggtctgcgataacggcgagataatcctgccgaacgaggaagatctgccagttgacccgcgctttgagaagcccccgaggaagtgctccgacgggagcgagccaaagcctgtaactgacgtcctcgactgctgggtcgactcgagcataaccccgctcataatcaccaagtggcacgaggccattaagggcgacgaagagggtaagaagtggttcgagcacaacttcccaacggctctgaggccgcagggaacggacatcataagaacgtgggcgttctacacaatattcagaacgtgggttctcaccggcgagaagccctggcacgacatcctcatcaacggtatggtcgccggaccggacggaaggaagatgagcaagagctatggcaacgtggttgccccggacgaggtcattccaaagtacggcgctgacgctctaaggctctggacggctttagcgccgcccggagaggaccacccgttcaaatgggagaccgttgactacaactaccgcttcctccagaaggtctggaacatctatcgcttcgccgagaggcaccttgagaactttgacccggcgagcgccccagaagagctcgaaccgctcgaccgctggatactcagcaggctccacaggcttatcaagttcgcgaccgaggagatggagaagtaccgcttcaacctcctcaccagggagctgataaccttcgtctggcacgaggtcgcggatgactacattgagatgatcaagtacaggctctacggcgacgacgaggagagcaagctgaaggcgaaggctgccctctacgagctgctctacaacgtgatgctcctgctggccccgttcgtgccgcacatcacggaggagctctaccagaacctcttccgcgagaggattggagccaagagcgtccacctactcgagtggccgaagtacagcgaggccaggattgacgaggaggctgaaaagctcggagagctcgctcgcgagatcgtcggcgccatgagacgctacaagaacagccacggcctctcgctcaacgccaagctcaagcacgtggcaatctacaccaccgattcctacgaggtgctcaagaccatagagaaagacatagctggaaccatgaacatcgagaagcttgagataatcaagggcgagcccgagcttgaagagaggataatcgagataaagccgaacttcaagacggtaggaccgcgctatggaaagctcgtgccgaagatcaccgcctacctcaaagagaacgcggaagaggtggcaaaggcactcaaggagagcggaaagatcgagttcgaggtcgatggccagaaggtagaacttaccaaggacgacatcgtgctcaggaaggccgtcttcagcgagggagaagaggtcgagacggcggtcgttggagacgctgtgatactcttcttctgagcttgccttctttacatttccttgttacccagggtcaacctttttaaagccatttccaaagagggtggaaggtgagagactatgaagagactacctggtagcgtgagaagagccatccgcgcgagatactatgacatagagccgcgagcgtggattgggaagaaagggttagccgagagtgtcatcgaggagataaacacccagcttgaaaaggatgggatcctgaaagttgagataaggaagggcgcgctcatctcaaccggaatggacagaaaagccatagcagagagggtcgcggagctcaccgacagcgagcttatagacgtcagggcaaaaggtttatattgttcaaaccgagggaaggctgggaaaggtatttaaggcgccttgaaagaaaggcgtccgctgagaggcgggaggagaaacccgtccagaaagtcaggctcgatatcgctaacttcagaaagaagtttaagaaggggagggattgaaagatggcgactgtctatgacgttcccggtgacctgctcgtcgagagggttgccaaggctctgaaggaggttcccgagataaagccgcccgagtgggccccgttcgtcaagaccggaaggcacaaggagagacttcccgagcaggaggactggtggtactaccgcgttgccagcgtcttcaggaaggtctacattgatggcccggtcggaatcgagaggctcaggacttggtacggcggcaggaagaaccgcggccacgctccggagcacttctacaaggccggcggaagcatcatcaggaaggcactccagcagcttgaggccgctggcttcgtccagaaggttccgggcgagggaagaatcgttaccccgaagggccagagcttcctcgacaagatcgccacagagctcaagaaggagcttgaggagcagattcccgagctcaagaagtactgagctctcttctcatatgttttttgagagtccaagtactgaatttggatagctcatgctcatctagtttccaacctccagagaattatgccaaccagaatcacagctaccaccgctagaaccgatatcttagggatgttctctctcattcccgtgtttagatctgagcaaagcgggaggccgagcacgctaaggggttcataatacggtgggacgatgtaggcatctctccaggtgataaggagaaacgtgttgttacccacgacaacggcttcggttttatccgcaagggcgtagctaatgggtatccttctgccgttgtttatgatgaatgcagtattattctcgtgatcaatttgaagggttccagtttcgttattcgggatgtattcgccattcacgggaatatatctaggggggatcaggttctttcccagctccctctcatccgtcgtgttgaagattttgaagccctcatcggtcagctcgtaggcagtgaagccctcggtagtggtcccgttctgtcgtatctcccacaagaaggcaacaagggggtggtcgttctttctgtaaacttgaacccaaacgtgatggtacacgttttcatcttcctggtagtccagccagtagtaggttttcctcggggtttcaacggtgtagtttctccaggagagggttccgtttcccaggaggacgtaggaatcgttgtattcagcgatggggagaccatctatatagagggcttctctgcactttccgctaaccctgtacacaactggaaggttgtacatcctgaacgagaccacccactcgtttttctcccacgaccagaaaccgtagagggacttcagcggtctcgacgagtacgccaactttagcacttcctttgtgatgtccctcttcgtgccgtttgcgatcaagaaatacctcgtgggagtgtattccggaaggaaagagagcggctcgtacctgattccatcctcaaccgcaatatcgaagggcgctttaacctcaggaatgtggaatccctcaggggtctcgtttttaagctcgaagtctccgttgtggtagaggtagtaaacggtagtgttcggaaagatcatatctacgcgggcccacaggcggtttttgttgtccagtccgaggttgacccacgcgtagggggtaatgcccgcgttctcgggggctatcgtgtccctcgcctcccacgagaggccccactccccggtaacgttcagtgtttttgggtcgagcctgaaaacgctgtcgctggctgagtgaggaacactcccatagttaacaacgagaaaaatgctcccgttgtagaacagaaaatcgcgggcatagccgacgtaattggggagcaccggccttagggttatgggaacacttccgttgtacacccccatgtagagttcgtcgtacgggtaagagtagataagggttaggtttccggcattggcaacctccagagtgtccacaatggataaaaagtctccatcttcgtatggcagctcctccgcttcaagcttccatgttagatcttggaattcgctcccattgtacgcaaaaagcccgtcgttctcaacaagcaactggtgacagctttcacaccaggctgtactgtaggcactcacgcagggcgatgagagtacaatcaaaacagatatgagagcgagtaattttctatagtgattcattttaatcaccacatcaagggtttattacattcttgagttgttattctccctttaagcttttcgtcccaatacctttttaacgggacttccaattttaacctggaggtgagaacatggcggaggacatagaggagatcaggaagcgcaagctcatggagctccagaagaagtacctcgaacagcagaaggcccaggaagaagcccttaagcgggagatggagctggaagcgcagctggaggcaataatgagaaaaatcctcacacccgaagcaagggagaggcttggaagggtcaaactagtcaaacccgaactggcgagacaggttgagcttctcctggttcagctctaccaggcggggcagataagggagagaatagacgacgcaaagctgaagaggattctggccgagatagacgccagaacgaggagagactttaagatcaagtggtaaagggatcgcatatggacgcttccctgatcatcaaaatcctcgacgaaaagggagaggtaagtctggacacatggaaggtcgtctccataaaggagaacgacgatgggactgccgatatactctacaagaacaagcacgtcggcagtgatggtgatcccgtcttcctgtggatctatgccaacatagttgaggaagacgacgatgttcgcgttcttgagaggataaccttcaagaaggaggatatcctctggttggttaggtacgtctttccgaaggttaaggttataaggggtttgcccaacagcccgccggccgggggtgtttgagtgagcgggaagagagtctgtcccgtgtgcggctcaacggagttcatatacgaccccagcaggggtgaaatagtctgtaaggtttgcggttacgttatcgaggagaacgtggtcgatgagggccccgagtggagggcctttgatccgggccagagagagaagagggcgcgcgtcggtgctcccgagagcatactgctccacgacaagggactttccaccgacattggaatagacaggtcgctaactggcttaatgcgcgagaagatgtacaggctgaggaagtggcagtcccgtctcagggtcagcgacgccgctgagagaaacctcgccttcgccctcagcgaacttgataggctcgcgagcaatctaagcctcccgaagcacgtcgaggaagaggccgcaaggctctaccgtgaagcagtgaggaaaggactcataaggggacgctccatagaagccgtcatagccgcctgtgtttacgccgcctgcaggcttctgaaggtcccgagaacccttgatgagattgccgacgtctctcgcgttgataagaaggagattggaaggagcttccgcttcatagcgaggcacctgaacctcactccaaagaagctcttcgtcaagcccacggattacgtgaacaagttcgccgatgagctgggtctcagcgagaaggtcaggaggagggccatagagatcctcgaagaggcctaccagagaggcctcactagcggaaagagtccagcaggattggtggcagccgccctctatatcgcgagcctcatggaaggggagaagaggacccagagggaagtggcggaggttgccagggtcaccgaggttaccgtgaggaacaggtataaagagctggtagaaaagctgaacctcaaggttccgatagcctgactatcgaccgaaccagctctctagggttctctgctttcccgcttttaccgcttttttcagcctttcgaggccgttcttaacgcgctcctcgctgaagtcgtgctcgtcgcagaggaactttaggatcccttcctcgtccggctcgcgccacttaagctcgtagtcgtcagtaacagggggatttaggaagaactcctttatggcgtagaggtcaacgtcgctctccttctggtacttggccagcgggtctttcgttctcttaacgattgttaaggctttcttcggccctatcccctttattccgccagggttgtagtcagtcccgaccagaatggccagctcgatgagcttctccctgtctatcccgagctccttaagaacctcttccagaaccaccagctccggcttgacctcgacgtaaacgttctttccgggaagttttctcctcccagttatcgtgaggttccttacgagcctcggcgcaccgaagaggagtgagtcgtagtcctggcttgcagaggcatagacagcttttttggcggccatgtaagccgcttgagcttctccctcactcggggcctgaacgactggaatacccatgagctcaaggagctttttggcgtcgtttatcagctcctcgttcaccctcgtggcgcgcatcgcgtacttcttggcctcctcaaggtcacccttctcaagggcctcgtaccacttctcctctgcttcttcccttgcctcacgcctcttttcaagctccctcttcttgaaatccggtggcttgccgtcgaagacgtaggccggctttataccagcttccatcaggttgatggttctgtagaagaagccgctgaggtgagaagtgatcctgccctgtgagtccattagtggagttccatcgcgctgccttatggttgagaggaactggtacatggcgttgaaggcgtctatggcaaccttcttgccgtagagactttccagctcgatttcctttctcggtatcagctcacctatctggactcccattctcaccaccggaaaagatgagaaaaagaagtatttaggctttgcctcagcctgccagttgtacagtatctccaaagtgtagagagtcacccaaacagcgtgacctcaacctcttccccagcttcgaggatttcaacggtctctggaacttctatgaatccatcagcatccacaaagcttgtcaccgcgccgctgcccttcaaaatgggcactgctttctccccttcaatcctgaccggaaggaactgtctccttcccttgacggaaaataccttgtgggcgagcctcttcttgacctttctgacttcagaactccttccaatcagctttctcaggagcggtgccacgaggagcgtgaagtttgtcagacagctcgttgggtagcctggaagcccgaagatcggcttgccgttgatttccccaatgatagttggctttccgggctgtattgctatcccgtggatgtaaaccctgccaagctcctcaattattgagctcgtaagatcccttattcccccgcttgccccaccgctgaggaggacgacatcacagcactcaagtccctcgagtatcaggctcttcaagctctcgcggtcgtcccttgctatgccgaggaagagcgcctcccctccaagctccctgacggcatcggttatggcccttccgttgatgtcgtatatcttgcccggtttgagctcttctcctggtgggattatctcatttccggtgcttatcacggcaacttttggttttttaaacaccggcacttcggagataccaaccgccgaaaggagggcagtttccttgaagccgagcctggttcctttcttcagcagaagcttgccctttggaatgtccgcccctgccttcataactccgaggccaggataggcaggcttgtagatgatgacggtgtccccatccctgtcaacgtcctcgaactgaatgaccgcatcggcgccctctggaaggggtgcaccagtggatatatagactgcttccccttccttcagctggattgaaggggtatctcccgcgtttatctcacccacgaccttcagcttaacaggttcgctctcgctcgccatgaaggtatcctgagcgcgaactgcgtagccatcaacggtggccctgtcaaaggggggaacgtctattggggacacaacgtcctctgcaagaacccgaccaagggcctgttcaagcgaaactttctcgactttcggttcaaggttaaaggactcgatgacctttactgcctcctcgagcggaacaaccttaaggaacgccatttccaccaccgaagttaatggttccatcgcctataaatcgattgcgtaaacggaatggcttaacagaaccgctaaaaaacgacggcataagtggaaagaggtgagatgatgaaggtataccacctctactcgggcggcaaggactccagcttggcggcgtggattttagcaaagctgggctatgaggtcaggcttgttaccgtaactttcggaacgctcgataactggaagtacgcggaggaaacggccagaagacttggcttcgagcatgaaattctcaagctctcaggggagatccttgagcgggccgccgaaatggcagttgaagacggaagacccggaagggcgattcagttcatccacgaaaaggctcttgaggccctggcctcgaaacctgatgttgagagggttagtgacggaacgagaagggacgacagagttccatacctcgacctgccaaaggcacgttcacttgaggatcggttcggggtggcgtacataaggcctctcctcggcctcggctacaggacgataaacgagctcgttggaaggctctttgaggtcgagataagggagagcgaggagcttgagaagagcgactacgaggtcgagcttaggcacctcttaaggaagagaggaattgacccgctgtcaatattcccgaaaatgcactatcagtccagggttcttggatggaaggaagaaaagctgacctcctccccatcgcgaacggccagggttccaaagaactgaccccactaccggcggaaaggtataacagttccccaccacttgcctacctgtcttcagtaacagctaaggaaaagaattgaatcagaaagaaaaaattcacctaagaagcttgacgaactctctcatccaggcgtacaggtcccctgggtgccttgaactgacccagtttccgtcaacgacgacctccgcgtcaatccactcggcgccagcgttcttcacgtcgtccctgatggttaccgtgctcgtgcccttccttcccttcaacacgccggcggagatgagtatctgcggcccgtggcagatgcttgcaactggctttccgtcctcgaacatcttcttcgttatcgcgacggccttttcgttcagcctgacgatctccggtgcccttcctccagggagaaccagcgcgtcgaactcgtccggatcaacctcgtcaaaggcaaggtcaacgttgaccgtgtagccgtgcttgcccgttatcttgcccctctggaagctggcgacatagacttcatggccctcttccttgatcctgtggagaggatatatcagctcaaggtcttcaaaaccgtcagcactcagaatcaagaccttcatctcaatcacccccataacattcagataaagattgaaactcgacatttataacccttgctggacagaaatgacgaacacgtgtaaacattaaaaagaaagttcagagcggcagttcggtggtctccttgtgaaccttgaggacgaccatcgtgtgcgttgcatcaactccttcaatgcttcccatcttgtcgaggaactcgttgagctctgagctgcttctagtcctgattttcacgatcatgtcgtagtcgccggtggtctcatagacctcgcatatctcggggtacttcttaagctggtcagcgacgtggccgtacatcccagccttggcctttatgaggatgaacgcgagtatgctgaaacctagagcgtttggatccaggatgaccgtgaacttctttattattcccttctccttaagcttctttatgcgctcgtatatcgtggactcggcaagtcccacttcctttgatatttctcgaaggggagttcggctgttcttctggagaatcatgaggattttcttatcgacttcgtcaagacctcctctagccataaacatcaccacacggggaaaatttttcggaagagcttataaatttgccgactataggataccatacgtttataaaaacccgttcgtctttgcggaagggggtgacaggaatgccaacgaacgtaacagcggaataccttgccgcggaagaggagtacaggaacgccaagaccattccagagaagatccgcgccctggaaaagatgtacgcaacagtcccgaagcacaagggtacggaaaagcttagactccagatcaagaggaaactcgcggagctcaggaaggaacttgaaaaacagaggcagatgcgcaagggcggtggcggcccctcaatggcagtaaggaaggaaggtgcagctcagatcgtcctagccggtctcccaaacgtcggtaagagctccctgatgagggcgctgacgaacgtggatgccgacgttgccgactacgctttcacaaccgtcgagccgattccgggaatgatgcaccacaaggacgttcagatacagctggtcgaagtccctggattagtggagggtgcggcactaggaaagggaatgggcccccagctgttgagcgttatcaggaacgccgatgcgatagccatcgttgttgacctttcccaggacccggttaaacagatggagatcctcctgagggagtttgagagggcgggcatcaaggtgaacaagaggaagccaaaggtggagataaagaggacggccagcggcggtatcgtcatcaacggtcaggagaacataaagggcgacatccaggaagtcatgaagatgctcagagaggaaaggatacactctgcggagataaccgttaaggaacctgtgaccctagaggagtttgctgacgcgctcgatgaaagcctcgtctggagaagggcgatcatcatagcgaacaagggcgacgctcctggaagcaaggagaactacgagaagcttgtcaaagcctacggcgaccgcttcaagatagtgccggtctcggcgaggagaaagattaacctcgacaagctaaaggacgagctttatgagctggctgggattatcagggttttcaccaagagccccggagaagagcccgcttatccgccggtggcgctcaagaagggttcaacggttatggatctagctgaaagaatccacaaggacttcgccaagaacttccgctacgcgagggtctggggcaagagcgtcaagttccccggtcagcgcgttggggccgaccacgtgctcgaagatggagacatagtggaaatacacgcaaggtagtgttgtccattatttttagatcttctctggatattagcctacctttcccaaactccctttggaagtgattctagaggaaccaagaacttggcgaacccaacggaactaccgttccgtgcgttgaagcagagcttcaacgtcgcgcaggaagcttttagaaaaagcttcaccaatgaaactttgcaagcaaagtttcatcaaagtgcgtggttcgtgtttgacggagcattttgggcggattttccttttgaacgctgttgggagtggcgaattctatttttaatttgcccgatctgtgtgagtttgctttttaattgacgccccacgggcgtcaaggtgttagaaactccttttagagggctgaaattgggaattcactaatgctagcttgtgtatcttgaaaatccttttgaatcagccaattgaaagtaaacccctcataaaacgagcctgtttaaaagagcatatcaactttccgccatccgttaaggacgcttgaacgacagtgaaagcggcgctgaagcttttagaaaaagcttcaccaaaagtttgaatgtcttcgtgatattggctgagaattggaattctcatgacaaatttgcagatgaataggggttttcttatttttaacgcctttcgggcgttatactgcgagcaaaccccttgaggatttccaatttatggtgagaatcactgaaaagctgggcactcaaaaaggacattccatctttgatgaaactttgcccacaagcttttggaaaaagcttgaccaaaagtttgtagctcttcttcaaggagagttttattttaggattttagactgcaagtgctcatttttgagtgagaaccttttaggaagcttcttgaagagggtgttttcttttctttgacgccctttgggcgtcgattttgagttaaacacgcactaacaggagagtttagaagttctctcttttgaacacaattgctcgacgagaaaaatcacatgaaattggcattctggaaaagagctacgagccttgatcaaacttcgcctgcgcgaagtttgtactggtgggcccggggggctttgaacccccgaccacgcggttatgagccgcgcgctctgaccaggctgagctacgggcccacctgatggcgccgccgcccggattcgaaccggggaccgccggattaacagtccggcgctctaccaactaagctacggcggctcgacccaatgtagggaatgagaggttgatttataaattttgcggttttgagaaaagaaaaatttataactactcattcaactcttatcccgtgccccggtagcctagcctggcggggcggcggacttgtaatccgcaggtcgcgggttcaaatcccgcccggggctccatcttcaaaccttatcggttctccgaacgctctatctccggcgtctccgaggcccggaagtatgtatccgtgatcgttgagctctctatctattgccgccacgaacatttcgacatccgggtgagcttcctttatccgggttattccctctggggctgctagaacgccgactaccacgtagcgcttggcgttaccgtactttttanacctcatccanggactnnttgatgagcgnnttgagccggttgcgtatcatnncgggtcggctattatgacggtgtcttccgcctttatcctgggcactttgacgtacttcatctcaatctcgaactttggcgcctttccacgggatgcggagactattccaaccctggcgtgctcgaaaactttaatgaggccctccattaatggaatcgcagccctaagaacggtgattatcacgacgtttctgcggtccttcacgattatgccctctgtttcttccagcggcgttctgatggggactttttcggtcgccatagtcttggttatttcgtatgccatgtaacgtccaagtttgacgaggccctttctgaacgctatcgggccagtgctttcgtccctcaactccgtgagaatctccattatgaaggggctgtcctcaaaagagtacacaccttcccagcgctcgtccctcttcatggacttcaccgttgggagttggggcctgggtttattagacttccgtttgccgatttttggtaaggaagtgctactcttttgattcctcctcgataatgcgcctcatccacgttcccctgctgaaccatatgaatgccactatcgccgccaaaaagttgctcatgcccattccgaagaacacgccctttgggctcatcccgaagagctccgcgagcggaactctaagcccgaaaaccgtcacagccgcgacgtagccgaagacgtagctcaggggtatcctgaagccccagaggcgaagcatgctgagaaccatactcttcttggtgtgtccagctgagctaaaagtcctcgtaacaacgacgaagattccattaaagaacggaacggaaatcaggaagtatttgaggacgtactcgctctgggctatgaccttagggtcgtcaaggaagaccttgaatactggaaccctgaagagtccgattatcaggatcgctgaagaggctatgaggaagtttataaccattgccctctcggctatcctcttggccctctcgtacctctccgccccaatgttctgggctatcatggttcccatagccatgctgacgccccttgctatgctcgtgatgaagttcacgaggcgggtggttattgtgtaggccgcgtaggtcacatctccgtacccgtagatgatcctcgtgaggacgacaaagccgaagctgttggctgactggccgacggctgagggaaggccaacacgaaaaatcctcgagtagaactccatatccggcctgagcgtttccctcgtgaggtgaaggccggcccttccgctcgttaagagacgagcacctatgagggctccggtggcgtttgagaggacagttgctatggccgccccagcaacaccccactcggggaagggcccaattccgaagatcaggagagggtcgagcaggatgttcatggcaactgtgagcatgcttatcttcacgggtgtttttgtatcgccagaggctctcataagggcggagaacgccatgaacgtgaaggagaagggaacaccagcgaaaacgacggtggcgtaggccttggcgtaggggtagacgtttggagtgaccttcatgaagtggagcgcgtagggcaggattgccaggcttatcaaagcggtagcggtggagaagaagagcataagggagtagagagcccccgctgaacggttagccctctcgtagtttccagccccgatgtactgccctacgaaggcgaagcccgctgttgcaaatcccatgccgagggccatgagggttcctattatcggccagctcgttcccggagcggccagggcttccctgccaagcttgccgagccagaaggtgtcggttatgttgtagagaacctgcacgaggttgctgacgattagagggtaggctaacttgaggagggtcttctctatcggcccgttgagaatttcctgcctcattgcctgaatctttccgcgctccatccctaccacagtaagacgggcatcgaagcggggatataaaaagttaatggatgtggagttaaaactaatgtttctcgattatcgccctcatccagcttcccctgaggaaccatgcgagcgctatgaccgctccaagaacgttgctcagacccattccaagccacattcctgccgtatctctcatcaaaaccccgaggccgtagctgagcgggagtcttataccccagaggcggatcatcccgatgaccatgctcttctttgtgtgccccgcgctgttgaacgtgttgttcacggccgagaatattccgaagaacggaagcgaggcggagaagtaaaggacaaccttcctgctctcggctattattgccgggtcgttaatgaagaacctgaatatcgggacgcggaaggctgcgaagaggatcgtcccagcgctcaggatagcgaagtttatgagcatcgtcttctccgctattttcttagccctctcgtagaggcccgctccaatgctctggcccaccatagtccccatcgccatgcttatgccgtcggagaaggcgaacatgaagttggtgagcctgttggttatgctgtatgttgcgaaagccacgtcttcatagtggggaagcccatgtgcctctccgtagagccttccaacggtgaagataaccctcgtgaggatgacgaagccgagtgcagtggttgatgagccgatgcttgaaggcaggccaacgcggaaaatcctcgagtagaagtggaagtcgggcttgagagtctcgggcgtgaggtgtatgcccactttgcccgtgaacaggagataacctccaatgagggagccgaggctgttggagagcatggttgccactgccgcaccaacgacaccaagctgtggaaacggcccccacccgaatatgaagaacgggtcgaggacgaggttgaggagaaccgtgccgatgtttatcttaaccggcgtcctcgtgtcgccaaccgccctcaggaggaagttgaaggcgaagagcgtgaaggaaaagggtatgcccgcgaaaattaccctcgtgtagcggagggcgtaggggaatatcgtgtcgctgacacccatcaggcggaggaggtagggagcgagtattacaccagataccccaacagcagtcgcaaagaggagcatgagcgaatataaagccccagcgtagcggttggccctatcgtagtccttcgccccaacatactggctcacgaaggcgaagccagcggtggcgaatcccatccctatgctcatgaagaaccacacgaggggccacgccgttccgggagccgagagctcaagccttccgagcttcccgagccagaaagtatcggtgaggttatagagcacctggacgagctggttgatgattaggggataagctagaatgaggagtgtcttgactatcggcccattgagtatctgctcgcgcatccgctctactttctcgctccgcatgatcgatcagatggaaatctaaacgttggtataaaaggtttatcgtggataaaagaaccagctactcttccacgattttgacatcgaggttcagaaagtgtctgtcaaaggtgtatatttcatttatgtcaagttctctcattttcaggtaagctaaagcgtcgttcacgctcacccctttatcccgagctatgagaatagctttgagataatcctcagtagcaacggggaggacaatgacgttctcagcggttaggaggtcttcaatgaattcaagggcaatggttaggtttaatttagcctcaaggatgttggccacctcgctgaggtggactactgtggttgccacttcttcgccgttttcaattctggtaaggatttctcttgcctttttctttcgttccagcaccgaggagggtacttctccctttggtttaatgaccgcatacaaaaagacgttggcatcgatgaacctcatagagatccctcactgaggatttatgtccttgagaagctccttctcgatgtcttctcccttcagctcgacttcgaggatgtcgaagaaccttgaaagcctgggcttcttcctgggaagtatctctatcctgtcctcgagttcgacgactataacctcgtttccccacctctcacgccaggacttcggcaaaaccagccttccctggggatcgactctcttaacttccacagcacccatagaatcaccattaagggatttagaatggaactaaataaaccttttgccaagtggagaaaacgaagtagaaaagaggagaggacttcagaactcaagctcgtcctcttcctcgaagagcctcttcctggcggcctcgaggaggatcttctgctcctcctgggcaacggtcttcctgatgagctcgacggcatccgggttagcggagatgctgtcgatgccgagcctgacgaggatcttggccatcttcgggtcacttccggcctgtccgcagatgctggtttcaacgccgtgcttcttggcgaccttaattacgtgcttgatgagcttgagcacggccgggtgggtctcgtcgtagaggtgggcgatcctgtcgttgtccctgtcgatggcgagggtgtactgagtgaggtcgttggtaccgaagctgacgaagtcgatgccctccttgatgaggtcctcgatgatgagggccgctgctggaacctcgatcatgatgccccactcgacgtccttgtgcggctcaaggccgactgagcgggcgatctccttggccttcctgatctgctctgggtggccgacgagcgggagcatgacgccgatgttgttgtagccctcctcgacgaccttcttgatggcggtgaactcggccttgaggagctccggctggtcgagaccgcgcctgattccgcgccatccgagcatcgggttcctctcgtccggctcgtcctctccaccgggcatctccttgaactcgttggtcggggcgtcgagggtcctgtaccagaccggcctcgggtagaaggcagcggcaacggtcctgataccgtcggcgagcttctcaacgagctcgtcgaacttgccctccttgatgaacttgatcgggtgctggccgatgctgaggatcatgtgctcagccctgagaagaccgacaccgtcggcgccggtggcggcagccctctcggcgacctcgggcattgagacgttgaccttgaccttggtcgcggtgatgagcggagctccagcaacgacgacctgaccgccagcggctccagcggccttctcctccttcttctcgacgaggctcttgactatgcccttgtagacgacaccgcgggtaccgtcaacggtgacgtagtcgccagtcttgagcttcttggtggcctccttggtaccgacgacggccggaataccgagctcacggctgacgatggcagcgtggctggtccttccaccctcgtcggtgacgatagcggaggccctcttcattgccggaaccatgtccgggttggtcatggtagtgacgaggacgtcgccctccttgaccttgtcgatctcgctggcgtcgaagatgacgacgaccctaccggcaccgatgcccggtgaggcaccgagacccttgaggatgacctcggcctcctcagtgccctcgacctcctcggccttggtctcttccttgagggtggtgatcggcctgctctggacgatgtagagcttgccgtcgtccttgtcgtaggcccactcgatgtcctgcggccagccgtagtgctcctcgatcttggcacccatcttggcgacctcgattatctgctcgtcggtgagaacctgcttctcaacccactccggaccgaggtagtcggcgaccttgacgtagacggtgcccttgccggtctcggggttcctgacgaccatgacttccttcttggcgatgaacttctccttgatcttccaggtgcccttctcgacgatgtactcgtccggggtgacgctgccgctgacgacggcctcaccgaggccccagctggcgttgatcatgatctcgttcctgttgttggtgaccgggttggcggtgaacataacaccgctcttctcgctgttgaccatcttctggacgacggctgagaggtagaccttgctgtggtcgaagccctgcttggccctgtagaaggtagccctggcagtccagagtgaggcccagcacttcttgaccttgtctatgacgtcatcaacgccgtagacgtcgaggtaggtctcctgctggccggcgaaggaagcctccgggaggtcctcagcggtagcggatgaacggacggcgacgtaaacggcatccttgttaaagcgggcgctgagctccttgtaagccctctcgatctcctcggctatctccgggagcatcggaagctcgatgatcttctgcctgatcttggcggtgttctcctggagctgcttggagtcgtcaacgttggtctggctgatgatctccataatccactcctggagggtcttaccgtcctcaagcttaacgttctcgacaaagtacttgtaggcctctgcagtcacacagaatccgggcggaaccggaattccggccttggtgagttcaccaaggttggcaccctttccaccgacaaggggaacatcttccttgccgagctcctcaaaccactttataaacctgtattcgctcatggcgatccctccaaattaattactgcgggtgatatatcaaccggccgcttttaaaattaactatccagacctgttctttggtgtatagggatgaaaaaagaggaaaaaatgtccattaaagcccgtatgtcacggaaggaactttgggagggggtgctgctcgaggagggagttcaggaactcgattgctttctcgcttccgtatgcgtacgtcatgtagcggtatattgaaaccgccgcatcgagcgggtgcgtctctttggttgggtcgaaggttttcatgatgaaatcgagcgttttctgtgcctgttcttcaaagcccgccacgtggtaaatataagccatctgaacgtagcttgtcctcgagtacgcgtaggggtaattctctgccttaagtctaccttcctcgtcctgctggtctttgagccatgtggcggcttttttaacagactctaacaccgtttcgtcccctgtgagctggtaataccttgccagagcggatgctatcgcaagtgtggtaccgatgttatctctccagtctcccgttttaccctgctcgttcaatatctctctaagaacgtttttctccgtcgtggcgttcaagatgccgagttccttgtagagcggaagcagcagggcgtttacaacaaagcttcccgatttgtcctttggggtggtcatgaagtaatcttctttctctctggacttcaatagactgagcgctttcttggttccgttgaactggaacttcctgatgggctccagtgtgtacgccgtgtacagcgtgaagtcgttgggaggaacaccccaagggaatgccccgttctccatttgcttgtactctagccactttagtagccagtctgccctctccttaaacttcccatctccggttttgttgtacaggttgtagtacagatcaaccatccatccgtttaagttgaaataggccttgtatcctgtgtcgaagtcggcgtagttgtagcccgtccagaacctctcgaaaaagttcaccagaggggagtagtccccatggtactctatggggagaggctgttctattctgagttcgggctctgggatgaacttgtatatcacggaaccaccattgcagaactctagcttaaagtgggtgtcatacggggcatattccatgaggccataccttatcagtccgtaggagtagcgcggtctgtcaacgaatatgtagctcacgttgtattttttcataagatagtaaacgagactcctctggttggagctgaacattatgacatggtccgtgtaagcccgcgccgcttcctttaccgttggggcctcaccgaagaacccctgataaacctttttccacacgacaacgtcctttctgtgggtgtttccaatcaagaggtatcccatatcccaccaaacgagtatcgtggcgttttcaggggtattctgagatatccactcataggcctctttgtccgttatgctcggaatcgatatataatggtacgccccatagaccccctggaatgtgggagttaagattaagaccgctattatgaggacttggactgccctcttctcaggaagggtctttacaagagcggaaccgaatccccgcacgtcatttaggaccctcttcaaaacggggccaattgatgggaaaacgacatctataaaatagtccgaggcgattgccgcaaggggaattgtggcgtagggatccctaaagcggaaggagactccacccgccagcaggaatgtccaggcccacagtacaagtcccctctggaggggtccttttttgaagtaatatgaactcccaagaaccccgaagacgagctggacaattccaacccacttgaaatatccaaggaaacttacctcgctcctctgaagccgtaaaaatagttctccaaaagttgattttacctggggcaggccaaggtatgccagaagtccagcaaggaccaggatgattacatagtggacgttgcgctttatggtgggctccaaataagacagcaagactatcgctgccgcaaaggcaaagaatatccatcccctgtgggttatggtgtagagcccaaaggtcactgcaaaggggataaagctcgatactgtcttatttttaaggaaccttacaccaaaaaacatacttaaagagaacagaagcagccccatgttttcgggtatgtagaggcttgttctgtatatgaagtttggggcaaacgccagcaataatgtcgccaggagcgcctttttttcgtcctcaaagagctctttgtaggcaaagtaaaaccccaggactgcaaacgtgccgtaaacggctggtatggcgaggaagaaatagtccgagtggaatattctgtagaggaaggcaccgactatgtgaaagaggggcggataactgtaggcacggaggccgaggagggacggtagatcccgggacactgcccctattccaccttcagcaattctcagggtgaggtccctatgaaggtactcatcataagccgccagtaagaggtttctgtgcggaatcagtctgattatgaacgacacaataatgagcaacaataggtatatcattgaaacgtatgttctctttcgctccacggccaacacctctaaaagcttttaagcgcagccatcagcttttactggtggtgttgtgagggggttaaaaatatttggccttgctttttttggatatctatttcttgcactctactccaattatttggatgaagaccttcgcgccgttgtctatcagaggggctttgagccctcatccgtcttgcttggtttcttagttgccctggttttttttatggcgtttgccgcgggctatctttcgggacttcagcttccaccatcattcctcattgcactgtttctcatactctcccttcacgacttcccgaatgcatttttaatcgcatttgtggccgtgattggatactatctcaagattgacgtctttgaaaagttctccactttggccctctggatctcaattctcggccccatcatcttttacttaagcatgggcattccccttttccagtggggactcaggtacaaaatcgttggtcccctcgtccttttcgccctattgggagcaggggggctaacatactcgaagttttccaccagagcaaaaacactctttctcttggcttattctgtcgtatactttctcgggactttccgctccctgcttctcctcggatacatcccgtatctgctggactacactctgagtcgtgaaagaaaatggcatgttgtaatttttggctcggcactccttggaatggtgctcatcatgagcgggagcatctctgctctgcttgtaagaattggatttacgtttctggttttccataacctggttcgcatctcccttccctggggttattttcacggctcggttctcttcagtgaaggccccagagccctggtctcacagctctttggcgcatcaactaactacacgtacttctttttcggtcaagcggtggctgattttggcatatttggtcttcttgaggcgtttctcctcggcctcttccttagagagagcgaaagggagcatgaaacctttgtctttgtctgttccctcatgatatatgccctcgattctggaatagatgcgctcatcctgatgtttatcattggagcgttgattttccaggatttgaggctgaccattatcgggacgaggaccacacccagaacaggttcaagctgattcttttctgccctagggacgaggcttttgataaggaaaagcaatgctatcgccgaagtgatccggttgaagttaatccaacgctaatctttgtttgttagagctaaaccaataatacccgcatatgtctcggactcactctgtctttgcggtttagtgaccaatgactatcctgtgtagtgtgggctcttttgatgattatctacccccaatgccctatattcaccattagtgataagatgcgtttactctcggcgaaatctttatatcactgctgacatctagtttccaatgccaaacaacggaggtgttgctatgaatcgaaaggtgttgagcctgctaatcgtggcagtaatggtgctgtcggtagtgccagcagtgcttccggggacgctggcagctcagaactctccagagaatcacagtgtgataaggacactagaggacacacttgacaagagtctgcttcttagctcatataaaacgggacttagatgggtttcgccagaggaatactcgaaaattacgggcataaaatttaagcccctaacagagtctgcctttaaagaggctctaatgaacgctccgtactatccgggtagggaaacaatggcaatattgccctctaccacaggatacaaggtgtcctcaggtttgtctcttccgccaatggtgttcaacaatctgtatctcccacctataggggatcaaggttacattggctcgtgcaacgcctggagttcaacctactacgtctggacgtacatgatgaactggtggagggacaatccatatcctcgcacgccagacgtcatcatgaacccgagctttacctacaacctgattaacggtggcgttgatgaaggaagtaacccctgggatgccatgacccttatatctacagtcggtgccgttccactggacgcgtttccactctatacatatcctccaaaggaagcatttacaaatggtacccttacaaattacactctctattacgagtggtacaacgaagctatctccaggtggcccaacatcacccagtggatgatagcaccgcgtaacagcggtaacgactacatgtggcaggcctcattgtatgagtaccaagttccgggtcagtggtacataatagacctgtccaacgacacccagtggcagtacctcaagcaactgctcgctgccggttacgttgtgcagtatgcttatggggtaagctttccattcgatgcggtcaatatctttgacagcgcggatgagatactgcaggcccttgattactgggcaagttacgtcgccactgcgacgaacaacgagacctattatcagtgggtcaacgagacatatttgagcaacgagaccttcatacagggtctgaagcagacctttatgccctacactgagaccaaagcgttttatgacttcaccaaggaaaccggctggtgggaagtttggtccaagtacattgaggtcaagtatggaaggacatattcgttaattaaaggtggccacgctgtaaccatcgtgggctacgatgacagagtcaaaaccgcagacggatatggcgttgttaggatagcgaactcttggggccagaactggggagatgggggatacttctacatgagctacgaggacattcggtttggagaggaatcgttccaactggcatgggtatacgttcctaaggcggccaactaccagccgaagctcatgagcgtcgtcggcatagctcaccccttaagaggagaggtcattgatgggacctacgatccaagcacgtatatgccagttcacgaagctggtatcccgatagttgcagaagtaaatggaactccagtgtggggcatgaactttttggacttctaccatgattacctccctgaaaacgtcattccgtaccttgccaacaaccgtactctcctttatcggaaacttccacaggctcacccgttcccgaacagcccgatggcattcgacgtaagtgggcttggtgaagggttagcttattacatggaagaaacgggtgatgcgccaacttacatgactatctacacaaacgtaagcgatataatcccagacaacataacaggtgaaatctacaatttcacacttctctaccagggcccgaccggcgactacatgcttctcgcctcggctgatataaccaatggaaccattcccgacggcggatggaaagttatccccatcgaggttccgatagtgcagtacggaagcctcacactttcaaatagctcaacaataaacttcggcaacttcagcgttgacgtgctcagcctcgtcccgctcaagggcgcctacgtcagcattgacggaaaggagtaccagctcagcgaggagaacggtggctactacttctacggtacggaaatagaccagaagcttaagctccctgctggaacatacaactacacagtcgtcgtcgtttacccgaatggtaaggaggtcgctcttccgaccagaacagttaccatcgaaggcccaacggttgacatcctatccccagttaacacagtttacaacacctcaaccgttgaggtagttgttaacgttaccgacccgtacgccaccgtgacaaacgttaaggcctacctcaatgggaagcccctgaacctgacggcaagcggatcactctacgttgctaccctcactaacctaaccaatggagagtacaaactaactgtgattgcaaacgacacgactggggcatatggaattgccaccaggttattcgtcgtccacacaagcgccaaggtaaccgaggttatcgtaaacaacgagaccaacgttaccatcggcgtcgtcggcggaagcgccaacgtgacggccgagaacaacaccatcgttgctaacgtttccacctcctccggcgagttcaccgttgagatcccagttgtgaacaacatacccgcagtcgttgtgaacgcctcctccgttgacaccgttgtagccggaggcagcaacgccaccctggttgccggctggaacgcaacgttgactgaagtttcgacgaagacaacccctgtagataccaaaggcaacaagaaggtatactccgtgaccataacagcaaacgttagcattggcgagaacggtgtggcagtggtggctctcagggatgtcaacataagcaaggtctatgttataaagaacgggcagaaggttcagcttaccacaaacaagagcaactcactcggttactattacaaggagggcaatgttatattcgtagtactcaaagaggacccgatcattgtggcgcagggaacaaaggaagtaactgtaccatcagagagcggcatctccatcacgaccctcaacttcctcggctaccgctggtacaacatataccacgaggagttcaacgagacctaccagaaggccctcgaactcggtgtggacaacgaaaccctccagaaggccctagagctccacaaggaggccgagaagtactacgaagaggccattgagatcaccgacggcaacatactcgcgtacctcagcgacccgagactcataaggccactgcgcctggcgtacctcaacgagatgaaggcagtgaagctgctccttgaagccatcgaggagcttgaggcccagggctgaaacctttttaacctcttttcttccttttctcccggtggtcaaatgatatatgtgaaggtctatcgcgttcagggggaggttcttctcgccgcttgcgatgaggagctgcttgggaagacattcagggagggggagttgaagcttgaggtcaaggagcgcttttataggggcgaactcgtcgaggaagatcgcttgaaagagcttttggacgaggcaacgatagcaaaccttaccggcgaacgctgcgtctcgaaggcgatagagctcgggtatgtcgatcctgaaagagtcctgagaatccagggtgtcccgcatgcccagatggcgaggctcttcttctgagttaggtttttaacttctcgtctggcactctctccggtgagagctgtgagcgagcgcttttgttatagatgtgggataagcgagagagaaggtgggcccctcattgagggtctctgtcaggtgtgctaccggaaggaaaatcccgtccttcttatcgagaacgaaataaacacggagctctgccagaactgcgggagctacaagaagagaggagtgtgggttgatccccacagctacgaacttgaggagctcatctttgaggttgccgaaaacgccctgcttgaagcccttgaggattccttcagcgacaaaatccgcgagtacgaggtcgtatcacctgaggagcttgaagaaacggaggaaatccccgtcggcagagcaatcgtttcatttgagcccgtggattaccatatagagtacttcccggcgataataacgtacgaagttcgtgttaaggccagaacccacgagcttcagcgagagctacacgacgagcggaagaaagttacagtatacgttcgccagaccgtctgcccgcgctgtcagaagttcctcggtggttatttcgaggcgatacttcaggtcagggcagaggacagacctctaacggaggaagaaagaaaggccatcgggaagctcgtcgaggagaaagtggatgagataatgcgcaaggacaggatgggcttcatacaggacacgatagagaaggaggaaggactggacttctatatgggatcaaccagcgccgcgaggaagctggcccaggccataaaggagcgcttcggtggaaagataagcgaggcctacgagctagtgggcatggacaggcagacgagcagagaggtttacaggacgagcgtcagcgtcagaatacccaagttccagagaggagatatagtcacggacaagcggggaaccgtttacgaagtcgagagggttgacggcaagggcatgaccctgcgcaatctctccacgggggagagcgagcacaaggactggaagaccctcagcagggagggagttgatacagtcgagcacgaggagagcgaggcgatggttacgagcatagggagggacgaagtccagctcatggatatggagagctatgagacctacgaaattgaaaagccaggagttgagcttaccgagggcgatgtttacagagttgtctctgtaaaggggaagcgctacatccgtggaagaaaggagggggagtaatgagggttataggcgtcgaccccggaaccaagagcttcgacgtgatagggcttgaagatgggaggataaagctcgacctcagctatccgagcgaggtcgttgcagaggatcctggaaggatagtgaaagccattgaggagttcaacgcggacataatcatcgggccgagcggctacggcgtcccgctcaagcacataagcgagctcaccgatagagaccgctttgagatgaccctagttagggaggaggagatgaaggaaatacccgtcctcatcggcctccaggagatggtaagccagatggccgagaagggcatgaacgtctggttcatccctggcgttatacacctcccaacggtgccagagtggaggaagtacaacaagattgacatgggaacagccgacaagatggccataactgtccttggaatccacgaccaggcaaagaggctcggtatcgattacgccgatgtctccttcgttcttcttgaggtcggctttggctacaactacgctggagctgttaagggcggaaagatagtggacggcattggtggtacaattttcccggggccggcctatgtgaacagtggagccctcgacggcgaggttgcctatctgatgggcagcataaagaagtggcatctcttctggggcggggcgagcgtaatagcggccgaaaagatactccctccagaagagttcgccaagaggcttgatgaagagccctttgcgaaggcctgggaggccatgaaggacggctttgtaaaggcggttgcaagcgagctggcggtcgttggagatgcgagggaaataatcctctccggcaggctgatgcgcatagacgagcttagaaaagacgttgaagacctcttcgaggagcactttgacctcccagtggtcaagcagaggggccttgagggcaaggcgaaggaggccgcccagggaagcgcgataatcggagacggtctggcagggggccagttcaaggaactcgttgagcacgttgagataaagaagagctatggaagcgttctagactgggtgaagctccctctggccctttaaggtttctcttttctgtccaccaacatttttaaccaaaggttttgaacctttcccggtgatggtgatggagagaaagacggtcgttgttataggtggtggagccgctggaatgagtaccgcctcgcgcgtcaagaggttgaagcccgaatgggacgtcaaggtcttcgaggcaacggagtgggtgagccacgccccatgcggtattccctacgttgttgagggcatctcgcccaaggagaagctcatgcactatccccccgaggtcttcatcaagaagcgcggcatagaccttcacctgaaggccgaggtaatcgaggtcgagcagggcagagttagggtgagggaggaggatggtgagaagacctatgagtgggactacctcgtcttcgccaacggcgcttcaccgcaggttcccgcaattgagggcatcgacctgcctggagtcttcacggcagacctgccgccagatgccgttgcaataaccgagtaccttgagaaaaaccccgtcgaaaacgtcgtcgttattggaaccggttacatagccattgagatggccgaggccttcgtcgagaggggcaagaacgttacactcatcgggaggagcgagagagtcctcaggaagaccttcgacaaggagataacagatatagttgaggaaaagctcagaaaccacctcaacctccgccttgaagaggtcacgctcaggattgaaggaaaggaaagggttgagagggttgttaccgatgccggcgagtatccagccgacctcgtgatagtggcgacgggaataaagcccaacaccgaacttgccagagggctcggcgtcagaataggtgagaccggtgccatatggacaaatgacaggatgcagacgagcgtcgagaacgtctatgccgctggagacgttgccgagacgaagcacctgataacggggaggcgcgtatggatgcccctcgctccagcaggaaacaagatgggctacgtggctggaagcaacatcgctggaaaggagattcacttcccaggagttcttggcacaagcataaccaagttcctcgaccttgagattggaaagactggtctcaccgaggcggaggcaatgaaggagggctacgacgtcaggacggcctttataaaggcgggaacgaggccccactactatcctggctcaaagactatatggctcaagggtgtcgttgacaacgaaaccaacaggctccttggagttcaggcagttggaggagatattcttccgagaattgatacagcggcggcaatgattacggcgggcttcactactaaggacgtcttcttcacggatttagcgtacgcaccgccctttgcgccggtctgggacccgcttatagtccttgccagggtcctcaagttctgactttcttttttgctcttcttttgtacggtgatattgaagtggaaagctttaaagcgagtggtgtcggtttttctgtgatgtgcgagtatacctatgagaacgggaaaaagtgcaggctgaaaccgctggaaggctcaaagtactgtgccctccacatccctagggaagagggagaggccgtatacggtgagagactgaaagagatcaagaaagaggcctttgagaaaaggttgaaagttggccagacatattttgagggcgttgatctctacgatgtagcgataagggacttcacaactgaaaaagttcttgttttcaaaaactcgcgggttacaaaccttatcatggatgcttcctcggttaggggtcttatcctgattaactcaaaagttgagagagttgttattttcgaaagcacccttgagacgattcttgtaaaaaattccacggttttcggtctcaacattcttaggacggagttttcaagtcacatctcaataagagactcggaagttaggtaccttatgataaactcgacgcgctacacgcccaagggggaagtcggtgaagagaaagcctatggggagaccgagaggattgtcggcaacatagagatttcaaaccttacaggcgttaggaggataggaataaacacccgctacccgctcctcagggagatccttaaggaacacgggataaacgtatcagaaagcaaggagcggagcgttagggcgcggaatctgataataagggatgtctcctttgacgtgtcccctcgctataagagaagggtgaggcttaccgttgcaggttttcatggcaggctgcaccttgagaacctcgaggtttttggccacattgaaatccggaagagctacctggtctccccggagttcgtccacgtcaaagttgagagtaacctagtgctaaggggcacctcgatccacaccgactctacttggggcatgacagttcttcccaaccttccgatagagcttgaagtgggtggtttcattatagtagaggactgtaggttcaacaatccccgtgcggaggaacttttctaccgtctcgcgaggacgagctgggaaaagagtggagactttgacagggctgacgagtactactaccttgagatgctggcgaagagaaaggccaagctccagtcgaggaaaaaggggttgaaaaggatcatcaacacagcagaggtttggtttgaatggctcttcgcagatctaacctgcaaatatggaacggactggaaaagacctattctcctctggctgggagccgttaacgtcatttttcccctactgttctgggcgacgaagagtgttgagggtctctcaagctctctcagcttcctcgactacgagtacttcagcatcgttactgccacaaccctcggctacggcgactaccatcccttcggcgttggcaggattatagcgtcggtcgaggcactctttggaatgttcatgtgggccgtcttcctcacagtcttcgctaggaagtacatgaggtagggcaagctttaagcacacatccctctacctttatcgggggtagaaatgaggaagctcagagttgggttcatagtcaatccgatagccggaatgggcggtagagtagcgctgaaggggaccgatggtgttgttgatgaggcgataaggaggggggcgaggccagtagctcctgaagttgcccgcctgttcctgagtgagctgaagcactacaaggaggctgagagttttgaatttctaacagggcccggccctcttggggaggactaccttagagagtttgggttcgtctttgatgtaatcaggcacagggagattggctaccgtgagattgaaggagtgaaaatcccggacaccacttcggaagacacgaaaatcctcgcccgtgaaatgctcgaaaaagttgatataatagtcttcgccggcggtgacggcactgcgagggacgttcattccgtccttggcaaaaaagtcccaatcctaggcgtgcccactggcgtgaagatgttctccggtgttttcgcggcctcgcctgaaagtgccgccagagttctcgtagaatttgccagcgggagggccagactggaagagagggacgtcatggacctcgacgaagacgcatataggagggatgaggtcaggccaaagcactacgggaaggccctgacgcccgtcgttgagctgcttgtccagggggcaaaggagccgcagaaagtcgatgagagcgagacccttgaggccatagccgatgcggtggctgaggagattttgagcggggacggaatctactttcttggggcaggttcgacaataaaaagaataaaggacaggctgggggtaaacgggacgttgctcggggttgacgttgtggaagtaaaggacggaaaggccaggctcctcgtgaaggacgcggctgaaaaagacctcctacgctttgtcgataaaaacccgaggatagtcgttacggtgataggcggtcttaacttcctcttcggcaggggaaaccagcagttctccgctgaggttttgagaaggattccgaaggagaacatcatcgtcgttgctactccatcgaaggtggaaaacggagttatccgtgtgtacacgggagataaagaggttgatgaaaaactcaggggctacatcagggtcagggtctctccctggatggagaagatggtaaaggttatctgaccttttaattttcttgctggaatgtgtttgagaatatgagtccctcttgattaaaattctcacgaaaacattttaaagcacttcttatcgaaagttttaccgggtggtaaatgtggtttacttcgaacatgcaactgacccggtgacatttggcctcttcatggtgctctactacgcatcgattccccttgcgatcatcgtgtgggcctttaagtactacccgtatatacagaaaagagaataccatctcaaagagcttggagctttcctcctccttgcctttatggtgacgtctttctccgggtactctctccttaaccagtacctatacctccactcgcctttcgattcaatatcctgctacacctcctcatgtgtactgtcatccgcactaactagtgagtacggcttctctgaggaggagctcaaaagctacggcctcccctcagtgggagtgatgactgtcttcaggatatctgacgttgtagtcagcaaaagtttgcttaagcccaagagattaaacaacattgtaattacgagggcatggctcatactgccggtcgttgatgtttacgtgtaccacgtgtcgactggtcccaccaagagaatagtgggaaaagagaggttttactttgtgtggccattatctccagggtctttcctgagcgagaaatttgacgcggacttcaccgttttgatcacaggaaatagtggagccggggcatgactgcttttgtctcttttctctgcatcatctttgtccccctcagctcttttaccagttcttccataacgcccaggaacgtctctacttcttcgatgctgttgtagacgtggaaggatccctcaacctgaaaatccgtgcccccgcacagggaacacctaagctgccttctctccatgagaatcaccgatgttaccatctgcttggagtataaatatgttgcgcctggtaaaatgatcgaagttgccatacagtccggacttgtttttaagcaaaatttaaaaatctcgtttattactcttattggtgatggggttatggtgaaaagagtatcaaagctaaaacgtattgatggaataactcacgggagccatatagacacggtttatcccgaccctgctgtggctctgaacttgctgatggagggaattaaagataatgagcctcggattgcgactgtggagttaaatgttggtaaaatcctgccccgcaaaaagaccgtcaatgtgtggatatacgacgtgtcctttggcgacgatgtgttcatgagatcacttctgattgaggattccaagaagaagatcctccagtttgcaacggcttttcccgttctcaactcggaaacgagtgttgagtttgaggtgaacgagattctcgagtgggctaacaggctggaagcgaacgtctcgggtaaggtcatcggagaggagactccctatgtgagcttctttgcagttgattacatcgagagaaaagccgactacctggagcttgacactgccagggcaaagctggccttcctcgcttactgggccaaggttgggccgataggggataaaatctccgtcagcccgcagaatggagagcctgtgcagattaacttggaagatgccgagctgctcctcccagcctcgttcaagggcgcattcatggacgactacgccataaccggcagggtgctgagggtcaagcccagcaggacgttatacggcgatggataccttataagactgaagagtctccccttgggcgagatagacctcttcgttctcagagaacacctgaaaggagagaacaaggagataaaagaaggggaaatgcttaccgccgttggatggctccagggagggctcgtttagaccgccctccagaacgggtcttctttcgcctttacctttgccgtcatcttgagggcctttatgtctgtctcttcaagctcgtccttgagctgcttggcgagaattatgacgtcgttcttgctgaggtcaacgtagagggtctccccggggtgtatgtgcctgccgactatcgcgccctcgatggctattgccaccgcgtcccccttcttcgcctcctggacgaagtcgttcttgttctttatcgacttgatgacgccgaccttctcgccggtctccttgatcagagtcacacccggccttatcctgccctcgaggacttcgacgccgactatggccggcttgctccttctgaagacgtagcgctcgtccgggtagagcctgataacgcctgggaaggtgacgttcttgaggagctcgcgcttcctcttctcctcctcttccttcacccaggcctcgtagtcctcgatgagcttgtagataatgttgccaacgaagattgggacgccctttgcgttcgcaacctcttctgcatcttcgttgaccttgacgttaaagccgaggacgaccccgtacttcggctcctcctccttaacgctcagggcctccataacgtcggtcttgctgatgttgccaacatctgcctttctgatggggattcccttctcctggagctccttgctgagggcctcaaggcttccaagtgtgtcggccttgactatgacaccgatcttgccggtgtttatgacgacgctctgaatctggctgagtatctcctgctttgccttttcaatctcctcctcggagcgcgccgctatgactggtgaaccagctaacgcctcctcaaggcccggagccgctatcttgacacccgccgccgctgttacctcatcaacctggtcgaagcggaacctcgggtccctgatctcgtcgaggggttttggcttcaggagcgcgcggattttggtaactatcgccttgtcctttccgccaaccactatcgtgtcgtcctttctcagagttccatcgtagatgatgacgtcgatggttgtcccgaggccaacctcttctctgacctcgaggatggtaccgcgtgcggggccttcaacctctatcttcagcttctcctcaaggtacttctgggagaggcctgctatgaggacgagaagttctggaatgcctatgccgtacttggctgagattgggacgatcgcaagctccctggtgaagtcctgaacgcggtcgaagcggttggcgttgaatcccatctcgtagaactttcctatcagttcccagagcttggtttccagctcctgtattgctctctgatcctgcttcttaatgttgacgaggaaaggctcgtcctcctcgatgacccagccctttatcctgtctatcttgttggcggcaactataaagggcgttctataccgcctcaggatttcgatgctctctatcgtctgcggctggaagccctcgtttatgtcaacaacgaggaccgccaaatcggcgaggcttcctcccctagccctgaggctcgtaaaggcctcgtggccgggagtgtcgatgaagagcagtccggggagctttatctcgcccttccagagcttgatgagcgggccggcgagctgtttgacaacatctatcggaacctcagttgcacctatgtgctgggttattccccccgcttcctttccagccacgttcgtgtgcctgatgcggtcgaggagggtggtgttgtggacgaggatgccgttggccacgaagttgtgggtctcagttgtgacatcatagacgtaaccctcgtattcgaactcttctatgtcctcaaccggaatgaacacgaggttttcagcgaggttcctgatgtagtcaacgtcacttgagtcaaactccctgttgcgccagacttcgaggagctctcttccaagctctgtgagctttccgtcctttatcagcccatccttttcgaaggctttaatgtagttgtgatcccttatcctaccctcgaggacggcgatttttttgtcgaggttaattgagcctttctcgatggcgtcgagaattctcattagagtctcgtagctcggggcttcttcggattcgtattttccgtagaacggaacgtttgagttaagctccgtccttgtgaagccgaagaggagcctcaggcgcttcagttcctcgaaaatcggatagctttcgctcctcctgctctttttaattgccttttcaagagcctccgccttgttcttcaccgagaaacctatgtaccttctgaataggtcgaggtttctcctgccagatataacgagggtcgtgtagtccgagcggtagatctttgagactattccaaagcggagaaggagcaatgaaaggtcctcaaggaactcctgggatgcgctcgtcacttcaatcctcgcgtccttaaggctgacgtgcccgtcggcatcaaagtaccccctgaggaagcgggagacgtactttctgggggcaatgaagagtatccttgggactctaatgctcttcgccttctgtctctcggggtattcaaacaggactctgagaagcctcagcagggcgtttttgccgttggtgagttcaatctcgtaagatgtggtgcgctccactctcttcactgccaccccgaggactgaaagcttcttcagctcctcgtagacctcaacatcgttgttggctatcttgtcctggcttccgtctccgaacataacgcccgcgaagtagaagaacgcctcccattcctccggagagcgcggaagctttacgtagtggagcggcttccctgagcggtgcatccttggggtgaaggccaccctttccacttcgtcccacaggttgagcctctctatgtcctcccacctgaaaacgttcctctcaactttgtacgccctgtcgcccttaaactcgctggagattttgctgagtacttctcccctgagctttgcgattagctcatcgttcttgagcttctcataaacgaaggagacgaatctctcatcactctcgttcccgtggattaccctcggaacggcgacgtagtcccccggcttgagctggtctgcgcgtacccatcccctcgttgtcaggaaaggatgttctggcgtaaccgaaaccgagtgccagttcttgagcttgactctgagcattttgcccctatgcctcaccttccagacgtacgggctttcgagaactcttaaccttccatcttcgcccactattgtgagtttcgctccgagctttctgatttccttctcgttgtcagcgactacggtttctttagctaaatcgaacagtcccttaagtgttatcgggccgtgctcgggcagtatcactttctcatctggcaacaggcacttgccgtggtcaacgtggccgagaaccgcgatgattggctgtctaattctcttcgtcatttttctcacctgagctaaagtccggcgtgggcttttaaaggttagccgggggaaggattaaaaatccatgcagtaaatcctgacggtggtgagatgataggacttgtggttggaactctactcggcattctattggctctcatcgcgggcagactgaggggaaggggtagcgagatcttcatgtcgctgctgggaataccggtctttacctacgcattctcggttccgtttgcggagacttggccgcggaatacctacatctgcgctggaacgtgcctcactcctacccaatgggcgggggtatgggtgtttttgtcgtttctggttgcggttgtctattcctacttccgggcgagggagagcctgagcattgacgagtacgttcaggtctcgtacctggcgttggggatatttgcgggggcggtcgtactttcgtcaacactgcttcccgctttgatcgttccgggcattctggcctacgccctccttgtctggccgagggaagaaagttctataaagttccttaaagttgaaaggacggacttccttgaaggagctgaggtttacaccgacgagaatagcatgatggcctttaagaatggtagaacgctcttcatcgggggagcagtcctcaaagaatttcctcgctccagggagcttgcggaatgcactttgaaggctccaaatccaagtccagggatgaagcttgcgattttaatcgttgggttcctcccggcaacgcttctcttccttgttccaaggggtgttcttgcaatagccgcctacggtatcgttgtcttgatgaccttcctgctactcggaaaggttgcagtcagcagaacgaataaaaggcttcccgaggaatgtcgcgaggttctgaaggagtactcggacttcataaggaaaaagaaggggaagctcgacattgtaatagactaaatcagcgctccagacagtccatgctgtccaggtattccttctttgacctcgcgtgggtgtggtagaaccagtctgcggccttgcagtactcgaagagttcctcgggcttgaagtagaggtttatctccctctcggcgctctccgggctgtcgctggcgtggatcacgttgtagattgcatctccaacgtcgaggccgtagtcgccccttatactccctggctcggcgtccttcgggtcggtggctcctgccatcttcctgacgacgcttatggcgtatcttccctcaacgaccataacgacgctcggagccttggttatgtagtcgatgagcggctcgaagaagggcttacccttgtgctccgcgtagtgcttctcggcaagcttcctgtcaatccatatcatcttcattccgacgatcttgagaccgcgcttctcaaaacggctgatgatttcccccatgaggcccctaacgacggcgtcgggcttcaaaataatgagggttctttcaatctgtttgtctgccattggcaacaccgaagttgatactcgggggggttaataggttttgtgtaatggtggatgggaataaaaaatattgagaaacagcacaaaccatcagccgacttttacataccaggtgacggccccccaggtatcgtgtttgtacggggtggatgaccattctatatgaggccctgaatatgagtaagtgccccctcccacgtcatagtacttgaatgtcgcttggaactttacatttactatggcatgccattgtccatcgtggagtgcattttcattcacgtgtccttcggatgcaacgttggttttaaacgaatacttagcgtcctcagagtacatgttgaaatccaagagccatgtggctgtttcagttgatctgtcaacggcaggaagtattttcgaatctggtattgtcacggtaaacgtaacagcaggtggataacccacggtgacttgagtggttgtatgaccacctaaagaccccacgggatcggctctatccaactgtggatcaagattgggttcgaggttccaattgtggattatcttagaggaatcagccacataacgcttgtagtttttatttccctcaacttccaaaagcccatatcctggatctatttcgtatcgtccctccccgttttcatcaggagcaactagaaagtactccctgctggggtcatcgtcattccagagaccgtatgcatagaattttgcatagatgtttccgtatgggggatcgttgacttcaatagttaaggcgccgaagttgtgccagtatggcgagctctcaccactgtaaaccttcacattgccgttgctgtccactgctttaactttccatccttctggaacgccaatcttctctttggggattatgtctggcttgaactttggtgcctttttgctccactgcagaagctcgtccttaattttgtcagatagtattggagctccacttcttgttgcagtgataagaatatctactctcccctcttcggttacctttatcccataaccggttatgactaagctttttggcagttctggaaccgcgtagacgtgccacttggcgtttggagcgctctcttcgacaagcgtctggacagtgcttttgagaacatcactgtccagtggaaaactgttctcgctataaaggaggtatgcagtgtagttgctttctgtgatcttctgtatcgctgggatactgtactggacgctctcgttcgttgggtatgccgaagcaacaaacagactcccaaccaaaactccaagtaggaaccataccatcttctgtcgcatctgagccccccaacggggttgtcaattaagaaaacgcattcatgacatttaactgtttcgctctcccaaaattagagattgtcaaggaatagcattgaaccaaaattactaaagaaaaatggaaaagttcacttcctcttggccctctggagcctggcctcctggaaggccttggtccacttgagctttctgggatttctacccatgaagtagtacttctcgcacttgcttgagcagaagaacaggactctgccatcgttcctgacgaacatcttgcccgttcccggctcgaactcccttccgcagtaggagcagacgttccagcgggccatcttcatctcctcctcctgatctctctggcctcacgctcggtttctctgagtatgactatgtcaccgacgcggaccggccccttaacgttcctccttatgaccctacccttgtcgcggccttcgaggattctgaccttgacctgggtaacgccaccggtaacgccggtcctgccgacgatctcaataacctcagcagggtatccttcgtcgctcatacctcacacccctaaatctaaaatcccctcgcagagatgaccttaaacatttcgtgaatgttaaggaaggaaaaggagctcacttcatgagctccttgaccttcatggcgatgtcctcaacgagctcgcgggccttgcccggctcgatgatagcaacgctggcagctgggacttcaaggccagcggccgctccaagctccttcttgctcgggacgtagacgtacgggatctccttctcctcgcagagcggcgggaggtgggcaacgatctcttcagggtcaacgtcctcggctatgataacgagcttggcctggcccctctcgacggccttggtggtctcgttggtgcccttccttatccttccggtgtcccttgcgatctcaacggcctcaagggccttctcggcaagctcctgtggaacctcaaacttcacgtagctcggcttcgccatcttcatccctccgaaacctcatcgttcatctgtttgcaccaccgactcgggctgaccgcttaaaagggtttcgctactcaactggccagaacacaaactcgcagtgatctgcgcccatggcctcgcacttggtttccttgccctcccatctctttcccgtgaactccgttaggaactgggctattgaacccgcgtagtggacatgatatggcagggatgaacccttccctcctggaaagaggtttttgcccgttatcaatattaggtcgtctttgatgtccacgatctccagggtgccgcccccactggagcgcgttaggagcgctatttcttcgagtgcggccctcaggctgtcggtgcgcattctcgcgtcttttccgagcccaataaactgcttcttgccccagagataaaggaactctttgcccttctcaggccctaggaactcataagcagtctctatagtagccctttcgctgtcttcggtgattatttccaccctatcccagtcaagccacagagttccatcggattctgctctaagcctctttttgataccttccaaggtagcgtattcttcaagtacgagttttatcccctctgaagaccttacgtatggaaagatcaggtttgcagtctttagtggctgaatggagcgtgctatgtgaatccttccacgggacacttcaaagacatagtcaaatggtatcaaagtagcagctagatcaactttctcaaacacattcccgcagagagcggccatggcggttactccagttgacttcacggagtttatcagacgtaccagcgtttttatgtagccctttggattgggctggagggtgtactgggccgttaaatcatccacaacaagaacgtcaaaatctccttttgagaggcgatccctaattacggccgttgtgattcctatatcgagggggttggagaggatgttctcaccctgcttctggtcgggagcgtagaggttggtgtacccgtccaggataaccagagaaccgttctctatgaaggggaggtagttgatcccattgtgctcagcttctttgatgagagtgtcaggtgcttctctaaacgctactagaaggacttttttcccgtctttaagagcgtttagagcgacctgatgcatgagaattatgttgtcgtattcgagtgaaccaacgaaggcaacggcggaactctctattatgccgccgtcaagggcatcgtcaacctgccttattcccgtctttagcatttttctcaccctcgcggagtttgtttgtagaacttataatcttttggttaacgcttgagacattttgggaaaactatcaaattaaattggataaaaaatttcaaagctcaggagcggccaagctcatcatccaactcaggttaagactcctcatcatagccccgatatatctcgaggctccttctggctctcgccttcggaatctggtggcccattatggccacgatttcatctgccctggccttcccgtggtggagcatttttctttccgtctttatcttctccaccctgaaggtgtagcccccgacctcgatgacttccccaacgacgaactcctcgctccttggtaccttcaccttaaaggcctgggtgatgccctttggaaggtagatagagacctttatgaccttcgggtaagttaagctctcgccccagagggtcttgacttcttccaccttagccttgttgaccctcttgtccccctccagctctatccctgttattctgacctcatcgtcctccgtctcgacgatgtcccccacttttatttcttcaccctccggaagctcggcttcgctcttgaagctcctctcgtgcttgctgacaatgagaggaaccttcctgaacttcggaagggtaacgtgccagacgtggccgcagtcgttacagcgaagggtaagctctctccccctctccctgatgacctcaacgttctcgctaccacattcaggacatacgaacagctcttccatttctctcaccggaatgggagaagggaaaacggtttataaacctgccccaaggagccacttccaaaggggtatgaattcaatattctttccatcaacggtttccgcggcctcgtaatcccacgtgatcgcctttagattcccgcatctaagatgcctggaagcagagatcagagcctttacttcacgtctcatcgtctctgggtcgtcaacgctccagctgacctggatcagctcagaaacctttggccccctcgaaaccacgaagtcaacttctccttcacgtccttcccagtaatgaacctcgattaatgggtcggagtagtgctttctcctcaagagctcaacagcaacgatgttctccaatctgaagccgaagtcctccacacccagagcctccgcgaatccaatatcagccagatagagctttggagcgctccgaagggattcaacggtgttgccatgatacttccgaacgggaacgacgaacccgacgtcctcaaggtaggagaagtactcgtagacggtcggcttacttagtttaacccccatggatgacagaaatccgtggagctttctaaccgaggttttcctggcgaagttccttgttatgacccgtattagggccttcatagcggagcttttttcaacaccatatctctcgatcaagtccttgtagactatcaggtcgaggtactcctggagcgttctgatcttgaggaggggagggtagtccactattcctgggaaacctccgtatctgacgtattcgtcgaggaaagcaaaaagccggccccttctggcttcggttaacggagaggtcagcttaaactccttgaactccaggaattctctaaaagacagtggaaagagctgaaacgacagcgttcttcccctaagggaagttgcaatctccttcgagagtagttttgaagaggagcccgttagaaaaactctggcgtttcccctctccaccatccgtctcacgaatttttcccatccctctacagcctgcacctcgtcaaggaaaaggtagagaacctggctccggggttgtgcttatgatagagctcaactatgctggagagatctttggccgtcattccaacaagcctctcgtcctcgaagttaacgtaaaaaagccttctgaaggggagcccagaacccatgagtctcttcatcgtcgcatagaggaagtgagttttgccaaccctcctgaggccaaagatagagagggcagtgtcaaggttcgtgggcagggcgagctccctctccttcacctctgggagtccaagctcccaaaactctgctatgacctcttcgagcacctctctcatcatatgtacaactcaattttaccatatttaagtgtttttgtcaaactcaactttaccatcagagctggctaccctcctcggggttcttgatcttcaacagcgggcagacgtccatgcactcgcgacagtggacgcaggagtcccagtcaacgactatcttcttgctcctttcgtcgatgctcagcgcgttctctgggcatttgccgacgcagaacccgcagccaaagcactcgtaggccctcttgacgaggtagtaggcgctccaggcctcttcctcattcggagctctggcggttcttgtgccggttaggaactcaacctgccccgccttgataacgtcgccatcgacttctacctcaccgaggattggggccacctcaaggagcctcttcttgttgaggacggtgttgaaggtcagctcgtagccatcgtcggtctcttcaatctggacttttaccggctcccatgagcgctcctctggaatatcaacacccagcttccgcgctattgacttttcacccttgctgagcttcttccagcgccagaagccgtaggttacccactcctctggaaggtcaaagcgctccctccagtactccagcgccttcttccacttctcccagagttcgggcttctccctcttcagcctctcgaactcagccagagaagcgcttggacagaggaaacagcctattctatcaaaaccgcgagcgtagagcgggttgtacttcagcttcctgctgaatatgtagagccagacctctatggccctccagtggaagattggcgatgcgcctatctcgttcggcacccactcgttcctccacacgcgcggctgcttgaacctctttatgctctcgtacttcctctggccgacgaacatcaggacgccctttgggtagttctcctttatggccatcgtaatcggcccgagcttcgttaccttacagcaccagcggtagtccctccccggcggtgagaagacatacaaagccctccagaaggcgtcgccggcgtcggccactatgaacctgactcccttaggctcaagctcctttctcagctcttcaacgtattgaaccgtttcagggaactcgatgcccgtgttgttgaagaagaccgtaaagtcagttccaaactcctccagcgccagaccgagaaccgccaaactgtcctttccgcccgagaaagcgaccgccttcggaaggtctgagtacttgttagctactctcctcatgaactccctgctcttcacgaccttctcttcaagcgctatactgttcgcccgcagaacatcctccatggtggccttcttgccctcgcggtagtttactgccttctgcctcttcggctttacgccggttcccctttcgcccctcatcagggcatcgtagtccttctttgctatcccagtggcgaaaacctctccgtcttcggtaacgagtatgacctcatccccaacccttatgctcggatccgcttcgaggacgccaactgccatcaggtttgcgcccttctttatcggccctacagctcccttgtcaacgactatccatttcttcatcttctttccgaagcgcttccagagggcgatggccccctcaactttcagtccggcgtgccacttcagctcgagcgggttgtacttgacgtagccgaagacgtagccgtcgaggattatctcgtaggcatcatcctcgctcgggagcttgttgaggaggacgatttttccctccaaaatttcgccgatgtcaacgccgtagtgctccatgaacactgagcggatgaactcaatgtccttctcaaaggcgaagcgcaggtctcccggcggagtgatgtttagcctgaacactccttcctttccgtgaactgcgcaggagtcgccgatgagcgggacgttgcacttctcgcaccagtttatgtaagcctttccaaggaagacgggtcttcccatttttcccacctgctcacacatacgctcggggtttaaaaagtagaccccacaaacctgagaaaggcttataaggaactcaacatagaagaagtctagaaatttcgggaggtagtagtaatggctggctttgccgcctttgtaatattcgtcctgggtctgttcttactcctgctgttgctactgggcgtcaagataatccggccctacgagaaaggtctggtggagaggctcggaaagttcaacagaatcctcgaccccggtgtacacttcataatccctttcatggagcacgtcaaaaaggtcgacatgagggagcacgtcattgatgtcccccctcaggaagtcatctgtaaggacaacgtcgtcgtaaccgttgacgccgtggtgtattatcagataatcgacccgataaaggccgtctacaacgtgagcaacttcctgatggccatcgtcaagctcgcccaaaccaacctgcgtgccataatcggtgagatggagctcgatgagactctctctggtagggacataatcaacgcccgcctgagggaagaactggacaagataaccgaccgctggggcgttaagataacccgcgtcgagatacagaggatagacccgccgaaggacatccaggaggcgatggccaagcagatgacggcggagagggagaagagggccatgatactcctggcggaaggtaagaaggagagcgccataagggaggccgagggccagaagcaggcggccattctgaaggccgaaggtgagaagcagaggcagatactcatcgctgagggccaggcagaggcaatcaggaaggtgcttgaggccctcaggatggcggacgagaagtacctcacgctccagtacatcgagaagcttcccgaccttgccaagtacggcaacctcatagtcccgtacgacacagaggctctcatcggcctgctgagaatcctccagaaggtcaaggacatgccgctccctcagccgccgaagaacgagaaggaagagccccagggaagtggtgagaacagcgaagagcttgaaaagcctaaagacatgacggagtgaggggccatggaccccttcccgatttttctcctcatccttggactgctcataatcctgctcgacatgatggttacggcattcataacacccataggggttacctttgccgttcttgggattctcttaggcttcggctggaacttcacggagagctttgtcgttgcgttgatcttcggcgtcctcgcctacatcctcgtcggcaggtacatcagaaaggacgtcgtggacattggagaaaaggagaagaagtacaccttcgagctggtagggaagagggggagagtcgttaaagtagcggaagaccactacctcgttgagcttgagggggacaactggatagcgctcagtgatgataagctcgaagtcggggacacggttgaagtggtcaaggttgatggggtcaagctgatcgtgaagaaagtctgagcccaaaccgttttaacccttctttttcaccttcctcggtgaaaccgatgcacccgggcggttttcttgaggtcataactggcccaatgtttgccggaaagactaccgagctgatcaaaagggtcgagagacagattttcgccaagagaaaggcagccttattcaaaccggccatagacaatcgctattccgaaagggaagtcgttgcacacaacgggctcaggtacgaggccttcgtagtgccgaccacagaaaaaggagttgaaaggataaaggagataacgctcaatgagggctacgaggtcattggaatagacgaagttcagttctttccgatgtcagttgtggaggccttaaacgagctcgccgatcagggaatttacgtcatagccagcgggctcaacctcgacttcaagggcgacccgttccctgtgacgaaagaactcctcgtgagggcggacaacatcgtctatctgacggcggtctgtacggtctgcggaaagcccgcgacgaggagtcagagattgatagacgggaagcccgctccaaggaattcgccggtcatcctcgttgggggaagggaaagctacgaagcaagatgcagggagcatcacctggttcccgacgaatgagatatttaaatggtaaacacaaaaaagcttaaaaacgaatttccaaagcatgaacaggcaaaaggagggggtgtaactatggccaggaacaagccgtttgcgaagaagctcaggctcgccaaggctgcaaagcagaacaggcgcgtccctgtttgggttattgtgaagaccaacaggaaagttatcactcacccgaagaggagacactggaggaggacaaagcttaaggagtgaggtgatgtaaatgccgatcaagcccggtgaagaggtcatattcgtcgtcccgataaacaagatcaagaagagggttccccgctggaagagggcaccgagggctgcccgcttcgtccgcgagtggatagccaggcacgccaaggctgacgaggtcataataggcaccgacgtcaacgagaagatctgggagcgcggcgctgagaagccgccaggaaagctccgcgtcaaggttgtcgttgaggagagcgaggggaagaggatagcaagggtctccctcgcctgattttaaccactttttagaggtgacgagatgcacatagagagactcgattttgagaactccccatatctcggtgtttacgggcgcgcaactgacagggttcttctcctgagagagggactgggtgagaagaagctggaagtcctgagagaagttctcaaagtcccgatcatcgaaaccagcatcatgaagtcgaggatagttggaatattcgccgccggcaactccaacgcaatcatcgtcccttggtacatctgggacgctgagcttgagagaatcaaaactgctctcaacgagttcggtattgacatggacgttgtcccctttaagagcaggctcacagcccttggcaacctcatcctgaccaacgataaggccgccctcgtcagcaaggagttcacgagggaggaggcaaacgcgataggcgagatactgggcgttgatgaggtcgagaggggaatgatagccagctaccgctcagtcggcagcgttggcgtcgtcacgaacaagggcgggctcgtccatcccgaggcaactgacgaggagcttgagtggctgagcgacctctttggcgttgatatctacgtcggcacagccaacatgggcgttccattcgttggctcttgcatgctggccaactcgtatggtgtcgttgtcgggcacctgacgactggtcctgagatagtgaagatcgaggaagccctcggcttccttggttgaagcaaagcttaaaaaatggcctgagtagtggcggaggaaggaggtgtgaaaaatggaggtcaaggttttccgcgtcaagggtacctttgagaggctcggaaagaagcagcctttcaccaaggagtacagggccctcaaggaggagcacgtaagggagctcgtttactctgacatcgggagcaagcacagggttccgagaacaaagatatggattgagagcatcgaggagataaagccagaagaggccgaggacccggtcgtcagaaggctcagcctcgagctttgaccttttctctttaagaataggccatcattttaaagggactgttcattggataaagcttgggctcgagacttcagaaaattcgaagaaatcttcgaagggaaagaagtgagctcggctctttttcttcatcattatcaatcagataccctagagctcgtcatcgctcgttttactctccaaaccgaaagttaaaaggatagcggctcggccagtatgcccctcatcacccttcagctatcgtgaggttcgtcatcgccgcgttgcctgcctacaactcgcttaaaacctcttcgtacactttttctatctcgcccgcaacaaccttccaggagtagcacgtttcaacggcttttctcccggcttctccaaactttttggcaagccctttgtcggagaggagctttaagactgcctcggcaagtgccgcttcgtcgccaggggggacgagtatgccgctttcactttctttaacgacttcagggatcccaccaaccgttgtcgtgacaactggaattccagaggccatcgcctcaagcactactatcccaaaggcctctgccgttgttgatgacaggacaaaaacatctgcggaagcatagagcttcggaagaagtccatcagggacatagcccataaacctcacgtggtcttcaatgcccaggaattttgcctgcgctttcaggaagggaagcatctcgccagagccgaccataacaagtgtgacatcttccttttcccttgctatgttctggaaggcgttgaggagcacgtggggccctttcctgaaggacatcctgctaacgtagagaattaagtctccgtttattccaagctcttctctcaccagttctctctctttattgctcagtggtctgaagcgctcgtcatcgacgccgttcggaataactctaactggagaatccgtgaagtgttctacgaacgccttcgcagccttgctaacggctattatttcatgggggtattttagatagtggttgaggagtggaaaagtcaacccaagggccttccatagggaagactcgtgggagaaggatatgctgtgggttgtgaggagtgttgccttttcgagagttctcccggccttaaccgccttcagcgagagtggagtgaaggcgtggtgggcgtggacaacatcaaaatccacgagaaactcgcctagttctctgttcgacttcagcccgtaggttatgtttatcccgagcaccggactgatgacacccgggactttaaccaatcctacccccagctcttcaagctctttttcctttcccgtttttagatcattagtcactattgaaacgtcgtggccgagctttttcagatagattgcaagctggtgcatatgagtggcgacgccgccgatctttgggtagtaccagtcgctgacgagggctattttcattttcctgcacccctaagacatcatccaccgagcaccaacctggcggtgtgtgcaaccaataaagccagcatgagagcgtccaacgtccggtagtttatcctaagcttcactgccactgccccaagtgctccaaggggggtaaatcccaccaccagcaggacaattgaggcccaagagaataccacaacaagcgtttcagaggccttttttccaagcgctatcggcgtcgttttgaggcccgccttaaggtcgctctcatagtcgccgaggtggttcctgagctcgagggcaaaggagtagagggtaacgctgagtgctataagcgcctcgatgcctgagattctcccgtccattgaagcgccgtagaggaagggaagcccgccgaaaaagaggccatgagagagcacatcaaccaccggcctcgccttcagcctcggcggtgcggagtagatggtcgcgaggagagtcatgagaaggtaaaagatgaacattagggtgttcgttctggaggcgatagccgttccaagcagggcaagaaccacagagattgccacgccttcccaaaaactgagctccccgctggctattggattcctcttaaccttatctgggttcagtgagtcggtgtccacgtcgaagcagttgtttattgagaatgcgtaccaaacgaagaacaccccagctataaaggccagcaacgcctcatcacgactaacccactttgcattcatcagtatcgccagaccaatgagaccgatgtatgcccggccctcaagcggccggaaattccttataacagctgaaacagatgccatggtatcactcaatagctcccaaaataggacattataagtcttttcaccgccaggttttccagacataaaaagcatacggtaccacaaaggggaagaaaagaaatcaggcgttcgccttttcctgcctcttcttcgtgaggtactcgtggatggccttcgcggccttcctcccatcacccatcgccaggatgacggttgcctctccccttatggcatctccaccggcgaaaacgcccggaatgctggtcatgaggttctcatcaacgacgatctttccgcgctcgaccttgaggccaggtgtgttgatgatgagcctgttcgggtgctttccaatggcgataatgacggtgtccgcttcgagggttacgtactcgccggtaccgactatcttcctcttgcccctggcgtccctctcatcgagagccttcatcttctcgaacttgactgccttgaccctgccattctcgtcgcctatgaactcgaccgggttgacgaagtagacgaacttgatgccctcctccttggcgtgctcgacctcttcctccctggccgagacgtcctcctcaccgcggcggtaggctatggtcacctctgcaccgaagcgcctggcgctcctagcggcgtccattgcggtgtttccagcgccgataacgatgaccttcttgccaacgtaaaccggtgtgtcgtattcagggaagagataggccttcatgaggttgaccctcgtgaggaactcgttggcggtgtagattccgttgaggttgattcccggggcgttgattagcctcggagttccagcaccggaaccaatgaagacagcatcgtactcttggaggagctcttcgatggtaactgtcctgccaacaacgtggtcggtgagtatcttgacgccgagctttctgagcttctcaatctccttgttcacaatctccttcggaagtctgaactcggggataccgtacatcaggactcctccgggctcgtggagggcctcgtagatggtaacatcgtagccgagcttcgccagctctccggcggcggtgaggccagctggcccagctccgatgatagcgaccttctggcccttcttctcgatcttcgggattatctcaaagagaagctcctcatcaatgcccttctcgcgggcgtagtcagcaacaaagcgctcaagcttgccgatgtttatcttgtcgccgaccttgcccatgacacagttcatttcacactggtcttcctgcgggcagacacgaccggtcgtagctgggagtgagttgcaggcccagatgacgttgagggcttccttaacggccttgtcaggatcgtcgcggtactcaacgagcttgcttatgaatccaggaatgttgatgtgaaccggacagcccttgatacagggtgcatactcgtaggggcactgcagacagcgctcggcttccttaacggccagttcgaaggtgtagccgaggtttacttccttgaagtccttaatcctctcctccgggggcctctcgggggtcggaaccctctccttgatgagcttccttctcggcatcactgctcacctccctgggcctggagttgctttagatagtgctcaagggcgagcctctcaagcggggcgtagaaacccgtcctgtgtatcagctcgtcccagtcgaccttataggcgtcgaacccaggcccgtcgatgcaggcgaacttcacctctcctccaacggtaacacggcatgctccgcacattccggttgcatcaaccatgattgggtgaaggtcggcgtgcatcgggattccatactccttaacgacgttgaatatcgccttctggccgccagcagggccgacggtgagcaccatatcaaagtgctcgttctcaaggagctccctgaccttggctgtggctctcttcacaagctcctgcgctatctcgttcatcccccagccgggctgaaggtcaaagccctcgacgatgtgcctggagacgctctgctcaaactcttccctcaggattaccattgggttcggggagacgtgaagagtggtaacctcgtttcctatctcctgccaggccctggctatcgggaaaacttcaacgatacccgttatgagacctatagccaaaacccttccgaacttctccatcggggcggggtttccgagcggaccggcgacgttgaggatctcatctccgggcttgagctcgttggccatcctcatggtcgtttttccgcggacaaaggtaatgagggttatccagccctcctccctgtcccatgtgacgggagttagggggatcctctctccgttgggaaatgccctgacgataacaaactggccgggctgaacctttttagcgacgtggggagcgtgtatcttgtaccacacctcattcatggccagctcctttttgtcgagtatcttgtaaggcataatgaacacctccgtacatgagtccaaacttggacatctaaaggttcacaactttaagtgcttataaacctgttgttaaccaaaggtttaggacggcgaaggtttttcagcccgacggaaggataatggaagaaacgtttttaattgaccatgagaagtgggctgggggtacgtatgaagaaggttgcctacactttcgctgtaataatggccgcctttggcatgttccttccgctgatctatggtgcagtgccagccctccagaggctcctgggtgagaacccgctcctgaaatcgcttggaatatcggttatcttctgggttctggcatacgttctatttgaggaagaagagaagagtgccgacttcacagcttcctgaggaaggttatgtagcccgtgtgtgccagcatcgtcgtcttcggcctcatgcactctcttttgacttcctgctccctaacgaggacttccacaacccttggcctcatgaactctcctttgaactcttcaagcgccctgaaaaagcggtgcacctggttcatgcatggggtataggcaacaaaatatcctcccggtctgaggacatcaactgcatgcggcaggacgttctcaggctggggaaggtcaaggactatgtggtcggcttctttctcatctatcccgtcgtaaatgctcttatttttcaggactacccgatcggaaaagcctgctaactccacgttcttctttgctatctcgtagaagtcctttctcacctcgtagcttattacctttcccgtcggcccaacagcgtttgccaagaatattgtgagcgctccgcttcctgcccctgcctcgatgaccgtgtcgcccggtgaaattccagcgtaggctatgattattccagcgtccttagggtggactatctggggacctcttctcatttttgctatgatgtcgttgatgtccggcttgagagccgtgaaagtctcccctctgtggctctgaattttagcgccgtagggctttcctataagctcgcccaagttcaagatgccaaggtcagtgtggaactctttatcctcaactttcacaagataccgtttcccccgtggatcaacgagaagaactctatctccgactgatatcatattctctctcctccggccacgataatcttccccccagaaacctcggcaacttttgtgctaagctcttcgaggattccaatgtgtgcctcgtttagtatgctggtgttaacgaagctgataatggcaagatctcccgccggtattgtaccaactgcagtcaatattgatttcagggctttttcaggattgaagtatatgtaatgggagagtccaaagaccactgcgtacttgggcttccgaggaagtctggaaattctgctgagtatggaatggtaattccttaagaagttctgcggctcatacgtggggactatgtcctcaagcacttcaccgtacgaggctgctccaggtccgattttaatgatctttatttcccttataacgtcgaggattttcgtatactcaaccccgctggtctttgcaaactttctcatgagtatgtcaccaataccccagaaatctattgacacgattccgtggtcgtggatggaaggtattatctcaccccacgctattttctccacgggtgcattggaagagtacttgattaaaacaatgtcacccggcactatagccctgataaagtcatgaagtgctccttcattagacattatttatcaccagaagggtttttaacggctcaacttttaaatcttgccgggtgaaaggaatgaagttcgtagtgtggccgagcgagatagattcgcggttgcctcgaaaatacggcaggctagttaaaaaagaggtcgcccttgaagcccccaccccagaggaaatacgcgatgccgctgaaattctcggtatgaaggtcattgagttcgaacctgaaaagctgaatcccagactgtcgggcatcgatgaggagctcaggacaaagggaatgctacggatcgagagcccataccccaagggcaaaagtctcagaatgatttgtgagaaaatcagagaactcagggcaaagaagcgcaaagcccacggcaagagaaagaagaggtaatcactcctcttctgtctccactactattgcagtggttgtgtcgataacgccgtcaatgttgtgtatgtcgtggagtatctttctggtcagctcgccgaggtccttggcctcgatgtggactatcgcatcgtaggggccggtgacggcgtctgccttcgtaactcccggcatcttcctgagagcctctataacgctctcgacctttccaatttcaacagtaagcaacacgtaggccctaaccatgggaaccacctcggagttttacgatattatttcaacgggcgttaatttaagcttttcgtacaaagttccggtcgggttttctaaagtcccccaacatagaactaataattccgaattaagcattgacttctggttcttcaggcaaacgtcaacggacctccaaatagaacgctcaggcggtaggcatataaaaccactttcctcactccatcgggatgtgagaggagatgaaggttgatgagcttcccattgacgagaggataaaacgcgtcataaaggagagagggatcgaggagctttacccaccccaggcagaggcgctgaagagcggcgttcttgaggggaagaatctagtgttagctattccaacggcgagcggaaagaccctcgtgagcgagatagtgatggttaacaaacttctgagcgagggtgggaaagccgtctatctggttccccttaaggcactggcggaagagaaataccgtgagttcaaggagtgggaagttcttggcctcagggttgctgcaacgacaggagactacgattcaaccgacgaatggctcggaaggtacgacataatagtggccacagccgagaagttcgactccctcttgaggcacggggcgagctggatcaaggacgttaagctggtagttgccgatgaagtccacctcataggctcctacgacaggggcgcgacgcttgagatgatactcacccacatgcttggaaaggcccagattttggccttaagtgccaccgtcggaaatgctgaagagctcgcggagtggctggacgcttctcttgttgtgagcgattggcgcccggtggagctgaggaaaggtgtcttccacctcggccagctcttctgggaagatgggaaaatcgaccactaccccgagaactgggaaagtctcgtactggacgccgtaaagaagggaaagcaggccttagttttcgtcaacacgcgcaggagtgccgagaaggaggcaatctcgctttcatccaaagtttcaaagctcctcacaaaacccgagaccagaaggcttgaggagctgatctcctccatagaggacaacccaaccactgaaaagctcaagagggcgctgaagggcggggttgccttccatcacgccggcctgagtagggcagagaggacgctgatagaggacgccttcaggaacggcttgataaaggtgataacggcgacgccgacgctctgcatgcatcccgatacatatgtggtcaccaaaagcggtgcaaaaaaggtctcagagctgactgaaggcgacgaagtcttgacgcacactgggacgtttaagaaggtgatccaacctctgagaagggagcacaagggaagactccttgttataaaggcctacgggacagttccagttaagatcactcctgagcacatggtctgggtggtaaaacagatacggcacaagtcccactactccgacggaaggcaggttatatggtgggagttcgaggggcccgagtggatgaccgcccaggagctgaaggagaggcttgaatctgagactgacccaaaggtttcctacatgcttctccagccgattccagagccctctgttgatgcggacaaaattcccctgagaaaggaagtctacgttgtcaaccagcacggaaaaacggacaagctccatccttccgtaaagaggacgcccgaatacctcccactgaactttgaaactgcccgcctaatcggcctgtggatagccgagggttctacctcaaagaatggtgtgataaagttcgacatcagctccaacgaggaagatcttacagagttcataaccggaacgatacggaaatatttccctcacgccaaaatagttgtcaaagaccacgaaagaaaccggcggactgtgaggttctgcaacaagcgctttgcagagtggcttcgcgagaatataggacatggggcggacaacaagtcaataccgccactcctccttttgaacaagaacagagaggtaaggttggggcttcttagggggctaattgagggcgatggatacgtgaggagagagtcccagaggagagccaactacatatcatactccactgtctccccttccctcgcctaccagctccagctccttgtggcatcacttggatacacttcctcgatccacaggagcataagaactgagggcataggcaagaccaggaaaccaatctacgacgtaaaggtcagcggaaaaagctactactccctccttgaagagcttgggttcgaagtcccccaaaggggaaacaggacgtacaacgtcaacaggacttggaagaactacctcctcttaaaagtccgctccattgaagaagaagagtacgaaggagacgtctacaaccttgaggttgaaggggacgagagctacagcgtcggcttcatcgttcacaactcggctgggataaatctccctgcattccgcgtaataatccgcgatacgaagagatacgccaacttcggctggactgacattcccgttttagagatacagcagatgatgggaagggccggaaggccgaagtacgacaaggtcggtgaggccatcatcgtcgcgagaaccgaagaccccaagaagttaattgacaggtacatccatggaaaacccgagaagctcttctcgatgctggccaacgagcaggccttcaggagccaggttttagctttgataaccaacttcggcgtcgaggactttagagagctggttgacttcctttcaaggactttctacgcccaccagaggggtgatacttcatcgctcgagtacaaggccaaggacatcgtctacttcctcatagagaacgagttcatagacatggatgtggagaaccgcttcatagccctccccttcggaaggagaacttcccagctctacatagatccactcacggcgaagaagttcaaagatgcttttccagctatcgagagaaatccgaaccccttcggcatattccagctcctcgcatcaaccccggacatggccactctaacggccagaaggcgggagatggaggactatctcgatctggcctacgaaatggaagagcatctgtactcaagcatcccctactacgaggactctcgcttccaggggttcctggggcaagtgaaaacggctaaagtccttctcgactggataaacgaagtcccagaggctaggatatacgagacctacaacatagaccccggcgatctctacagaatccttgagcttgcggactggctgatgtactccctcatcgagctctacaagctcttcgagccaaaggaagacgtccttcagtacctccgcgacctccacctccgcctgaggcacggtgtaagggaggagctccttgagctggttaagctgcccaacattggacggagaagggcgagggcgctctacaacgccggtttcaggagcgttgaggacatactgagggctaagccgaaggatctcctccaggttgagggaatcggtctgaaaatcattgaggggatttacagacacctcggtgtcgagtacactatctcagaaaaggagaagccaaagaagaggaagggaaacctctacgacttcctcaaatagcctctccttcttttcccctaatggcgagcagattgaaaatgttcctcccgggttcaaaaccgttctcgactgccctgttgtatagctttcctcctgttctctggcctaggaaataggccaggacaaagatgaggatgaacggaattcccgaggcattccagctcagccccgcgagccttctcaagactatcacaagtgggacggggagatgcactgccagcgcccactccagcctgcttccacttctcttcgcgtgtgtcctccagaagccgaacgggatgtttacgaggaacgtaattatcaggccagcaatgaaccatatcatgttcatagataccacctttccagtttttaaactgaaccttaaaaaattttgtccacctaactacccatcaggtttttaagcgggtttccagctacttcgggtgggcgcgatgatagtcatagtcactggaatgcctggttctggaaagagtaaaatcgtaaaggagtttgagaagagaggttttccaagcgtttctctcggggacatcgtcagggaggaaaccctaaagcgcggtcttgagcttaccaaggagaacgttgccaaggtcagcatacggttgaggcaggaactcgggcagaacgccgttgcaaagctcgccgtcgagaaagtgagagcgcttttaaaaggttcgcaggtcgtcgttatagacggcgtccgctcccttgatgaggtggggacctttaggggggcttttccggaagagaacatcattatagttgcagtccacacaccaccgaggcagcgctttgagaggctcaaagctaggggcagacacgacgacccgcagacctgggaggactttgaggagagggactggaaggagctccgctttggcatcggaggagttatagcgatggccgactacatgctggtgaacaacggctccagagaagagtacgaagctgaagtgaaaaagctcgttgatgaaattatctcgaagctttgagaagctttttaatccccttccccaatccaggcagggtgagaccatgagcgagctgtttgaggaagttgaggttgaggcttatgtttacccgacggaggatattgagaaagttaagaaggcgatgctgaaccttatcccagatttggagttcgaggcctttgacaggggggactatataatcctcaccgcgaagactaggagcaggaaggccctcagcaggctctatgaactcttcagggggcaggcgatacttgatactgcgaggagcttccttgaggagggctacttcggcgaggagattatcatcaaggtgaacaagcaggccgcttatgcaggtgtcgtgaacttcaacgaggaaagcccgctcggcccgataacgataatcataaggacgaaagacccgcagaggcttatgaagtggctcgcgccgaggactaaggatggcgttccgatagagtgaaaaagaaagagattacctcctcttcttcccccagcttatctttgccgtcagaaccttttcgcttgagaagaccctcgccgtcaggtagagggttatgagtgccaccactgcaaggtaagcgacgctgaatagcattggggcgtactcgccggttatggcgtacctgtaggccgctatcgggtgggtgaacggaatcgccagcagcccgtagcgggcaaagaccggaagctgggagaggtcaacgaacatcagcaggaaggccggaaaggccagcggcaggataaccgaacttacaaccgtgttggcgctctgaacgtcctcagcgtaaacagctagtagcatagctagagagagcgcgaagactatcgttaggaacaccacgagagcgaataggagcatcccttcgggagtaaccccaaggccaaggtcgcttaggcttatccccgtctcggtctggaaggttccgagatagcttctcaaaccgaccatgtaagctaaagccgcaatgaggcccataaccgccgtcccagttatcttcgacgccactatcgttgttctcttcaccggaagggtcagcagagtctccaaggttttgttctccttctcggccgccaccgctccagccgacatctgggcggttattgtgaccatcaggaacactatgagtggaaggctggtggactgggaggcgaggacggacgaaacgagtgagggtgaaacgtccaccaccctgccgcgaataaccgacctgctgacggcttcaatgggcttcaaaacggcatcggggttctcaaagcccgcgttctttatttttatctttgcaagctcttctgaaagcacgtcaaggacaacctttatcctagcctcgctgacgctctctctgattcccgttccgatggtgttgaatatgccgtatatctccacctcagccttctggttgttttctatcgccgtgctgaagttgtgtgggataacgacaaggacgttttgttccatggccgaggctttttcgagggcttcttctggcgaggacgcgcttataacggtgaccgtcacgtttggagtaacgttgagggcccgtatcaagagctcgccgtactttccgtcgtcgaagttggctatcgcgacgtgggtttccttctgagcctgttctatcccaacctgcatcatttttcctagagcaggataaagcacgaggggaacaatgattaggccgaagaggagcttcttgtccctgatgaggttcattatctccttcttagccagcacccagaagtcgctcatgaaccttcacctccaactggctctggaatctcgacgccaactgccctcatgaagacctcctcgaggttctcggcgtcgtacttctccttcagctcggctggagttcctgactcgactatccttccctcgtttatcagggcgactctgtcgcagaggaactcgacttcgagcatattgtggcttgagacaaggaaggtaacgccctcctccctggcgaagctctttatcgtcttccttatcgtgtaggcgttgactatgtctaggccgctcgctggctcgtcgaggatggccaacttcggcatgaccatgagcgctctcgcgaggagaagcttcctcgtcattcccttggagtacgtcgagaccttgtccctgagtctgtctccgaggcctgctatctggactccacgcttgaccatctcttccgctttcttctcgtccttcgcgtagagcctcgccataaagcggaggtactcaagtccggtcaggttcttgtaggctcccgcctcctcgggcaggtagcttatcagcgcccttacttcctccgcttcctcaacgacgtcgtggccaaagacttccgcttttccaccggtggggcggagaagtgtggcaagtatcttgagcgtggtgctcttcccagcgccgtttgggcctatgagtccgaatatttccccttctttaatctcgaaacttatccccttcagggccttgacctttccgtagtccttttcaaggccctcaacgaggactgccttcatttggatccccccagtttgtaaaggagcagaccaagagtcgcgagcaaagcgccgaatatgacaacctcattcagtcccgaaaaacctccgattatggcgatgccgagcccgcttgagactccaagccagccgttccgtgtgcgggcatttttgaaggagtggccgagagcaatcaggagagacccaaacatcacaagccctatgtagagtgcgaaaaagaaaggattgatcgtcgtgcaagcctctccactggggagcaccgtgcaggccaacctatctactggaggccggataactgaaagaaccaaagctagagtgtagagcacccctccagccagtttctcgctgacattcattctaatcaccttcgtaaatgaatatgtcctcaatattgagcccaaaaaaccttgctatcttaaaggcgagcttgagggatgggtcgtactttcccttttcaatggcgattatcgtttgtctcgtgacgccgagggcctttgcgagctcctcctgggtcaggcccctttcctccctcagctcgcggaggcggttcttcactcacatcacccgttcgtaccagtgctgggagacaaggagcacgaatgcacccacgaccagggggatgaggagcatagttgctgttccagtgttcccgttgctgtactcccagaggtattcggcaaagaggaggggctcatcagggcgtaggcgttcctcgtgctcctggcgtttatcatctcagttctctcgtcctctatcctctccacacgggaattgtagtaccagttaagggcgtaggtcagcaggatgcctaggaggaatatcccaaccgcaagcaagcccttcccggacttcacggaataggccaagccgatcacaataccggttaccaaaaccacgagcagctcttcgtacttcagcatcacatcacctcctcgtagtgcgccctcgcgaagagcgggaggagggcgtagacgaacatgaagaggccgctgacaatggaggcactcttccagaatgggtcgcgctgggagatgatactcgttgagacgaaggtgagggctattgtaaagccgaggacacgcatgctcagggcgtagctcttctcactaatgcgttctattctctcatcaacgattacctctccgattctttcgaggtagcgttcgtaggccgtggcaattagcacaccaatgaagatgcttccaacacccagagtcacactgccccggttagaggccgcaatgaacagtccgagaacaatggcaaatatcactccccagccaagccagtagcgaaccttcatccacatcaccgatgtaaagttccctttacgtaaagcttcctttacatcattataaacttttccccaaaatttttaaatcccatcggagaagagtaagacggagcgggggttgccgagcctggtcaaaggcggtggactcaagatgctcttctttcgccaaatgaaggcctctccagtcagaatgacaacaaagaagagccgaacaccgataacatttttacaagaaaggctttggtggactcaacggccaagatccactatggtcgtgatagacagaagtacgctgaatgggtgaagaggcgcacgccgagcatggctaaaaagtatatccctctactggacaaatacctttggggaaagaaagctaacactcctgaagaactgaggaaaataattgagtcaataccaccaacaaagaaaggcaatcccaaccggcacgcctacctcgcaataaggagctacataaacttccttgtagatacaggaagaatcagaaagagcgaggctattgacttcaaggcagtcatcccgaacatcaagaccaacgcaagagccgagtcggccaaggtgataacctccgaagacatcagggagatgttcagccagttaaaggggaagaatgagacgattctgagagcacgaaaactctacctcaagcttctcgcctttacaggcctccgcggtgatgaggttagagagctgatgaaccagtttgatccaagggttgtcgaagagaccttcaaagcctttggcctacccgaggagtggaggaagaagatagcagtttacgacatggagagggtcaaacttccgaccagaaggcatggaactaagaggggatacgtggcggtgttccctgcggagctagttagagagctagagtggttcgctagcacaggctataaactgacggccgataattccgacaaacacaagcttttcagggattatacaaaggtgaaggacctcgccttgttgaggaagttctggcagaacttcatgaacgacaacgtgatgagcacggttccaaacccgccggccgatgcttttcacttgatagaattcctccagggaagagcaccaaagacggttggaggcaggaattaccgctggaacgtcaggaatgcggtgaggatctactactacatggtggacagattaaaagaagagctggggattttggaactgtgataggcatattttccccaactaactcttctttctctttttcttgcatttctctgcgatctttgggtatgctgagcttaaataactctggaattcccttgcagtcataacattgaagtaatgttgccgtatctttgccttacccgtcttacctcccgatacaacaaaatttccaaagtggccggtgttctgggtgaggagaaacttcgcctttgcagagtaaacaacattgaggaacttaatatccgactcatccttaataatcctgataaccgactgatcccgtgagaagtccaccttaggcacgatcttcttagaattccgctgtataagttctataagctcgtcagcaagagctaagacgccttttcggttcgtttttgaagccacttctatggcaatgatggcaagggtaaacttcatttcttcaataatctcactggaaacgtagttctcaaggaacttttccttaaggcacgtgagacagaaccaggctggactctttgagggggatctggatttaagagcactcaccaaaatagacgtatcaaatactgtcctgattttacccctcggcatggactacaccagtccggcctttttcattttggcttcaatccgcttaaacttcttgtatgacttcctaacttcatccatcagctctcgaacgctctttgaagtttttaagggttctggttttgcattcttggagaactcgccggttccaagtttatccattactgctttgacctcgataaaccacgctacatcttcaggcttttcatgaattttattcgctattagagtgatgagatcagttgcaacctcctcacccgagaggaatctaaacctaatgcttgtggccacttttcccaccatccttacctttgtcttcttgctcttaagattaactctcgacgccataagacaaccaccgaaatttggatatagcgtggattatattgcaaaaaagaaagaatcacggaagcggattaaacgctattaacccgtctaggatatagcgtatgtaaacatccgttacttcatacgaatatgacgagtagatatatatgtagaatctaagacgtttctcgaactctgatgggaaccacactaacttaaagacagaagggacggtagttgtagaataaaaagcacctgcacctgtgaattcagcgtatattctcgtcgttggagtattcccacctgaccagtccctcgaagtccaattaataattccagcgaggaaaacattgtttgcttcagctccggacagaggtacacttacattccaagttttactacccttactggtgtggtaccatcccacggaaagtaatagttgtggtgcaagagatgaaacaataccctgtgtatcactctctttttttgttgaattcattgtaagtgtgagatttccgagttttccggtagcaggctggcctgtacttgtggaaaagcacgtattgtcccagtaatcaacgataaatgcgctgtcgtctgggtaatcgctactaacccatgttaaatctgaattctggatataataattaacggttatttgtattgtatcagtcccaaataacccggtgtaatttgagtttgaataatagctaactttaagagttactgaatctttcattgtcccagatgggttagttcccggcagtaaattttcagaaactacaaatgtagtatttgcgtttattgagtactgctttactgttgtcccgtctgcaaaagtaaagtttagattcccggcgtcaatgatttctacctgtgcataaattgtttttggttttgggtttgctatactgaatctaaccgggacttcgtatgaatctaccttttcattatgatactttaccatacccgtgttaagctgatacataatcaccaccctccccaattacgagtagataaagaatagctcccgaggtcgtacctcctgaggcgttttcaataaacattatccctgactctatgttcccgctgggtgttatgctcactaagttatgtttaagcacacgacttccaccagtccccttcattaacaaggtcataatcctcacctcaaatatagctaatgtttatcaaaacgctatccgacgccgtagtccccgctttcggctcgatctcgacaacaatttttctaaccggctcttttggaatcggttgaataaacacctgtccgttcaatcccggcataaacttatgctcccagaacggtttagtatcaccgaaacggtagagtctaacgataacatagtcatcatttccgtgtgaaaccgtaatagcgcaaagcctaaccggtgttccaaaatcccattcctttgaaggctcgtcggctgtgagttcaatcggtatattatcggcgggttcaaaatacgcattaactcggacttctcccgtcatttcttcctcccccctatgaacaacccgattaggacgataacgaccgctagaattcccaccatcctaacgaacttcagaagtccgtccgtgtccggctgtgttttcgtagcgttctcgatcctcttgatctccttctcttcaggctttttggggacaatcagcttatacccgccaactctttttgtttcatgttcggtctttttcgctccccctccagctcccggaagtgccgtcatctcaaagtcaatgaggttcacaccctcgacctgtccgctgtcctgttttggctgtggtttcggtaatgattcgctctttggctttgagattggatttagcataggggtaggtttggttttgtcctgcttagctctctgttctctcaacttggagattagtctcatcttatccagcggaattcccggcttaaatggacgaattaccaagtcatctggctcaaacccgtatttctctctcgggtcgagcctgataattccaggcttggcaaacaccatcttttatcaccccttaacttcctccatagctttctttatcctccttctaatcctctgaagcgttgaattagacaaatggcgaatctttgaattgttcttcttaaacgaaagcctgtacagtaaaagcaaccttccccgtgccgtcttccccgtaatcctccccgccttgtaatcacgtagaatggccttgataatgtcgtaaaactcccgtgcgctgtctaaccccttctgtcccctgtccttaacacgccttcccagatacttatatttcgccgtcatatcctcacactcccgttaagcttcccctcgattctcgaaagcctattttcgtgattgtaaagacgcttctccatctcgtctaacttctttgaaataatgctcaactgcttctgattgactttagaggttacgtaagctgttgaaatagcagtaaacaacgccgtaaccccagcgctgagaatctcatactccagcatctcacctcaccctgtctagccactttttgaactggatttgaaaagcgacccacaacacaaaaaggataagcgcctgaactatcgtgtccttatccagcttcatcattcaccacctctcaaattggaatcgctattggttcgggagtgcggggtttcggaagaggaatcggctttggaaggtctttgcgctttggtataacctccgtacgacctccagttatccagtcgttcagcttcctgtaaagctcgtcatcagcttcatagggtttcaaatggtcaggaacgtccggcttccaaacgtccagcgttggcgttgccttctcggggttctgcttctcccactccctcttcttccgctcaagctcccgaccatacttaactaactggtcgagagtcatagcgttcgggtctttcccctccgctttcagcgccgccttaacaccctccaaccatgccttaaagttcgcataactcacgaaaccatacttatgcgctaaagcgtcttccctcgttgcataacctccccaagggtctttcaccatgttgtttacgtccgtctcagtgtagtaccctccgtgaaaagtcttagactcccccggttttacctgctggccatacctccccagaactggattattcgggttcaccggcggtgcagtccccggcgtccactcatccccaccatagtgtaatatgttcatagcctcattatattctggagagtccgttttaccctccagcactccttttataatcgtctttgttgcctcaacgttcgtttttgccttttctgagaaatcagaagggttcaagtactccccagcctgttttagctttttctctatcttctctccccagtccttgaacatcccgaacagtttatagagagtgtagattatcataatgaacgctaagaagtaaaggattatttgaagaattgacccgatgttatccctgttctttaccatcacgaccgctggaactgtcattcccctcacctcttcctcgtgaagtaatagagaaccccagcgccgaccaaaaggccgagaaccaaaagacccttgttaatacccctctttgtgggttcaacgctggtggccttaatcaccggttcaggctgtggctttggaacactcaccggcttaatcggtggcttttcgggtggcttaggtgctggaacggtcttaatcccggtattcatctcaagctttggctttaactgtccattctcgacaacccagcctttttcattccgcacgacaaggctctttttaaggctctcaagctgtctctgaatatcaccctcgaaaggcgctcccttgaactccttagcctcgaacatctttgtagcaagaacctcaacgtcgtggaattttgggtcgtactttgtagaacctgttagctttttcctcaacttcattataagctccggctgggatttggactcagaaacgagcctctttaattcatcctcagagaggccatacttccttagaacatcgttcacgtccggtggctttatgtccgctttcccgtacttcttgagaaggcgattcctaacctcttcaaactcccgaccatctttaaccgtataaacggctttgtggccgcctccaatatcaaaagttacgacctgaaccattttacccacctcgttaagttctcagagaatagagagaaaagaaagactgatttaagcctctgatttaaaggcttatgacctgcggaactatttcgtgactaatgtacctcagctttccggcgctagtggtcttaagcgcaatcttgaaagttcccgaactctcctcacggaggtcgagtccaccgatgacgacctcacggtcgtaatcaaacatagtcataccggtcgggacgctggaaagcttatactgtaccttgtccagctcacggctggtgttgtagtcaatcttgtaaagctgaatcctagccggcctagtcctaacgagtgcgtacttatctacgatgtcagctctcgctccggtgtcgtcgtagaagaccataagcgcacgcttaaggactgaaccaaccggaagctcaaagacttccgtaagctctccgagctggttaaacgccttctcgatagcgtaaactttcggctcttcgatgaatatctcgccgtaatcacccgccgaatagacggcgacgtattcactcccgctctcataaacctccttatcgagagttatcttaacctctgcatcgctaaggctaacgttagtggctacgctggtgttccactcggccttaatctgaagctggtcttttatgagtgcgtgaatcttcccagcatcgagaaccatgaggaactggacatcctgagtcccaccagccggaacgctaaccgtatcgttgaggctaagcgccttcccgtgagtgtcgtaaatgttcaggtaaccgatgtcagttcccttaagtgcgtagtgaacaacattaccgttgctaacaactcttatttcattaatcgccttaagtacgtcctccatagtaacgttagtgtcagaagctccgctgttggaaagcgtaagctttgtaagaagcgctatgctgtcaataaccccgttgcggggaatatcaacgctcttaaccgtcaggttaagaacgtcatcaagggtttctttcaccttatacacggttcacacctccctgatttcactaccccgccttcagaacttccccttcaggaacttgttgtaaactatcaggccgattataacacccagaacgttcatggcaaagtccacactcattatcttcttccagtcctccatacctaccacctctcgcacttttgaggcctaacggcctcgagggagaataaggctcaatgacttttaagtactgaaccaaaaaaatggagaaatctcccgaaacgggaaaaacagttcgattaaaccgttttctccagcttatagctcctgtgatagaggtgcttgatcaccatgctcaccgacacgtcccgtggagaaacgccaagctctctcgccagcctctcacgaaccctcaacacaatctccctcgcctcttggtcaaggtaaacccccaccggtctcaccacccacttatcgatgtttagacataaaaccctaacgccagccagaccacgacagccaacccataaatgtagccgaccaggaactcgaccacgtcccctagagtagcagccggtttctccgattcactgatctcatacagagtgaacataaccaaaactactaagctccatgccaaaaggaacgccgaagcaaagccaaggagagcatggaacaccgaacgccagtcatcaaacaggtactccctcgccatagcatcacccgtagtgcctcgtcctcctgatgaccaattcgcgcttgatcaccctcaccttatccggcggaacaaactccaccaaatcgtgctttctcaactgatcgttcaactcagaaaaccccggaatcatcctgttgaggtaaatgatgtcattcggaacgtagtgctggaagataaaatgccgctgcgcctgacgaaagaggagctttggaaaatccgctatcgactgagtaatcgccaccgtgtagagcctcccatcacgaccctccctaaacaactgctccaactccttccccggcctcctcgaggacggattatacctatgagcctcctccaccacaataatcctatctcgatcccgcctgaacagctcatccagaagaggcttatagtactgctccacaaggccgtccacgccaatcctgctgatagtccccctcgtagggaccacgaggacctgatcaaaatcaatgagctttttccagttgtacctcgcacccacctttaccttgagcagcttaaccccaggaagggtaaccagaccgatgtggttcttaaccttcgtatccagcacgatgaacctcctacccctctcataagcctgctcaataagccacccagcgaaaaagctcttcccgctccccgtgttcccatagattaaatcaatgctccacggcggaatatccacgtccagaatcgccacgatcccacctccaaaaagagaaatcaagaaccaaggttcttctgaatcttattcaaaagctcgcttttaggaggctcaggctccttcggcttcgccttctccctcaaggcctcggcctcagtcttaaccggcttctcaggctcacccgtcctcttctcacccccagcagccggacccttatcggccttctctttacccttcttcttcaaagcactcctatacatccacgtcaggagaagcaaactcccagcaccgactagaaggccaaacttcccgctcacctggagactctgaccctcgaccttctccatgtaccagaggccagcattgaacgaaggccggccaacgtcccaccacagggaaaagtccacatccaacccctgctccctcgccttcctctcaaggttcttcacgtaaaaattggcaaagatggtaaggctgtgatccttctcctggaactcatcaatcctcgcgttgaactcctcctcagtcattaagcctgaagtcccggcaacctcttcaacctcggcctccccctcattcagtagctcctcaacctcctcgaggtccttatcaacatcctcgacgagagaggtaatgtccttctcgtccaggacgacctcttgagcaacggcttcctcactcatcaccctcacccttaatgaccattttcatatcaggttcaatggcctcctcaaggtcgaggagataccgcttagctttctcaaggtaaagaaccgccaacccaatctgccgtaacgtagcctcagcctgtccaatgacttcaaacacacagtcccctgtctcagaaatcgttacaatcacccgcaaatcactcatcaccaatcaccttaaagctcgcaacaagcctaagcttcctcttcttacccagctcaatcaccagggaattccggtcctccaggtgtttcaccttcgccttgctgaggagagtcatgacggcatcctgaaagtcctcgctctccggcggttcaacgtcagtctcatccaacgcttccaccagggaatcaacccaatcactgagcctcttcactttcacggcagtaacagggtttgccatcgccatggcaagtttcgccttatcaaacaccctcaacccctcctcaggttctcctcaatcttccccagaacaggactcgaccggacgaccggcttgtcctcctcatcctccttagcgtccttcaacgctccaagcctcttcaagtgcctgaacagctcatcgaaccagccaaccttatagagatagtacgcaaaagccaggccaatgccaatagcgtaaaccttccacgacagcttaggcctcggcagagaaaaccgcttcaccctttcacccttcaccttctcccctttcgtatcccccgagttcacctgggggattttgggtgaatcaccctttttcacctggggattcttggtgatttcgggggattcacccattttcaccctatctcccccactttcacccggggattctgagggattcccctcaacatcccccgaaaccaccttagaatcaccctgagaatcccccgatttcaccctttctccctgctcatccccatgtacctgctgaaccttaaagcctccaagaagcttctgcttctcctcttcaggaagcttcagaaagtcctcgtaaagcatgaccctcttagacctgcaaaccgagcactgaggcttcttagccctgctccagaacctatgaccacacctcaaacagatgtagtacttcctctcgccatcacccaccggtctcaccaccagaatcccccaatttcaccgggggattttgagggattcaccctttttcacccggggatcctgggtgaatccccctcaatcacccattttcaccctggtgatttaaacactgaaccagaaaaatggagaaatctcccgaaacgggagatcaccccaccaacttcaatctattagcctcaacctccgcaactctcccatgagtcataagatcccgtaggacctgcaccaccttctcctttggataacccttctccaccatagcatccaccacagtcccccaaggaaccccattcgggaaccaagaagaggcttccctcagaaaaccaatcaccctctcctgaaggtccagcacatcactcggcaccccaacctcgaggatggccaagtcatactgatccgtctcaggatcatacgcaatcatcctgatcgaagactcaaagaggttcaccgctctctcaacatcaacaggctccaccgtctcactcaacctcagcttagcaaaggcctccgcgatcctcataaggccattgaaataacgcagattcagcgcgattttcccgctcttatacttcttccttaactccttgaagccagccttaatggcctccttagcctcctccgagaacctcggcctcaaactcctcgcataaacaaagaacttcctcagcaggtcctcaggtataggtcccgctgctccagcatcgttcacctccatcacgtagtccaggacatcatccccctcctggtaatcgtccaggacgacaaaagccaggtcaaagcgattaagaagcgtcggcggaaagtcaatctgctcaatcaccgtcttatcccggtcaaacttcccaccctttgggttagcagtcgccatgatcgtcgtgtcaatcttgaggaccacgttaatcccagccttattgatcgggataagctgctgctccatggccgtgtgtaaagccttccgctcatcctctttcatcttctccagctcatcaataaggcatactcccccactcgccaggaccagcgcaccgccaacgatcatccagtcccccttactgacctcgttcctcttaaccgtcgccgtaaggccaacgccactcgacccgggaccagaggtaaagatcgccttaggcgcaaccctctccacggcccccaacagctcagtcttaccacacccaggatcaccaacgagcaagaggtgaatatgacccctcggcttcgcctgagtcgggacgccaccaacaatagacacagccgcacccaacttctccctctccaagccgtagagattcggcgcaatcgaagaagccaccacaaaaggcagcttatccccatgcaccctcgccagctccctgaccctcctcaggtcctcctcgctcagctcctcaaccgacatggccttgtccagaacctccacatgattcacctccagaacccgctcatagaccggaagatcatccttcttgtaaacacgctcccgaacaatagcgctcaaccgaacccgcataccacccttcagaatcccagcctgaggaccaatcacgtaagccagcctctccgacggctcaccaccactcaaatcctcaggcgaatcctgcactttgaaaaactggaagtccagcttatcactctcctcctcgagcagttcaacgttcctcgaaccacaggcctcacacctcttcggccttaccagaggcttcaaaggctgctgcagcctcgccatcctcgcgccacagtccaaacacacgaacaccgccttcctgtaaaacgaccggacattactcaccccagtaactagacccttgatctcaaccagcttcccaacatgctccgccctaacatcctcaggcttcagcttatccctaagattcgtgaagtgaaccgaccactcccccctgacctcgaccatcaggtcctcctcaacgaaccgcctcaaggcatcgttgaaggccttgatggcaacaacaggacgctcgacaacggcctccgccagctgaggcaggacagcattaagctccatccagtccacaacaataaaccgatccctcgaacccgtcaaagcctccgcgatcctatccctgtaaaactccctgaagaactcacgagcgagattcaccaagtcctcatgatccttagccttggcctcctccagctccctgagcttagcctcaacctgaagaacattcagaatctcctccactgcctcaggcttcagctcatagtaggtaatgccgagctccttgtccttcacctcgaggacgttggtcttatcacggcgaagaacggataaagctacttttaaggaactgtgagtatatggcttaggtaaatggctgttgtattcttccattatctccttcaactttgttaagctgagtctcccattggtccagagaacataatagggtagggcttcaacagttctttgtagattaaacgctttctggattaggtttagaaactcgattacattccgatacttttcggttacctcagttacattccgatacatctcatttgtaacgccagaattgtctttattttccgaaatctcgcctgtaacgtctgtaacttttgttaacatctcaccctctctctctcactcattctctctccctcccgcatgattttgaaagatttttgcaaagaaaagaaagcatggtcaggacctcttcatctcgtccctgagcaggatcccgaaggagatccctatcatgctcccgagcatgaagccgaagaggaagaacacccagtccataccctatcacctccgaaagggttaagtccgcaaaaaccgaaagggtgtcgggtggtagaatggccgaggataaggttgattttgagatacctgagactcccaaggagtctccaaaggccgttgatagggagttactggagactttgaataaggcgataaaggctgttgagcggcttggggacaggtattttgatgttagggagaaagatattacctcccgaaaggagcttgagctggagaagtaccgatactggagcaggacggttatcactttatcaattcttgcgataactctgattagtggggttctgtaccttggtaatgagaaggttctgagtaacgagggtgtttcgtttcttcttggcactatagctgggtacctgttcagcatccttggcgggcttatcagcggcggggttgtgagggagaagcgagctgaggagtgattcacagttcctctaggcatctctctatcacctttattggagttaggatagtagttttgacggcctttcctgtggcctcaacggctcctggagcatatttctctatcagaatcccgagcaagaggccgaggcctacctttttgatgtcgtccattctctcacctctccatcagcctcttcagaaacctgtgaaccatctcgccgtggttgtagcgttcggccttgtccagtggaaggagaactatcttcctcccgtcggcgagctttctcctcacggcgaggcctctctcgaccttccagacgagccacttcacccgcgtcttgaccacgtagaagacgggaacgccgaggtagttgccgaggtcctcgaggaaggtgtattgaggctcatcaaagatggcgtagccgtcgctctcctggagctggtggcggtttttgacttcgaggagcgctattggcatggcgttcttgaagtcccagatgatcatgtccacgtcgaagacgccgatcctggtgatgccatacttctccttggcctcctggacgaggtctgagaactcttcgtgtgcgctgaatccctgaagctggttgaagatggcgcttatggtctgcctccttactttcctgatctctctgctggtcgtgataaggttcctcctgtcgccgtcgttggtcattcgacatccctcctttccggcctgagcatggtcgtgatttcgtaccggtaatgtagtacgctaccagcctgcgagcggagatactctaaaagtagctcatcagaaccgaggattgtcactccgtcgtactcccagcactttgttatttcgttgaacttgtatctgatgacaacccactccgtcatgctaccaccaccgccgacgggagagcatttttgacaagctcgatggagtcctcggggacgttgaggatgaccgcgatgtcgtcctcgattgtagtgattttctcgacttcaacggggacgatgattctaagctcctcgattctctggagagccttggagaattccgagagctgggaaacatcaaaatagagaacggcgcgggtcatgctctcacccctgtttcttctggaaagttcctgagctgttcaagctctgagaagctgaagcgcctcactccagtctcctcaaccgcgagaatgcttaaatcactctttccagccttactcctcctgacctcgaggttgaggtccctgacgatcttctcgatgtcggcagaggtcggaagatctctcacgtgaaccttctccccacccctgaggagaagatccacctcgatgtgttctccgccgccgtagaggctgttcatgatgacgatctgttgaacttcagagagatctacgagcctgatctcaaactcctccgcgaacctgccgagaaccgccagccagctcattccctcaccctcccgaggtttttgagagagtagctcgaaaaaggaaagctctgtttgacgatgaagcgagccgttctctcggcttcctcccgcgtcttggcttggattattatctcgcggttttctctcccgtgtattctcacaagccatgccttgagaacgggttttctcccgcgcctgctcatggtctcacctcctcgagaatggccgttatcatcctgaccagctctttcacatcttcaatctcttcatcaagcacctccgccttgagggcgtcttcaaacagctccggagggtacatagtgtcattgtagccatacttcccttcctctatagccacgtctgcaacgaattccctggcttccctcagccactcctcaagctcagccttttgcgattgcaagagtttcctgagcttttcctcaaggtcagcagtcatgccctcacctcctcaccagtccccaccgacgtgttttgtgtcgtagaactcgatttcgaggagtccgtgccttatgtcgatgaggacctccaggttgcgctcctttgcgaatgtgaggattctttccaggtcctcccggtacagctttgaggcatgtaccctcagcacgtagctgtcgtcagcaggccagtagttgttgccaacgcagggagtcagacccatatcaccgaggtagcggtgtagatccttcatcaactccagaacctcctcacgcctcatggtctcaccctcctgtagtagttgcgcggcctcttagggtgtgaggcagttttctcccgtttcgggagatttctccagttgttggcggggatgaattccctgtacaggtcggccgggtagaagaggctgtcctcgtccaggacccagtcggcttcgtcgagcttcttcatggcttcctcgaggggaagctccctcaactcaaacaccgagacaacgcgcattggcgacaccttgacatttttgtcaaaaatgtcattaatgtcatcgcaaataaggtttgtggtaaaaatgtcgtcattgtttttgatgtcataatgtcatatatgtcaaaaatacaaaaccgttaggtatttatgtcaaaaatggcaaaatgtcttaggtggtgctcgtggcgaaggtggacaacgtcgagattgttggaagggtcagcgcgaatgggagggttgtaatcccgaaggatatccgggatcttttgaacatagaagatggagactttgtgaggctggtgatcacagaagtcataaaagtgccaaaatctgctaaaacaggatcaaacaacaagaagaagcgatgaggccaaagtcttgaggttgttccggtggagggttaggtttatttttcttttgtgagtgcgtagagtaggccgaggaggaggattatcgcgaggagtgcgttgaagtctttttgttcttcggcgattttcttttctttttcgaggatttgtgcgagttctatggcttcgtctctggttatggttcctgctcggagtttttcggttagttctcttcttctttggacttcttcgagtgttagtttagtcatgatgctcacctcttatgatgcggttttcgaggtttgccaattctttttcgagggttgtgagaattagggtggggaggtcgtctaagcctttttctactttgctcattctttcttttaggtcgaggatgttcttgtttatgttttctattgtcttgttcattttgtcgaattgttcggtgttttcttttattttctcttcgttccttgctgagcgttctccgagctggtaaacccgtatgatcaggaaggagattattatgccgagaactgtgtttgctatttgggagatgtcaatgtttattgtcgtcatttttggcaccgttcattatttggtgcttcttaagaaaaacttttatccaagaattctcaatgaattttggcgaggtgatgaattgtggttggtatagtctcgtattggcaagagaggtggtgggttcttgaacttgtgggaatggtctcattgcctggtgtcatctcgggagcggtgggagcgtctttgtggatgctgactgggaacttctgggtttcagtccttgttgctggtgctctgttgtttttcttgacgcctcccttcgaggaggaggccgtgagattcttaaataagagaacgagagggattgcaagggaaaaggtttctagtgttcaatccagcattcaagatgtggttaggtctgtaaaggaggaaaggcctgagaacgatcctgagcgtagggagttggaagagcttcttcgaaagtttaggcggtatggtcctgaggccttgacttgtaatgaattcatgaggttgaagtatttgttgggaaaataccggccgggggatgaagatgtacttctcttggcgatgtatgctgtgggaatgttagttgggtacaggtgttttgggaaggggtctaagacttgagagttgttctggtggggggttaggtttgcagtaattttttattttcgacagatttttaatgttctttgttgagtttttattggtgggagaagtggggaagaggaagaagcgtgctgttgttcctgctgctgttcatccgagtgttccgggtatggggacgattacggttcagcgtactacgtcggttgagattgttatttctggtcctcggccttctcctgaggaggtggataagttgattaaggagaagactctttctcgtgaggatgctcttgagttctatgagtctttggttgaggatattcgtgagatgtatgggactgccgatcttgaggagcttgagaagatggctatggaaagcgaggatttgtggcttgaggagcatgtttgggatctgaggatgtaccacgcgctcaagggatgagctatggattctgtttttgaggttcattctcggccgttagagtcagatgaggatgtgtcctcttggattcgggggaaggttagggagattgttgctgatgtggagatgtttaagcgtagtggtgttgtgagggattattggattgttagtgctgatggtatgttggatgtgaggggtgtttttcgggatgggactgttttcgctcttcgtgtgagttttatggttgaggatgtaagcttggggaagattgtgttttgtgatgttagtttttcgtgggtttctcctcatgagaagacgcgtagggtgcttaggaatgtgagggatttggggagggagtttaggtctgttaagtttaatcgtgctttttcggagaaggagggtgcttctattttggttcggtgggacaataagccgtatcattctgaggctgggagttggccttttcacaagcattttggtgggaggaaggttcctgcgagtaggtctcaggagcagtcggttggcgggtttttcgagtttgtgaaggttcatttgggtaggtaatggggttgttctggcggtgggtttcacgttcttttcgtcatgtgtcgttcctggtcggaggtcctgctgccgagctgctgcaggaccaggacaaaaagaaggcacgagcgggcttttttggtgttcttttctgtactttacgacgggtgtcgggttaaagttgttcaattcgtaaggcttttaggctaaaaatttataaagtctggtgggtgttttcgtcatggtaaaatcgtctggtgtgtctggacactcctatgctggggagcgggagcaggctggagcgcggaagcggaggaagccgaggcgcctttcaccgcgtctgcacattacgctaccgccagagatatactggaaggccaaggagcgctgggataacgtgagccgcgtggttgcgagcttgcttgaggtggctttgtctgaggatttgacggttgaggaggtcgtgacggcggttacgcttattaggagcggcgctttggtggtgaattcgcctttgggtgcgggggttgccgagcctggtcaaaggcggtggactcaagatccactcccgcaggggttccggggttcaaatccccgcccccgcaccacagaaactttgcagtgcaaagtttcatcaaagagtgaatgtcctttttaaactgctgagtttcagtgattctcaattgccaattggcaattctcaaggggtttgctcacaatataacgcccaaagggcgttaaaaaagaagaaaaccagtatttctttgcttgttcatcaggagaatctacttctcaaccaatttcacaaagacattcaatcttttggtgaagctttttctaaaagcttcagcgctggcggaaaattacgtgcctcccatacaaggttcagattctaaaagggttttttacccgcttgcttctttagtgagtgtttcactgtctaaggcgccttcgggcgccaataataaagttgaaactaattgaagagggatgattttaagataaaacccatcgaaacttgccccttgaatagggcacaactggctttttgctcttcacaaagaaagggaacacttttggtcaagctttttccaaaagcttgttcgcctgcgcgaagtttgatcaaggtttgtggtttcttttagaattgccccactacaaggattttcacaatataagagctaaaagtgagtgaattcttcagacatgccaactgggaaggagtttctaacaccctgacgccctacgggcgtcgattaaaaagcaaactcacaccgagaactcttactaaaatcgaattcgcactcatacagcgagctcctgaatgaaaatctccccagaaccgccttctaatcaagaaccacgaactttgatgaaactttgctttgcaaagtttcagcgccgctttcactgtcgttcaagcgtccttgaaggatggcggaagagtagtatgcgtttttagcgagctgacttttgagtgggtttacttatcgagttgccagacttacaggattttctcaccgtatagcgctcgaagagcgctaaaaagaaagttcgaaatcacaattaacgagagatttttaagagcaaacccacacgcgaacctgctttctaggggagcatacgcttacaagagaggcaaattcaaagagaaagataaaactaaaacgaaaagctcagtagtctatctctcccctctccttcagctctctgtacatcctccaggtgatcacgggcttctttgcagccaaaacgtcatcaactctcctgacggcggtgttgtggggtgcgctcgtgacaacttccggattgctgtatgcctcctcgctgatcctcttgagagcctcaacgtatgcatcaagctcctccttgctgacggtctcagtcggctctatcataagcgcttcatggactatcagcgggaagtagatggtcggcgcgtgcatgcagaagtcgagtagcctcttcgcaacgtcaagggccttaacgcccgtctccttcttcatcggctctgctgaaaagacagtctcgtgctttctaagctctttgcctgggagttcgtaaccgcgagttcccttgagcttctgggtaaggtagttggcgttgagaacggcgacttcactgacctctttgagcccctcccttcccattatcttgaggtaggtcagggccctaacaataaccgcaaagttgccgtagagctcctttaccttgcctatgctcctcggaacgttgtagtcgaggtagtagcggtcgttctctgcatcgtagcttacgagcgggacggggaggtagtccttgaggaagtccttcactccaacgggcccgcttcccgggccgccgccaccgtggggagtcgagaaggttttgtgaaggttgaggtgaacgacgtcgaagcccatgtcccccggccttatctttccgaggacggcgttaaggttggcaccgtcgtagtagagcagaccacctgctttgtggactatcttcgctatctcaagtatctcgtcctcgaagatgcccaatgtgttcgggttcgttagcattaaccctgccgtcctctcgctgacggcgttctcaagggcctcaaggtcaaccgttccgttctcgtttgagggtatctctatgaccttgaagccggccatggctgcgcttgcagggttcgttccgtgggcggaatcaggaacgagcatctccgtcctctgggtctcaccgcggtcaatgtgataggcgcggattatggaaactccagtgaactcgccgttcgctccggcagccggctggagggtgaagcggtccattccagttatttccttaagccactgctcaagctcccacattatcttgagcgctccctggacggttccttcgtcctgatacgggtgcacataggcaacacctggatgggaggctatctcttcattgatcttggggttgtacttcatggtgcacgaaccgagcgggtagatacctgaatcaacgccgtagttcatctcgctcagtctggtgtagtgtttaacaacctcgggctcgctcagctccgggaggttgagtgggctcttcctcctcagcttctcaggaatatcgacatcaacgtcctcgatgggcttgggtagggtgtatccaatccttccgggacgggaaagctcaaatatagtaggttcatcccattttgcctggtggaacatcttcatcacctcacagctcggcctctcctattatctcccgaagggcatcaacgagaccatcgacccattccttcctcgtggtttcggtagcggcgaagagagcggtctccccaagctcctggaagtgttttccgatgtagtaaccgccgtgaatgttcctctcaaggagcctctcgtggatcacgctgtacggaacctcaaaccttaccggcacgtccttgaagttcactccgtcaaagactatctccccgacctcagccaggcgcttcttcaggtaggcagtgttcttgagtatgacctcgccgagctccctaacgcccttcgggccaagtgtagcgaggtgtatggccgctgcgacggcaacgagggcctcgttggaacagatattggaggtggccttagcgcgccttatgtgctgctccctcgtctggagggtcatcacgaaagccctctttccgtccgcgtcctttgtcatgcctattatccttcctggcatctgcctaatcagcttcctgtcgtttctgaccgcaaaaattccagccctcgggcctccgaagttcatcgggttgccgaagtaagcagcctcgccaacgactatatcagccccaagctctccaggtgcctcgacaattccgaggatcgtggggtcaacgccaaccacgaacaaagcgccagcatcgtgggctatctcaccgatttcccttatgttctcctcaagcaggccgaagaagttcggcatctcgatgtaaacgccggcggcaccttcaaccgcttccttgagcttctcgatatccatctgccccctctcgtcccagggaacctcaaccgtctcaaggcccgggccggcggtgtaggtcttgaggacaagcttcttctcggggctgaggtgcttcggaacgacgaacttgttcctcttcgtcacgcgggctgacatcagggcggcttcagccattgctgttccccaatcgtacatcgaggagttaacaatgggaaggccgacgagttcagctatgaggctctggtactcaaagagggcctgaagcataccctggcttatctccggctggtagggagtataagcggtgaggaactcgcttctctcgataaggtacttcacgtgggccgggacatagtggaagtatgttcccgctccaaggaagctcggcatctcaaggactgtcttgtttttgctcagcgtctcattgagctccgtgaaaacctcgtactcgctcttaccctcgggaaggttgaactcctttaccattccttttggaacgtccgagaacaggtcttcaatcgaggaaaagccgatttccttcagcatttcatctttatgggctgagttcgggatgtagtgtttgcccatacttatcaccttctaagcttttaaatgctcattgaaagttggtgcaggataatatatgctttgtggcatgatggactgaattagggatatggacaaaaagcgacatcaacattaccctatccacaccaaaatagtttcaaaaaagttaaatcaaaatcgaaagatcacccgctgacaccaacgtcctcgaagaacttctccatgagaccagcgacggccctgatgtcgtactgcatggtctcgtaaaccgcccactgaaccttgctgtactcccttccgtcgagggtcttgaagccgctcggagcgttgacgtcgaagttggcatggagttcgatgttcctgatggcccagccgtcaacgtcgtcgtcaagccagtcgtccttatcaacgtgggtgtagatatagacggtatcccctggaacggtgacgctcgtatccaccagcgggtttggatcctgagcgtagcgcgctatgaggttccagttcttgtcgtatatctcgacgtagccgagggtcttgaagtaggcgttctgcatgtctatgtccttgaagacaatggttatcgaactcgctccaaggaactggagcttgagtatgctccaatcacccttcttaagctccttcgtccagaagtagcttccgagatggccgcgctcgctccagagattgatgtccttccctgtggaatagagcatgtagcgccaggcgttgtgggctatcatgtccgcgtaggcccaggcgacgccgtgggaaagatccatatgaccgttctcgttgtctgcaacgtagatgtcctcaccgattataaacctctgcttctcctggggtatctgccaccactttatgggcgtgaggtcgaggggaacgcggttgttaaggatgtcatcggcgaccgtcggagaaatatcgttttcaacgaagtcgtgggcctcttccgcgtagctgaactcgtcgagggtctcaaagaggtgcggagtagtatgggctatgagcatgctcatgtcctcaaggatgtggacggcccttccgaggtagagcatggcctcttccttctttccctgcttccagagctgaacggcctgatcgtagagctgctgggccatgtcggcggcggaagactttccgtcgccaaagaggtcaacggttatcagctcggcgtgatccataggatccaagaagtggtactggctctggagggtgtacactttcccgttgaacgttatgttcccaccgcgccagtcctcgtcgtaggcgccgtagaggagctgatccttgtactgcatgaggatagcgccgagccccgggttgtctgcatagaccgcctcgatggccttgtatgtcagcttctggtggacgttcatcgggtcgtcgagggttgggccgttggtcggccacgcacttacaaagcctagattaccgaggagtaaagccagaaccgccagggctttaacggccttcattttatcacctcgagattttatgcatggcggatacaggagataggcctaaaaaattaacggcgctcgaaatacttttaaaagtggctggcccttccaagatgttatgaacaggaagagggtcaccgtgatcgcgatagttagtcttatcctaacaatagcccatctttccttgggatgcctgggaacttccaaaaacaaccctcatccccagactgaacaagtacagtggatagctgatggcaaaataagcagaggcgaatacacagtagaaaagaacgttggtgaaatgtcccttcacttccgcgttgagaacgacacactctacgtcggaatttccgcggaaacccatggctgggtggcaattggtttcggcggcggacctggaatgaggaacacagacatagtgatagcatatgttctccccaacgggactggtgaaataagcgactcgtactcgacgggcttctctggaccgcataatcccgacacgttccttgggggacacaccgacatactatcttacggcggacgcgaggacgagaacggaaccgttgttgagttctcaagaccgttgaatactggtgacgggtatgactacgttatacccacagaagagtctttcaggatcatctgggcctacgggccgacagacgactttcaatcgatgcacataaaagcaggtcacatttacgtaacgctggaggaggatgggaaatgataatcgccttcgacttcgacgggactcttgccgatacttattcatgcatcgaagatgcttttaagcgtgctctagaaaagcgctaccgctggctccccggaaaagccctctgggcgaagctgctcaccaaaatagagtttcagttcgagaggccaacctttggaaagcacaagggcaaaattaagtccccattcttcatgagaacgaagttctttgagacctggtttgaggaaagggccaagcttagcaagccgattgacgacgcaccggaactcctgaagaagcttaaggagcagggtcacactgtaatttccttctcggccgaagacttcattgacggaatgaaggtcaaaaggctgaaggcgatggggatatacgacctctttgatgacgtcattgtattcggaagggatttgacgatagaggaggcattcaagctggtgcgcgagaagtatggcgacgatatctttatctgggttgacgacaagccgtggcgcttcatagggcacggcgatgagaacacggaatacgtctggtactacttccccattacggcgaagttcgtggagaagaagcgagagatgctggctctaataccccacctccacgtgataagggatctgtggagtctgttcgatgtaatcaaaaacgtcgagaggcagaggagaagtgccaaagaaaaagcataaagtattttattctctttttcctacttattcctaggagatgcccatgaccaatcctctaaaaaacagggtattgatcctcctgctggtgctgttcgtggtgattacagtactatcaacaaccccctggatgaacaagatatcagagagcataagatcagcggaaccaaatgtaacagccgtttacattggaaccacagcccccaacggaacgtggcagttcaaagtagaggatagggtactgactgactgtgtagtggcttacgtttacaactacaccccccctgggaagcttgttgtttatgagctggattctaaagcactcaaagtaattaacccctccgaagaaataccttcgtccgagtgcaagggagagctgatatatggatacctcactgcgaacttcacgaaacttcctgaaacgttaaccatagacgtttgggtcggaacaacctcaacaaacgatgggtacatatacttccgccagattggcgactggatgttcataaacggctcatacgttggatataaagctccctccctaagcaacaactacatgctgatgcccatcaaagaactgggaaaaataacgaactcgaccgggattcacgtggtcaatcgccgctgaggtactccagagtgtcttcaacaaactcgtcataatcttctttttcagtttcctcaagtctcagacgaaactccttacccagcgaccatcttatagcaacgtcccccttgtttgtctcagcaatgataagtccaaacggggcgtcacccatccagtgatgctttgaaaaacccacttcaaacccccgccttctcagttcctcaagtatcgtctcataagtttttgaaggattgtaaggacttcgagcgaacccaatgtaggccatctttactcacccctgtgaaatactggtcagaagttaaaaccttttcggttcccctaacaaaacttaaaagccaaagcacaaactttctaccatgaaaccaaaacctctaccagagaaagcactaaaactgggaaagaacgttatcatagccgacgttcacctcggctacgaaatagcgatggccaaagaggggttctatctccccagggtctttcacgacgttgttaggaatttgaaaaacatcatacaaagggaaaagccgaaggggctgataataaacggggacttcaagcactcatttgttcctgagtggcgggaaaaaacagagctcagaacttttctcgaagaggtgtctcccctggtatcagagatagtcttagtgaggggcaaccacgacgttggcgttctttggctgaaggaacttggggttgagattgtggatgaacttgaaattggaagatggaagctcgttcatgggcacaaactcgtggagggtgagaacttcataatcgggcacgaacaccccgcaataagactgagggacgaggttggggccgttatcaaagtgcctgcgtttctaatggggaaacatctgatagtcctgccagcgttcagcccttgggcctacggcaacgatgttttgagggagatcgtgtccccttttttgaagtacagacgagaggactttagagttttagtacctgtgggcagggaggttctcgactttggaactctatcaaaacttcaggaagccctaaaaaggctgtagcaaaaggtttaaacatcgaagggcagaataaaatggaggtcgcgaagatgagtctcataacgtatatcgcgttcttcgcctacgccccgacactcgccatactatggtacttttaccacaaggacaaatatgagccagagccaaagagatacgtagtggcaacgttcctactcggagccactctgtcagtcggaatctcatatattcttgaaagcgtgctcactataggggggataataaagccgatcctacctgcaacggccttttacgttgcgctagtggcggggattgtagaagagcccgcaaaggcactcgcaataaggtaccccttcgcggcgggccagatagacggcattatggacgggcttgtctacggtgtcgcggcaggccttgggttcgccgccactgagaacttcctctacggactcggctggggagtgggagtcacaatagcgagggctttcttaacaccatttgctcacgccacgtggagtgccatagtaggcgtggggtacgggctggtgtccgagggaaaagcgtattcaacgggaagctttctgatcctggcaatgttcctgcacgcgatctgggactatttcgcgttcctcagcgctggaatccctgcctacaatctagtacttatattccttatcctgctcaacgctgcaatactgcgctacttcctcatgctagccgagatggaggagagaagcaaactctggtactacctgttcaggaggggtatgcggtgaaggggaaggaagtcctagatgaagcactcttcgaggcgaggccttacgtcgagtactgggatcggcttaaagagctagttgaaaaactgtgggaagaggccactgatgaaaagaacttcatcgagcttctcaatgaggaaatggagagggcaaaggagccgttcaagactgacctcaaaatattccttcagaaatttacggcgttgataagcggatgaacggaggtgagcccaaatgaagggctcacgagcggttctaggggctctcataattggattagttgtccttgggggctacctctacacccagagggccagtgaccactcgcctcaagtagacaccagtagagcacagattttagcctatctcggcggtttggactgctattcctatcatgaaaacatcaccacaatcatcggggacgaaaccattgagtcctcaataaatgggagcaggataaacgggacgtactactttgagggccagcgctccggactgcactggtacgccgttgtcatcaacaacacgctgaaggagcgtatcatgacaaacgggaccacgaaggacgttaacatcactctctcaaaggacgaaagggccatgttcttatcggttgatccagttaaaatgggtcttcaggccgtcggggtgggaaaacttgtggaaaagaataaggacaaaattacatacgcctttgagataactctgtcaccgagcacagacttcaaaatgaacggcactgttaccgtcctctgggatggtggaagggtcaccaaacttatattcaacgtggaagtgtggacacagggaagacagagtgaaaatagaacaattatcgcagcaataaaagagaactgtgtacagcccaaatggctcaaagaactatccccatagtttcttctggattgtcaaagaccattacattatctcaccttttcccaatctagtgttttcgcatgtttaaatatcaaactaattgcaataactcagtattccaaaaagtatttaaactcatattcaaggtttattatgaaacaacatacggaggtaataatatgagaaaaatcctaacaacattcctcctagctataatagtagttatgagcggctgtattggagaaaatgctggactcaccaaggagaaggttctaacggctatccagaacatagagactgcccgctacaatgaaagcttctccatgagcatgaacatatttgatccgaacaccaacaagacggtcaacgtgacgatgtcaggcagcatagccggagtcttcaacaagagcgcgggcattgaagcaggcaatatgaacttaacaacccgcatgatggggatggacataaatatgaactggccgtatttcaccaacggctccgacgtatactttaatatcgacggcaaatggtacttcgtcccatccaacaatgacctccacaacagagccagagcctctctaaatgtggactatatagagaagctcctcagggagaaaaacgtgactttcaaaaaactaggcgatgtctacgccttccgcgttaacgtaactttctgggagttcgtcaacgctactaaccagaccacatacctcaacgaggcgtggggcccgctctccgacaacataacggtcaacacgaacgctggctgggtcgaggtccacttcagagacgacgggactccaacgtttattgagacctacatagacttaacaataataatccctgatgaattcctgcaagaacccgtaaccatccacgagacaatccacgattcaacggtcttttcagacataaacaagcccaccaacataacaattccagagggaatagaaagcgcaggagactttgaggaagtatttgggtgaggggctaagcgcccctcgtggccactatttttatcccttcccactccgcaaccacttggccaacgctcaccggtgccttgagcttaagttttgccaggaacttcatcagctctggtatcttttcctttggaacgggctccgctgttttaacgctcaccgtcgggagggcaccgccctcaactgggacaacgctcatgacgaccctttttggactggtaacttcctgaattgcccactccattcccctagggcatttacaaccctttacttccttgaccttaccgttttcgacgtcaacttcaatggagcatccgagggggcagacaatgcacgtgaagcggtatatcatgctctcaccacctcaactgtgagcctttcgctggctttctgaatctcctctgccctcagcttcagccgtatcatctcggcgggtttaacaaccgggagtctgagcttctttccaatctcgggaatccttagctcaacgttctccatcggcctggcgacgcggaggtagagataaacgtcgcggtcgccgccgaggtagtgcggagcaatcaggcggacgttctggcccttctcaactttcacccacttcctgctctctattccgccattctctatgaactccttggcactcttagccgctaactctccctgctcggccacgtagtcaacgaggtcgtttatgaggagagagtttccggcaacgaagattccaggaacgctggtttcaagacggtcattcacgaccggacccccagtggcagggtctatctcgacgcctatcttcttgagcttcttgacgctcggaattaatccagcggagataaccagcgtatcgacctcgatccagaactcgcttccaggaatctcgttgaagttctcgtcaaccttgactaccctaaccctctgaacccttccctttccgcggacttcaacgaccttgtggctcaaatagaggggaatgttgaaatcgcgaagtatcatgacgttcctcgcaagaccgccaggatagggcatgagctcaacgaccgccttcacctttgcaccctcaagggcgaacctgcgcgccattattaaccccacatctccagagccgacgatgacgacctctttgcccgggaggacgccgtaaatgtccatgagggtttgggcctctcctgccgtatagattccagcgacacggtctcctacgatgccgatctcaaaggcgtgcctctctcttgctccggccgcgtagatgatggccttcgcccagacctgataaactccggcgggcgaggtgaatatcaccaccttctcaaggtcggagtagttctttatctccagcaccctcgcggctgtcctgtactcaacgccgagctccaccaggcgcttagcgagcctcgacgcgaactccgggcctgtaagctcctccttaaagtagtggagaccaaagcctgggtgtatgcactgcgggaggattccgcctaaataatcgttctcatcgaggaggagtacgttgagcccaagctccttggcctttgccgcggccgccattccagccgggccaccgccgatgacaacgacgtcgtaggagagcatcggtatctgcggcatcggctccatcatgcttcctcccccctgagaagggccttaacgtcgcctattccaatctcgcttccccttcccttgagggttacctcccagggctcgacgccgtattccctggccaaaagctggacaatcttgggcctgcagaagcttccctggcaggttcccgttgttgccttcgtcctgaactttacggaatcaacgctcggggtcttaactcctatgaacttcatcctctcaatggcctcaaggatatcgccctcgctcacgtggttgcacctgcacactatctttccgtaagaggggttcttctttatcagctcgttcgccttctctggcgggagcatgaagaagtgggttatatccttcctgtacgggttccacttttccttctccacgagattaattcctagatcgcgctggattatgtccctgacctcgtaggctatggctggagcgctagttaaacccggagagcgtattcccgcgacgtttatgaagccccatacctcttcctcagccttgattatgaagtccccgccggtgggttcaggcctcagcccggcgaaagtccttatcaccttgctcttcggcgggaggttcggccagagctttttagcaccctcccagacctcccttagcccctcctccgtagtggcgaggttgtccttctcctcgggcggaaggtcctgggcgttcggccctatcatgaggtggccgcttatttccgttgtaacaacgatacccttgcttatcggcgtcggcgtcgggaagagaaccctcctcgggccgggaacatcgtcgtcaaagaggtagtattcacccttcctcgggtgtatctcgaagtagtctattccggccattctagcaatctcatcggcgtagaggcctgcggcgtttataacgatgtccgcctcgatgaagccgttgttggtctcgacgcccttaacctcgccgttctcaaccttatgcccctaacttccgtctcaaggtgggttttgacgccgttagccacggcgttctcaaccagggctataaccgctggaatcgggccgatctggccaactatcggaacccatagagcacctatcgcctccctcgtgaggcccggctcaaggtggaagagctcatccctatcaacgatcctcatttcggggacgccgtttctccgcccgcgctccagaagcttctccagctcgtcgaagtcctcttccttcgtggcgactatcagagcgccgttccacacatgaggaatttgaagctccttaacccactggtgccagaggcggtttcccctgatgcagagctttgccctcatcggatacttctcagggtcatcatcgtagccgccgtggatgagggcagtgttggctttactgacgccccagccaacgtcgggagctttctctattagatgaacttccagattctcatatttgctcaagacgcgcgctatactcgcaccgcttatcccagcaccgatgatggcaaccttggtcttcatgtccacacctccaaactaaaaggaagaactgattctccagttttaaagctttctttaacctttagtttggcttaacggagattaaagaacgattttgggcacaaaaagggagaacagaggagaacatgcctcaaatgtatgaacatgtccatgccctatttagtattcctctgcttcattctccatttctgtatctttaaccattattagtagggtgtttatcccaacggatccctctggatgctcaggatccttagggaattcaggcccagatggattatcaaatggattcaaaccaatgaagtattcatcagtattgtcaaatctattgaactgagaaactaagtagcttaagtacatccctctttgtagcttgttcttcttttttagccctcccaatgttgaaactctatgggcagtatcacttagaagatcatggatgatatgattccatccacactgacgggagctagaaagactaagatttgtggaaaacgcccacccgtcataacctatcatcattccataaatagaacatccaaatggataattatggcaacaacaccatgggaaataacagatccatggggggcaatagtatgacttgtcactgtctaaaaattcaagtcttgttgtttcacattccggataaattctgaggtattttaaaccccgtgatctaggtcttctccaagggaatctacgagaataagtttgggggttttggtttccttgtgttctgtgtccacagttttgtgtagtaatactgcaggagttatttttaatattacattcgtccggtctagaaaacctaaatctaacattctcttcgtataatacatattgggcatcctccactgggttattaccaatcttggcttgagacagaaacgccctgtttattagaggaaggttgttctgatcaacaaacgtgaatataacgaggagatcacctatttcgcatctctttttggatagcccacggacacgagggtgattgggatccaattctactatgggactttgatggacaaagattcccccaaactttagttgaaaaccctctttatcaagtttgtttccaggtttagaattagggagaacattgtttagatattcgagaccatatcttagatatgctcctacataagttggttcactagggcgaggatgatttcttacatgtgaaaatgcgtaccgccagctgttttctgaaaatataagaatttctccccagtgcttttttattattcttctaaatttttgatacctggattgaatagtgtattttcccattaccatcaccagaaaaactttgttgagaaatagttttaaatattttgttataaacatcataacaagagatactaaaaatgaggatagtcgaaattgaggttaataatttcaggtcactaagagctgtaaaaatgcccctcgatgaacttacagtgttgatcgggagaaatggagctggaaaatcatcgctattgcaggcattagatttgttttttaacccaaatgccaagtattccgaggaagacttctataacagagatacgagcaaacccatacgaattgccattaaatttagacttgagaacgataaagaacgtgaggaatttcaaaaatatgtgataaatgaagacaatgatcatgactatataaaagtcgtgaagattatgaaatttccagcatcaaaatccaaccagtcttaccatggagttgtcaagagtattccccagttttcaaacttaccttcgaggaaagaggacttaatagaaagatacaaagggctacagaaagaatttcccgatttaccccatttagggagtaagcctactaagaaaaagattcttgaagcacttgaagagtacaaaaactcgcatcctgagaaatgggaagaaacactgcaagaagaccagttttttggatataaagaagtcggtcatggaaagattgacaagtttataaagttcttattagtgcccgcagttaaaagtgtctctgaagagactgaatacaaaaaggggagtattattacagaacttacccaattgataatagaagaacatataaggtcaattcctgagtttaatcgtctagaaaagaggtataaacacttacttaaaagtctagaggcacacagaaaaacaggaaaggataagctattctctgaacttagcaacgagctaacacaaatcctagaaaaatttgcaccaaatacacaagccaacatcagttggggtaatctagatgatttcaagatcccactaccagtcccaactgtgttagttacagaagacggtttcgaaacgagtgccgaacgagttggtcatggtacgcaaagggctcttttgttctctttattgcagtatatgactgcaaaaagacatgaactcaataaaatgaaaaatgtgggtagagattcagatgaaaaagatcagaaattaactctacttttggttattgaagaactagagttatatcaacaccctcagcgtcaaaagcatctgcacaaattattcaaggatcttgctgggaatacttttggtggatttaatatacaggtaatgtactccactcattctccttttttaattagtactgacacatttgatagcctgagagtattcaagaaaattaaaacccaaaaatcacgtaaactaagagagaccaaaatttattggtatccacaacaggaacttcagaaagacctaaaacgctacgggatagactccccatcaaaacacgttaaaaaattcacgactacagtaaatcctgtgatgagtgaaggattcttcgcggataaagtagtattagttgagggagaaagtgacagagccgctctagaggtcgttgctgaacataacggtgttgacctcaatggcaacaatatttcaataatccccgtaggcgggaaggggaacatacttacggcatatttaatgtttaatggatttaatattccaacgtaccctatatgggatctagacctgtatcccgatgaaatgaacaaaaaattgtttagtgcagtacagtacaaaactaaaaggacacctacttcccctattgtgaggaagaatttcgcagtctttaacaaaaatttagaagacgtaataaaaaacgacttaggtgagaaaaattggggggtgttgtttagtaaactaaaacgagaaaatcttgtcattagtggaaaggatttaaagaattatacccccatgagacgattcattgaactatggtattatccaccaaatgacatcaaagacaggttatcccgcgatgcctctcttaaaatactggaaagaatagttgaaaagatatcacgattgtagggtatatcaatttgattttgcactatcaacgacctttgcccaccccatagccctctttactgcttctttccagcctttgtagagtctctccctagttttctcatccatcttcggctcgaaaattctttcagccttccacagctcggctatttctctcgtgtccgcccaataatcaacggcaagccccgcgaggtaagcggcgccaagagccgttgtctccttcacgacgggccttatcacctttctgttcaagatgtccgcctggaactgcatgagaaagtcgtttgcggtggcgccaccatcgacgcggagctccttgatctggacgagcttttccatctcgtcaacaacatccctggtaaggtatgctatcgcctcaagcgtcgccctcgcgagatgctccctgcccgtgccgcgcgttatgccgattataatgcccctggcaaactgatcccagtagggagcccctagaccaacgaaggcgggaacgaaataaacgccttcgttgctctcaagctttgtggcgagttcctctgtctcagaggcatgctttatgatttttattccgtctctgagccactggactgccgctccagttacgaaaatgctcccctcgagggcgtagctgacccttccatttaggccccatgctatcgtcgtgagcaggttgtccgaatagagcaccatcttgtccgtgttcacgaggataaagctccccgtaccataggtggccttcaccattcccgcctcgaacgccgcctgtccgaagagggccgcctgctggtcacctgcatcgccgcttacgggaatctcagccccgagaagctccttctttgtgtagccgtaaacttcactagactccctgacctcaggtaaaacgctctcaggaatgtcgaagagctcaaggagctcatcgtcccagtcgagcttcttaatgttgaagagcatcgtccttgaggcattggaatagtccgtaacgtgctctcctgtaaggcggtagatgaggaaggtatcgaccgttccgaacatcacctcgcctttctcggccttctcccttaaacctggaacgttgtcaaggagccacttgagcttcgaggcagaaaagtaggcatcggggacgaggccggtcttctcctttatcatcgtcccgtactcacgctttatctcctcaaccatttcagccgttcttctgcactgccagactattgcgttgtagagcggcttaccatctttgtcccatacaagcgtcgtctcgcgctggttggtaactcctatcgccgctatctgattcggctctattctagcgctctggatggcatcttttatcgccctgagctgggcgtcccatatctcctcgggattgtgctcgacccatcccggccttggatagtgctgggggaactcatactggcctattccgtggatgttgctctccctgtcgaagattattgccctggcggaagttgtaccctcgtcaagagaaagaacgaacttttccatctgcaatcacctaagaaaaattagaggaaagagaacttattagacttgctcatctcagcccgagctttttaaggtactctatcatcctcaccacgtcgttcgctataaccacttcaaagagccccttgagcttggcgaggttatcgtccttgtagaagagaacgtcgttttcagtccacagaacaaccttcaggcccagggagcggacccagtgaagggcctggagggtcttttcaagccctatgagcggtatcgcctccatggggacgttcaccgaccagaggttgagctcatccttgagcttcgggattaaaggcaccacttcctcacggtctatgaggaggcccatcgtggtctcatcgtcgtactttctgtactcgcggagggcatctatatcaaaggaggatatcattacccgttcagggttgttctctgctacgatttcagcaacttcgcgggcggcgtctctgtccttcagctcaacgttcacaagtgcattccttggaatggcctcaaagacctcttcaagcgtcgggatcctctcaccctgcccaacgtccgccttcttgagctcttcgagggtcatgtccttctgcctgcccttcatgttgctcgtcctgtctatggtctcgtcgtgcatcaccactacgcgcccgtcctttgtaagccagacgtccagctctatgccgtctgcacctgcctcaaccgccttcctgaaggcaaggagagtgttttcagggtagttgctcatgtaccccctgtgtccgaggacgataaccctatcacgctcccacataacaaccgcctcgcgttcaatacgcaccgttcataaaagcttttctcaggcgggcggggtcgtcggaaattactgcatcaacaaatggcagaagtcttggaacccacctcacctcgtccatcctgtagttccagaggaatatcttgagcccccttttccgggcagcccggagaattgcagttaggttcctgaagccaatgtatgaaactgcatctattggaacgtgaacggagtagagcccctttaaagttggaaggaggagggcgtttgaatatccgattattgagaagcccaccctgcagtccggacactcagaaatcagtttccttacgatatcaggattatctgcagaaaacaccgaagatgcaaaaagagagttcttctcaaccaggttcaaaagcggttccacggcttcaggctctttgacatcgaaatcgaaaaatcctgaaacactcctgatcacttcctcaacactgggaacgagctttccaagagggtgaaggcgctttatttcagcaaaggttaattcagagacgcaataatactccccatcgctccagaagccctcatcatggtggactataatcttaccatccccagtaaccctgacgtccatctcaacaccgtcagcccatctgagggcccttttgaaggctggaatggtgttctcaatcttccccctgcaacccctgtgtcccaacgtgagcactctcatcctgcccgattatgttcaaaaaacccttaaaaatgcttcttccatagatttggagactataaacgacaataaaacaaggggtgatggaagtggcggagttcaaatacagcaggattttcctgctcggcttcggtttcttcggtataagcataatatgggctctttacaacgcatacataccgctatttctccaagacacgttccacatgaacaggacgataactggattcataatgacgatagacaacctctttgcagtcctgcttctgcccttcctgggcgcgctcagcgacatgacgaggacaaggctcggaaggagaaagccgtacatcctgctcggcgcaccttcagccgcgctgatgttcgcgctcattcccgtggcgagggaacatggcaaccttgctcttttcatgggcacaataatcttcatgaacttcttcatggcgctcttccgctcaccggtcgttgcgttcatgcccgatataacccccagcgaaaagaggagccaggctaatggtataatcaacttcatgggcggcctcggagcccttttagcatacttcggcggcaaagtgctctacgacatgagctacgcctacccgttctacgcgggcgcccttattatgctccttgcaaatctgctggttgtgctctttgttcctgagcccgaggaataccgcgttccgggtaaaaagataaacttgagagaactcctctcagagacctcacgcaaaagcttcggcgagctcaaggagaacctcaaggacgtcttcgccagccacgagaggagccttcttgcaatactcctggcgatattcttctggtttatagcttttaactcccttgagacgttcttcacaagctacgtcaagtaccacctctatggaattcccgttggagcggctgaaacggagataacgaggaaaatagaaagcacgggtgccttcatgcttggaatgttcagcctcagcttcatgatctttgcaatacccgcaggattccttggagcgagaataggaaggaggaaaacgataaccctcggtctcctaacgataatcgcgataatccttgcggcgttcttcatcggcgaaacatcaaagccacaggaagttgcactcacagaccccgttatcatgaagttcatgggcctgttcttcgtcgggggaataggctgggccatgattaacgtcaactcgctaccaatggtcgttgacatgaccgtggacgagaaagtcggcggctacacaggactctactacttcttcagccaggcggccaacctggtggcaccgcctttcgcaggtgcactgcttgatctgataggctacgaaaccctcctgccgtttgcaatggcgttcttcctgctggcactgatagcgatgcagttcgtcaggaggggtgatgtcaagggtggcgccgaggacgtttacgagtacgtccccgatatggactgaagcttcctttccttctttgctgtttttgtctttggaaatccaaaagtgtaaaaagtcacgacaaccagaattttgtttagtctggatacatccagcgaaacaatgggaaaattagggggtgttaacatggaatccgaatcgaaccagggtgttgtgaggaagggcttcagctggggtcttgtccttggtctcgccctgctcggtttcagcaggagcgttggatgggctctaaacaaggggctgtccttcccgctgttgtcgagctatacccagtcggcgtttgttaaaggtacgatactggccctcgagggattgatcggaatacttgtcccaccgctcctcggctattacagcgataccctgaagtcgaagcacgggaggagaagacctttcattatgattggaggccttctggcgggcatagcagctataatgatatacaccgcctacgccatgagtgttccgctgatcggcttcgccctgacgctggcgttcttctatctctcaatgcatctctacacggcccagttcagggcccttatgcccgatacagttgagagcggaaagcgtggaactgcgagcggcgttataaccttgctggagtgggccggtaacctcttcctcttcggactggccggctacctaatcgctaaggccgtggacatgactggggagagtgagggaataaaggcactcacccagacgccttacctcaagatacccttcctcgtcacggcgttcttccttattggtgcagcagtctttgtctacctcattgtcagagaacccgaggcacccgacatcgaggagaacgagagccttggagagtacctctggagcatcgtcaggaacagggacttcctcaagttctacgcggctcagactctctggtggatgagctttgagttcatcgcggttttcctctacggaatcctcgcgttcatactctacggttcagcaacggaggagaacatcaaggcggtaacatccctcggcctttacctgatggcgctcttcaacgtcgccgttcttctcggtgccctgccaggaggaatcatctacgacaagctcggcagaaggctgagcatagtccttggaggcctgatctttgcaattccacagatatggggatggttcataacgaccaaggcccagataacgatagccttaggaatagcgggcataggctggggaatcctcatggcggcatcgtacccagtaatcggcgaccttctgaccaagttcgagagggaagcgttcacgggcagatactacggcttcttcgaagccacccgctccctcccggtgctcctcgcaggaacgatcggtggggcaatcgttgacctcgcgggcgagaactacagggtgcttttcccgataggtgccctcctcgtactcctcgcgctaccgatggtgtggatgatgaagaaccttgacgtcgagggagggaaggagtaatgggattgctcctttccatttttgtccttgcagtcattgtttttctcgcgtttgtggccttcgtcggctacaagatggtcaaacccccgaggctggttgaggactggacgccaaaggacttgggctttgactacgaagacgtcgagttcacaacggaagacggcgttaaactcagcggctggtgggttgacaacgggagcaataagactgtaattccgctccacggctacactgcgagcaggtggtactccctttacatgaagccgaccgtcgagttcctcctaaaggagggctacaacgtcctcgtctttgacttccgcgcccacggaaagagcggagggaattacacaacggttggcgacaaagagctcttggacgttaaggccgccgtggagtggctgaaaaagacccacccggagagggcaggcaagattggactcatcggcttctcaatgggggctatggtcaccataaggtcgctcgcagagattgaagacgtctgctgcggcgtcgccgacagtccgccaatgtatctggacaaaaccggggcaaggggtctgaagtacttcgctaaccttccagagtggctctacgtctttgtcaagccatttacgaagctcttcagcggcggaaaggagatacatcccatcgagtacgcggacagggtcaagaaaccacttctcataatagccggggaaaaagacccgctcgttaaggtggaagaagtcagggagttctacgagaggaacaggaagatcaacccggacattgagctgtgggttaccgatgcaccccacgttagaaccctcaagttccacccagaggagtggaaggcaagagtcagggagttttttaacagagccttcaacaacccatgaattacccttttttgattttttgtagcaacacttttaaaaggaaactacatcactacccctatgaaaaaattgctggtaataacaacggcacttatcctggcaatcggggcgggcatctttctgtatgagaatcgggaatattactctccggatttgtccataacccagaacgatagtgtgtcagagagtcacgccaacacatccagcacatttcctagctcctgtcggcttgttatcctcgtccacgatgtaagcccggtttacctcaaagagcttaaggaaataaccgagataatcgacgaatacggcatggccaacaacacgtacttctttgtgatcccaaaccacgcgggaaagcatcccatagataaggatcccgattttgtaaatttcctgaaagagtcccaagctaaaggttaccatatagagctccatggctacatgcatgaatacagagagttcgactgcgacgcgggaactgcgcgcaagaagctggagcttggcctggaagagttgagggcactgaacttttcgcccagctacttcgtacctcccaactacgccatatctgaagatgccctgaaggtagtgctatcccacaatctgagcgttataaccaaggacacattgtacactccccaaggaacttcatacaaaatcatgaacagggagtacacctggtacctttcgaattcaagtgctaagttcagcctcacattgaaaagagcaaaacatgactatacgagatgcaggggcaccttctacttatcaattcacccaaaggccgtaaactatggggcaggactcaagtttctgagggagttcctctccttcgccgttgaaaggaactctcccaaccacgaacgttgaattcaagaaaaatccaaggattcttgaaaagaatgaatcgtggcctcggctaaccctcttttcctcatcagtcagcgtggctaacgctcgtcatcggccgaggagagttagggagaactcttttaaaaagcaaccggaaaataagacgggggatgaagagcgtttaccggtctgattagctaccggatgaagagactggcactggccgaccccttcactcttctccaaggagcgtctcaatgagcgcgattatctggttgtgaactgtttcaacgtcctccatcgcgttgattatcttcatttcagggaacatctcggccagctttaggtagttctccctgacctttctctgaagctcgaatatcttgtcgaactcgctcttcaccttcctgcttcttattctgttcatgctctcctttaccggaaggtcgaggagaaaaactatgtcgggctttacggcgaagcggttgaggtctatgagccactcaaggtcaaggcccctcgcccactgatacgcgagggacgaatagaagtagcggtcggatataacgacttttccggcctcaagggaaggcttaatcagcttgtcaacgtgctcagccctgtcggctgcgaagagaagtgcctcagcctcatggcttattttagcaccgtctattattccttctttaccgcccgtaagaacgagccgccttatgagtttaccaaaaggagtgtccgttggttctttcgttagaacaacttcgtatcctctgttttcaaaccattctgccaggagttttgcctgcgtggacttgccggcgccgtctattccctcgagtacgatgaacatcagtgccacccccaaaataggacagataatagagaggagcagctcttataaaactgccgccctcacttgaagaccctcttgaggtaatcaaagagagaccacatgctcgtaaacgtcttttcctcgccgtccttgtagaactcggctatcccgtccggcctgaagcgcagtccgaaggtgtagtcacccttgttcagcttgtggaggaagacctccttcggtttcggcgggatgtagctggtcatcatgtcgtttataagctcagcctcaaagccgaagtgctcgctgagcctggggaaaaagagcaccgcaggagtgttcatagcgtccacaagggcctttccgccgatcttaaagttgtagcgcttgaaaaggtcgtgaaggaagtcatcgagggcgtttggataataaacggtggcacctatatcgttcggatgggcctctatgaagctcctgctcttcaggattgcctcaacctcatcaacgtccaggccgttcacctcgaccctaacgcccccgtggtagtaaacgtaagctaagggcatccctttgctgtgggcaaagtccttcagcgctatcagcgggataagcctaacatccattatcgttgagcctgtactgactatgcccacaaccatggcacgctttccatacctcgatatcgccctgccgtctctgccgactattaccgtcccctgggccacggtaccaatggcccttcccagaagggcaagctcttcggggttgaacttttcagagtagtataactccacttcttttcacctccttgtatcaccgtgagtgtttaaaaccatcccatttttgaggttatcggtagctttcgatgtccgtgtttattcgttagagtacttaaacttaccgacaaactattttaatacatcggagcatcacctctggaggcggtatcatgaacgctcttgaacggcttgaaaagctccttgataaggagcagtttgagaaggtaaaggccatagacaacccagaactccacgaatttctggcggaatggattgagtggctcgaaccggacaaagttttcgtctgtaccgacagccccgaggacgaggggtacgttcgttggaaggccctctattacggcgaggaaaggatgctcgagacccccaatcacaccgttcactacgacaactattacgaccaggcaagggacaaggccaacaccgctatccttctccctggaggcaagaagctcccatacatcaataccaaggacagagacgaaggcctgaaggagatacgcgagctgatgaagggaatcatgaagggcaaggagttattcgtgtgcttcttcgtccttgggcctaagaactcgatattcacaattccagcagttcagctcactgattcggcctacgttgcccactcggagttcatcctttacaggaaaggctacgaggagttcaagcgcttgggtaggagtgcgcgcttcttcaggttcgttcacagtgctggtgagctcgacgagagaaaaaccagcaagaacctcgacaagaggagaatatacatcgatctcgaagacgagacggtctattccgtcaacacccagtacggcgggaacacgataggcctcaagaagctcgccttcaggctcacaatcaagagggccgttgaagagggctggctgagcgagcacatgttcctgatgcgcgtgaacggcccgcacggcaggaagacatacttcaccggggcctatccgagcatgtgcggaaaaacctctacggccatgataccctgggagaacatcgtcggcgacgacctgactttcatcctgccagtaaacggaatcgcaaggggagcgaacgtcgaaaagggtgtcttcggtataatccagggtgtaaacccagaggacgacccaataatctggcaggttctccactctccggtcgagataatcttctccaacgtcctcgtcaaggacggaaagccctactggaacgacatgggcatagagattccagacgaaggcgagaaccacagcggaaagtggtggcgcggaaagaaagacgctgagggcaacgagataccgccgagccacaagaacgcgcgctttaccgtttcgctcgaacactttccgaacgtcgatatggaggcccttgagaacccgtgcggcgtggaagtcggcggcatgatattcggcggcagggacgcagatacctggccgccggtcagggaagccttcaactgggagcacggcgtcataacgatgggtgcctcacttgagagcgagaccaccgcggcgaccctcggtaaggagggagtcagggccttcaatccaatggccatcctcgacttcatgagcgtccacctaggcgactacctcaggaactaccttgagttcggcaggaagctcaagaagactccaaagatattcgccgtgaactacttcctccgcgagaacggcgtctggctcaaccacaagctcgacaaagccgtctggctcaagtggatggagctccgcgtacacggcgacgttgaggccatagaaacccccatcggctacattccgaagtacaaggacctagccaagctgttcaaggacgtccttaacaaggagtacacaaaggaggactacgagaggcagttcaagataagggttccagagttactggcgaagatagacagaatcgaggagatttacagaaagctagacaacgtccctgaggagctgttcaaagttcttgaagaggagagacagaggctccttgaggccagggagaaatacggggactacataagccccttcgcccttgagggcgagtgagccttttctccttttttcgtcattcgacgagcggcaagactttttaagtcccactcctattgggtatcaccgaagatgatacacgggtgatggctatggtgaacgtttccaatgccgttgaggatgaaataaggaagaagctcccgtatccgcttggagacctcgccgatctggcctacaactactggtggagctggaacaggagggccacgaagctctgggagtacattgaccctgagcactggagggagtacaagaacccagtaaagctgctcctcgacactccagaggagcggtttaaggagctcgtccgcgacgacgacttcatgaacctctacgagctggtgatggatcaattccacgcctatatgaacccgcgctcgacctggttctccaccaactaccccaagtgggacaagcccatagtctatctctgtatggagtacggcataagcaagagcctgccaatttattctggcggtcttggaatcctcgccggagaccacgtgaagaccgcgagcgaccttggacttcccttcatagccataggcctcctctacaagcacggctacttcaggcaggagatcgacaaagacggcaggcaggttgagatattccccgagtacaagcccgaggagatgccgataaagcccgtcctcgacagggaaggaaagccgctccgcattgaggttccgattggggaggggattgtctatgcaagggcctttgaggtaaacgtcggcagggtgaagctctacctcctcgacaccgacgtcccagagaacagccccgacgacaggacgatctgcgactacctctacaacgccgagatggacaagaggataaagcaggaaatcctccttggaatcggcgggatgaggcttctcaaggcccttgaaatcgagcctggggtcattcacctcaacgaggggcacccagcctttgcgaacctccagaggatagcctggtacatggaagagggtctgaccttcaccgaggccctgagcatcgtgaggggaacgacagtctttacaacccacacgccggttccagcaggccacgacaggttcccgatcgaagaagtcaagaagagactcgcaaagttccttgaaggaagagaggaactccttgaactcggaagagagggagatcagctcaacatgacccttcttgccataagaacatccagctacgttaacggcgtcagccagctccacgctgaggtaagcaagaggatgtggaaggatctctggccgggcgttccgctcaacgagataccgatagaaggaatcacgaacggcgtccacaccatgacatgggtgcacaacgagatgagaaagctctttgacaggtacatcggcaaggtctggagggaacacacgaaccttgagggcatctggtacgccgtcgagaggattcctgacgaggaactgtgggaagcccacctccaggcaaagagggagtttatagacctcctgagaaggaaggccatagagagaaacaagaggctcggggtagacgaccccataccaaacatagacgagaacgccctcataataggattcgcgaggaggttcgcgacctacaagcgcgctacacttctcctcacggacctcgagaggctgaagaagattgtgaacaacccggagaggcccgtttacatagtcttcggcggcaaggcccacccgagggacgatggaggaaaggagttcctcaggagagtatacgaggtctccaagatgcccgagttcaggggtaagatattcgtgatggagaactacgacatgggcagcgcgaggctcatggtggcaggcgtcgatgtctggctcaacaacccgcgcaggcctatggaagccagcgggacgagcggaatgaaggccgggctgaacggcgttctgaacgtcagcatctacgacggctggtgggtcgagggctacaacggaaagaacggctgggtcattggagaagaaactaccgaacctgaaacggaagcggacgacccgaaggacgctgagagcctctacaccctgcttgaggaggaagtcataccaacctactacgagaacagggcaaagtggatatacatgatgaaggagagcataaagagcatagccccgcgcttcagcacccacaggatggtcaaggagtacatggacaggttctattccaaggccatgagcaactacatctggctcacaagggaaaactacagcggcgcaaaggagatagcggcgtggaaggacagggttagggcctcgtgggacaaagtggagataagggacgccaaggccgagggcaacaggcttgaggtaagggtttacctcgatggtctcaagccggaggacgttgaggttgagctctactacggcgtcagggcgcagggctacgagattgaaaagccccacatcgttgagctcagacacccagagcaggtgggagagggtgaatggctatacacctacgaaggaaacgccctcagacacctgggagacccgtgctggcactacgcggtcagggttcacccgcaccatgaaaagcttccgcacaggttcctgttgggtctggtcaagtggaagggacttgactgattccttcccttttccaatataacaattcgttctttttccccaccaaatacaaataaattagtaccgaagttatagattagcccaaaattaacaagggcaatagttttaaggattacttcggtaaacttcccgatataataatgggggtgataaaatggatcagacacagaagtggacgatgtatctgatattcctcgtggctggattcgcaacgggaattgggagcctcggcctgttcccacagttctggctccactacgggctgactggcctggtagtgcacctcggattcctgctggtgttcactttggtggccatatttgaaacagaaagggtaatgaagtctggctactacttcgtagagctgtacagaaaagtccttcagagaccagcgatgatactcgccatcgcagtaactataatagcattcctatcttactacacggcaaacgttatgctaattcttcttggtccgtacgttggtactgaaaccatcggcaggctcgtagcgaagatcataatgctggcgctgatattcgtgataataacgagggcaaaggaaaaaactttcacaatcatgtcccttggatcgctgttcttcatagcggttgctatcattactgccatccttttcaaagtcaaaatacccccaacggcggccttccttgcaactgcaaagcacatggcctacagctggcagcctttaagcctctcactgattagagcagccgccgagagggcactttacggcgttggacttggcttcggcttctacataatgcttggcagtttcataaacgagcgcttcaacgctaagacgatcataggagtcggtatcctaatgcaggtggtagtgagccttttggctaccctgacaattatctacgcaatagcccccagcagtcccgagaggcttttcttctacgcatatgggggagaagaagacgctctccaacttataaaggacttaccagacatactatctggatattcctacctactaatcctaatagggctctccatattcttcgcagggcttacaagcatactgcccacagctgaggttggagttcagataatagcgtccgtgttcagaatttccagaacaaaagcggccacgtatctcatagcagcatcactgctcctcggcattccagattcggttccatccgtagccgatatgatgctaagagcagttaccatagccacgttcttcatggcaatatatgagctgtacccagtaatatccagcagggcgcttaagattctgaactcaaagctgtcgccgcttgaaatgggagttgctgcagtggccattacgttcttcatagtcgagggcctttactcaatgtacacagcagcaaaaaagggagacttgtacctcctctctccagtgatcgccctgataataattctgtttggtatattaggcgacaaaatatgggttacggaagcccccgagtgagggggcttttatcttttcacttgtgggcaaaaatcgcaacaactttctctggcctgacgtcgtcgattctaacgaagccgaagcgctcgaactggacgatgtcgtccaccttaacgtccgcgtcgctctcaagaagcccctccctgatgatcagctcgtctccctcgggaacccaaacctcacaggcctttccttccgtgacccagtgaaccatcctccagcggttctccctcgcgacttcgtattcaaagctgtggaacctggccctaatgccgttctcgttcacttccatgatttcaacgttgaagagatccttgaggcggacgaagtttccaggcttgaacagctccatgtcgtcctttgagacgtagaccggcttatctggctcaaacttgagcctcctaactcccctctccgggtaatctggatggaggggtatctcagccgtgaactcctgagcaccttcaacgtacatcggaatcggatcggcaacgaagaagtagcgattggctatcggctcgattatcttcctgtttatcgccgcgaggttgtcccagcttatagtggtgtcgctcctcttgaggccgacctctatgatgagctcccttatggcttcaggttttatgccgcgccgtctaagggcccttattgttccaaggcgcgggtcgtcccagccgaggtacttgccttcttcgattccctttctcgtcttggatttgctgaggatcacgccctcgattgaaagccttccgtggtggacggtaacgggatactcccagccaaaatactcatagacatacctctgcctcgtctcgttctctgcatgctcctgtccgcggaagatgtgggtgaccccaagctcgtggtcgtcaatggcagaggcgaagttgtagagcggccagacgcggtacttgtttccagtcctcggatggttcgggttgtctattattctgagggctggccagtcccttacggcaggattcgggtggttgaggtcggtctttatcctcaccaccgcctcgccctctctgtattcgccgttgagcatcttcctccagcgttcgagctggacttcaactggctcctccctgtgggggcaggctatccccttatccctgagctcgcggaacttctcgggcgggcaggtgcagacgtaggccttgcccatctttatgagcttctcagcgtagtcgtagtagatttcaagcctgtcgctcgctatgtggatctcatctatcctgaagccgagccattcgaggtcctcctttatccactcgtagaatatcggctcaggcctcttgaccttggggtctgtgtcatcgaagcggagaatgaacttgccgtcgtacatcctggcgtactcatggctaaggatcgctgccctagcgttcccgaggtggaaagcaccgtcggggttcggggcaaagcgggtaacgaccttacccctctcggccttcgggagcgggggaagacccttcttttcctcttttttctcattcttctcttcaaagaactctggatagatttctctaagctttgcctcctgctcctcaagtgagagggagttcacttcattaacgacctcgttcacaaggggaattatctcctttgccctctttctaagctctgggttctcaccgaggactttgccgatgaccgccttcgggtttgcctttcccctgtgcgtgtaggcgttgatgagcgcgtacttcaggacaagctccctaatttcctccatctttgaccaccgggaaaagaagaggtggggacgttataaagtttagtcctagtgttccccgtatttaggtgtttcttcaattttctcttctagttctttccagccctcatggagcaggatcacaaacccgacgatcccaaagagaagtccgagcagtccaaactgaaagagcgtcagcaggatggcccagagcagcactccaatcgcaaagagcaacacatcaaccctcattatgacatccccagaagaaagtttaccttcaaaagttaaaaatattgtgaagaaaattagaaaaggaatcactcagcgaaagtgatgatcttgaggctgacgggccttctaacgacgttgtacttgcgagcgcctacgatatacttaactccgctttcactgacagtatcaatgagcctctgggttatcacaccgttgaagacaacagcgtagacgtccttgcgctctttcagctggttcgtcagctccctcactgggatctcggctattacgttcttgttctcgtcgaggagcagcgcaatgccgtccttctttaccctctctataaactccctgaactcttcaagctcaggtgcactcttcgacgtttcaatgggctttactatcttctcggccgaaggcctaacgacggtagctggctccctcttttcttcgggagtttcagccttgggctgagccttaacgacttcaggttcgggcttggtcacctgccttggctgcctctcaccctcgctctccctctccctgatcagctcgtagaaacttctgcccttgttgaacatctcgttgatgacctgctcagccggtaccttgctcctaagggccttcacgatctccttcttggtgagctcttcaacttccttgccctcaggtgccctggcaacgtagtcaacatccgccacctggagaagctccttgaggatgagctcaccgccgcggtctccgtctgtgaaggccgtaactattctctccttgctgagcttgattatcgtctcgggtattgaagttccctcgacggctatggcgttctttatgccgtgcttgagcaggttgagaacgtcagcccttccctcaacgacgatgattgagtcggagaacggcacgtgcgggccagctggcagcttctccgggccgtactcgatcagctccttggcacggacggccttcttaacctcttcggttatctcctgagtctctggtatctcctgctccatcagggtttcaagtatctccttcgccctctcaatgatgtactttctctttgtagccctgacgtcctcaatgcggagaacctttatcctggcctctgctggtccaaccctgtcaatggtctccaaagcagcggctagaaccgcggtttcgaccctatccaggctcgacggaaccgttattgttccgtatgtcttgccagccttgttgtgaacctcaacccttattctgccgatccttccggttttctggagttccctcaggtcgaggtcgtctccaagaagaccttcggtctgaccgaagattgcaccaacgacgtcgggcctttcaacgacaccgtttgcctcaaactcagcgtaaatgacgtacttggtcgttccgaactcgtcctttccggacatactatcaccttccttgaccttttttcgtttttcggacaaaatctgctggagcacggttttcttcctcttcattggattccctccagcagggggtcagaaacggagacaacccgaaggtagaggccgtacaggtcttcaacgccctttatgtcctttctgacgagcttcctgagctccttccacgtctctatgtccacactgcagggatagccggccagatagttgaggagttttttggccagctcttcccccttcttatcaaagtctgtgagtatcatgacctctttgtgggatgatgcaatgagcgccacctcggacaggggaaggcgtgagagccttattatctccgctctgacccccagattccttagagccacctcgtctcgcaggccctccactatgagggcaccctcaaactctcgcagtttgtctataagctccaggaaccttttatagttttcggggtacatgagaccctcgcaggtagatactcactggagttataaggttttgggtctatgtgtatctaacagacctccctaactctcccgtgatacgccataggctcctcgtagaactcctctatgagcctctgaagcctcctagacagctcaatctgcttgccccaggagccctcaatctttcccttcgcggccattctgccgaggaacttcttcatctcatcgcttagaggtgatggcctgcacctcgaccatggagttcccggaaggggcatgaagtagtgcgcccgtacctttccaccctttgccataatccacttcatcagctcgatgctctttctctggctttccctggtctcgtttggcagtccaacaatgaagtcaacaacaggctcaaagccgtattcaagcatatactcaacagccctctggacatgctcgaccctatgaagtctgtgcatcgcctttagcatggcgtcgtcaccgctctgtgcacctatggccagtctcctgttgtcggcgtagtctatgagaagttcgagggtttcaggtagaacaaactccggccttacttcgctcggaaacgtcccgtagaacagtctcctgccctccttcctcagcggctgaagggcctttaaaagggcctcaagtttgtcgagttttaagattgcacccgggcttccgtaagcaaaggcgttcggcgttatgtaacgcatgtccttcattctcttcgagtacttaacgatctggtctatcggcctgtgcctcatgcggaaacccttaatgtagggtgtctgacagtagtagcagccgaagggacatccgcgggtgatttctatcggcgaaatcaggcgaacgctctcggggtaaggcgggaagcgccagaagttctcgacctttgcaaagccagtaaacacaaaatccccgtttaagtagaacgcaagacccgtaatgttggcgagctcttttgtgattctgtagcccgtcttctttagagtcgtgaggagctggtagagaacctcttccccctcaccaatgaccgctatgtcaaaaccgagcacatttaacgtatgttttggcatggctatcgcatgatagccccccgcaactaatagagccccccgttcctttaaaagtctgatttcatccctcaacgagccccagatctcctcggtgaagaaagagtacaggacaactttaggtttagctctgagtatttcattgaaatccttggtgatcaggagctctcctagatcaaagccctgactctccagggcaccgagaaggtgaacgaacgcgttgtggttcctcttagtcatccttacggctatctccggcatgggttcagaacagtaaaagggtcttaaaatgataacggtagggaaacgagaagagcaaaagcggaaaagggccaaaaaggccttcaggccttgatggcaagcttgatgtcctcagccttgacggtcttcctgccagcgtgcctggcgaaatcgacggccttcttgctgagctcgatggcgtactcctcaaggtactcggcgagaaccttggcggcatcctcactgaccctctcagcgccagccttccttataagcctgtcaaccggggcaatcggaagctcggccattcacaacacctccttaaagggcttttcattaagctttaggcaattggagatatataaagatttcggtaaacggagctatttctcagggtctaacaacgaatgaacccttagatacatccaattttcagagatgagtgctactaataatttaatcatgacctcaattcaggagagggaaactaaaccctatcaaagggcttacccaggtgaagtggtttaattggatttaaaggtgtttaaaaagtaaaaaaccaaagacaaccattctaagcggagtggattataatcgggccagaaaaaacaatgaaaacgaacaaacagctgattaccaacgtcggttaccgtttcctttttgagagcgctagatgtttgcttccctggtaatttccacgataggggtttttagcaggcccctccagccggataaacgctatctgaacaaagcgctcgccgtatttgagttccacagactcgttggaagcgttgaacagggctagagtgagatttccatcccatccagggtcaacccaggcaaaagaaccgattaagccctctctggctagactgctcctaagcttcatgtcgcccattacatcatccggaagcttgatcctctcgagagtcaaaaccaaggcgtaagtctttgggggtattgtaactccccctgaatccttaacgtcgagtattttaccatttacgtaagcttcgcctccaacccttaggtcatatcctgcaggctgcagggattcttcactgaaaggctcgatcaaaatttcctttctaatcttccaatcgggaagcatcatttagaccaccgaaagagctatataagtgagaactataaaaaccgcacggccgaggatgagcggtttggcccggcactgacctgtgctgagggccaccacatctgaggcgggatgggccggtggcctagtctggacggggcgtcggcctccggagccgaaggtcgcgggttcgaatcccgcccggcccgccatagaaactttgctgggcaaagtttcatcaaaaatcgaatgtccttttgagtgcccagcttttcagtgattctcaccataaattggaaatcctcaaggggttactcacagtataacgcccaaagggcgttaaaaataaaaaacccacacttctctgcctattcattgcgagaatcccccaatccacagccaattttcaaggacattcaagcttttggtgaagcttttttcaaaagcttcctgcgcgaagtttgatgaaggtttgtggttccttttgaaattgcccttctacaaggaaatcctctcaaaatgacccgtcagacaagaaccacaaactttgccttgcaaagtttctttggtcaagcttttcccaaaagcttgctgtgcgacgttgaagctccgcttcaatgcacgggacgatagtcccattgagtttgatcaaggttcgtagctcttttccagaatgtcaattcactatgattctctcaacaaacggctgttcttgaacgcgagaacccttaatcaacttcaagacgaagctttccagaaacccagtgaagaattctcatccaagaatatagagaaaataggggaagaggacttcagccgaagagggcgccgagaccggcgagggcctcctcctcgctggcctcctcctcttcttcctcttcctcctcctgggcagcctcagcggcaccgccctcggcggccggagcggcggcaactgcaaccggagcggcgaccggcatagctgccttctcgatgacctcgtcgatgttgacgccctcgagagcggcaacgagagcctttatcctggcctcatccggggtaacaccagcggcctcaaggactgccttgaggttctcctcagttatctccttaccagcggcgtggagcagcagagcggcatacacgtactccatctttcgcacctccaatcatcttcatccttttttcttttatcacgggttgagggatacatgggaaaggaaatcagccgaagagcgcgcccagtccagcgagcgcgtcctcctcagaggcttcctcctcttcctcttcttcctccgcctcctcaaccttctcctcggtcggctgaggagcggcggcaactgccatttgtgcctgagcgtttaaaagttctttggtcttctcgtcgagcagatcctcaggcaggttctgtgctatgagcaggacggcacgtatagccctgccaaagatatcctccacagtgtccttggtgatgtagccagcctcgactgcaacgttcttcgctccgagataggctttctggaggatggcctcgattgtctgcttggtcgggtaggctatgttgactgacaggttgaacgcgtgcatgtaagccttctggagcatgttgatgtactcgctctcgtcgattgcaaggacgtctggggtgtagacaatcccgtcctcgtaagcagcgagcaggttgagaccgacttcgagcggctcgatgccgagggcgttgaggatcctcgcgagctgctcggttatgacttcacctgccttaaggacggtgtagtccttctggatgctgaccttacccttctcaatcctcgccggaatgccaagggcctgcatctcaccaacgagcgggcctggggctagtgacgtcggcccagcgggaattacaacatcctttggaacgactgcaccggctttagcaggagccggggtcttgctctcctcaaggagcttgtagagcttgaacgggttcatttcggtggcgagtattgcagcaccgccctgaatgtggtcgatgagcttctcaagctccggctgtccaagctcctgggcagccctctttatggcgagctctatgagagtgtttctgctgaccctgagaagggccttaccgcggagcttgtcacgcatcttgctgagcgggtacgctgggacaccggccacgtcaacgagcgctatcactgggtagctcttgatgatgttggcaagctcttcaacttccttcttcttccactctgccacgtgagccatctccctcacctctcaaccttaacggccgggcccattgtggtcttgatgtacactgacttcacctggttttcaccgcgctcaagcttgttgatgatggcgttgagcaccgcctcggcgttctcggcaagcttctcgtcgtccatgtcctcggttcctattggggcatgaactacagggttgttcttgagctgtatcctgacggtctttttgagcttctcaacgataggctcgaggttggtcattgtcggcgggacaaccactggcatcttgttcctcggaccgaggtacctacccaggtacctaccgatcttcggcatcagcggagccgctgctatgaagaagtcgtattttttagcgagttttctggcctggcgtgggctcttagccagctcctccagctcctcaccactaatcacatcaagcccgagctttttagccgcctcggccacggcaccatcagcgatgaccgcgatctttggctccttcccacgaccgtggggcagcacaacctcaagcttaaacctgttctccggcttgcggagatccacatccttgaggttgactgccatctcgacggtctgtgtgaagttgcgcggcttagcccgggccttcgcctccttcaccgcttccacgagtttctgcctgtcgaaggccactttacagccctccctctcattttcgttgatttaaacagccaaacggagaatcaaagatgcctttaggaatgtgtttttaaagttttccccaaacgggaagggaaaaagaggcctcactgggcctcctcagcctttgcaaagagctcgtcatagacaccctcgtcgatctctctctgaacttccctgggatccttgccctcaacggtaacgcccatgctgagcgcagttccgatgacctccttggcggcagccttaaggttcggtgcgagcatctggtcgatcttcatcttggctatcttgatgacctgctccattgtaaggttgcccgcgggagtgtggccggcttcgcttgagcccttcggaatgccgagctccttcttgataagctggctcgtcggcgggataccgacctcgatgcggaaggtcttcttcttggggtcctcaacgataatcttgacgggaacctgcattccctcgaactctttggtagccttgttgatctcgtcaacgacctgcttgacgttgagtccgagcggaccgatagccggaccaaggggcggtccgggggatgcctttccaccttcgacaagaacttcaacaacctgtgccatttatctcacctctcaaacttagtcctgttgcccgtcactccttctggcgtttgcttataagtctaacgtattctcccctaacagtcacggggattggcaccacagagctgacgagttcgacgactatttcatccttactctcgtcaacgcggacaaccttggctttctcacccttgaagggacctgcaatgagctcgacgatgtctcctggctcgaatccgctgactgccggcttctcctcgaggaagtgctctatctcactgaagggtatctcccctggcagaacgcgctttgcatgcctgatgcccctgattgcttcctcaacggcactcttgttgggagcctcgatgaagatgtagcctttaaccttgcttggagagaggatagcataaaggggcaggttgtaagtcttggccttgctatagatgagattggccgtggttgtctcctgaccaacggttacgctcactgtgaatatctttccctctgccatgtgtattcaccttttagagccgttaggagcccgtcacgaggtagcctattattcttattatcatgccaatggttccaataaggatcataccgatgccagttatcttagcagcaagcttgaactccttcattcctggcttctttgtaacgagcagtaccctcttggactccgccaggaaggacttgaccttttcggtgaactctgccatccttacccctccttaaaaagatttcatgaattaaagctcgtcgaggtcgagctttatcggccttctctcctcctcaccaaagtatgactcctcctcttcctcggcaactgaataaggtgaactgacacctgtgacgacgaggaggatccttatcatcttgccgagctcttcgtcaagctggataccccagatgacctgagcctctggatcgagcttgctggtgacgagctctatgatctgctgggcctcctcaagcttgacgtcgcttccgctgatgcttatgagagcgcccttggcaccgctgatgtcaacgtcgaggagcggactgttgagggcctgctgagcggcttcaagagcacgcttctcgctgtcactctcaccgataccgatcattgcaacgccgccgtccttcataacggccctaacgtcgttgaagtcgaggttgacgaggccaggcttggtgatgagctcggttatgcccttgaccgcctggacgagtatctcgtcggcgaccttgaaggccatgtggatcggcaggttcggagcaacctccatgagcttgtcgttcgggattactatgacggtgtcggtgttcttcttgagcctttcaaggccgtactcggcgttcttgattctccttatgccctcgacggtgaacggaagggtaacgactgccaccgtcaaagctcccatcttctttgcgatctccgcaacgaccggggcggctccagtaccggttccgccgccgagaccgcaggtaataaagaccatgtcagcgccctcgagagcctctctaatttctctctcactctctttggctgcctcctcaccgatctttgggttgtttccagcaccaagccctctggtaagctctttaccgaggaggatctttttgtgagccctaacctttaacaaatcctgggcatcggtgttcatagcgattatcttggcaccctggattccaacctgcatcatcctgtttatcgtgttgcagcccgcaccgccaacaccgacgacatatatcttcgcctgaatctgctcaaggagcttcttaagctcctcgtcaatatcggattgagttctaacctcaggagcgctggcctgcggagcggcggaggtcctttcaatcgcatcttcaatcagctttaacatgggttcaccctccaaacagtttaattccctcaatttttgagggagagtggtatataaacatagctaacccaaactgaagggtaaatggccagtatatcctttaaatgtttcggccttaatccctgatgaactcaagtcccagctcctccgcaactgccctcgccatctgtcgggtctcccctttgctacccttccagtcaacgtagattgcatcaacgcgctcggctgttctctcgatggcctttaggaggagctccttgctgaggggatgtgcatattttggggctatgtgcccaaacgccagatctgtctgaagtgccctctttgtctgcttcggtgcatagtgccccccgccaataccaacggcgaccttgaacttcgaattctgatagttctcaaggacgtatattatggtttcggctacaatctcgccggccctatcgttgacccattcttcctcgctcgaaccgatctctatgaaaaagcttggcacatcaagctcgcttggcccgtggtgggttgcctcgtagcagacagtccatccaaggtcattcagttcattcatcttaagcagagcaagcttcatagcacttggctgtgctattgcaaggctttcatccttcccgccgtaaagggctcctccccagtttcctgtcacgtgggtcgtaagggctgggagtttctgtttgctggagtgcctggaggcaaatgctataatctcgggctttattccagtctgacgctcgatagccctatcgaggccatcatagtaaatcatctcctgattggttgtcagtatcactacatcatccttctggtacactggattgccatcaaagaggagttcatcctctttaaaaccaaagttctcgatgagcttctccctgatgttcattgacgcgagatctacttttgtagtcatcacaactttcattttcaaaacacctcaaaaagaagagggaacctgtttaatagcgtttccttcaacgtccagatgacgtcatattcttgaggatctccgatatttccttagtagtctggttgatttgtactgccacgttctgtgcaacttcatgaacgtacctgatagtaatcgtgaccataataagggccaatgcgaccatgaataggtattccaaggctccctgtgcgcgtctcatcattttactcaccccacataaataaaatggggtaggaatatataaccctttggtataaaaacccaagtaaataactcaatcaactagtacagcattacctcgaagccaagttcactcagcaggtctgaaagctcctccgggtcaacataggctaagagatggtgattcccgagcgtgccatcaacgaattctggagcgtcctcaagtttcagccttacttgcgtcctgcaccgcgactcaaggaactcgttgccctcaacttcaactccagcaacaaccgcatgtctcccgcgtatcttgaaaagggtagccttgccaggagggaactcaacagcaacaccgactcccctgccgctctcaaagtgagttctaaggacgtactttgacaccaggggtgccgtacagtgggcgatgaccacgtggttttcgtcgaaatctgcgagattacccataaatgcaggttcatcaaagaacttccggattatcatcatgccaatcagggcgttgagttcaccctcgcatgcagcggggatgccctgggcattgaacatggcaagggcaaggcagggtgtagttccaatcttcccgataaggtcaaagcacccaactgtaaagcccttaagatgatagtcttcaagaatgcgctttatggcaacgtacacccgtccagcctttgcaagagactccctatctggctccttaatttcctcagcgttttcaacgatttccttaacggcctcccagccttcctcagcggttgtcttctcatagtactcatagaactttttgaggcttatgtgggtgtaaggtatgtccagcttctcgtttatcagccagggggaaaccctccctataaggcctattctggctctaagaaacctgtcgagaacatctttcatatcatcatacgcaaggagagcagctttaagctcctccgaactcttcacaacggtggagggaattagcctgtccctgaagtactccctgagttcgattgcggctgcaagggagttgttgaaagggttcccgtaaaatacagttggacgcctaaacacggaaaactccttgagaaatccctccgtcccacccgtcagagggaacagaaccagagcgtcaacatcgttgaagtttatcttctctttcagctttctgaagtcgctccttgactggattatttccccaccaacaacatcaaaatcttgctcaagtactctaacaaagttcgccgcctcttctctaaaagcctcagggcttgcgagttcactgactccaaaaacgagaccgaccttcatcgaatcacccagatttttaagggagagcaccttaaataaagttgtggtgggcatgaagttcgtcctcgataccagcatattcgtgaatcccgaggtcagaaagaacttcggggataatcccacagaggccatgaagaccttcctgagctatgccgagaagctcttcggtaaggtcgagttctacatgccaccagggatatacagggaggtcatgcatttcgtcgacagcgaagagctaaggcccgcaatagagctgtacatcatcaaaaagcccccaaacgtccacgagttgaagataccggccttcgttgtttacgagcttatagaggatatccggcggaggatagacaaggggctcagagtggcagaaaaggccgtgagggagagcgtactggacaccgacaacgtggacaacataattcaaaagctgaggaggaactaccggagggcgttgagggaaggaatcgttgacagcaaggaggactttgagcttatactcctggcgatggagctcgacgccaccatagtgtcagcggacgttgggatactcacctgggcacagaagatggggataaaatgggtggactcatccgtgttcagggaggttctcgagggactcgttgagaagctcgaagggaaaaatttataaaggctcttcgtcatcgtatcaacgacgccccggtggctcagcctggtggagcggccgcttggtaagcggcaggtcgcgggttcaaaccccgcccggggctccacaacagcttttctggggacatactctaacacgacatttttgaggatctaagatgaaactcctgctgttcttaaggttcttcacgggacaagcgaaaagcttaagaagtacaggccataatcagcaccgccgtcctggggggccgtggggtagcttggtctatcctgcgggctttgggagcccgtgacccgggttcaaatcccggcggccccaccatagaaactttgctgggcaaagtttcatcaaagagggaatgtccttttgagcgccctgttttccagtgattcccagtatcaattagcagttttcaaggggtttgctcacagtataacgcccttcgggcgttaaaaaaagaagaaaacccacacttctctgcctatctaccaagagaataaaaccgaatcaagccaattctcaaagacattcgatcttttggtgaagcttttcccaaaagattcctgcgcgaagtttgatcaaggttcgtggttccttccaaatttgcctttctacgaggattttcacgatatgcaagccaaagcgttagtgaatttttcaaacatggtaaatagaaaggagtttttctcgccttgacgccctacaggcgtcgattaaaaagcaaactcacggataacaaacccaataaaagcagaattcacaactagaagacagttctctaaagaaaatcctctcaaatgggcatcataaacaagaaccactaactttaatgaaactttgcccttcaagcttttggaaaaagcttgaccaaaaatttgcccttcttctcgaactttgcttattgaggagcgtatgctcttccagaaagcaagttcacgcggatttaacctcaaagttccctgtcgattgtgatttttttaacttcgtttttagtgccccttgggcactatacggtgataaaatccttttgaatcagccaattgaaagtaaacccctcataaaacgagcctgtttaaaagagcataccaactttccgccagcgctttcgtgagaaagggctgctgtggtgcgggggcggggatttgaaccccggaacccctgcgggacgggaccctaaatcccgcgcctttggccaggctcggctacccccgcactgcccgatagaacgaaaattgtggaacttataaatttaacccagctggcaaaaaagaaagttcacctctccattctcttaacgccttctggagtcccaacgaggattatgtcggcgatgtcggcgaatattccgttctcaaccacaccgggtattgtgttaagctcgatttcgaggtcgagcggatcctcgatgcgggcgaacttggcgtccagtatgaagttgccgttgtcagtaacgaccgggccgtcctttttcaccgccattctgagctccgctgtcgcgttgaagacctcaagttcctcagcgattgccctccacgcggcaggtatgacctcaatcggcacgggcatcttctggcccaggtactcaacgagcttgctctcatcgaccaggacgatgaacatcccggccctatactcgatgattttttccatagtgagggcagcgccgcgcccctttatcaggttcatgtgcgggtcaacttcatcggccccgtccacggctatgtctattgcatccacttcgtcaaggctcacaacgggaattcccgcctcaagggcaagaagtctggcctggtgagaagttggaacgccgtaaacgtcctcaagctccccttccatgaggagctttccgaggtaattgataaagtaggcggtcgttgagccggtcccaagcccaactaccatctcatcctcaatgaacttgagggcctccttggctacggcctttttcatttcttcaacgttcataaaatcaccccgtaatgttgaagacgcactttattgaagcgtttccactttcaaccattttgtagagcaggctctggtttgaatagcagactggctggaagtccgtcacgagggtgtaggtcatcatcgtgaagaagagccagaacaggaaccagccccagaaggcctttctgagtatcatcctcggctcggggatgtcctccggaagctccttcacgactgccatcacgaacttatcaaccagaacgtacaggagaaagcccagcagccagccggcatcattgtaataagcgagcagaccgctgactaccccagtgattgctccccacaggtaaacagttagcgaaaacttgtgctcgaccgtcagcttcactctctctcacctaaagccaattgtcttgggtgggctttaaaacctttcccgaagagaaaaagaagaggaatcacttgagccttatggcatctaggttgttgggagcgcgtgttgagataccgaacttcttgtggatgctggaactgaggtcgaggcacttgtgggcctctccgtggacggttattatcctctccggccttggcctcacccttgccacgtagctcatgagctccctcctgtcggcgtggcccgagaagccgtctatcgtgtggacttccatgttgacgttgataacctcggttctgccgtcctcgccgactatgggtatctcgcgaagtcccctctgaacctgccttccgagggttccctcggcctggtagctgacgaagattatgctgttcttcgggtccggtgcgagctgcttgaagtactcaacgctcggcccgccgacgagcataccagaggtcgctatgattatggccggctctcctgagtctattatgtcctgcctctccctgctgttggcgacactcttgaatatcgggttcaggaacgggttgtagccttcgtggaatatctgctcgcggatgtgcttgctgaggtactccggataggcagtgtggattgccgttgcctcccagatcattccgtcgaggtaaataggaacttctattccaccgacgcgggcgtactcctcgaggaccatcattatctcctgcgccctaccaaccgccatcgccgggatgagcaccttacctccgcgcttcagcgtctggtgaattacctctataagcctcttctcagcttcctcacgcggcatctggtagtcgttgcttccaccgtaggttgactccatgacaagggtctccaggcgcgggaacctgctcaccgccggttcaaagagcctcgtcggtatgaacttgaagtcgccggttatggctatgttgtggaggccgttgcctatgtggaggtgaactatcgatgaacccagaatgtgacccgcgttgtggagggtgagtcttatgtcgggcgctatgtccctgacctcgccgtagtcaagggttatcgtgtgctttatgacctccttgatgtccttcggcctgtagagaggctcaacgccgttcatgtgctgtatctcgatgaaatcctgctggaggagggtcatcaggtccctggttggaggcgttgtgtatatcggcccgtcgaagagcttgtagcggaagagatacggcagcattccgctgtggtcgaggtgggcgtgggtgataattattgcatcaagaaggccctcgtcaagaacgtacctgaactctggagcgtcaaagtgtggataagcctttgtcggatccttgagggcggcaatattaacaccgaaatccaccagaacgtagctctcgtcggtctggacgaggagagcacttctacctacctctcggaagcctccgagacccgttattcttatccatctgctcttgtactcggacttcctgtagatgttccttccgacctgcctcaggaacttccttctgtccttgctctcagtctggaggatactccttatcgagtatatggtctggctctgtattggaggtgtcctcacaaccctcggtgcccagtgaactttctgggtgatgagcctgagggtctctccgttctttccaattacgagaccgggtttcctggcctcaatgaggacttcaccaacagacggatcaaagcttatgttggttatctctgcctccggtggaacaagctgctttatcagttcctcggccttctctggaggcagtagaatgtcgggatccgggcggacgcttatgcgctttttgaggactttggcgaggtttttaatcagctcaccgtccttcatcatggcctcagggttcttgacgtatatgacaagctccggcccttcgaactcaacgtcggtaatccctgcttcccttgggaccatttggactattatctccctgatttccttgagaatatcgtcaacaaaagtttcacggcgtatcatagaaccacctcactcaagaagagacttcagctcctcctcactccactcacggtagccctcctcagttatcgttacgagagtaacgccaccacccgtgaaaacatccctttttgtggcggccttgatggccctgagagcgagcttaacaccttcctcaaggggaataccatcacgatagttctcctccagaacggagaacgcaaactccataccagaacagcagctgtaaagcggtcttcagttacaccacccgcagcatctatggagtacagcctcggggcggagtcatagccaccgacgaggaaccacgccatataggcgaaacccctgccgctgtggagtatgttcgatgtaagggtcgcaagtgccttaacgctcatctccctgctgacctttgcacggtagagttttgcctcagccctgagcagtctgacgaggctgaggatatccccgaccgttccagctccggctatcgccaggtggtcgtctatctggaacaccttcgttaccctttcagagagcaccatgttgccgagcgatgccctcctgtcggccgctagcactacgccgtccttacatacaataccgacggtggtggtaccctttagcttctcagtcaaactacaacacccctggatttggtttttagaatagaagaacctctgaagggcctttagggaaagagtatttaaaggtttcgccaaattctggaggggtgtgctgaaatgagaagggaagtaatactcctcaccggaccaccgctcaacggcagggatgagtacataggtgaagccctcgaaagggcaaacggagagagctacgcctactaccacgtctttgactacattcgcgaggtgggaaaggaacgcggggttaggattacccggaagaacgttcttgactttgcgataagccacccagacatgatgaacgagataagggacgaggcctttgagaggataagaaaggaaattgacgagagcgataagagagttcacctcgtatcaactccaagtctcttccgctggggaagtggaagtgtcatcggattcacgctgagcaatctgaagcttctaggacccgatagggtcatcataatcctcgatgacgtcctttctgtcaggagaagaataataaacgacccagagtggttcgaacgcttcggtgaaaaccccgagaacatcaagctgaccacgttggttatgtggcgtgaggacgcgataaaccacgtcaagaccctcgtccacgagctgaaaaaggagggaataaacgtccgctacgtccttcagttcggtataagacacccccacgaagtctttctcgacctaatattccgggagaacgaaaagcctcttgtttacctaagctatccgatgacgggtcacgaagaggagtactaccaccgcgtcaggggattctacgagaagctcagcgagcacttcacggttcttgatcctggagcgctggacgactggtgggtagttgccgaatacgacaaccaggtcaaccagaacccgaacatcaagaggattaaaatcaaacacctcctcgatggtgacgttgttgaggagcttgagagggaggatatagagcaggcgactgacatactcaggagacagctcgtcgagagggacttcaacctcgttgatgtgagtaaggcgatagcggtttatcactacgccgagggcgtttcggctggtgttatcagcgagatggcagaggcttataggactttagcagcgatatacctttactacccgttcaagaggagacccagcccgttcatggagttctacggcatgcagaacccctcgaggagaacgatgttcaaggacgaggacgagatgataagggcgatggtggaagaaaaggagtactggacgaaggcttaaacttctgtttcgtttttatttagttttttgaatagcggcaagttggttttttaatcttagagaaccatcagaacgtcagaaaagtaaggacaagagaaaagggagaagaaatcacttcttcacccatccgcggtgcttcattgcctcgtagaccctgctgacggcaacgacgtaggcagcgtccctcatgtggatgttcttctccttgtgggtgttgaagacgtcccagaatgccttggtcatcttgtcgtcgagcctcttcctggtctcctcgaccgtccagtagaagccgtttatgttctggacccactcgaagtagctgacggtgacaccaccggcgttacagaggaagtccgggatctggaggatgcccttctcgtggagtatctcgtcggcctccggggtgaccggaccgttggctacctcggcgacgatcttggccttgacgttgtcggcgttctctttggttatgacgccctcgatggcgctcggggcaaggatgtcgacttcaagctcgaggagctcctcgttggtgatgttctgggttccgggcatgtccttgactgagccgtgctccttcttccacttgagtacctcgtcagccggcgggagcccgtccgggttgtagatgccgcccttgctgtcgctgacggcaacgaccttcataccgaactcctcactcattatcttgtggaggtagtagccggcgttaccgtagccctggatggctatggtcttgcccttgaggtcgtcccagccgagggccttagcggcttccctgatagtgaaggcagcaccgcgagcggtggcgtccattctggcgacgataccgccaactcccggcggctttccggtgatgacaccgaaggccgggccctttctcctcattatggtctcgtactcgtccatcatccaggccatgatcttcgggttggtgtaaacgtcagggccgggatgtctgtccacgggccgatgacgtcgtagacggcccttatgtagctcctagcgagcctctcctgctccctctcggagagcttcttcgggtcaacgatgatgccacccttacctccaccgtaggggaggtcaacgacggcaaccttccaggtcatccaggtggcaagggccttaacggtgctgagggtctcggccgggtgccaccttataccacccttggtcggaccgcgggcccagttgtgctggacacggaaaccggtgaaaaccttgacagaaccgtcgtccatctcgacgggaacgctaacctcaacaatcctcatgggcctcttgagccactcaagggcctcttcgcttatgtccatgaactgggcagccctctcaagctgctggacggccatctcaaacgggtcaatctcgaccattcataccacctcatttcggtaatctgcgaggttaacttaggcgtttgcatatataaacctttcgataaacaggctggaaaacagtctgttttgaacaaaaagttaaatagtgaaatttccaaaagaacaaaggccaattctcggagatttcgccaaaaggagcgatgtacatcgaggaatttttatacaccaaaggacttttacgttcatcaaagttcataaaaatgatgaaatgccctcagcgagaagtcggtcatcatctctcagctcactctctttccaatcatcgggcaacgggccatagggaggccgtgtttaaaattattttccactcatctcaaaattgccgggatgtctaaaatcacctaacgagccaagatagatttgaaaaagtgacaaaaattggatattgattattttatgcccaagtaaatcgtcttttgtcgaaaactaccgttcaaaagctttttataccacgaccgaatatatacagagtgcccgtactgtgggcacttcagcccgattaaataccaacggaatcggaggtgggatataatggaagcccaaagggatcaatgggcgaccaagctcggtttgattttagcaatggctggaaacgcagtcggtctcggtaacttcgtaaggttcccgactcaggttgcccagaacggtggcggcgccttcatggtgccgtacttcatagcgctgttcttcctcggtattccagtgatgtgggttgagtgggttgccggtcgctacggtggcaagtatggccacggtaccctcggcccgacgtactacctcatggcgagggagagcctcaagcccaggagcgcgttctggttcggtgtgatatccggaatgctggcgttctcgctgacagtgctcctcaacagctactacctgcacctgatcggatggtcggccgcttacacatacttcagcgcggcgggttcctacttcggacagcccacaggagagttcttcagcaactacctaagcaaccacggccaggtcatgctcttctggggcataacagtaatcctgctcgcaatcgcagttggccagggtgtcagcaagggtatcgagcgctgggtcaaggttatgatgccactcctgtacgtcttcgcaatcctaatgataatatacatattcaccctcggctccccagttgacccgaactggagcaccatagatggcttccgcttcatctggactccgaactggagctacctcggcgaccacctctggcaggtaatgctggccgcgactggacagatattcttcacgctgtccctcggtatgagtatcatccagaactacgcaagctacctcggcccgaaggacgacgtcgccctctctggtatagcaacagtttcactcaacgagttcgccgaggttgttctcggtggttcaatagccataccgctcgcaactgcctacgctccgaagatagttccgcccgatgtcctccagcagggcaagaccgcagcactcgaatggataggacagaagttcggccttggcttctcctacaccagcctcccgaacgtcttcgtcagcatgggcgacatcggaaggctcttcggcgccctctggttcctcctgctgtggttcgcgggcttcacatcagccatagctatgtacaactacctcgtcgcaatgcttgaagaggacatgcacatcaagaggtcagtgggcacctgggtgatattcctcgtgtacctcatagcgggtctccccgtcatctacatcgacggctacatggaccaggtcgacgcgtgggtaagcttccagttaaccctgctggcgttctttgacataatcattgcagtgtacctcttcaagccagacaacttctggagggagcttcacgagggagcctggatcaaggttccagagttctacaagtgggtcaccctctacatcgcaccgctactgctcctgatacctatgatcggctacttcaagccgctggttcagacgacccttgagtggccggctagactggcaataatcctcatgtggatcctcggtgccatcgagagctactacgcaatcaagaagaagtacaaagaggaactcgacaagaacgaggtaatcatcaaggtctgaggtgatgacaatggagagctgggtaatctacatgttgatagcatgggcagtaattctcggcatggtgtactggagcgttagcaagctcctgagcgccgagaaggaagcaaaggggtaaggtattaaatcccttctttccctttttgatttgggggtgttctcgtgaaaagcagggatattcttctggagacagccgaggttcttgagtccacactcgataaaatcgacaggctcaaggtgctctcggagaaagagaaggaggccgttaaaaccaaactaaaaaacgctgcggcgaatttcaaaaagctggccgaggaagctgagaaggacaacgaggaactggctgagttcttcctgaagaaggcgaaggagctgaagctggcgagcgttgataagaaaatcgaggagatggggaagaaagaatatctaaaactggttaacaggattgaactctactcccgttcagctgagtacgacttcaagccagaaaagctcgccgagctgaaaagagtctatcgtaagtacatcttcggaatgacgtcgttcttcatactgacgggaatctacttgaatcaattcctggcggtgacggcgctaatccttgcgataccgataatactctcgatgctgtccctccagaggaggggctacctcgggcttctgctggcatattcagccataccaataccgctgatagtcggcgcaatggcggcaagctacggaatcagggccctcaacgatccagcaaagatcgcggagatagcgggacaccttaacaagagcactaccttcgcgcagggatacctcgtcgtcctaacgctcctcgccgcggtagagctctacctcctgatcagcgcagcggtggagctttacaggcacaggcacgctttcctttagtggagggcctcttctcccctttctccggttcttattctcacgacatcgtataccggaagcacgaatatcttgccgtccccagggattcctctcctggcatgccgcactattatcccaatgacatcgtcaacatccttgtctgggacaacgatctcgatcttcatcttcggcaggaggtcgtagggcggaataccaccctgaacgccgcgcccctggacgggataggccgtcagagaaacgtagcctgcactcttcagcgccttcttgacggtctcaaagtcttcgggcctgagaactgcctcaaccttcttcatgataccaccagaataatttggaaaaagttgccaaaaaggtttcgaaaaggaaaagctcactccacttgagctatgaactttttcaatctcttggtagatatgccggtctttctggcgaggtcttctatgttggcgttcttcaggtcttcgatagtttcaacgccagccctcttgagcttttggaaggtcttcggaccgatgccctttatggacagcaagtctgaaggcccttttgaaggagctttcttacttacttttcggggtagcctttttgactttgaggactttctcttccccctctttgaggcttcgacggcctttttcttaacttccctggtctcttcctttaccggcttgaccttcttcacggccagtgcaagggaagttgccttctccgtgagaaccttgggcttttcctcagtttcctccttctctggcggaacttctggaggttcaacgtactcctcaagctccggcgggttttcgctgacgtagggcccgacaacgacgggcctgaacgggttgtcacgctcctcaagctcttcgaggagcttaacgtcgaactcgccgatcttgacgtacctcaccagttcgttggcaagcctgtggaagtctctgctgtgaatgagaaccctcctcttggcgtactcctttgcctgtccagtcgttattaggaactgccagtcgcttgcctccagtatcaaaagctccctcgccagctgctctatcaccctgttcgtgagctcatcccttccgcggaagcggctcactatagccaccatcctgtcctccgcgcggtagatgtgcggccatgtccactcagtctcctcgttccaccaagttgagtggtcggagttggctccccatgaaccttctggaagctctatctcgtgcttttctcctgagtactcctcaaggaaccttgagagcgtcggtgtctcaactcccctctgatagaggagctctaaaaccctaccaagccatttaacaccctcgaaccaccagtggccgaagagctcggtgtcgtagggagctactatgatgcccttctcgccgaacttctcctcgtgctctctcaggagtctctcaactagcgagacgaagtgcctggcgtgctcttccacgcgctccatcgccttgtccgggtcgtagaactccttctccccaaggccgacttccttgctcgttatcctccagtactgcccgccgctcttcggggcctttttgtggaactccctgtaccagaagtcgccaggatagccgtagtgggcactccagacctggtggccagtctctctgttgcgggcgaatacagcgacgtttgagccctttatccagtagggcctcaaggtggtcttctctgtatcggcgatgagaacctccccatagacattgctcgccggaccctcatcgatgagcctgctctccacgaagaagtacctcagcccgaactcctcaaggaacttttctataccctgtctctttactttcctcccgccgggaagctcccactcaccggcaggtctgtaggcacattcaggaagccatatccccttcggcttcattccaaagtgcttctcataggttgcaacaccgttggctatctgggcccttatcgcctcgtcccttccgaggagcgggaggtagccgtgggtcgcggctgaggtaataacctcgacgtagccctgatcctggagctccctgagcttgcctattatatctccgtttatggccttccagtagtcgtaaaccttccggaagtagttgagcatgtatgaaaccgctttttcgtcgtacttcccggacttcaggtcttcctccattgccttcagctttctttccatgtactcctcaaacgccttcttcatgtactcgtcggttagctgttctgccagcactggcgtaacgtttatcactatgccgaactttactcccgagtccctgagcctctcaaactccatgagcagggggatgtatgtttcgcttattgcctcaaagacccactcctccccgaaaggccactttccgtgcttcctaacgtaggggatgtgagtgtgaaggacaaaagtcaggtaacccttcatagtatcacctggagtggttacacagctgaatatttaacgttagcgtgtcctcagttgggcctcggcaaaaagatgtacatcaacaacgttggggaaaagttaatttaacatcactcgctaaacattaaaaggtgagcccgatggagtccttaaaaaaggaagccggttcgggcattctgatgggcatcgttggagtgctcctgctgggggcaataataaagaccctcgcaatgcccgtcagcgctgccctaaagcttgggggagttatcttcgacataggcgttgctgggctggcatgggtatttcttgacgaagccattgaaagttctgaatccgacatataccgggccattctggcaatagccgccgctatccttgtggcatttgcgtggtaattctccgagagataagtccttataaacttctttcctcaacttttcccgggtgagagaatgaaggaagagatgagcagcgttgacatacgctatatcgtgcgcgaacttcagtggctggtcggttctcgcgttgacaaggtttaccacgacggcgacgaggtgaggttcaagctgaggacgaaggaggggagagcagacctcatcctggaggcgggaaagagatttcacctcacgagctacataaaagaggccccgaaacagccatcgagcttcacgatgctcctgaggaagcaccttggaggaggcttcatagacgccatagagcagcaccagttcgacaggatagttaagatcagaataggaaactacacactcatcggtgagctcttcaggaggggcaacataatcctcgtggattccgaaaacaaaatagtcgccgcgctccgctacgaggagtacaaggacagggcgataaagccgaaggcggagtacaagttccctcctgccagagagaacccccttgaggtctcctttgagaggttcctcgatctgatgagggaagagcctgagcttgagctcgtcagggctttggcgaggaagctcaacatgggcgggatgtatgcggaggagatttccctgagggcgggcttcgagaagacgacgccggtcaaggagctgagcgacgaagacctgaagagggtctatgacgagatgataagaaccttcaacgacgagcccaagccgaacatcgtcttcaaggacggggttatgcacgacgtcgtcccgatagagctgaaaatctacgaggggtttgagaagcgctacttccccaccttcagcgaggctctggatgagtacttcgggaagataacgctcgagaaggccaaaatagagcagaccaaaaagctcgaagagaagaagagggggctgatggccaccctcaggaagcaggaggaaatgctcaagggctttgaaaaggccatgagagagaaccaggagataggcgatttaatctacgccaactacaccctaatcgagcgccttctggaagagttcaggaaggccaccgaaaccctcggctgggacgaattcaggcggcggatagatgagggcaagaaaacgggaaacaaggtcgcgctcatggttaaaggcatagacccaaaggagaaggccgtaacgatagagctcgacggcaagaaggtaaagctctaccttgagaagagcctgggcgagaacgctgaaatctactacgagaaggccaagaagttcaggcacaagtatgaaggagccttaaaggcctacgaggacacgaagaggaagctggaggagattgagaagctcatcgaggaagagcagaagaaggaactgaacgtgaagaagctagagaggagaaagaggaagtggttcgagaagttccgctggttcgtctcgagcgagggctttctggttctggctggaaaggacgcgagcaccaacgaggttctcgtcaagaaacatatggaggataacgacctctactgccacgcggacgtttacggcgctccgcacgtcgtcataaaggacggacagaaagccggggagaagaccatattcgaggcctgccagtttgccgtttccatgagcagggcctggagccagggcctctattcagcggatgcctactgggcctaccccaaccaggtaacgaagcaggccccgagcggcgagtacctcggcaagggcgccttcatggtctacggaaagaggaactggatgcacggccttccgctcaagctagctgtgggtgtgataaactatgatggcgaagaatacgtagtctgcgcgccggttgaagcgattaaggcccacaccgacaaatacattgtcataaggcccggctcaatgaagaagggagagctagtgaagaagctccgcggaatcctcaagaagtggggctatgaggtaagggaagaagacctgaacgccatcctcccgccgggagggggagagatagtggaagtggtgggttagacgagctccttcccggttcccgtcatgacgagtttgccgtgcttcactcccttgaggctcaggagcctgtccgcgatttcttttatcctcttggccttccccttgactataacaacctcaaggcagttgtgttcgtccatatggacgtgaatgcttgagattatctcgttgagatagtcatgctggagatcgaggagctccttaacaacgtcagcttcatcatggttgtagagcatcgttatcgttccggccacctctttatcgcccgcttcccattcgtgccgcactatgaagtccctcatgaggtcccttatcgcctcgctcctgttaacgtagcccttctccgctattatctgatcgaacttctcaaggagttcttcaggcacggacacaccaaatcttatgatcttcatgccaccacctttacggtgttctcgcagaagttaaaaaggtgttcgaagaatagttccgccgggggtaggaatgggagtcgaagagctctatcagatagccaagggagaattcgcggaggacttaatcttcgagttggatgggaacccaatcactgtctccataaagggcctgctcctggcgagagttaaatcaagcacgtacaacttttcgttcttcgaggtaaccgagaccgagagcgttctcgccgttcaaatgaaggacttcgttgtttacatcgcctttgaaacggacgaagaactcagtgacgaagagttcgcggaaataggaaaggccctcctggagtatctaaccccaaagatagcactgctgacaacgaaggcggagaagttctacggtgggaaggccgatatcctgctcgatgatggcatgagttctgacttgagggagtttatgtactccctcctcctaaagcacaggaagggtgagagtccatacgaacagaccgaggtcgcttagggtggtggaaatgagcaggctttcaaaaatcgctgggattatactagccgttttggtggttctaagtgccgtttggtacttaaaatattacagaatagaacccgtgccaaaacccccactttggggcctctccgaccccccagttcttgagaacttaacgtgggttgcagagggaaacgttgagatagcaaacacgaccatgtcattggcctctagagtttacggagattcattgaagcagttgaaactcctggggtactcaataaactccggaaactggagcagtaccacctgccagtggagcctttggacaagaggggaaagagcttactacctggcatacaacggcaccagatttctctccatcaggggtgggccaaacgatgtcatcaacgccactgaaaggcagtggctctgtggcagaccattggattcgagcccgataaatgccccaactccagagacgatacttctaaggcaagcgatgtacgtggcaaacaggcttatggagaataacatctcagtaggggcgggaacctgggctggaccgatgcccgattggtacctatcgaagataaacttcagggttaacgtaggcgacggcgtcgacgtgttgatgctcctgtactcaagcgaagaccaagtaaaatacgctgaatacattatgaaaaaggaggacaggggcctgcactttctcagtggtgatgccgaggattacagggtgttaatagctttgaaaggcaggaaagccgacgtaaaagccgtggagacggcactccaaggtccgccagttagatgaaacgccaaaattttagtctcgcttttgtctttttctgtcatttttaccaatacgcgagcaaaagacatataaagctcgaactcttcagagcttcgatgcccaatgacagccaggagtgattgtttttggtgttaggagtttgccccttctcaagatggttagcctgaaaactgacgggcgggatcgtttttggagtgattaggggggcctgcttttggcctctgctgtgaaggtaccaaaacttctagcttagcattaacgttcttcgtcttcacagctttcacgctcattattccctcgtttttgggatttgttctttccaaagcggagtttagctcaaaaactctggaggcgttagaatgaaagccgttctgcccgattcgaagataccaaagaggtggtacaacatcctgcccgacctccctgaaccgctggcgccaccgctcgaccccgagacagacgagcctatggagccggagaagctcctaaggattttcgcggaggagctggtgaaacaggaaatgagcacggataggtacattgaaatcccgaaagaagtcagagagatctactccaaaataggccgcccaacccctctcttccgcgccacaaaccttgagagagccctcggcactccagcgaggatatacttcaagtatgagggggcaacggtaacgggaagccacaagataaacaccgccctagctcaggcttactacgccaagaggcagggaatagaaaggctcgtaaccgagactggagcaggccagtggggaactgccctaagcctcgccggggcacttcttggtctcaatgtaagggtgtacatggcgagggcgagctaccagcagaagccctacaggaagaccataatgcgcttgtatggtgctgaaatctatccgagtccaagcgatagaacagagataggcagaaagttcctggccgaggatccaaaccaccccggaggtctcggtatagcgataagcgaggccatcgaagacgttttaagggacgaaaaggcccgctacgccctgggaagcgtcctcaaccacgtcctcatgcaccagaccgtcataggtcttgaggcccaggagcagatgaaggagttcgaagagcccgacgttataatcggctgtgtaggcggaggaagcaacttcgcaggcttggcttatccgttcgtcagagacgttctgaaaggagaggctgaatatgagttcatagcggttgagcctaaggccgctccctcgatgacgaggggagtttacaagtacgactacggtgattccggaggatacacgccgaaaatgaagatgcacaccctcggccacacatactacgtcccgccgattcacgctggcggcctgcgctatcacggacttgctccgactctcagcgtcctgataaaccacgggatagttaagcccgttgcctaccaccagaacgaggtcttccaggcggctcacctcttcgcgaagactgaggggatagttccagctccagagagcgcccacgccatcaaaggggccatagaccgcgccctggaggcaaaagcgggaaggacgtgaagaggtcatactcttcaacctcagcgggcacggcttcctcgaccttaagggctacgaggactatctggatggaaagcttgaggactacgagccggagcacttcccggccctggataactactgatttagctccttccttttttcctttacagagccattagaaaaaagaaggggctacttcagatagccgagcttataagccagctcggcgttgagaaccgaacctccagcggcacccctgacgaggttgtggcccgttaccacgtacttgaagctcccgctgctcccctcaagcctcccgaccgtaacggttaggccccttcccctgtccctgtggagccgcggctggggaacatcggagtagacgaggggcctctcgtagcttggaaggccgagctctccaagcgggtcgaaggattcgaaggcctccctgacctcctctaggcttccctcttcaagcttgacaaagacagcctcagtgtgcccgtgtagcactggaacgcgggtagccattgcgcttattctgaattcggcgggctttacctccactccgtcgagctcgccgaggatcttcctgctctcgttttcgatcttccactcctcccctgggatggagggaatcacgttgtcctggattgccagggcagagaggccagaataacctgccccgcttattgcctgcatcgtcgccactttgacctccctgattccgaaaccgcggagcgccgcgagcgagaccgtgagtatggccgtcgagcagttcgggttcgtcactatgaagccttcccagcccctcctctccctctgaacctctatcagctcaaggtgctccagatttacctcgggaactaatatgggcacgtcaggatcgtagcggtggctcctcgcgttggtgaacacaggaaggctttgagctagctccccctccacctcccttgagatcgatgctgggagggcgttgaagacaatgtcaacgtccgggtctctgagaaattcagggagggaagtcacctccacatctctgaactcctctggcgaatcatcgaccagctctccgtacttccttccggcactcctctcagaggcaaccagtttctcaactctgaaccagggatggccagcaagaagcctcacgaaagttctcccgaccattcccgtggcaccgagaacggcaaccctcatttcgacacctccaaagcttaaagccaaaacgcaccaacccctgcgcgggtaatgtaaacctcggcatcgacgccgatctccagaaaggcctcggcaatcgctttcccaatggcgtgaagatcttcacccagcgcgaagatagcgggccccgagccagacacaaaggccccgtaggcacctgcatcaagggcggctttccagacccttgcgaaccacggcattagcctcagcctgtagggaagggctatcctgtcttcaagaagcctccccacggtttggacgtctccgctcgttaaggccttaaccagggcccctgcgagtgccacatttcttaccgcgtcgcccatcggaaccctctcgggcagaatccttctggcttctctagttggaacctcaatctgaggcagaacaaccaccagcggaaaatcaactggtattctatgaaccctcaaggggttaagggactcgattatcgtgaagtctccatagtaagccggaaccacgttgtccccgtgagcacttcccgaggcagcttcctctcccgcgagtgccgcctttattatcagcccatcatcctcgatgcccagaacccttgccgccgccaacgctcctgctagggatgatgcccccgaactaccgagcccgctccttggccttatctcctttctgagcttcatccgtaggtaaagttcctcaccgacaagcgtagcgagggcccttgccgcaacgaccgccacgttcctcccgtcggtagggacgtcgtaaccctccacctcaatctcccattcgtcagattccacgaacttgagctcatcgtagggttcccctatccctacgccgaagacgtcgaaacccggcccgaagttcgctattgtcgctggaaccctgattcgcatatcccccaccccacggaacggaagacctctaaacgttgccagcactgactcccccgcggataatggacagagccctcggcgggcttattctgtccgctatcagccgaagatgtatgagattgagggtactccctaggcgggcactcgggacggtcagcctgaccaggggaatacccagttcagaaccgttttctccatcaaagcctggaacttccgcaactccgacagcggttataaccgcctcctcgccggctaccctgtggaccaggatcggcaggctggacgactcgtagcccgctattgttccgatactccagtccctcgttctgccgaagattatggggatacccctcacgacatcaattgctccgtggtgtatcgccttcatcccggcctttgatgccacgtagagctcgtcgtaggacacgaagggaataagccttgctgagacgactcttcttggatccgccgtgtaaatgccgtcgacgccgctcattatcaggacggccctcgctttcaatcctttaccgagaaccgcggcggtgtagtcgctcccctcccttccgagggtcgttctgaggccgttgtaagagccgacgaagcctggaacgacggcaaccctacccctctccaacgcctcctccacgaccttgaggtttctggaggtcttcgctatgtcaaccctggcgttaccgaagttcccgtcggtctctagtatttcccatggctcaaagagttccacctgtatgccctcccgcctcaaagcctcagcaaacgccagccccgaaagccactccccgtaggagagcacgtggtccctgtaggcctcaaaggaggggaaatcctctcttgagagttttttaagctccctcaatggagcggcgagggtctcaaagggaatcccgtacttcttcgcgaagtccctgtggaccttctctatccattcaaagccctccccagttcttgaaaattttaatagggcgtcggtaacgcccttaatcgccgaaaccaccagggccacttcgttctcgtcccagaggcgggagacgaaggtaaccgcctccctaaagtcgtccctgaccgaggtccctccgaacttgaccacgagtctcccgcccgagtagagcactatacctccctcctgaagggtatggaggttttgccctccctcgccagctctctcctgacgatctcgacgcccttaaccatgttcacgagcttctggtaggcgattctcctgtcgagcagcttgagaccacagtcggggttgatgtagagcctctctggctcaatgtattccataaccttgcggatggccttcgctacttcctccgggctctcgacgcgcgggttgtggacgtcaactactccaaacccaagctcctggtgggtgagcttcttgaggtagtccagatcgcggaagtttctgttggcggcctcaagggcgaactgggaaacctttatgtcgtcaaagtagtccgcgagcaagtagtagttcgagtagcagacgtgaagcccgaacttcaccttaacgccctttacggccctgtttattgcttcaactgctatggaaacctcatccgggtggttgagcatggccggctcgtcgatctggatgaaggttgccccctccttctccagaagcttgaactccttgttcagaatcttcgccaggtcaaaggcgagctcctccttgctcgaatagtactcgttgaagctccactcggctatcgtgtatggccccgttatcgggactttgattatctccctggtggtgttctccttgacccagcggaactcgtcgagtacgaggggttcccggtactcgagtttcgagacggccgccgccttgttgaagtaggcgtttccccagaccctaattggtccgtagaatttgaagcccgctatcttggcggtgaagtattccgtcatctcgctcctgcccatctcgccatcccaggggatatcaatccccgccctctcgtgctccctgaggacggctacactcgcatctctaacggcctccctgaagtcctcctccggcagtctaccgagctctctaaggttgtacatcctcaggagccatctcggtttgggatagcttcctatgatactggtgggaagtattggaagctccatttcactcacctccgagctttccgagaagcttgagctttctccaggcgacgctctccgggaggaagtccaggagcgtgttcggggtgacgtaaatcctgctgtgctttctgaggtagggcctcagcttgtcctccaggcggtccctgcgctccatcctggtctctctagcgtcaactatgcccagaccgagctctccagagtacttttccggaaccgagccgctgacgaggtcgacgttcaggatgacgttattcgggagaacctggggggttccgaagtaagtaacaacccaaagcttcttgacctttgagaggcgctctatcagggtcttagcggtctccttcgatacctcgtcgctcttttccctcgtggcccttgagagctcagccgccagggcgggttcctgaatttccacgagctcaaccggaagctccttgatggcctcctcaatcactcccgcgtaggcctctgagagctcgtcgaggtttttgtagtactcgttaagtgagtggtaggccagggttaccgggccgggcaggacggccttaagcgttgccccggggtaaacttcctcctttatggccagcgcctggttgagccactcgggaagagggttctcgcgcagggaaagctcccccctcacgattggcgagcggtagaagaagttgttctcatagaacttgaaaagtccgttgacctcaatcccctctatgaagcgtatgaaggggttgaagatgtcgtcccagcggtagaggccatcggtgatcacctgtattccggcctccctgagcttgatgaaggccctcctcgtgtgctcaaggtaggccttttcgaggtcttcctccccaagtcttcctatcgagtactgctcgattttcttagccagggaaacgggtcttggaaggcttccaataagggctggcactatcattcaaacacccccttgattatttctctggcctccctccagaggcccagccattcctccagactcctggagctgactatgaggttgaggcccctcacggcctccacggcctttaactcctccaaaagggcctcgaatggctcatcccccacgggtatgcccagagccctaaggaagggcttcatctcctccttcatggggtagagcaccgatgcgattatcgggacatcaacgtccgcgtatttcttgagctcttcaacgatctttgaaatcccagttgcgctctcccccgccgctaccacctgggtgaaaaaggcctcacttcccgctatcagcttccttgccagtctccttgcctccagtttgggtctgtaatgagggttcattgtgctcgcaacccgcggcctgctctcgacttcaaggacttccttggtcggcatcacccctgcaaagacgagcctggccaggcgtatcaggttcgaggcgtcaacgtcaaatacgggcctgctgggtaccgcaaagcccggccagtcgccggttgtaagcagaacggcctcacagccgaagacctgggcggtcctgagctctgacgtcagggcgttcaggttcctgtcctttgcggtgatgtgtggcattactccagagcgcagtcccagggatttaaggtagcaggccaccgcaatggggtcgtagtgaggatatccaaggggattatctggcaccgttaccaggttagctctgatctctctaagaacctggagggattcctcgggctttgagaccgccgccacggggaactcaacgctgaaggcccttcccctctctaggttctgccagaaagccgaatccctgggcctggagtctctctccacgaggtcttcgagctcaaggagtaatggatgctcttcaaagagagtcgcggggtcaacgttgaacctctccagtatcctgacccaggggcattcttttccatccacctcgcacctctcgttcagcgcccccccgcaaggaccgttgaggagatcctttggacacgttgtcacctggatatcaaccaccccccagggccctgtctatgtcctcgatgagaagatcggcgtcctcaacgccaaccgagagcctgatgaggcctggggtaattccgaggagcctgcgcctctcctctggcatagtcttggcggcactcatcacggggtaggatgccaggctctcaacgcccccaagagagggcgaggggaataccctcttcagcctcatgagaaacgccttagccccgctctctccctccctgtggaggaagctgaggactccgccgaagaggggctttgagaatatcctcctggcggtgggatggtatggatcgtccttgaggccagggtagtgaactttttcaatctttggatgctcgctcaggaattcggctatggtctgggcagttctgctctgtctctcaaagcgcagctccaaagtcttgaggcccctgattaccagccaggcctcgaagggctggattatcgatccaagcctcctcctccagtgccagaggttttcaggatcaaggtcgccccatatcagagccccgcccataacgtcattgtggccagctatgtatttggtgaggctgtggattaccccatctgccctaacttttagcggcttgaaaatcaatggagagaatgtgttgtcaactacgaccgttgcccccacctctttcgcccgccttatgacttcaggaacgtctattaccttcagggtcgggttggtgactacttctgtaagaaccagcctggtgttctccgttatcgcctcattgagggcttctgaactcggatatgcaagcttgaccctcacaccgaacttcctcagctcctctgcgagctggatcgtcgttccatagccctccatgggaagaactacttcttcgcccgctttgagagtggaaatgtatagagcgcttatggctgccatcccgctgttgaatgccagagaatccgtgcccccctctatagaagcaactttcttttccaggagccttaccgttgggttttcttccctggagtacttgaggtcaaaacccctgtccgagagccccgtctcgcctgcctgctcaaaggcaaccgtgaggtacactggatcatggagaggcttcactgcaaccacccacgtccacttcccccacatctttatatatttttcgacatattttttggcattaaatattccttgtagttattcaacgctggatagttagaacggcagaaggtcatccccccattttggcaaaaaatagacatgaaaacttcaataaactcaaaaattatagccattataaacaaataaatgcaaatattgaagaaacgctaaagcttccagacaatagttctagggtagaagttcaggctcgcccttgcctcgggtatttccattcctatatttatcccaaggctcatcaaatccctcgggcccctcacttcccacctgctctctgcggaagacgtgataaacctggggacgcggtacttcttcaccagctgccaggtcttcatcatgaagcggagaatctgcgccctcccatagggattagcattcaggaggggtgagagggagaaccctatcgcaactccccgtctcgcggccattccggccaaagtatggtcaaagcccggatcctttctgccgaaccatggactaatcagggcatctacaccgctctctattgccatcctgtttattctcatgtcgccgccctgaacgtagagtagggccttgaggtttctgctctttacttccctgatgaggctcggctttctggtcacgaggaggagtgcgacctttccgtacttcccgcggagctccttgagttcttcttttagagagccccaatctggagggtcttcgaggacgagcttttttgtgaagactacttcgtcaaaccaatcgctggcaagttcgtgggcctcttcatccctaacgtccatctcgacgaagtagtcacgtgaaaaagaaacttcctcctcgctcattcctccagccactccctaatcgctttgacgaccgcttccttcctcatcgggaaggccttgacctttatcctaacctgaatgacgtcgggcccctcgtcaacctctgcctcaccgagataggccttctgcttgttgaagcggacgtagaaagttccctcctcgtcgaccttctcatcgaggtggtcgagaaggtactttttatcttcctcactgagcagttccttgaagtactccaggaactttcttaccgctttgctcctctttatctcgacgttcacaacctttattgggttcccgaagtagccctccgtctctaggatgtcaaagaggacgtcgtcctcgtctatctcctctggaatgaacgtcgctatcgcgtcgagcaccttgtcctcgtcttccgtcgcctggatgaaggttgtgagcctaacgtggtgtgccttgagctgcgccatctttctcaccggagaagggttttggcgagggggcttaaaaaccatttcactgtgcggttctgagagaatggcttgactggtaaggttagcatgggaatgttcatggaaaatcatgaatccttcaagaggttttccagggcctgtgatgcgcttatccccccacttcccttacccttcccttctccaccagcacgagcctgtccacgagcttggttgtggacggcctgtgggatatcgcgaccagggttatccccctggcttttatctccccgattatctccgcctccacgtccggatcaactcccgaaagggcctcgtccaggatgagaacctctggtttgcggatcagggccctggccagggctatcctctgccgctctcccaaggagacttccctgtaactgggcccgatcttctcgtccaggggcaggttcaccttcgcaatacttacggcttccctaagctcctcttcgtcgaactcttcccagagggttacgttctccctaacagtgccggggaatatgaactcgttggtttccaccaggattatctttctcctcaggttcccgaactccttggcagggatgtcgttaaccaaaacttttccttcctccgggcggtagtggcaggcgattacgttcgcgagggtcgtcttgccgcttccgctctccccgacgatgcccacactctccccgcgagatatcttgaggttcacgttcttcaggatcgtgccgtacgagacgtttctcagctctatgccctcaacccgtgtgagggttctctctccaaagttctcctcctccatgttgagagcctcatcgattctcttaagggctgggtaggattctggaacgtggccgaggtcgtttaaaattacgaccaggggctctatgatctctcccgccatcatgtagaacgccaccagagtgcctgtgtccatcctccagaggagcccgaccagaacgctgataaggggtacgagcctgtagagggtgtggtaaagatacctgtacttcaaagacgcgagcacgagccccttgaccgagttgtaccatcccgtacactcgtcgttcagcttcctcatggcccctctcaaagagtccgtgtttttaatgctttttctcccttcgaggttcgtccttatcctctcaatcagcattgagaacctgtccctctctttcgaggacaccttggcgagttccccgacctgctttttgaagaggagaacggtcgctatcaaaaacgggagcaggacgagggagagccttgggctaaggaggaagagggctattaaataggccccaaagctcacagcgttcacgaccagagcgggtataagggctgccgagagtgagctgacgtagacgacgtttgaaaccaggtccgtgaggtattccccgggagttttcaccctgaaggtttcctcctttgcgtggaggattttctcgtaaatcctgcctattatctccacctgcattgccctcttggatacgtcaaggaggtaggtaaccacgaagctcagggcgtttatcaagacgagaaaacctccaaggatgagtattctgctcgtgttcgggctgtttatcgtgtccctcagcatcagggcaaagcggacgttcaggtacgagacaatcaaattcaggagaacgatgagcgcctgcctcttcctcagcgtcctggaaagctcccagtacttggaaaacgagtacctgagcacgcccatcacagtacctcctttgcaagcggggtcttttatcccaatatctcaatgcagataaataaatcttactaaataacaacctaaggttaacaactctatattatgagcataagcattcagaaatgtttagtcccccagcaactattgtggatgaaataaaacagtcctgcttattcgggatcctcaagcattagccccttaatcccaaccttctcataaactgtgtccgagcttattttgccgcgtggaatgcatcgaaggcgttaggctgtactccccaatgccactggataaccctcaccatcggtgagtgccgagattaaagttaaaaatagaaacatcaacgctctctcaccccatcaggattaacttcaacttcgaatttcagcgcatccgttgggacaatcatcctgttggcaatgttgaacttcgcttgggcttcaaaggacaaccgggcattgttctgcgtggagacgaggataacgctcggatttgcatcgaggatcatcccataagcgggtcgcgatagcctcccatttctaatcttcttcacaaagtcatagtggataaactcaacatccctgccaatctcacgactcttaaccttccatctaaacgtgataccatcgttggtatcctcactagttgatgcagaggccgaataaccgagcgtgttcccgtccacgcttatctgtgaggtgtacgagtagtatcttttgggccccccgtccatttgggggagccacttgcttatccatatcttcgaaaggggtatttcggcgggaacactgacatcaactaccatttcatcaacggctatatcatgtctcttgggtttggcaacctgataaatctccaccagatagtacatcatcccagatgttgtggaaacgtagctgaactccgcagttacccccatctccattgtcgtcccgatagaagcctttttccatgtgatcgcaccgatgtcggtccaattcctagttcgtcccagcatcgatgcttctctaaatgttggtctctgcgagaagtgcctagcatttttgataaagtccctcagagcagcctccttttttgcgggcccctcaacaatgtagtaatacaccctaccgtctggattctcgtacactccaaggaacgttattcgagataactcgtagttgagaactattcttagggtcatgttattgtgttcaagctctgtcaaggctttcacagcatctccgccatagaagtacatcgttttgcccagtgatgctgggggaagtttgatgtccaacgtattgttggattctgtgggcttgatcattgggcggcttgtttcagccatcgctattcctaccatcagcagtcccaacaggactgcgaacaggggcttccacttcacgaagttcacctattttcagttttttacattattcattaatcaactcatcaactcatctttataaatttttcctcttacttaacataagaactctttcttttttcaaatattaattagttccaagttgaatttttagtttagaacgaatcaaaagaaggtcaggtcaaagaattgcccggaaatgcaaaagttgaaccatggaagcagagatgtatttcaatggagccttaagccactatcataagaactcagaattaaaggaagggggagaaaaatcacttacccttaccctggtgggctcttatgctgggcctgaccttctcggcgcccttacccttgttgagcaggccgcggctcctcttaccagcgctggtcagaccgcggaagaccctgcccttgtgggccttgccggctatccaggcgatcttcgggtcgctcttgatgaccgggtggtgcgggtcaaccattatgacctcaaaccacttgtacataccatcctcgccgacccagtaggagttgagaacctcaaggttcgggaacttcctagcggccttctcctcggctatccactggaggctcttcttcggtgagtacttgaccatacccatcttgctcggcttccttccgcccttccacctgggcctcttccttccgcccctcctaacgcggacgcggacaacaacgtagccctgcttggcctggtagccgaggctcctggccctgtcaagcctcgtcggcctctcgatcctcttaactaccgggtccctcctccactggatcatcctcttcttgaggagctctcccacgtagctcttcttcgggctcttccaggcttccctaatgtacttgtacattcccatctcgttcacctcttccctgtttgtggttctcccttccgggaacatcccgcgggtctgccccgcctagtcggtcgtggttcgagggtgagtttttaagggttgcggaataccagaaccggtggtgtccatgcgcatagaaaaactggctgccctgatggaagaaaagggcttcagcggggctcttgtaagccccggagcgaacttctactacctcacaggccttcacatccatgaagcgggcgagaggctgacggttcttgcggtcaaccctgatggggagtatcacatcctcgccccgagcctctatcagaacgtcataaaggactttcccgttacgttctggagggacggcgagaacccgtactcaaagctcgggacgataatgaaagagcttggaatcggcgggaaagttttggtcgagaacaccatgcgcgctgactggctcatcgggattttccacagcgacaaccgcttcgatccctatcccctcaacgtgctgatgagggaactgagaatgcggaaggacaaggaggagcttaagcttatgcagaaggccgccgaagtggcagacagggtgttcgaggaaatactgagctgggacatcgttggaatgaccgagaaggaattagctctcaagatagaactcaggataagggagctcagcgacggaatctccttccagccgatagtggcgagcggtgagaacggggcgaacccccaccacgagccgggcaacaggaagatacgcaaaggggacatggtgatcctcgactacggagcgagatggaagggctactgctcggacataactaggacagtagccatcggaaagcccgatgaaaaactcctcgagatatacaggatagtgaaagaagcgcaggaagacgccttccagagcgtcagagaagggataaaggcaaaagaagttgacagagccgcgagggagacgatatcaaaagccggctatggggagtacttcacccacagaaccgggcacggcctcggtcttgacgttcatgaggaaccatacataggaccggatggggaagtcgtccttaaaaacggcatgaccttcacaatagaacccgggatataccttccaggcctcggaggagtcagaattgaggacgacgtcgctgtcatcaacggcagaggaaagagactgaccagagcggacagggagctggtgatcctctgaagttacccctacagttattttcaaaaaggccaaaaatagagcagaatcaaaggcgctgagagactattcctcctctatctgctctccttcttcacctctttcattggacagctctctgagtctgtcaataccagagccaacggctatgagcacgtccccctcctcgatggtctcatcctttgaagggttgtatatgtaccttccgcccctcttgatggcgatgagcctgactccgaccttggtcgggagcttaagctgcttgaggggctttcctatgagtattgaacctttgttaacctttatccggcctatttcctcatcgacgtcgtgcattatcttcctgatgatggggtgaggctccacgtccctaagaacgaggtcggcgatctcgtaggccgaatcacttatctgctcgtttatggtcgccatctctatgacgctgagtagtttttcaggattttcttcgtgcttcgcagctctaagggcgagctttttgaccctcagtgtcagctcgtccatcttttcctcaaggatgtagacctcgtcagctatgtcctcgctgtcgtacatgacggccgaaaacgcgaggtcgaccatgagtgatgaaaggttcttcatctcgatgaggcagttccgtatttcctcaagctctttcatcgcctaccacccttatgactcccctggctatctccttcaggtgctcaacggaggtgtgagtgcccctgccgatcaaaacgtctccgggctttatcttgaagtcgccgtcaggggctattatccatctcttgccccttctcaccgctattatccagaccccagtattgcttgccagggccagctctcccagagtcctgcccacgaggacggagtcaggctttacctggatcttcgctattatctcctcactctcgagtattgcctccgtgataacggggtgaagctcaaggccctcaagcaccatcttggcgagatcccctgcggcgttggagatgtcctctatggagtttgccatctggagaactgaagttatctgttctgcctctttgggattcctagcggcaagaacggcgtgggtcatgaggtggtagttaaggagatccatcctctcctccaggtccagcacctcttcggcaatctccttgtcgttgaagagcacggcactgtaggcgaggtcaaccatgagctcgacgatgttcttcatctcgatgaatatctccttcacgctcttgggccgatactcaaactcctcaaagtcctccattctttttctcctcctgcccttcttaggccccacctctttaatctttttcggggctagacgatcatgtgggcaacggcaacgataaagagggtggagattatgtcggctatggtcgttatcgtgggcacggtggcgttgtccgggtcgaggccggtcctgtcaaagattattgccatgaagtaggccatccacatcacgccgaagatgaggatcggatagagaaccaggaaaggctttaccagacccactctggctccaagggtcaccttcacaacgaggatggctatgatgttggccagcaaacccagcagcgcacccacagcgctgtaaacgaggatctcaaccagaatctttctgttgaggaagccttccagctctccgaggtggatccttgtggatgtttttgtaccgattatcgcgcccaggttgccggttgtggccaggacggcaggatacatgacgctgaatatcaccgaggcgtagatcagcccgctgtaagtctcaaggaggcctcctgagacgctagacaggagtgctagggcacccacaaccccaagtacttctgcgagcactctcctatcgcttttctctatctttgagaacttggcgagcagtccgaggagaaccagccccgccgcgaagagggcgtagaactcaactgaaaatttttcatagaggagcataaagctgacgaggaggggaacggttatcaggtcggcggcggaagtgactatgggggccgctacggcatcagggtcaatctcatgtttgaaggggattatcgttgcgagggccgttatgtagccgagcactatgccggcaaaaacagtcgaggctatgattatgagcagaacggcaatcgctatctcgaggctccttattttaatcgcacctatgctccagagtatcagaactgggacgagagagaggatgattgagataaaaacgtttttcgtgacgtttctgtctttgattgtaggtgtcatttcaccaagatggagcattgtagtgaagcgggaggcaagcgagccgtagatgtttcccctgagccccatgaggccgggaagaataacgaggattatggggtattcgttcataatcttgtcgaagaacttacctagaaaagctcccgcgaagaagtccagcaggaggcacagcaggagcgctggaaacgaagcgagcattacttcccttatgaactccctgaactcctctgatatccaagcgcggactactgccatttccatcaccctccattgccgcttccctcctttggaacactgtttgctatcacctcaacttttttcagggcgtataaaaacgttttgtcgctttcatattgaattttaggccagtagatagcccacacagccccctaagtttgactgttcagcgtatttgactgattattgccaccttctgaaccataggcgaatgtcccaataagattggtttggccaaccaaaagggcagtagagaacaatcaaacccatccaaatttctgttccagctcggtcctcagcgttccatttaattaaactacttgttttttaatgtctttagcccaacaaagctcaaaaccattcttaaacatttgaaacgtgcgtttcaggggctttttcaccgtgtccctaaaataggagttcagtactacacactatcgaggtgacggccatgaggtggctgaaggtatggttgataataggcctcctgctgggaagcatagtcccggcagggatggcacttgcagacgaggccgggacggccccactgccgccggagattcaggacaacagtaccaccgagacgcaggttgtagcagaacacatagtctccgcccttgagaggctccacaatgtaacatcaacgataattgagaaggcaaacgtcagcgagaactcaacggtcttcgagcactaccagaaggcagaggagtaccgtgaggctgccatccaggactaccagaatggaaactacgagggtgcaatagcaaacggcatccttgccatgaggcactacaaggttatcctcgagaaggtcaagaacgtgagaaacgatgtcggggagaggctccaggaggagctcaggaggatgcagggctatttcatggctgctgagaagaccatcagaaaggcccaggaagaagggatagacgttggagacgcaccccagctccttaatcagacaaaggaagcctacaggcaggtcatggaagacataaagaacaaagacattgagaaagccaaggaagacctagcggtagcaagggagctcaagaaggggctcgatgagaaactggtggagataaggaaggagctcgcctacgcaaacgctgacaaaatagtaaacgctttcctcagaaggggggagaacgcaatgaagttcgcccagagagtcatagagaaggcaaatgctagcggtagaaacgttactgagctccaggagatgctggaagagttccaggcagtctacgagcaagtcaaggagttggccgaccagggcaactacacggaagcgctcgacgttataaccgccaacaaggagacaataggaaagttccacaaggccattgaactgaccaagaggaagatccacgaagttgaagtcaaggaaaagataaagaacatggccaagctcatcggagagctcaacgagcgcattggaaaggacgcaagggcactcgctgagccccacagaaagggagttgacaccaggaccgcccagctcaagctcaagacagcagcccaggaggttcgcctcagcgcggagctcctcaagcgcggaaagaaagccgaggccaaggcccacctgctcatagccctcgacctgctcgaagacgttgagagcttcatagttaagcacgcctgatattctttattctctttattcaattcaggggaagttaaagcccccagtatgtctgtccagcaaaacttatatccccttgcttttcagtatttctggtgaagaactgtggatgagattaaattgctcacatcagatttagaaaagctcgtggaaatgagttctatccctcttgactcgcttaacgaagtaaaaagagaacttaaaactcgggacatggttgagtacctggatgcgatagttgagagggccaagcccgaagaaagcctgaggcagaacttcttctacaagggagccccgataatgaagcttctcggagttagaggctccccagaagtaaggataggttcaggctacgtggatctggtgttgagggattccctcggtaggaaaatcatcgtcgaattcaaacgtctcttcgaacttagaaggaacaagcttctgagaactgacttaaactggaaagagcatgaggagcaaataaagaaatatgttttttctgaagagtccagatttgtcgtgttgacgaatctctacgagtggtacttcttcagctccaaaacgataataagaaaatccgaaccgttttactacgctacttttattgacctcgtccatgacatagagcagtatgggagcctctacgatcttcttgagaggaaggaacacggaatacaaaaaggggagcttgacaacagatttttcaagagcctacgtgagtggataaagaccctcgaggatgttgagttcaaaacagacgagagaatcaagatgcacctgattttgcatctcattaacaaattcatattcattcagactctcgacgattatggggtcgttgagttcaactggctctataagaagtggatgggcttctccgacagaattcggctggcggagagacataaagagaagcccgaagtagcggggaggcattacaagtccttcatagagaagttcctcggggagataaacgacttcttttacccattgtatgacacagagcttttctcagacagactgattgagtttataaaagatgaacccgagaactgggcacgcttttacaaggccttagagaccgtccttggattcgccccgtggcaggagaccggtcttaagatgggcataacccagtacgactacagccagatagacgaggacatccttggaagagcttatgagacatacctggctgaaaagaggaaggagaagggaatctactacacccccaagtacgttacccagttcatagtcgaggaaacccttgggaaaagactaaacgagcttaaggaaggaataacaaccgcaatacgggagaacgactttgagactgcggaaaggctcagcaaagagctttttgagattaaagtagcagatctcgcctcgggttcaggctcgttcctcatcaaagttctcagggggctctgggatacatattcggcggttattgacgagctgaagaaaaaggaagaagaactgatcggcaagaagacctcagatctctccgccctcgtccagagaaaggacatcatagagggcatagcaaaaatgagagagctcttcccgagtgatgagaggattctaatgtcccagatggttctgaggcacgtctttgcggttgatctcgacgagaacgccgttgaagtggccaagatgaacctctggagagagctcataaagctcaaccccaaggccttccgctgggataacctaggagaaaatgagcacgtccttccaaacctgagcctgaatctcgtgagcggggactcgctactcggctttgctgaccccaagattttggagggcagggaagaagtaagaaagcttatggagctgtgggagaagttcatcgagaaccccgaagacctggaggttcttaacgagatcaaagagataaaggaaaccctcagaggagaactcgatgaaaggtatcgggagctgttgagggagaagcttggagagaaggccgaagccctgaacaacagatttattcaccacccgttggagttcttcatggccttcttcaatccggatggctcgcttagaggaggttttgacttcatagtcggcaacccgccctacgtcaggatacagaacctcaagaaggagagccctgagtacgtggagttcttgaacaggttctacgagagcgcacacaagaactacgatttggcaattccattcattgagaggggctacaacctgcttagggaaggcggagagcttggcttcatagtcaccaagaagtggatgaaaatagattacggtgaaaaactcaggggacttttgtcaagggagagagccgtcaggttaatcattgacttcggcgatgaacaggtcttcaagggagcaacgacgtacaccatgatacttgttctgaggaaggagaggaacgataagctaacctatgccaaggtggaggagctgaaggaaaccgttgaccagctcagggccgtgaatgagccggacaagtggaactcggaaaggttgagcgtcatcaaagttcccaccaaggagctttccgaaaagccctgggtgtttttgaccgaggaggagaagaagatcgtggaaaagatctacaatggaagcaagaggctgggagaggttaccgatatctttgtggggcttcaaacaagtgctgacccagtttacattctcgaatacgttggggagagtggtaactactacatagtccactcaaagattacgaaccaagaacacaggcttgaaaaagatctactccatcctctcctgaaaggagaggaaataagacgctggatgatcccagaatatcgttatctcatcctgttcccgtacaaagtacatctggtaaacggtgaaagaaaagcagagctaatacctatcgaggagcttgcgagcaaatatccaaggatctgggagtatttaaacatttcagaggttagaaaaaagcttgaagggagagagcgaggtagccttaaaggttctccaaaatggtacagctatgtttatgagaagaatcacgaaaagtttgaacttccaaaattaataacgggcgttctttcaagtgaacctcgctttgcacttgacaaaaacggagactattactttgtcggtggcggaaccgcaggaggctatggtgtcctgataaaggacgattacaaagataggatttccctgcagttcattggagcgcttcttaacagttcactccttgactggcgtgtaaagcaaataggaagcgagttcgagggtggattctactcttatggaagggcatcaataaaagaccttccaatcaaactcccctcaaccgatgaggaaaaaaccctcaaggaggaaatagaggacaccgtcgaggagataatcgccctccttaaaaagcactacgtagtaaaatccctgtggagggagtggagcaaaaagctggctaacaagggaaccacactaggaaagctcatcgaaggctggaagaagggcgtcggaaagctcccgcctgaaaagctcttcttcacggatgtgagactcatctcgaatgaagaaatggaatacgaaggctttgagcttgagctgaaggacggaactctaaggctcttcggaagggagtgggacatgctcacgcccattctcgagcttgagggggacgaggagatactcgaacacgtttatctttcgatgctcgaactcctcgaatcgaggcagagggtcaaaaacctcaaggacatcctgaacaaaacaagagtcctcaccataggaaatgatcccgaggaaacaaggaggatcgttaaaaccgttaagcaaagggccggtgtgaagcacctaacttcatttctggagctcgttagagagaacgaggcatacctcgacgctctcgtcttcaaactttatggactgagtactgaagaggctaggatcgttctcagaaaccttaacaaaactcaggactacattgactccgtcgtcaggcacctctgactttatctttttactctcgatgtcacttttccaaaaaacttaaatacccaaaactgctactcgctccgatgccgatgaggggggagtaccttctccaccgttcagcgggcgtttcgctctgattacctaaatggcccccctattctggactctgaatcgcgcgctcttttgaaaaacttttgaggaggtatagccatggctgagcttaactttaaggccatcgaggagaagtggcagaagcgctggatggaagcgagggtttttgagccggacaggaaggcaaagcccaaggagaagaagttctacataacggttgcgttcccatacctctcgggccaccttcacgtcggccacgcgaggacgtacacaatacccgatgttatagcccgcttcaagaggatgcagggctacaacgtgctgttcccgatgggctggcacatcacaggcgcgccgatagtcggtatcgccgagaggataaagaaccgcgaccccaagacaatccacatctaccgcgacgtttacaaggttcccgaagagatactgtggaagttcgaagacccgaaggagatagtcaagtacttcatgaaggccgcgaaggagacattcataagggccggcttctccgttgactggacgagggagttccacacaaccagcctcttcccgcccttcagcaagttcatagagtggcagttctggacgctcaaggacatggggctggtcgtcaagggcgcccacagggtcaggtgggatcctgtcgtgggcactcccctcggtgaccacgacataatggagggtgaggacgtccagatactcgaatacgtcataatcaagttcatccttgaggagaacggcgagaccatctacctgccagccgcgaccctgaggcccgagacagtctatggagtcactaatatgtggctgaacccagaggcaacctacgtgaaggcaaaggtgaggaagggcgacagggaggaactctggatcgtcagcaaggaagcagcttacaagctctccttccaggacagggagatagaggtcatcgaggagttcaagggcgagaagctcatcggaaagtacgtcaagaatccggtgacgggtgacgaggttataatcttgccagccgagttcgttgaccctgacaacgccacgggcgtcgtcatgagtgtcccagcccacgcacccttcgaccacatagccctcgaagacctgaagaaggagaccgagatactgctcaagtacgacatcgacccgcgcgtcgtggaggagataagctacatctcgctgataagcctagagggctacggcgagttcccggctgttgaagaggccgagaggctcggagtcaagagccagaaggacaaggagaagctggagcaggcgaccaagaacatctacaaggccgagtaccacaagggaatcttcaagatagagccctacgccggaaaacccgtgcaagaggtcaaggagcttgttgccaaggaaatgatggagaagggcatcgccgagataatgtacgagttcgccgacaaacctgtcataagccgcttcggaaaccaggccgtcatcaagataatccacgaccagtggttcatagactacggaaacccagagtggaaggccaaggcgagggaagcacttgctaatatgaccatctaccccgagagcaggagggcgcagtttgaagcagttatagactggctggacaagaaggcctgtgccaggaaggttggccttggaacaccgctcccgtgggacccggactgggttatcgagagccttagcgactcgacgatctacatggcctactacaccataagcagacacatcaaccagctgaggaaggaaggtaaactcgacgccgagaagctcgacagggagttcttcgactacatcttccgcgagcccttcagcgaggagaaggagaggaaactgagcgagaagacggggattccggcggagaccatccacgagatgaaggaagagttcgagtactggtacccgctcgactggcgctgttcggccaaagacctaatcccgaaccacctgacgttcttcatcttcaaccacgtggccatctttgataaaaagcactggcccaagggaatagcggtaaacggcttcggaacgctggaaggccagaagatgagcaagagcaagggcaacgtgctgaacttcattgacgcaatcgaggagaacggcgccgacgttgtgaggctctacataatgggcctggccgagcacgacagcgacttcgactggaggaggaaggaagtgggcaagctgaggaagcaggtcgagaggttctacgagctggtgagcgagttcgccacgtacgaggccaaggaaggcgtcgagctgaaggacatagacaggtggatgctccaccgcctgaacaaggccattgaaggagcaaccaaagcccttgaggagtttagaacgagaaccgctgtgcagtgggcgttctacaccgtcctcaacgacctccgctggtacctgaggagaacggagggaagggacgacgatgcaaagcgctatgtcctgagaacgctcgccgacgtctgggtcaggctgatggccccgttcacgcctcacatcagcgaggagctctgggagaagctcggcggagagggcttcgtcagcctcgctccctggcccgagccggttccggagtggtggaacgagacggttgaggccgaggaagactttgtcaagtccctcatagaggacatcaaggagatcataacagtcgcaaagatagagaacccgaagagggcatacatatacaccgctccagagtggaagtggagggtcgttgaggtagttgctgaaaagagggacttcaaggcggcgatggcagagctgatgaaggaccctgagatgaggaagcacggcaaggaagttagcaagctcatacagaggctcataaaggaaagggccttcgaggtgaagcgcatagacgaagaaaaggcccttagggaagcgaaggacttcatcgagaaggagctcggcatcgagataatcatcaacccggaggaggacaggggcggaaagaagaagcaggccatgccgctgaagcccgcggtgtttgtggagtgagggggtttctcttcttttttttctaagtttggtcaactccctgaaacagttccctgtactcccgattctttgttttggtactctgtgtagcctcctaagaatcccactagaaggcttgcaactggccaatagccgagaataaacataattgggattataacaacgagaatcagggcagtgaatcttggtaatttgccgttaaggaccgacagagttccacgctgaaatattgagactccccacaatgcaatagcaatggagaatgcgagctctagggagttccctttaatccacgctagaggacttatcaaagaatagattactggacctgctatcactcctaaaaaataaatgagaagcatatcttcaaaaaaggtaaataggacttcagataagtacctttccaccgtctcccacctttttattctttgagtgtacacagtagcctgttgaaatgaataactaaagcaatatcacctcctgtttatgaaccatgggtacatttccactgtgaattcaattggaggtgcttggacggtgtgccttgggtgggaaacccaacaattgtagcccaagcagatgataacatcctcttcataaacgaactctgcttcaccccttagcttaagctctatcatgtggaatggtgttccctttttaacgaatgggacaacaacagggtgtgccacgaatattttgccccacgcgggagagctgctcagtaacccttttttcttcaggtcataaaactgaaattcaatatcgcggttggcatcgatgtcgtccgtgtaccatttgaaaatgagccccttagtgtaagtctcactgaagcctgctgctgcacttggaaggcccttagcgtcgatccctatatttaagccccaagtgacggttggctctgatgaagaaccactgccttctggcctgaaactccccacgccaaagtaggcttgttcaggtgagggattaaggatcgttgccctttctctgacctccttaactgccactcggaaattcttagggaaatctctctcactgggcacttttgcctcatggctcatgtagacgtagtaataatatcccattcttgcttcggctacccaaaaatcagcaccaagcttgttgtacacatgaactttgtgcccctctctggttgttatttcctctgatgtagtcaccgtgctaatccggcctattgacgtccactctcttgggggttcatctgcgagcgcacctctaactttgagagggagctttccgaactttctggcctcaatgtagaagcttttcgtcatgacttcaacatccgaggccttaacatcgtacccgaggtaatacaatggggcatacgctcctgagggaagtcttctcagggcaataccaacgaaagtagcattactgaactcttcaaggtttatcctaagtgttagtctatcccaatatttctgcaaaaactgttcagccatttgtgtactggattttccggaaaaagttttcaatgcaacattatcccctgggactggcaatggcaatgagggctccttttgaggcgatggagaaactccaacctcttcataccctcgaacctcggcaagtactacgctgccaaccacaagtagccccagcaggactgcgaacaagggtttccacttcatgcttgcacctcttacagttgtttgcactatattttgcgacagacacatttataaactttactattcaaagtttttaaaatgactatgccaatagtaattttattaatacttctaaaattccgacttctctgggaaaataagccgtgagtaaaaagtgttgcatggggatgtaagtgagccgtagagacttattaaatcaagccttttgggagaaaccctgaaactccaaaatttctccctgccattaattcaacaccgccttataaaacattttcccaaaaacgctttaaacagaggttctttagctctctttggtgttctccatgcctgccaacgaagaaaagtttagagaagagatcctttccaaaatcccaccccggaacgagccacctttgcctcccaactggttgcatattgaaatgctcgaacgattccgtgtcctcaggttcgcgcccctaagagaaggcatgaacgtcctcgaaatcggctgtggtgctcacgcgataacaacagttccgctcgcttacctcgttgatgagaccggtagggtagttgccgtggataaagcccgctggcacttcttcgaggaaataacatccgttgctggactgaaacacaggataatccccatgaaactcgacgcgagagagctgccctttccattcaaagcgtttgacctggcagttctcgtccacggcatcagaagtctgaaaaacgaagaaaccatcgtaaaggtcatatctgagatgctccgcgtttctgatagagttttcatagccgagagcctcccaatagcaaacaacgagcgccagagggcacaccttgagctgtacaacctgaggcaggagatattcgaggctttgttcggtgagaaggacgacctgcactacttcccgctggaaaagctggaggagtttgtggagcgcgccggaggacggatcgttgagagcggaaccttcgagcccaacctgccgcactacctcgcatacataccgcgggagtacgtatcgcagataaaagacgagaaaaagcgcactgaactcctggagcgctgggatagggcctatgaaaagtggaagaacggagccgaacatccacccgtgggatggctgattgccgaaagcgaggtcaaccgaaacccttaaaattaataacgcgatattaaataccatgatattaaaattcatcgatcgggaagaggagctccgggcacttgaggagctttacgcccaggacaaggctcacctcgtcctcatctacggcaggagaagggtgggaaagaccgagcttgtgaagcagttcataaatggaaagaaggccttctacttcctagctaaaaaagagccgatggagcttgagctggataggctcgtaagggccttcaacaggaagttcaacgtcttcatcgaggctgagaaccttgaggagttctttgagagagtaaaagagttcggaaagatagccttcgtaatagacgagttcccttactgggttgaggaagataaggggattccctcaacattccagtacatctgggatgaggtgctgaaggactcaaaggtttttctcgttctgctcggttcttcgatctcgacgatggagagccttatgagttacaagaacccgctctacggcaggaggactggtcagataaagctccgtccccttgaattcttccacctgaaggaggctttcccgcgctacagctgggaggagctcgttaaggtctatggaactatagacggaattccagcttacttccagtacttcgatgactctctttcagtggagaaaaacatcgagaacaacttctacaaccgggtgagtgtcctctatgaagacgccgagaggttgctgaaagacgagctgagggagccgactacgtacctcaacatcctgaaggccataaacgacggaaaggcgaagctcacggagatagctaatgagacgagggtcgctgtgacgaacctcccgaagtacctcaaagttcttgagaccctcgacctcgtaaagaaggagtacccgataaaccagagaaagcgcgggcgcggtgtttacagggtgaaagacttttaccaccgcttctggctccgctttgtctacccctaccgcgatgacatagagatcggagcaataagcttcgaggacttccagagcgacttcaaccgctacctcggcgaggtcttcgagagcgttgccggacagttcctgatcaggatgaaccgtctcggaaagctgcccttcaggtttacgaagctcggaaggtggtggcacaagggggaggagatcgacttggttgccctcaacagcatcacaggggaagcgggctttttcgaggccaagtggaagaacttgagcgaaagggaagcgaggggaatcctgaaagaccttgaaagaaaagcggagctcacgggaataccagggaattacttcggactgatcgggaagaggatagaaggaaaagagagcctcagagagaaaggctacctcgtctttgacctcgaggatttcaatgaagttggggaggaagggcgctgactactccctcaccagcctcctcgccagctcagcgtagagcgccggcatcttgcggagcgagtctatctcaacgtactcgttcgggccgtggatgttgcctcccctcgggccaaagtctatcgccttcaccccgtagggcgtgaagaaccttgagtctgccgctccaggcccctccaccggttccgccttctcgccgagctcctcaaggacttccagagtcactctgacgatcttttcctccgggtgggtgaagaggtagcccgccttttcattggtggcaacctctatctccgccttcggaaggttgaactccgccacttccctcatcgcctgctcaatctcgtccttcaagcggctcatcgccctcacgtcaaatttgaggatgtgcttcccgtctttgatggaatacagattgggcgtgatcgagacgccgtagtcgctgtacttctccgcttttatcggagccctcacgaagggcaccaccgccttgaggagcctcgtgaggccgacgtcaacctcgacttcctcaccctcgccgggaacaacgtacgtaagggtcacttcacccggcacgacgttgcccttgaggaactttccttcgagcgaaacggcgaaagcctctctgctccggaggaagtgcgaggccgctatgagagggtgtgtatcaacgccggggaggaagtaggcggcgtgcctcgtctccagcacgggcgtccttatcctgaagatctcacgcttaatagtgcccttaaccattgttttctccgaggggacgcgcacggtaactccaaagcccttcctccttctgattatcggcttcattccaatcccgtcggcgttcaccatgtactcgggaagttttccctcttgagcaagcctttcagctatgtgcatcgccatcctgccaccgatttcctcatcgcccgtgaaagcaaagagaacctttccatcgagcttctccttcgagagctccttcagtgcgagcattattgaggcaacgttgcccttgtcgtcggcactgccccttccgtaggcgcggtctccttttactgtgagcttgaagggatcggtctcccactcctccctgtttacgggcacgacgtcgaagtgggccataaaaaggagcttcggctttccttccccaatctcaccgtagaccgcgtagtagccgtcgcgctcgatcagctcgctctctatcccccacgatgcgagcgtatcccttatgaaggccgggcaatccctggaaggccttatccccctggccgggtcgttcacagtctcaaaggacacaaggcttgagaggagttcgagaacgtccatcgaaaccaccgttaagatagacgtcgaaatgatatttaagggttggtctggtttgagacatagactacctcaacctccaccctgaagtttgccgcaataaccaggataaccaaaacaaggagcagaactaatcctttggagacccagatcggataaggttcaggaaattcaatttccgacttcataactgtgccttcgtcccacacaggggcttcagacggcatctttgagagcacgaggagtatcaaaaagtcccccgccattccagcggtgttgaagatgtataggagtgcccagaagggagagcgagtaagccacgagactaagaaggcagcaatggaaattaaaataggagccactatcacgtatctcgctttcttaactgtcaagggagtcctaaagctgatgtaaggcgtaaccattccatacttggctgagatcccaaagccgacgtcagcgccgcagagctttgccacaagggcgtgaaacccctcgtgaagaaggacggtaaggacgagcggaagagcaaggtagtaaagggtatcccagtatgaacgaaacgacacttcaagccagggtgctgttagggcagagcctatgagcagaagcagggataggattatgacgtcgttgtagtacttgaagatgtcaaattctcctcccgaaacgtcctcccccatcgccattccagcacaaactaacgatggaaagttaaaaagattttgaccaacaagtgagtgagagaaagaggcctcagaactccctctcgacgaggaactccgcgagaagctcaaggtctctcctggcttcgctctcagggagaaccttgagggcctcgttcgcttccctgatgaggttcttggcatagtttgccgcgtagtctatgctgccgtacttcttgaggagttcgatggccttcgcgacctcctccttgacgttctcgtcgtgtatcagcgcatcgcccttagcatcgccagcatacttgccgaagactttcaggaactcggccttgtcctcctcgctcgcgtgctcaaagaagtggctcactatgagcgtcttcttacccttccttatgtcgcttccaacgggctttccgagcttctcctcgtcggcaatcagatcgaggacgtcgtcccatatctggaaggctattccgacgttcatgccccactttgagagggccccgatgtactcctcgtcctccgtgcccactattgcacctatctctgccgagccctggaagagcgcgccggtcttgccgcttatcatcttgaggtactcctctacggtgacctcttccttcgtctcgaactctatgtcgagggcctggccttcacagagaaggttggaagtcctgacgagaacatccaggattctcgccttcttctcggctgggacttccgctttggctatcgcctcgaaagccttgctgaagagcagatcgccggcgaggattgccatgttcactccccagagcttgtggacggtcggcctgccgcgcctgagctcgtccatgtccattatatcgtcgtgaacgagggagtagttgtggatgaactcaacggaagccgccggatagagggccttctccgggtcgccgccaactgcctcggccgcgcggaggacgacgaagggcctaacgcgctttccacctgcaagagggtagtgtctagcagctttataaagctcaagaggctccttttcgggaacaagttcgagaatgaccctatcaacgtccttcgccttctccttaatccttgcaaacagctcatcgtactttcccatgataccaccccgtgagcaatgaaagtgaagctgaaaaaagagagaaggtatcctttatcagttttaccctcactcaatctcaaccgtgtatccgttcctcgacacgaagacatctctgccgatcaggtagccctcttcctcggcaagctcggcgtaatgggtgagcatcctgaactcgccgtgggccggaacgatgttctcagggttgagcatcctgaggaggtagcggtggtcttccctgctcgcgtggccggagacgtggagatcttttatcatcctgacgcccttcatcttgagttttgtctccaggatgtagcgctgggccctgttgagggggttcggtatcgttccagcggagaaaacgaccgtatcctgctttcctatgtcgtagagctcaccgttggccatcctggtcaatactgcccccggttcaccctgatggcccgtaacaacgaggaggtagttctccctcgctccagagacttcagcgaggactttctttatggcattcgggcttctgactgccctcgctcccttcatctttatcaggccgagctgtttggctattccggtgtacttcgccagagacctgccaacgaagacggcctgcctgcccatcttgttggctatccagataagctcctggagacgggctatatggctggcaaaggtggtcgctatgagacccttctcgtccataccctcgtagaggaagaagtcttccaagagcatctgggcaacggcctcgctcggtgtcttagtcggctctgcgacgcgggttgattcggctatgagaaccttgacgccctccttgccgagctcctttaggcgtttgtagtcaggcctctcaccgagcgggttgttgttgtcgaacttgaagtcgccggtgtggacgaccgcaccctcgggagtgtggacaaccaccatcgccgcctgaggtatcgagtgagttatccgtacgaactctatcgccaggttctcgctcacctggactatctcgccgaattccgtttcgtacatcgggttcttgacctcgaagtactgctcgctcttgacctcgctcttggccagctttatcgtgtaaggagtcccgtatatcggaacgtccgggtagtgaggtgctattttcccgaccgctccaatgtggtcgaggtggccgtgggtgaacgttatcgccacgaccttcttgtttctcagaattgaatcatcgggtattgcgccgagcctctggagttccttggtcgggaactgctgaatgttgacatcctcgtggatgagaacgcggtcgagccttatgcccatgtcaattataacgacttcctctttcctgccgtcagaatagccgacggcggtcatgttcttaccgacttcctcgtagccgctgattgtgtaaactctaatcatgcctaatcctcctcctgccccaggcccctctcgaggcgtggggctgcgttgctcatagttgttgtcatgggtttaaaaaggtgtgcatttgaaagaagtacgagaagaaagagggaaagcgcaaaggacggaaatcagatgcccctgttcctcaagtaagagggcaggtcaatcctctgctccagccactcccttgtgaagcccgttattacgagcggaacctttctcagctcctcgacatttctggccccgacgaggaacatggcgtttcttatctcctctatgtaacgcctgaggatttttatcacgccctcaacatcgcccttgacggccggcttgaggagtggcagagcaacacccgcgaaggtggctcccatcgctaaagccttcgccatcgctatgccgtccctcatcccgcctgtggctattatcgggagttctgtggcgtacctaacttccgcaacgctgatggcggtctttatgccccagtcccagaagcgaagggctaagtcctttccgatctcatctttcgcacgatagtactccacaccgctccagctcgtcccgccgaggccacccacgtcgatggcgtcgatacctatgctctcaagcctcaccgcgacctccatggagacccctgccccggtctccttcgcgattatcggatacggaaactcggccttcagctctgctaaagccttcaaaacgcccctgtactgtgtgtccccctcgggctggacgctctcctggagcgggttcatgtggatggccaaggcatcggcttggatcgtctcaacggccttaagcgcctcctcaaggccgtagcgctccctgattgtctcggagaactgaggagcaccgaggtttccaacgagaaacacatcgggagcaacgtccctaacgtagtagctctcccaggtctcgggcttccttatcatggccctctgactgccaacgcccatcggaatgttgagctcctgggcggctttggcaagggttttgttaatcctccccgcgagctgtgaacccttcgttccgccggtcattccagcgatgaaaatcggatagtcgaacttcctcccaagaaactcgacgctcaggtcgatttcatccttgtcaatctcgggcaggctcatgtggacgaagtggacatcctcaaaaccgttggtgacatgcgcctggacgttcctcttgaggcagtgctctatgtgctcgaacttcctgatgatcgtgagttcctccctatcaaactcccccattacaaccaccgaaggaatagaggaaaagaagttaaagaagtttccgctcactccatcgccttctcgatgagcgccctcatgtgaatctctgcgctgtcgaggacttctatgccgacgtcgccgggctttattgccagcgggagctcagtacagcccaagattacaccctcaacgccttcccgggcgtacttttcaatcagctcaacgaggtacggcttgctctcaagcttgcccagggccagctcgttgaatattatcgagtttaccctctcgcgctcttcctcgtctggaactacaacctggaagcccttcttttcgagagcctccctgtaaaacggcatttccatcgtggtctttgttccgagcaagaggagctttttaaggccgcgtctccttgcctcctccgcaactgcatctattatgctgaccatttcagcgttcacggcctcctgaacgtccgggaagactatgtgcggcgtgttcgcggcgatgccgattacctccgctccggccctctcaagggccttagccgcttcgatgagcatctccttcctcccttcccagccgcgcgggttgtccttgaaggtcttgaagttcatcgagaaaacaaccagctccgggaagaagtagggctcgaagagctccctcgatatttcgatgtatttgcggtagtagtactcggttgattcaggggttgttccgccgatgagacctatccatttcatcgggatcaccaacgcaagtggacagaaatggttaatagtctttccaatgaaagggatttcaagaaaagaaggaagtgaaggtcaggcctcttccagccttattcccctgctttcgaggtactcaacggttttctccagttctccttcgtcctcggcaaaaattatcagccctatgtacttcccaaagcctttgggagaggagtgaattctgacattgaacctctcaagcgcctccctgagaatgggagccagcttgctctcgtcggttatctctgccagaaactttctctgaaggaacttccttcttccaagtcttggaaggacttccttctcaagcatggccttcatttcccttggcatacctggaaggacgaatatcttcacacccttatgctcgatgaaagctccgggcgcggctcccccagtgttctcaagcggctccgccccctctggcaaataggccatcttcttccgcccctcgttcagactcgggtcgtctatgtagccttcgctgtagagcttctcgtagaaggcctttatcctctcaaggcacttctcgcagaggacgagcttcctgcccaaagcttcagcgacggccaacattgtaacgtcgtcgtgagtcggaccaaggccgccgctgatgacgagaacctcaggcttccttgcaagtatctccccaacgacggcctttatctcctcaacgtcgtctccgaccgtcgttatcctcctcacccagtagccctgctcggtcagcttcgaggctatgaaggcagagttgctgtcgacggtgtggccggtcaaaagctcatcgccgatggtgaggacttcggcgaacatacccctcacctcagcctcgttccgaagccgtcccccctaatagccccgctcagcctgccaggaactttaccgttcacgaaccagacttcagagtagtgggccatctcgtaggctttcctcagcttgttgcatatccccccggtaacgtctgtcccggcggcggtgcaatgaagcctttcaaggagggcaggaacttcctcgcgggcaagttccggaatgagagtcccctcgccaggttttccgtcgtagatgccgtcaacgtccatgaggaatatcgccttcttcggcttgagcattttcgtgaggtacgccattatctggtcgcctgagaggatgtctattccctgggcgacatcaacggaaacatcaccgaagaggattggaatgaaatccagctcaaggagcttctcaatgacctctatgtcggcgtagagtatctcccctctttccgttatgaacagggaggaagtggatattgaaaaccctggaaggttgtggtcagtaaatatctcaacgaacttggaattggccctaagcattgactgatgagttagtgaaaagccgagtctcctccagctgtcaatcccccagctcccggaaagcccctctcttatggagtactctttagcatagtggtgtccaaagctgcctcccccatggactataacgaatttttcatcgggatagaactcagccagctctcttgcaatttcctcaacgacgtccgtcctgaagttttctggctcccccctcttatcactgaagacgctaccgccgatcttgatgagtatcactcttccacctcctcaatcctcatgccctccctgcttatcttcgttatcatcggcgttccgccggctatggttatggccgttgccacctcgctctgcttcccaggggcgagggcgtacatacagccaccgccaccagcaccggtaatttttgctccaagagcgccggcggttctggcagcgtaaaccagctcgctgagcttcttggtcgagacgccaagagcatcgaggaggccgtggtttatgttcattagcttcccgagtgtctggaacttcagttccctgtcgaggtcggaggtgatgacttccctggccttctcaacgagcctgcccattgagttcaatatcggctcgaatatctctggcatctcctcgtagtttttcctgaccattgcaacgagctctttcgtggacccgctcgaacctgtgtatccaacgactagtggaagctccatgaagggaaggtgctcgaacttccccttctggtagtgtatgaagccgcctatggcggaaactgttggatcgatgccgctcgatgcgccttggacgaggagctcaaccttgtggccgagctttccaacctcctcgttgctcagctcgaggccgaggagccttgagaccgccccgatggtcgcaacggcaacggcagcagagcttccaagaccagcgccgacgggaatctgggaggttatcgagacggttatgcccttcccgtttacgtccgcttcttcccttacgagctctatcgcctgcctgacgtagccgagaacttcagcggcctttccgtagtcgctctcgaagtagatgctgtcctcggtgaaggaaactatcaggcctggagtccttatgtcatgggcctctatctttatcgctcccgtatcgttgaactcggcgctgacgtacgtcctcaggtctatggcagccgctatggcgggttttccgtaaacaacgctgtgctctccaaagaggataattttagccggtgccgaggcaagaacccttttaacgctcatttttgaccctccaaaaacttctctatagtctcaatgaactcataaatgtcatctagatgctcgcgaagtgcctcaaaggcaagttcatcgtttatcctgccgtatctatgaaccaagacgtttctaaagcccttcatgagcctcagcttttgggccagccccttggagatgatccctcctctaacaagtccttcaaatacgtcctcttccttctcagggattcccagctttaggtcagagtttatgattgcgcagatatcgatgacgttctgtatagcaaactcaacgcgcttgtaaatcccgtcctttatgagacccagcgactggaaggtctcgaagtcctctggcaggtgctcttcaaccagcttcaggctttctagtatttcctcgatcttcgagcgtatcagctcaaccctcattctatcgcctccaggccgaggtagtcgtaataatagcgcttgaagtcctcccactccttcaaaacctcataggcgaggtcgtagagaaaagtctcgtcgcgacagaagagaatcttccccttgaggcactcccttttcaggggcagaggaaggagctggaagatctgaacgtcatatttgtccggaaggtttcccagaacgagcaccctgaacctgaaggcctccttttcgttcccttcgtaataaacgcagaggtcgtagtcgctgtctttgcgagcgtctcccctcgccctcgagccaaagaggattataaacttgaccttatctccaccaagctggaggattctggcaacggcctcgtcgaggttcatagtagaaaatatggaaaagggcttatcacactttcgctagcgcctgaagactatgctcgcgtacccgacaactgcttctgttgagcggctcacctcaaagctcgttgtgtagtggagaagctcagcctcgaccgcaccagcgaggcgggagtagactattgcagtccctacaccgccaggcccgcacatggtgtggttcatctcccttatctcctcaaacatcccccttacgtcgaagtcgaggattctccttattatcctgaagtcccactcctttatcctgtgggggagctcgtccgccctcgctctgaagggcacgtagccgtagatctggccgtagtgcatgaagtcagtgctcgctatgaccaccacgtcctttcctagctccctgctcgcctcgaagatggccctcccaaggtcttcggcaacgtcttcgtcctgaataccgagtgttatcgggacgatcttgacttcctttcctgccttctccgcgaggtactgtatgaacggaacctgaacctcgatggagtgctcgtatttgtgagcgaggtcgtcaaggtcagctatgcctgagatttttgctatctccctggcaagctcgccgtcgacctcaatctcgccgagcggcgttatccaagtgcccggagggtgaaccgctatcggagagccgaggccggtgtggttcggcccgaggatcacgaacgtctccggaagaccgtcctcaaagatggccttataggttctgctcgccgtgtagccggagaatatgtagcccgcgtgaggcgcaacacctgcggttatccttctatcattcccctcctcgccgaggtcgctgaagaacctctccagcatgaggactagctcctcgtcagcgggataaaagcttccagctacagcgggataccttaccaccatctccatcacccccaatggattttagctcgagagtttaaataccttcggttattttaaggcccgaaccagataggggaaggagaactttggaaccttcgggtatttcacccgaatccacgagcttccacatcccagcaagaacaacggcagatgtcggttctacaaggaagcccgcgttgatgagccactcaagcgcttctctcgtctcggcctcaccaacgctcacgcagaggccgttactctcctccagagccctgagcatgtcctcctttcgcggaggctcgggaattgctatcccgtcggcgaggcggtttttcattacggagcgctcgcagaggctctcgtaaccttctgcctggacggctacaagccggggggcctcgtttatctcccccatctctctaagctctctaaagcccttccagagaccgaggaagagcgttccagaacctgttggggcgaaagcatagtccggaactcccacctgctcgtaggtctcgtaggcgatgagcttcgtcccctcgatgaagtaagggttgagccagtgggtcacgtaggttataccctccctcttcgcgaactctatagcctctttgtgaacttccattctgtccccatcaacgaagtgaatcaccgccccaagccgctggagtagggaaatctttgcgggcattgcgtcataggagacgaaagtgtgaacccggattctagcgggaagtgagtagagggcgaagctcaaagccgcgtttcccgagctgtcgattactacttcacttaccccctcctccatcagctttgccacagtcacccacgtgcccctgtccttaaacgagccgcttggctggaggtagtcgagcttgaagagagcagtaacagggccgacctgaagttcaaccgttggcgttatggcgggtactggcggtggaagaaggttaccgctaacgggcaaaaagttgatgtatctccttgcatcaaggtagggcatgaggctcccgaagaagtcgaagtactccctctccacaaagagcgttccgccgcagtcgcacttcagcatgaaggtctcaggataggtttttccgcaccttgaacacctgagcatgccatcaccttttttaggtcttgggaaaagtaaatgatatcaagttaaaaaggtggttgccatggtcgagaagttcgtttccgcagagagaccgcagaccgaggaaggaatgcagtaccatatagcctgcaagccgggcgatgttgctcgctacgtccttcttccgggcgatccagagagagtacccaagataagctcgctctgggatgaggcgagggagatagcattccacagggagtacaggacgcacaccggaaagtacaaaggagtgccgataagcgttacctcaacgggcataggcgggccatcaaccgctatagccatcgaagagcttgcggcgataggggcggacaccttcatccgcgttggctccacgggtgcaatacagcccgggattgagataggagacctcatcatagcgaaagctgctgttaggcttgagggaacttcaaaacagtacgtaagggtcgaatatcctgccgttgcagaccttgaggtcaccctcgccctcatagaggccgccgaaagccttggagtgagataccacataggaataacggcttcaaccgacagcttctacctcggacagggtaggccagggctgaacggctacttcccaagctttgccaggaacctcgttgacgacctcagacaggcccgcgtgacgaacttcgaaatggaggccgcgactctctacacgctcgccaacatctacgggctcagggcgggctgtgtgtgcgcagtattcgccaacagggtaacaaacgagttcggtaaggcgggcgagaaggaggctgctttggtcgcgagtgaggccgtcaagatactcgcggagtgggacgaggaaaaggagagggccggaaagagggtatggcaccctggcatgaggggttgaaatggacgagaggctattcattatcaaaaccctgctgagggatggaagaagggaagaggcgctcaaagaagcccggaagattaaggactcctactggcgctcctacgcgctccggtgggttgccgagagctatgcacacgaacccgagaaagcccttgaggtagcgagtgaaatagaagagcactcaatcaaggacgagaccctcgcctccctttcctaccttttttcaagagagggggagtttaagaaagccctagaagcggcgaggcttatcaaagaccagttcgttagaaagaaggccttcagatcggtgagcaatcttctggcaatagcggttgcacgcggcgggacggagataaggctcagcgacctgaagctggatgagagggacattgaggagttgaagccactcccccatggaatcgtctacaaggacggaaagctcatgcccggagccaccctgcacaggataaagggagaggtccagacgggagtagtggagcgttttgagaagagacccaaatggaggcccccagaaccagagttcgaggagaaagggcagaccaatgaatacgtattaagctacataaacaggcttttgaatgaagggaaacttgaagaggccgaaaaacttgccaaagggcttcctgagcccgtgaggagcgcatatctcgagagagtgggcattgagtatctaaacaggggcaatgcagaaaaggccgaagagatattctcccagcttgaagtcgcaaatactcttgggcacgccctaatacaccattatggatacgaggttgatagggcacttgaatacatcaagaaggttttcgatccccttcccaggatgctgatagcctacgagctcgcaaaaaaacatggcgcgaaagagaaagctattcttgaagttctttcgtggaggggaaccccctcaaagatagccagggttctcaagttcttggcctttgaaatgctagaagagtctaagaagtcaaaggatgatgagatgagaaaaacttctaaggagctctttgagctgggcaggaaaattgaaactggagaacacgctctttagaccctttttagcgcctaaaccggccggaaactgaattaattaggtgtccaaaagggctacgaaataaattgccacgagaagaagctttgaatgcttggaaagcccagaagattgtggtgcggtggccgggatttgaacccgggccagcggcgtggcaggccgctgtcctagccaggctagactaccaccgcagttccagcccgtaggatactcattggggactcgtttataaatctttcggtctgttccgaaggttaaatttataaagagtcttcagaaagggttagcgggcgtgccccggtggcctagtctggatagggcgcgaggctgcggacctcgaggtccggggttcaaatccccgccggggcgccatagaaacttttctggcgaaaagtttcatcaaagagggaatgtctttttaaactgctgagtttcagctattctcattaccaaattagcagttttcaaggggtttgctcgcagtataacgcccaacgagcgttaaaaagaagaaaaacccaaattctcttgcctgtacattaggagaatctccattctcagccaatatcacgaagacattcaagcttttggtgaagctttctccaaaagcttcctcgtgaagtttgatcaagttcgtggttctcttgaaattgcccttctaaaaggattttcacgataaattagctaaaagtgagtgaattcttcgagcatacttaattggaaaggagttttctcgccttgacgccctatgggcgtcgattaaaaagcaaactcacaaagagcgagcgaacaaaaatggaattcacactccaagacagcattcaaaaggaaatccactcaaaacaaccctctaatcaagaaccacaaactttgatgaaactttgccgggcaaagtttctttggtgaagctttcccaaaagcttgctagaaaatgaaaggggaattcaggcccccgctctcagcttcgccagtgcatcctccgctgcctggagtatctggtatccgactggagaagccgtgaggagcgggtgagtcgctatctggagggtgtagagctcgctagccgtaagcctcttctgtatggccagtgcaagaacgttgatcatctcgccaacgctctttccaccggctagctgggcacccagaatggcccccctgtccctggagaatataagcttgaccgttaccatcgaagtatcctcgaactttgctggatgtctgtcggggccagtagcccgtccaacaatgacctcaaagccctctctcttggcggcttcctcagttagtcctgcggcggctaaggtcaagccagcaacgtgggtggagtaagcgcctattgtcctcctgttctccctgactatctggagcttaaagaggttcgcccctgctatcctcgcctcgaaggttgccgttgaggctagcatcagagggaagggctttcctgtaaagaagtccctgtgctcgacgcagtcgccgacggcgaatatgtccgggcaggaggttctcatgtactcgtcagtccagatgccgtatcttgtaacttttagacctgtttttactgccagctcaacgtttgggcggtagcccgttgagagaattaccagatcggcggggatttccccaccttcgacgagcttgacaccttcaacgcgctctctgccgactagcctctccacgtgcccgtaaacaacgtttattccaacttccttgagcctgttctcgatcatctcactgaattcggggtcgaaagagtttctcaacagcctgcttctgacaactatcgtaacgtccttcccgagctttctgatctcgtccccaacttcaagggctatgaaaccgccgccgataatgacaaccttctcggcatcctctactctcttcttgagctctttgaggtagtggtagtccttggagacggtgtacacaccctcaagctcaacgccggggatgtcagggatctggggtctcgaaccagtcgccagaacgagcttttcccagcctatctctctccctgacttcgtcaggagtgtcttggacttgggatttatttccgtgacctcatcaaccagaacgtcgatgccgaggggtttgagaaacctctccgttgggagaacatcatcctcaacgctcctcagggtaccgaagatgtacggaatcccgcaaggaatcatggaaacgtcctctttcttgatcacgaggacgcttttgtcgggatagaacctcttggcagagatcgcagccgttagaccgccagcacttccacctataacaaccacatcgtacttcattaacctcaccaaagagagttctcaaaagactattaaacactttccttaacccgaggtttaaaacgtaagcacagttaagaagtggagagaacgaagaggaacactactcaccggtcgcgcccttcagtgcatccttgcaggggcaccttctttcctttggaatgtactcgatggccttcatgagcaggagctttatctcgttggacttctgggccataagctcgaccacttccgtgtgagtgagcttgttggggcttatgccagcggcgtagttggtgactatggcaacgctcgcgtagcacatctcaagctccctcgcgagtgctgcctccggacactgggtcattccaacgacgtcggccccgaggatctttagcgcccttatctcagccctcgtctcaaagcggggcccttccatgcaggcataagttcccatggggtgatatgtaaagcccagctccctggcggcgttcatcagggctttcctcagctcgggacagtagggttcagtaaagtccacatgggccacgaactttctatcgtgcgggctttcttcaccgtcgtagaaggtgtagtgtctggtcttggtaaagtccatgagctggtcgaggattacgaagtcaccgggcttcatgtctaggttgagagaaccaacagccgaagtcgaaagaatcctctcgacgccgagctcgtagagggcccagatgttcgcacggtagtttatcttgtgcggtggaacgctgtgtccctcaccgtgcctggcgagaaatactatttcctcgccgttgtactcgccgatcttgactttgaccgttccgtagggtgtttcaacggtctcttccctgatgttggttagaagtgcggggtcgtaaactccagaaccgcctattatcgctatccttggcattcgcatcacctagacagataaaagaaacgtgccttaaaacgttattcatctgcccacaggcgcttttgctcctctgcccgctcctctatatcctcaaccacgcgaccactggcctgaagctctgctatcttcgccaaaatctcgctgagcaaccatgaaccccacctcggatccttaacctcgagggccgcgtctatggctccatctatgtcgccctctttgagcttctcgattgctatactcccaaaggcgagggagcgcaggtgggggtcacttatagaggaagcaagattccaagccccctcatagtcatggagtttcgagagataacggacggccttgaccttcaagcgttccgaagagacaaaagagcctatttttctgacgagttctaggtactccgaacttggaggcctttcaagaagaatatccagcacatatcccgctgcgagtagtttagcatcctcaggcagcgaatcaatgaactcctcaacaagctccactctatcgattatagaggatacaacggcagatatcacctcatcccattgctcacgggggattctctcaagggactctgaaacgaacttgatttcaccctggaccgccagactgacaaggaacgatttaagaacgtcaacgctaacatccgacgaaaggccgactataaactggaaaactttctcgtaaaccgcagagtccagactgcccgattttttgaggtaaacagccacagccttcacggcctcaccaagccagtaatcactcttgaactgagaaagcatgcccagagctgtgccaagctcatctcttttgagatgctccttcaggatattgaagagcgcaagcgacttccaaggctcgttttggattttttcaacaattttgtgcgcatttctcagattgccatcctggatatgcttattcaggatcaggagtagtgcatcatttcttttaacttcgttttcaatctccaaagaatactcaaacgccctgtccatgaagtctatttgaacgagttttttcactaagcgatagaggaaatcatcccttggtgcttgcggcattttgagtattgcctcataggcgctttcgagaacacggttagcactctgagggtttatactgctcaaaagtgtcccgacctcaattagagcgtgaaccataaggggaggattttcaatcgaggctattgcctggagagcagaagagaacgcatctttatatttgggacgtttggctagatgcatatagtagccgattctagcatacgtaagtgcccttagataggggtcttgaatactacgggctattgacagcaactcaaaataaacgtctttggacaaactataccaccccaaaaaatatccaatgatgttgtatttatatgttatgcccccatgttcaagatcaaaacacataaaagttacagaaatccaaaagaatcagctgaggtcgtcgtacacaactccaacgacttccccatcgtccagggaaacgaagctgacctttgtcttctttccggttttcggatccacaacgacaaaatccgggctggccaagtactggctcgagggcatcttccagacatcgccgtaatggatgcgaagctccttcaaaaacctcttgggatcacgcttgataaccgttggcataggtatcaccaatgatatatacaacttcaacatataaaaagctttcctaaagacattcgttaaaaaatgattcgacaatcgacgaataatttgaaaaagcacccaatccgtccgacgaaaaccataaaaatgctaagaacagccaaaaaagaaaaacagccctatcagactcacctacggagcatctcaacgtactcaagctcctcaggaatcggccttctctttctcctctcgttctccttggtgaacatgtactcgtaaacgagcatccacggaagcattctctcaccccctatttttctctccgttaaccaatagcatttttaggtttaaaaacttttgtagattgttttttcacagaaatgaaccgaaaagaactccaaactcaataaaagagaccatagaattggatttagcttcaatgtacaaaaaattacatcttaagcggctctaaaacggctgattaaacgaaatgaatacattttacaagaactcaaagacccaaccgtttataaggttatggttcatctctaaacaaggtgagaaaaatggcacttgagaagctcggccaagcactgaacagcgctctcaaaaaactcgcccgttcgagcaccgttgatgaggccacgatcaaagagattgtgagggatatccagagggcactactccaggcagacgttaacgtcaagctcgtccttcagttaacaaagcagatacaaaagcgggcgctcgaagaagaacctcccgcaggtgtcagtaagaaggagcacataataaagatcgtgtacgaagaactaaccaagtttctcggaaccgaggcaaagcccctcgagataaagcacaagccgaccgttatcctcacggttggaatccagggttccggaaagacgacaagcgtcgcaaagctcgcccgctaccttcagaagaggggatacaaagtcggcgttgtctgttccgacacctggagaccgggagcctactaccagctcagacagcttctcgacccgtttggcatagaggtttttggtgatcccgaggagaaggacgcagttaagctcgcgagggaaggcgttgagcacttccgtgagaagggtgttgacgtcataatagtcgactccgcgggaaggcacaaggaagagaagggtctcatcgaggagatgaggcagataagcgaggccattaagccccatgaagtcatacttgtaatagatggtaccataggtcagcaggcgtacaaccaggcaatggccttcaaggaagcaacccccataggatcaataatcgtgacgaagctcgatggaagcgccaagggtggtggagcgctctcagcagtagcggcgacgggtgctccgataaagttcatcggaaccggagagaggatagacgaccttgagccctttgatccaaagcgcttcgtttcgaggctgctcggtctcggcgacatacagggccttctggagaagatagaagagctccagaaggagcaggagttcagggaagaggacatggagaagttcctgcgcggaaagttcaacctcaaggacatgtacgcccagcttgaagcgatgcagaagatgggccctctgaagcagatactccaaatgataccgggacttggctattccctcccggaggacgcagttagggtaggagaagaaaagctaaagaggtacaaagtcataatggactcaatgacggaagaagagcttgaaaacccagagatcatcaactattcgaggataaagcgcatagccagaggatctggggcaacaacggcggaagtaagggagcttctcaaccagtacaatcagatgaagaagatgttcaagagcttgaataagagaaagctcgcgaagatggccaagaagttcaatttcggggggctgggaatatgatagaggcaatcgttctgatagttgtgaaacccggaaacgaagagaaggtctatcaggagataataaaagacccccgcgtcaaagaggcctacagagtatacggagagtacgacattataatccgcatcgaagtccccagcattgaggagctagacaggttccacgacgaagttctcaggaagatcaaggacattgaactaacggagacccttatagcaagcagctaccggaggtgaacgaattgaaaaggtgggtcgcgacagtcgacctagtcactttggaggtcgagtccgacccaaccttcaaatttaagtgcattgagaactgcggactttgctgtgagaggcttgaaatcccgctcagggatgaggacatagagagaatcgaaggattgggctacaatacctgggagttcgtggactatgaaaagctcttctacagaggggataagtttctagggtatgcgataaagaagaaccccgttactgatgcatgcgtctttctcgatccagaaacaaagaagtgcaaaatctacaaccacaggccgctcgcatgcaggctgtatccatttgtctttgttaaacacggggagagaatggagatctatattaaggaagattcattctgccctggcattaaccatcccgacggtaaacccgtcaccaaagatttccttatgaaagaatactgggacatcatcgaggaatacagacaaaaagtaatccacaaaggccagaaaacccaggtgaatgcgagcgtttagaccgaaacatatttatacatttttttgttaatccctggccacctggaggtgagagggtgagccagttaaaggcagtccaggaaaagctgagactgataagaatcctgaggctgttaaagaagtcttacacatacgaggagctgtcccgcataacgggattgccaataacggtccttaaccgatacgttaggggaaaggtactaccaagctccgagaggactaaagagcttatggagctgcttgcaccctatatcaacattgaagaagaggttcgcaagaggataaagttcgatgaaaggggattcttcgacaacatgcccgccctgagcgacaccgcgctgatgagtctgatagcggaggaagttgccagcaagtacatggacaaggacattgacaaagtcctcacagccgaaaccgacggcattgtcctgggagctcatatagcgagagagctgggggccgacctgatatacgcaaagaagaagaaggaagtcggcgtcgagaagttctacgaggtgaactacgtaccaagtgcatcgggaagcgttatgactctctatctgccacaatgggcactgaagaagggagagaccgtgctcatcgttgacgatgtcataaggagcggtgagacccagagggcgctcgtggagctggcacaccaggccggtgcaaagcccgtcggcatgttcttcctgataagcgttggagacgaagtggaaaaactcaaaggggagtacccattccccgttgagagcctcataaagctctgagggatttccatgaaggggttcatttacaacgccgccgggctgagcatcccagtcgagttcacgcccggcgttccttttagatttgagtgccccgaagaagactgcggaaaggttgtggtcatagaaggcgtgatagaagaagtcgatgaagttgaattcacaaaggttcttgagaaaacaataaaggaaaatccgtccttcagcaaaatcagggagataacttccagaaggtttgttttcaaagggaaagttaatgaaagggaagtaactcttcccgtggaaagttttcaggactttaccgaaagattcctcagggaagtcctaatcctcaagggatagtctcggttcctctttaacaacctgcatgaccacgctcgtgttcgttttttcaacgccgtcgagcgacagcagccattttacaaacctgttcatatcagccctgtccttgaactttgcgattacgaatatatcaaactcaccggtgatgtcgtaaaccatcatggccctaccgctctccgcgatttttcgctcaatctcaattattttcttcccctgggccttaactccaattagggcagtcaaaccaaaacccagcttttcatagtcaacaatcggggcgtatcccttaataaccccgctctcctcaagacgcttaatgcggttgtatacagtgccgacagccacccccagctccttcgctatctccctgtaggaaagcctagcgtttttctggagtaatgacagtatcctcatgtcaagctcatcgaccacaatcaccaccggagagaatacaccgtaaactttaaatacccttctctaagagggattagcgggcagtggaccggtagcctagccaggatagggcggcggcctcctaagccgcaggtccggggttcgaagccccgccggtccgccatagaaacttttctaatgaaaagtttcaccaaagagcgaatgtccttttgagcgccctgcttttcagtgattctcacaatcaatttgcaattctcaaggggtttgctcggagtataacgcccaaagggcgttaaaaaagaagaaaaacccgcacttccctgcccatccatcaagagaatctaaccttatcaagccaattctcggagacattcgagcttttggtgaagcttttccaaaaagcttcagcgctggcggaagattggtatgctttctttttagatatgcctgcttttgaagggtttacttccaattggctgattcaaaaggattttctcaccgtatagtgcccgaagggcactaaaaagaaagtcaaaaatcacaattagcgcggggattttggagttaaacccgcgcgagcctgccttcttgagagcatacactccctaacaggcgagatcgaggagaagggcacacacttttggtgaagctttttctaaaagcttcctgcgcgaagtttgatcaaggttcgtagctctttttcggaatgccaattcaccgtgattttccaactcaaatggctttttgagagtgagaacccttaatccaccctgtcaactcgtgtttaactctaaatcggcgccctttgggcgtcaaagaaaagaaaacaccctcttcaagaagcttcctaaaaggttctcactcaaaaatgagcacttgcagtctaaaatcctaaaataaaaccctcttgaagaagagctacaaactttgatgaaactttgcctggcaaagtttcagcgccggcggaaaagaggtatgcgtttttaatgaactaatttttgagtgggtttactttcgagttgccagacttacaggattttccccacagtatagtgctctttgagcgctaaaaagaaagttcgaaatcacaattaacgagagatttttaagaacaaacccacacgcgaacctgctttctggggagcatacactcccgataagcaaagttcgagaagaagggcacacttttggtcaagctttttccaaaagcttgctggaaacgaaaggcttaaatacttcaacacttttattttcttcaggtaagaaaaaaggaggtggtggccatggtgtacgtggccgttcttgcaaacatcaacggcaaccttccagcactggcaaaggcccttgaaaagatagaggccctaaaggaggaagggtacgaaatagagaagtactatgttctgggcaacatcgttggtctgttcccgtacccgaaggaagtccttgacgctcttgatgacctcatcagaaacaacacagtcaaggtcatcaggggtgagttcgaccaggtaatagccgagagcgatccccacgcggaaggaccggactacattgacaaggttgaatatcccgactacataaagaaggccctcaagtacacctgggaagcccttggtcacgaagggcgcgagttcataagggaccttccaatataccttgtcgacaagattggaaagaacgacatattcggagtctatggaagtcctctgaacccgtttggaggagttgtactgccagaccagccgaccagctactacgaagccatcatgaggccggtcaaagactatgagatactctttgttgcatcacccaagtatccggtcaacgctatgacccgctacggtagggtcatctgtcccggaagcattggatacccaccgggcaagaaccacaaagcaacctttgccctcgttgatgtggacactctacacaccaagttcatagaagtggactatgatgacgagaaaaagctcatagaggagaaaatcaagaaagagggccttccggaagagcttatcaagatactctatcatggaaaggtctgatccctttaaccttttttgaatcctaagtagaagcctgcaacaaacgcaccagtacctgggagtatcccaagagccttctgtccaagacctagtacctgctgggtcacgttctcactcaggttgaagagcttgtcagtgtttattgttatcactcccttctgctgaagccagaagaggctcaaaaggtaggctcctattaatgtcatcacgattttcacgaacttcttcagtgcataccctgttacaaagcccactatagcaccaacgcccagatccccgaacataccgctcatatcgaactccatgagaccaccactaacaaatcgggcgagaagaaagataaaccttttgttggcaaaacccttaaattatatggatctaaaatatttcacaaagaacaaaagggtgagatcatgacaacccccctagagagattacagaacaagattacaaaggaagttctgtggctctacatactccggcttttgaaagagcgccccatgtacgcatacgagctaaaggagaagataaaagaggctttcaactttgaacctgccacagtcagctcttacgtggtgctttacaagcttgagaaagagggatatgtaacctcagaatggcaggaaacgacaggaggtaaaccggccaggaagtactacaagctcacaccgaagggcgaagaactcctaaaagagggaataaacttcctcgaagaaacattgaaaaaactgaagggggagtgatcagcgtcctccaccacgcggttctctggccttcgggcgaaggcccttgtagccgcactttctgcacttctttgcgccccatgggttagtggcaccgcagcgcatgcacacgagtttcctaaagatcctagcctcagcctcagggaatctcgccattcttatcacctcgataaccttaaagcctgcaaccctttgatctggaacttttaaacctttggtgcgggggacgggattcgaacccgcgcagccctacggcagcggatcttaagtccgccccctttggccaggctcgggcacccccgcgcgagggaaagtaaagcgaggggcgttaaaaattttcccctcaggtccttatgatcctcatctcgaagtcctcaaccggtatcttgaagtcttccctgctctcgatctccttcctgttgtagaggacttccctggcaagtatccagtagatgagggcgagagccttcctgcccttgttgttggttgggattgcgatatcaacgtagctcaggaagttctcggtgtcaacgagggccactatgggtattccaatctcaacggcctccttaagggcctggtggtcggccctcgggtcggtaactatgagaacgtcgggctcaatgaagttcttgacctgagggttggtcatagttcctggaaggaaacgaccgggtatagctttggcgccagtgacctcaccgaacttcttaacgggcctctggccgtagagcctgacgctcacggcaagtatgctctcggggtcgaacttggcaaggaactttccagcgacacgaagcctctcatcggtcttcctaacgtcgaggacgtagagtccgtcctgccttaccctgtatatgaacttcttcatgtccttggtcttctgctgggttccgatgtggacaccggcagcaaggtactggtcgagcggaacgagatactcctccacctttcacacctcctcatccttcaaacgttatcaccctacccctttcaccaaggtcttcggctatccttatcagctcgttgagcttggcgatggagtccttgcggagcaccaccgccggacacctaaagcccacggccatgtgggcgagcgcctcgtcggaggactcaaaacgagcctccgcgaggattggaacaatcctctccgactttgcgtcgttaataaggttgtataagtcggtgagcgtgcccagatttatcggctttatggacagggcgttgtaatagcgcctgtctagtatgtccttctggcggaacaggtactccccatctataaaaaccccgtgagttccggcaataagctcaaggaagagctcctcatcacccattggctttagataagccacgttgttgtcttcaacgagggtcagcagtttttccatgtccatgggagccttctgggcgagtcccagggcgacatcgagaccgagttcactgctggctttttctgtcgcctccgagtatccttcaacagtcgcctctttgaggttggagagcacgccgtttacggcatcaacaacatcggttatctccatcaggtcgcgcaccattacgtagtagtcaaactcactgtcgctcgcgaactcaagtatcgggactgggagttcggtggtgaacgtcccgccaaggtaagtgtagagcggaaggttcttctcgctggctgctgcctttgccgtggcaaccgatacggctaaggccgtgtttgcaccgatgtggctgaagtcctcggtgccgtctatctcccacagatagctgtctataagctcctgctccgttgcgtcaaacccgataagctctggccctattatctcgtcaacctcactgacggccctgtgggcttccgctatgtagaggtcaggattctcgtctaccggggcggcgaacctgccaaaacccgagctagttataacgtcaacctcaaccgaatacctgccgcccctgagtactgttaccctgccgactatgttctctatcaccgtcatctctcatcagctcggccttattacggtgatcggtatcacacccttctcgaactcgaggagagccgcctgaaggggagtaattccctcgggtacatcgattagcaccggggctcccatcgctatctggagagccctggctccaatgatgcgggccttttcaaagcgggtgtacctaaacacgactaccaccccacttcctgtgcacagatcaaattttggtggggccgccgggatttgaacccgggtctccggcaccccaagccgggaggatagaccaagctaccccacggccccgcccagaaatgcggtttttagtagactttataaaccattacctggtcgatcagctctacgtggctcagcaaggttctcctgcagcagtacctctcaacgccgaggtcgtcgaggaccttacccgggtcttccccggcctcaaccctcttcttgaactcgtagtacttgtctgcgagcacctttccgcaggtgaagcacctgacggggactatcatttttcacacctcaaagggttaaaggaaaggcatcagcggtatgacttctgcctcttggccctcggacccttggttgagcggttgggcttgtgaggctcggttctcctgctgtcgccgacgagcattgtcctgtcgtacttcataaacttttccttcaggttcatgtcgttggtccactcaacgagggccctggctatggcaactctagctgcctcagcctggcccatgaagcctccgccctcaaccttgacgtctatgtcaaccctgctgacgatctcttcacctgcaaggatgagcggctccatgatggtgaagcgcgctatctccggctcgatgatctcgacgggcttgtggttgatcctgacgcggccctttccttcccttatggtggccctcgcaacggccgtcttcctcttaccagcagtctggatgaccctcatctttctcacctcagaactttccaccgaggaacttcgcgacctctccaacggtaacgtacttcggagtggcaagcctcgacatgtgggcctcgcttatggtctcgaactccttgccctcgaactccttgggaactccgacgtagaccttgagcctcttgaaggccttccttccgcggtcggtcttccaggggagcatgcccctaacagttctcctgacgatctcgtcgctcctcttcggatagaacgggcccctcctcgggttggtcctggttctgagctcggtcctctgcttgtacttggcgaagatgtcctccctgttgccggtgatgatggccttttcggcgttgacgatgactacctcctcgccctcgaggagcatcttggcgaccttcgaggcgagccttccgagtatgagtccttcagcgttaattatcctcatggcccatcactccattatgattactccactacccttcgggtttctctccataagctcctcaatgcttatggcctctccaccggcctcgattatcttcctcctggctgcctcgctgaacttccaagctgcaacgacgaccttgtgctcaagccttcctgcaccgaggacgcttcccgggacgataacaacgtcgccctccttggtatagcggttgatcttgctgatgttcacctcagccctctgcctcctgggcctctcaaggcgccaggcgatgtccttccatatcttgactccttcctcgtttgactttttcctgagggtgcggatgagccttctcaggttaatatcggtcggtccagttctcttaaccatgaacatacctcctcaaagctctcgcagggaaaccgacagtcggacggggtgagcgtaattatggtgcgggggcggggatttgaaccccggaacccctgcgggacgggaccctgaatcccgcgcctttggccaggctcggctacccccgcgtcagtcggctaatttatggagctcgtttataaatctatcgctcttcctcatgagtattttgagcgctatgctcacgatttcctcaacgggaagttcaccattcgtttcgacggtaaacacgaatgaaccgggcactatctcctctctgatccccttacccatgtgctcctcgaacttcctgggaaggtaaaaggcctttatcgtggttatgactatctcctcatcactctcctcgacggggagtccacgcctctcagcgagctctttgagctcctcccagtcgggaacgtctttgctgacgtgtatcttggtcaggtacttgtagtaaacgaagcccggttgccacttggcgtgatcctttccgcggccgagcctcgcataagcgttgaacgttagcctttgtccttctgcgagctttactatggggatgttcgggttggcgggctttacatctccatcgctactcttgaggtcgcccgagtacaccatgccagggccctcagcctcaagcgagagggtaaccgtgtagtcatcaagctcaagggcatcgagcgagaacctctcatgaggagtcgtgagcggtatcatggcaagcctgtgcgctattatctcgtcgaaaagtgcagaatcgttctctaggaactcgacctcatcaacggcaaaggttgggacttccgagagaatagtccttctaagggcgttcgcgaacggtacatcaacgccgctgacgatgaactttattgagtcgggcctcttctcaagaatcttgaactctaccattggcatcaccaaaaaagaagttgtaggggatcagacgcgcctgccccttctcccgcccttcggcctggtaccgtcgtgcgggatcggggtgacgtcctcaacccttccaatcctaaggccggccctggagagggccctaatggctgcctgagcacctggtcccgggctcttgctcttgcttcctccaggggcgcggaccttgatgtggacgccggtgatgcccttctccatagcctcttcggcggcccttctcgcggctatcatagcagcatacggtgagggctcgtccctgtcggccttgacgaccataccaccgctccacctggagatggtctcggccccggtgaggtccgtgatgtggatgatggtgttgttgtatgaggagtagatgtgggcgacaccccacttctccttcttctttatgttaacctgagtggtctgctcctcgctcatgcctcaccaccctgcttagcctgttcgataaccatcctctcggggtggccctccttggcgaagggtgagcccttggcgtaggttatcgtgtcctcctcctcgcggaggacgaggtagccaggagagcggatgacctgaccgttaacctcgatgtggccgtgaacgatgagctgcctagcctgcttcatagtcctggcgaggcccttcctgtagacgatggtctgaagcctcctctcaaggacgtcctcaacggtgagcgagagaacgtcatcgaggactgcatcggccggaaggaggccaagcctgtagagcctctggaggagctgctgcctctcgatttcggcctgcttgccacgggccgcaaggagccttctagccctacgcctgaactccttgagctgggtctcgtggcgccagagctccttcttgttcttgagggcgtagttcctcttcagaaccctctcgcggtcaagcctctccttaatccacgggtgagagggagtttcgtacttcttcctctgcctcttcgggtctcccatttacaccacctcacttcttccttctgctcacaccgacggttgtaccgtgcctgaagttggacctggtcctctgtcccctgacagggagaccgagctcgtgccttataccgcggtaagccctgatcctcctgagcctgttgacatcctcacgccaggccataacgagcttggcagtgatgaggtgcatgtccttgccagtctcgtagtccttcggcctgtttacggcccaagcgggtattccgtgggcgaccgggtcagcgagtatctcctcgatcttcttcacctgctcgtcggtgaggtaacctgccttcatgaacgggtctattcctgcaaccctgagcaccattgttgcgaagtttatgccgatgccctttatgcccgtaagggcccacctaacctgcttatgtccgtctatatccactcccgcaacacggacgatgtgcctaaagttctcggtcattacgaatacacctccacatccctttgaaacgataagggattttggcgccgggacggggatttgaaccccggtggccatacggccacgggctctcaaggcccgcgccatcccaggctaggcgatcccggcatacacccgatagccgctccccttcgcgagctctctcacttcggtgaaagtctcatccatgagggacttaatatactttgccccctgcttggtcttgatgaccagctggaggtagccaccatcgttcagatgccgtggagcgtttataactatttccctcaggacttccttccctgcgtgcacaggggggttcgtgattatggagtcgaacttttctccagcgaccggttcgtagagactcccccagcgaacctctgcgttcctaacgccgttgatttttaagtttttctttgctatgctgaccgccctgcggtttacatcagtcatgacgacataatccacaaagcgagaggcaacgatgcctatgggaccgtatccacagccgaggtcaaggaccctccaccctggctgaagaaccatgctctcgatgaggagttccgttcccctgtcgagcctgccgaaggagaaaaccccgctcgctgtgatgaacttgaaacagtgccctctaacgcagacttcgatagtcttcgtcttcagcggagtgctcggctcttctgagtagtagtggctcatggtcggggattcgataaggggtttataaaggtgaaggagcctaaaatccccgtattatgtcccacacaacagccacacctactgctccaacgacaaggaggacaaggaagccaagctttttgtgcttcgggaatacgtaggcttcagcggcaccgaaggcaacactctgagcggacaataggagaaggtttttgacgagatgctcacttctgcccaacctcaaaagttcatcgaccatctcaagagaagagccccctacagtgtgtcccaggagatagacaccaaccagcaaaccggcaccgaaaagggaggtctttataatccacaggccgaggtccctagccgatgttaccgtccattccttcccagaggcgagagcatacaaagtgaggggaatgtctaatatccactgcaccatgaggaggaagatagggataaacgaaaaaatttccagaaacatggcgaccacggaaattgccgcccccacaacgtttccggttaaaaagagggccatgccgagcagataccaaacgattatgtgatgaccaattatttcctgtacatccttcacaaacctgtccctgccccagttctcctcgaggattacgtggagccgcttaaagtcttccctccgatatccgtgcttctcaagatggcggccgatgaaaaagagagcagaaactccgaagagcgggagaagtgcaaacatcgtcacgagcagtccagcatctatggtttcgccaccactgcgggcccccaaaaagaggagggccattaatatggaaatcataccaacaacggtctcaattatcagcttgaggcccttcctcccctccatgaaaagcaccccaaagaagggaaagagaaatcactctttctccttccacagcttgggataccagtcccttggcatgaagactttgtccacatcgaccgctatgcccttgctcttctggagcatctccccggttgtcatcatggctttgcccagtgcaacaagctcgtccttgagggtcattattgcgacgaggtctcccttctttatgcccttgtggagcttgactacgccgggaactgctaaatcagcgccgtgagtaacagcggcaactgcggagtcccttatccagaccttgggcagatgttccactgccttctccatcggctggattgccttcctgaagtactcctcaaccccgtcctccttccagaagtggtagtagtccacaaggtcatggagggtcacgagggtctcatcctccttgaaggggccacttctggtccttctaagttcggccatgtgggcgccgaccccaagggcaaggccaatgtggtggatgagcgaacggatgtaggttccggcctcgactccaaccctgaagagaacgtccctaccttctatctccagcacgtctatgtagtagaccttcctcgtcctaaggcgtctcttgacggcactcctcaggggcggcctctggattatctccccctggaactccctcataacggcgagtattttgtcctcgggaacgtcgccgtggaggtgcattaaagccacgtactcctttccagctggcagaagggcctgcacaacccttgttgctctctccagggcaaccggaaggactccactgaccttcggatctagcgttccaccgtgtcctgccttgttaaggttcagtatcctcttgacccaggcgacgacctcgtggctcgtcggcccgggcggcttgtcgaggttgattatgccgaactggatgtgcatctcgattggccgtttctccggcggaaagccccacttcggattcgtctcggccttctcgtccttcacaaccacttccctcttgatgtcagcgggaaggatcctcctcacttcgtccctcgccatgatcatcacctacagatctttaagagccccaacaaattcatcctttgaaattccagcaagatgaagcactccgagcaaagttccgggcttcagctccttgtgaagcggaaccacggtaccaatttttctcccgttttcatatttaactaaaacgacatgactgcccctctgacgcgagaccttaaagccgaacttagatgtcagtactttgacgacctcttcacccgagagccttggcaatctcgacattgaaatcgcccacgaactttatcttcccaagttcctctttgagctcggggaactcttccaggtaaagctccaccgcctccctgaggttctcaagtgcctcctctatcgtctcgccctgagtagttacccccgtgaacacttccttgacgacgtaaactccctcttcctcccagataacggcatgaaggttcatgctccccaccgttttctctactgtagccctctttataaatccacctaatatctgaagcggtatgtaaagacgggccagttgggcaggtatttaacgagcttcaggtagccgggcacaaagacctcacgcttgttctttttaatgccgttaagcaccgcatcggctacccgctcaggttcgattgaccccctgggaatcttacccttccagaactcgctcttcacctgcttgggatagactctaatcgtgcttattcccagctccgccagctccttctctaagtttatcgtgagatagtggagcgcacctttggtggcgcagtatgaggggatctcagggacattgacaaaggcaacgccgcttattacaaagacgacctttgagcccttcccgagaaacgggaggagctccttcgtaagccagatgggagcaaagacgtttactctgaatatgttctcaagctcttcactggaatgctccaggaggggctttctgatggcgtagccagcgttgtttatgagcaggtcgagctttcttattcccatactagctaaagcatccctgattttggccggagcttccgtgtcggaaaggtcagcagctatgtaatcaaagcttttcagggccttggatagctccctgagcttatcctctctcctcgcaacacagattacgtggtagccctgcctaacaagcctctctgacagtgccctcccaatgccgccggtggcgccagtaattagggcagtcttcataacctctcaccaaagtttatgcccagaacagggctataaaatcttgggatacaaaaggcagaacaaagaaccagaaccgagaatgagaattgtgaggggaaggcccctcactcgaggctgattccagccccctcgagggcggccttgatctcctcgtcggaagcgccgcgctgaatgttgaccctctccggaaggggctcgaggtgcttaacgttcatcctcctgcgcttgaccttgttgaggccagcaccggtaacgaggacgaagttcttgtcgattatgtcggcaacgacgaccttctgtccagccctccttccggcgataacgacggcaatccttccaacctcaatagctggcattcatcccacctccttttctttttcatcctcccccgcgtcaccgctgggggaaaggtggtcgatggcggccttcacaatcgcgaagacgccatcggggccccagtgggccgtgttaataatcaagtcataaatggacttgtcctcgatgtcgattccgtagaggtttaaataccttttcctgttctgcttctccctctcggctatcttaacgaatgcctcctcaacggagatgccttccctcttggcaaccctcttggcgcgctccattatcggagcgtcaagccagattttcaggtcagcattcttgaccatccagccagcgaggcggccttcaataacgacattgcactccttggctgcctcgatctgccttctgtcaatttccctgtctatctctgggtggagctcaacatacttctggaactcctcgagggtcatgcccatttccttggccatctgcctgaatataagcccagcatagatgtgcttgaagccgtagtgcttggcgaggttcctgcagagggtcgttgtgccggaccctgccagaccgctgacggttatgacgaggcagcccttgggcattccgcaccacgtcaggcagtgattgaagccctaacctgggccttcatgaccttcctcatgcagctcgggcagaggttcgggtagggcctctcgggtctcttcttggtcttcgggagcttcctgagctcgctcggcctgccgcgcgggacgccgttgagcggcctgccgcacatggcgcagtgggcaaccttcggcttccttctctcgaagtggatgacggtccttccaccgggagtcctgacgtactttctcctccatgaccttgacctgtacatgggcttcatactctcacctcgcaacctcattttgcagagcgtttttaaatttatcccatattaaggaacttcctcagtatcatgccgaccgcgtagctggtcaggaagtaccagccgacgtatccgagctggtcgggcggcagcgccgagtgctgccagctgtggaaccagtcaaagaggaagaagttgaagggggctttgactattccaacctcgacgtaccagcgcctgagccacgcgaagaatatccaaaatacgggaagcgtcaggaacattgggatcatctgctgctgcataagctcactctgcatcttcataagctccatctgcttcttttgaacttttttaagcttcttttcgtcgccactcttctgagcttcacgcatctccttctggagctctttggcaagcttctgcatgtgcctctgcttctcaatatccgtgaagaagtagtagatcaaagtgtaagtcccgccgattattgccccagctaccgtaatgacccacatgggatggtagccagttatgaacggtccaaacaggttgtcaaggaacgcgtatattccctcaagcatactcactcaccgccagatcgagtactttaacgagctcgtttacggcctcttcaagacctttatcctcgtggttttcaatgattttgatgagcgcgttagagtgcattgcgtacgctatggccgcggccctgttgagatcctgatgcctcgctatctgctcctcggtctcaacgtccctatccctcttgaggtcacgcaggcgccttccaaggatttcactcggggcagcctcaataatgactataaagttcggattgaggatttctataacctcccttggaaatccgagaaggtatccagcgggggtccggatagtcgcgtgggtatcgagcagaacgggttctttcctggcaatctcaacaatcctctgggcgactttaagctgaagttccttctgggtcagggggtcaagctttctcatctcgtccctgtgcttcacaagccccatattgacggcctcttcgaacatcagatccccaaaattgacgagtctaaacttggctcgggtctttttgagggccagcttcgttatggtgctcttgcccacacctggaatacccgtgatcacgacaacaaacggcatggctctcacccagaggactcaaagatttactccaaaaggatacagaaaaacgagcttaaaaggttttgcaaaaaggaaagggtcacttggcgaagaacttcctgagtgccgggaacatctcggtggcctgttccctggctatctcctcgtagaacctgtagagtatacctaccgtcaggagaattcctgttccagtaccgagggcaccgaggaagtccgccagcactgccacgagggctatggtgaaggagccccagaatgtcacgtatggaatgtacctctgaaggaccctctcgaggattcttggatccctcctgaaaccgggtatctggaggccagcgttctggagctgccttgcaatgctcctagcgtcaaggcccgtgagttcaacccacaggaatccaaagatcagcgaccagaatattgtcattaacgcgtacaccagcgccctcactgggtcgttgatcacgtggaagatgtccctgggcgggtagaggtatatgacgaaaccaccgactggattgcctgcgctgtcgaactggccaaggattgggtggccgtagttggcgaggagcctagcccagagctgtatgttggcgtagagtgccatagtaaggatgatcggaatgttgctgacgtacatgaaccttatcggatacctgccgcggacagtaacacggccgtagctgaggggtatctcgacgcgcatgctctccagatagacgaccacgaggaagaccactatcgttccaatcagctttacgatgtctgggagggttccaccacggtatattgcgccgcttatgtcccctttgaggatgtgctgaatgaaagcaggaatcgcaccaatcaaggcaggctctcccgtgagtgggtctatgtactggttgctctgaacgggagccagggatctatagataaccgtctgggagacacccgcggcaatgaataggctgataccgcttccgatgccccacttgctcaccagctcgtccaggagtatgagcagtgtcgaggctagaccgagctggagaacgatgaggagtgcaaggcctattccaatgtagatcggcccgttggggattgaaacggtctggaacgcacctattccggtgttcaccttaccgaaggcaccggcgaatacatagatgaacgcctcgaaaaagctcatgaacacggcgaataccctttgggtggcctggtaaaagcgcctgtcctcgggatttgagaggtcaagcctaactatctcggaaccaacgagaagctgcatgattatactggcggtaacgattggaccgataccgagggtcaggagcgagccgctcctacctgcgagcacgaaacggagtgttgcaaaataatcctgaacctgctggggtattccatagaggggtatctcggccagaacgaagtagagcagcagggcaatccctgtccacatgaatttttcctttaggggaacgtgcctcttgggcctttcaacttctgggaaccagcgttcgatggcgtagactacttcccggactcccatcttcaacacctgtgggattgttaaaagttaaagaagacagtcaggcgaggagaacctcgccgccagcagccttgatcttctcctctgccttgggggtaacgtagtaggccttcacgacgagggcccttgtgagcttacctgtgccgagtatcttgtcaacgccgagggcagtcgcgtcgaagacgagctttccgtcctcctcgtatattatgcccgcatccttgaacagttcaaagttctcgtctatgtcgttgaggtttatgaccttcgggatgtactgaactgctttcggcctgtggaagcccctcttaccgagcctgtccggggcgtacttgatggtccaagtccacttctgatccttcctcttaccggtgcccgccataccgcggccacccttgcttccaccgccgcggtgcttcttcttgcagccccatccgtgagtgtgacttccgcggagcttcctaaccttcttcctcctcctaatcatctctcgccacctcagagcattctctcaatgagctcgtttatcttctcgccgcggtaaccgagtgctccgccctccttgaaggagcgcttcttgctgcccttaaggccgcccctcggcgggtgaagcctgaagaccggcttgatgttcggcagatccctgagcttcatctcgccgttgacgaccttctcggcgaactcctcgatcgtcattccgagcttctccttgacgtactcgtcggttatcggcttgtttcctatgagtctgcccctcttcctgaggagcttggctagggtctccttgtcgatctcgccccaggttatgtaatccttgaccttctgaatcattccgcggtagctcggggtgtcgtcaactatgacaaggtggttgatcctgtggaggcggagcatggcgagggtgtctctcacttcacccctcgccctaatcccgctcctaagcctgatgagcgcaagctttgccatcttctctcacctcactcaacctcgaaggtcgtgggcatcgccctacccacgacgataccgtagcgctcgatgtcctcgggcttgatggcaacgcggttggtgttgtagagggcgttgaacactgccttcgcgaagttgacggtggttctagtctcaccgagggtctgtgaccagacgtcctgaacgccagccagcgtgagtatcttcttgcccacgtcaccgataacgaggccgaggccacgcggtccgggcatgagcttgacgcggacgctgccttccttcccctcgacggcgaacggaattgagtgcggcctcctgcacctgcactcccagcttccacagccgcgcttgatctcgatgatgttcatcttggcgtagttgatggccttcctgatggctataccgacttcccttccgtggccgattccaaggccgacgtagccgtccctgttgccaacggcagcgagaaccctgaacctgatcctcctgccgctgtcggtcattctcaccgtgagggctatgtcgagtacttcctggttctccctgaggttgacctccggaaggaggacgtcaacgatctcgggctcctttatctggtagcccttcctaaatatctcgtgaatgtcagtgatctggccttccttaacgagcctgccgagcttggtctttggttcccactcctcaagaaccctctgggctatctctctcgggtcgctcattctctcgccccctcaaacttctcgattatcttggccttaacctcttcaaagtgctcggggagcttctcaggctcgaggcccttgacgagatatccagagaactgcttcctgtagagggcctcgtcctcctccttgagggccttggcgtagttggctatgtgctcgccgtttatcctgtagtcctctggatagatctcctcgctgtgcgggacgttcaagccggcgtcaaccgcacccttgaggaccgcgaatatgctcgaacccctggtcggcgggtggagacctatgtcgaggatggcctcctctataccagcctgcttggccttgtagccgatgaggagaccgagtaggtaagctgagggagtgtttcctccgtgtcccttccagccgaagtccctcatgagctccatggtgtgagctgaaacgagcgttttgtctcccttcgggtcgtagacaacgatctgagcaatgtggtggttgagggtcttcctcacgacgagcctcggcttcttgctcttgaggagcttgagcctcttgtgatagttagtcttaccctctctcctcctcctgaacggaaccctatacctcggtccgtgtgccatctctctcacctcactccttcaaaataccgtgctcctgcatgaacatgtagagctgcctcttgttcttgaactggccgcccttggcacggatgtagagcctcctgtaggtgtgggcatcgagcttgccctcggccttgagcttcctgagctcctttctgagggcccttatggtcatcatccagacttccttcttgcccatcctggcggtcttcttgcccttcttgcttcccggaccgcggtggcggcccttcttcctggcctcctggaaggccctagccctggccctgctctgacccttgatgggcttcttcttgatgacgccgtcgtggatgagcctctttatgtcctccctcgttatggcggcagcaacgtcctcaatcctctccgggtcgatccatatcctgttctcgccacacttcaacagctcggcggcaattctcctctgggtcttgagcatgatcatcacctcacgggttgagaaccttcactccgagctccttggccctagcgagtatcatctctctcttcctggcgccgactgttcccgctatcctggcggcctgcctggtcgggtctatggcctcaagctccttgacgttgtggacgaggacttcctcgtagccgctcgggtggagcccgcgaactgctttgggtgagctccatccgatgctcggtgagcgcggcttgcccttcttcttgagcctcatcttgctgtcgattcccttaggccttctccacttcgggtcgttcttgaacttcgggtacctccaccactcctggcggaggaacctcggcttcttcctcttgagcttggcccttatcctcaggagtctcgccttttcgttcatctctcacacctcaccatcagaactttatcggcttgccagccttctcaactatgtagataccgtcctggaagacacgcctgtcccacttggttatcctcgtggcctgctcgatgttcgcagctgtctgaccgacggcttctttgtcaatgccctcaacctcgatctcgcttcccttgaccttgacggtaacacccggaaggatcttggccctcctcgggttcttctcaccgaggaagttctcgatgacaacctcatcgccctgaaccttaacggtcatcgggaagtggctgtaaaccactttaagcctgtacttgaagccctcggtaacgcccttgatcatgttgttgatgtgggccttgaatgttctcacgatggcgacgtccttcttccttggaaactccttgtagatgacgaccttaccgtcctcggtgaagatttgaacgccggggtacttgagctccctctgaagctctcccttcggccccttgaccttgacggtgttaccctcgacggtgacctcgactccctctggtatctcaatctcctcacgaatccaagcgtccaccggcatttttctcacctcagtagacgtaggctatcagcctgccgccgattcccttttcgagcgcttccttgtgggtcataacaccctgggacgttgagacaatgaggataccgaactcgaaggctggaaggaacctcttctcccacttctcgtagtccctggccttgaccgggaagcgcggctttattgcgccggccttgttgatcttacctatgagctgaaccctgtatataccagcccttccgtcgtcgataagctcgaactcgccgatgtagccgttctcgagcataaccctgagaacctcaccgatgagcttcgaggcgggcttgatgtagacctccttcttcccaactctctcgctgttcgttatgtgtgaaagcgcgtttgccagagggtcaagcagagtcattttctctcacctcactcatacttcttgaagccgagcttcggggcgacctcgcggaagcagtgcctgcagagcataaggccgtgtatcctgattatcggcccgtactggccgcagcgcatgcaccttctcgctcccttaccaaacttcctcggcttcctcttgttgtaatcggccttcgccatctcacaatccctccaccttagccttgagctcctccatagcgaagactataccctcttccttagtcagcttgtgtttggtcggtatcttcctcctctgcctcttcctcttggcgaccctaaaccctggcctctcgagggtgacgcagacatccataccgaagataccgatctcggggtcgtactcgacgcccggtatgttgatgtgctcctggattccaaagcagaagtttccgtgctcgtcgaagttgctcgctttgagctttctgtcaacggcctcaaggagcctgtcgagcatctggtaggccttctctccacggagggtgaccttgaccgctatcggctcgcccctcctgattccgaagtccctgttggtctgcttggccctcctccttataggcttctggccgacgagctgctcaagcatggtctcggccttggtgagcctctcaccgctctcgccaacacctatgtttatcgtgaccttggctatcctcggcttcctcatcgggtgagcttcccagtcagccaggattgcctctctgttgatctgcatctcatctcacctctcacggaagggaaatctcaggcttgtccttaccaatgacgaaggcgtactccttcagggtgtcgaagagctcgccgttctcgtcctcgattgtaacgacgtcgggccagcccatcgggaactgcctgacctcgacgatcttaccctttctggcaacgttcttaccctgggtaacgaagacgtaggcaccgacctcgaacgggagcaccttgactatctgcctctccggaacctgcattatgaccgtgtaggaggtcttgtaggcgtccttctcggcaaggctgacgaggtggttgcttccgtcgtggaggtttagctgaaccttagcgcccttgaccatcctcttgttgttgatcctgaagggcttgagcttggcctcttcctcgcttatcgggtggagtataagcttgcctatcctgttcgggagaaccctgtagtgctcacccgtctctgggattgagacgacgtccatgattccaacggggaacttgtagtccttcctgaccctaccatcaacgaggatcttgccctcgttgaggatcttcctggcttccctggcggtcttggcgtagccgaggtagtccctgactatgtagatcagcggtatggaagtcttcatgctgtgcggacccggactgggcctgacggcccacttgtaagccttcctgtgaatgtaccaggaagtcggagcggcaagcctcttaaggtgcctcttcggacccttcctcgccatcaagcagccctcctctcaattatcttctctctcttttcgtcttcgaggttgagctcaacaatcatgacgttcgaggggtggagcgggtagaagacctcggtaccgtcggtcttcttgtgggtaacgccctcaacgtgaatcctgtacctcctgaggtcaacctccacgaccttaccctcgacgcccttgaagtcaccgcgcataaccttgaccttgtcgccaaccctaatgggcaggtttctcactccgtacttctccctaagctccttgctgaggggggcgctcattatcttgcccctcaggtgaaggggagcgttgtagaggaacttcctctgcttcctcggctgcttcatatcaagcttcatctcatctcacctcacagcactatgctcgctatactaccgagcctgacccacctctcggcggcttccctcgctattgcacccctgatttcggttcccctcgggacaccttcgggagtgactatcgcagccgcgttgtcctcgaacttaacgcgcatgccgtcgagcctcctgtactccttcctctgcctgacaacgacagccctgacgacctggtgcctcatgtcgggccttcccttcttaacggtggcgacgaccatgtcgccaacgccagcggccgcgagcctcctcctggttcccttgtatccaacgacgcctatgatctgaatgaccttggcaccgctgttgtcggcaaccttgaggtaggcacctatcgggagggcgcgcgtcggcctgacggggctaatacccctggttgcaccagcacccttcttggccatgcatcacacctcctcagccctctcggccctctggaggacggccacgacgacccagctcttggtcttgcttatcggcctggtctcggctatgagcactttgtcgccaactttagcgttgatgcactccgggttgtgggcgtgaaccttgctcttcctgagctcgtatctctcgtatttcttgaggtagtggtagtactgcctctcgacgacgaccgtcttcttgcccttgtcgctaacgactataccctcaacgtatctaccgtgtatcttgaggttcccgtgccaggggcacttgggatcgttacaaacctcagcgggaggctgaaccctcaatccaatctctctcatttccgccacctctttttgagtctcatctcgggtcttcccaccagatcctttccgttgacacggatcttctcattgccaaggtcaaactcgatctcgaccacgtccttcgggactacccagaccctatctcccaccaggacgagagtgttcctcgtctcatcaaggacgtagccctcgatgccgaccagctctggatgagatgcccttataacctttgctttaaggcctatcagctcgtgccagattatgtttttccgggtcactcgacctctatgagctcctctgaaaatccaagctctgccagcaacttcttgaccctgtctctgtggtctccctgcagttctatccttccgttctttgccgttccgccgcatgccagcttcgccttaagcttttttgcgatgtcctcaaggtcgaactccttctcgtctatgccctcgattatggtcttgagcttgccgtagcgggccctctccacgtagacccttatcctctgctgctccttcaggacctccttaaagagcatctcatccagagggttcacaatcctcggcacctaacctcaccttttctccctaagcttctccctctttatggtaagcaggcgcgcgatatcgcgcctgaggttgcggatgaccatggggttctccatggaggcccccatggtgagcacgccacgctccttggccagttcgaggcggagctcccttatcttcttgtcgatctcctcgatgctcatctccctaatctcactgggcttcattggcgctcacctcttcctcaacgatctccttaatctcgatctcatccggaagcttggcgtcgggcggcatgatggagaccttaacaccgatgacaccgagcttgagctgggcctgggcgtagcccctgctgacgagggtctcggccgggtttccgaccttagcgaggtagccctggtagaacctgacgctcttggccctctcaccggtgagctttccgctgagccttatctcaacgccacgagcaccgttcctcatgatggccctgatggcagagtaggcagccctcctgaagtgaatgcccctctcaagggcctgggcgagcctgacggcctgaaccttggcgttgaggtaggggttcttgatctcctcgacctcgatctgcgggttctcaaggccgaactgcttctcaaggatcctcgtgagctcccttatcctcctgccaccccttccgataacgtaaccggggttggcggcgaagatagtgaccttggttccgaggggagtcttctttatgtcgaggccgccgtagccggccctcctaagctccttctcgaggaactcgtcgatgagcatctccttaacgccttccttgatgaagtacctctcgatcgccaaaggtctcacctcctaatctcctcgacgactatctctatgtgtgtggtctgctcgttgaacggtgtggccctaccgaaggccctcgggatgtatcccctgaggactgggcccctgtgggctgcggcgtggattatcttgagcctgtcaacatcaaggcccttctgctcggcgttgttcttggcgttgaggagtatcttcttgactgccttggcgaccttgaccgggtaccttcctgggccaaagcccttgcccggcttgtggccctggctgtcgttgaagcgcttcatcggaaccggcctcttcttggctatgacgtcgtcgaggtagcggagagcgtcgttgagcatcatgccccttatctccctgaggagctcgacgctgtgcttgggtgaaatcctgaggtcccttccgctggccctcgccatcctctcggggtcaaaattttggaatgagtaggaaaacctgcccctgctcatctaaaccacctcacttgaccgccacgaacatcgaggaccttgtagcaccgacaccaggtgagccgtgctggacgaccttcctcgtcatggcgaactcgccgaggtagtggccgatcatctcctccttgatctcaacgggaacgaactcctttccgttgtagacgtggatggtcatgccaaccatctcggggaggactatcatgtccctgctgtgggtccttatcggcttgttgtacttgcccttcttagcgagccttatcttcctgaggagcttcttctgctcgggtgaaaggcccctcttgaggctcctcctctgcctgctcgggaggagctttgcgaattcctccagtgacatgttgagaagctcatcaagggtgtagcccctatacctaaactccttctttctcgccatcttcatcacttcctcctaccagttcttctcgcggctatgtgaccgaccttccttccgggcggagcgcgccttgaaacggttgatggccttccaatgtggtgctccttaccaccgtgcgggtggttgacggcgttcatcttgacacccctcggcttcggccagaacctgttcctggccttggctatgtagtaggccttacccgccttgacgatcggcttctcaagccttccaccgccggcaacgacaccgatggtagccctgcacatcgggttgaaggccttgagctcaccgctcgggagctggactatgaccttgtccttctccctgctgacgacgagcgcgtaggttcctccagctctaacgtactttccaccgtcgcccggaactccctcgatgtcgtaaacgtaagtaccctccgggatcttggcgagcgggagggtgttgcctattgctatcggggcctcggggcctatgtaaatctcctgcccgacgaggactccctcaggggctatgatgagcttcttggttccgtcctcgaacttaaccctcgcgaccggggcggttctgcccgggtcgtggagtatctcctcaacgacgcccctgagtgtcctctcctggacgaggttgagcgggacgtacctaacggcacccctgtacctgtgtgaaggggccctaaatgtggtagttcccttacctctcctctgctggatcagactctttcccatctcactcaccccttcagaacaatcccaatctggcagctatctcacttgcatcgtactcaggcttgagcttaacgtaggccttcttctcgcccttcatagtcacgagcgtgttgacctttgcgaccttgacgttgaacatctcttccacggccctcttgatgtcctgcttggtggccctcctgtcaactatgaaggtgagcttgttctccctctcgatgagggaaacggccttttcggtaacgagcggccttatgatgaccttgtacggatccatctctcatcacccgtaaatctccctaagcctctctatagcacccttggtccagatcgtaagccttcccgggtgggtacccggtgcgaggtactcaacgccgaggttgtcaacagttacaacgtcaacgcccgggtggttcctcgctccctggacgatgccctcgttcttggcaacgacgatgagcgggcccttggccttcttgtacctccttccgcgcatcttgccctttcctgccctgatcttggtgttcttcttggccctctcgatgtcgtcccagacaccgagcttcttgaatatctccctggtctgagcagtcttgaagaccttctgcaggtcgtcggtaacgacgagcgggatctgaacgacgttgtcaaccacgtggcccctggccctgacgaggtcgtagttggccgttgcagctatggcgctcattatggcaagccttctctccttcttgttgatgtcctcccagattatcttctcgaccttgggcgggtgggtcctccttccgccaacggcgaacgggacgaaggcggcgaaccttggggaggtctttatcctctcaacccttgccattccgtggccttttccaatgttctcggtgacgcgcctcttacccgcctgcgggtccctaccctgcggctgaatcctgtgagtccaggaagcgatgacagccctccttatgaggtccggcctgaagggggtgctgaacaccttgggaagctcgatctcctcaacgggctcgccttcgagattgaaaaccttgaccttcatctatctcacctcactgcttggactccctactgacgtaggttatctgcggcctctcaaccggcggcttcttcttcggcggccttatagccggcctgacccttattatcctcttgaatgaacccggaatcgtaccctcgatcatgaggaagtcgctcctaacgatgccgtagtgcgggaagccgcccttcggggtgatctcgatctcgtttccgtcgagaaccagcttgccgttctcacctatggcgatgagcctcttgttgaactcggtcctgtggtggaagcccatctgaccggcctgcggaacggtccacatgacccttgccgggtgccacggaccgaggttaccgatgtgcctgcccttgccagccctctgggccttgtggaactgcaccttgacgccccacctcttgaccgggccctgggttcccttgcccttggtgacggctatgacgtcgaggagctcgccctcgtggagaacctctccagcgcggagctccttgccgatcttctccttggcgtagtcgaacttggccttgacgtcgtcgccaccgatggcgtactccataacttccggcttcttcttgaggccgatgagccagggctgggtgtggacgagaagcctgacgtcggctatctcgccatcgttgacgaggtcctcaagctggccgagcttcgcctggaaggcctcctcgttgtagttcttcggcagggtctttatcctcctggccacgttcttgtgaaggtcgtggaaccaaacctcggtggccgtttcaaggccgaggtatccctgcttgtaggcccttatgccgtagacgaagagcggcggaacctcgactatggtgaccggcacgaatatctccttacccttggtgagccctgggctgtcgtcgatcatgaggatgtgggtcatgccagccttgtagccagcgaaaccgagcatcctgacttcactgtcctttggccagctcctaatcctgggcactatgctctttgccctcttcctcggggaatatgccagtgaacctctccttggcctgtgtatttttcccatctcaatccctccttatgagattaaatatcgcgagggttgcaagcaatgcctcctcggtgcggaccgtttcagtccgctgatttggaatggtgttgaggatcagatggaactcaaacttctcctcgccgaggagctccatcacgcctttcctcggtgagccgaacacgaaaccgacctccccctcgagcggggggatctcaacctctcttatgtcgcgacccttcctcgaggtcgcgatgaccagatcaagcccggcctttttaagtgttttcgccagcgacttcctcgtgaggtgaaccctgtagccccagtagtcctccggttttgtcgggacgaccctcagaggtctcgtcgagacgattttgaacgttgcacgcccttcaacgttcccttcaacgaccgccagctcatcgaggccgatgtccgcgtaagttcttttcccccttctgaaggcgaaaccctctcggatttcgccgacccttggccttcccttgagtttgtggtgcggcgtcctcagcggcggtatcactcccacgtacttgagctcgggcatcagcgggaacagcctcttcctgaggtactggggggtctccgcgtactcgaggacggtcttgatgaactttccgtccctgccgccggccctgtaaatccagatgtgctcaacgccgaatattgaacaggccctggctacctgtccgaccttgtacgttctgatctttgggtcgtcggtctcttcgaggagcgaatcgggaatgaagacgtgccaggccatttttccgtcatcctttgatgtggtagctccaatgctgaactggggtctatggagactatttaaaaggctttcgaacctttccaccctcttttgggttgaggagtgtgaaatttttttgcaaaggaaactttgcagggcaaagtttcatcaaagagtgaatgtccttttgagcgccctgcgttcagtgattctcaatcattaattggcaattctcaagggtttactcacaatataacgcccaaagggcgttaaaaaataagaaaacccgcacttctccgcccatctatcaagagaatctaaccgtatcaagccaatcctcggagacattcaaactttggtgaagcttttcccaaaagcttcctgcgcgacgttgaagcttcgcttcaacgcacgggacgatagtcccgttgagtttgatcaaggttcgtagctcatccttaaaaagctagatttcacgcgattttcttctttggaaagccagtttgaacatgaaaacacttgaaataccttagttgtgttggttttaactccaaaaccaacgcccaaaggggcgtcaaaagaaaaattaaaaaattcctgaaagcatccgacgaacggcaagagcgacaagggaaccaccccttaaacttgggtctttgaggaaataagcctttcgaagtctcctaaatcccatactaaccagccatcatccctgagctcttcctttccctcgacgcttttagccacaagcccatagctcttctcccatccatcgaggcccgtaagctcggccttcctctccaagtccttcaaaacccccctcgcttccctctctttgagctccttccacttaacctcaacgaacagcgccttcttttcacgctcgttgagggcaacgaggtcaatctcctcgcccttgtgccaccagcggccgaagcggtggtacaagctgggaaggtgccccttggccgagagcattatcaggaactccctcgcaaccttttcgaaggtagtccccaggtaggtgttgaagttcttcctgaagtcctctatggcgggctcaggattgaggccctcaatgtcctcatagtgcgggctgacgaagcggtagtagaagcggaagtactcatcctcgattgtgtagatccccctcttcgagacccttttggtgaccggaacctcgcgcttgactattccaagattctggagaacccgaaggtaggccggaaggtccttcgcctccatcatcgcgtactgggagatctcggtgagcctcgtcttccccagggctatggcctcgatgatctgggcgtaggtcgtcgggtttctaagctcctccattagcaaaagcctcgcctcgttgaagaggaaagccgttggctcaaagaagttcgcgattatctcctcgtcgctcccgtcctttaagagctccatgtacctcggaactccccaggtgacgccgtagaggcggacgagcctctcaaaatcgctcccgtaccattccaccatgtcaaagaacctgaagggcttcagcttcattatacccctggccctgccgtagaggggagccttgtagcccagaacctcccgctccatcatccccacacttgagcccgagaggatgagggtgacctgggagtccttgattatgaggtctactatctcctggaacactgaaactatgggtctgtaggcctctatgagatagggaaactcatcgattaccactacgagctttccctgctttgtaaggaacctaaaagcgtcctcaaagctcccgaacctcactggcataccaatgaactcgctcacttcctccgagaaccgttcgaggtccttttcataccccctctgagagcacaggaagtaaatccccctcttgccctcaaggaactttctaaggagtgttgttttcccaactctcctccgcccgtacactacaatcaggtttgcccctctgttgtagagctcctccagcacctcaagctcccgttttctgttcacgaatttacggatcataattataataaccgtgattcgaatatttaaacctttcccagcttggaaatgaatggaaatccttcagtccacgaacgccagcccgttccacagctcccggatttccctcgtcgcgtccggatagacccgcttgaaggttatcctccagtaaccgttgccgaggtcttcgatgtcctcgatatgtatcttaacccccagcctctcaaagtgggtcaccatcttgtgagcggtcgttatgttcttgacgcggacggtgaaggtctcgtcaacctcgccgccgttggcaacttcatgaatgctctcgacgaagggcctcagaagggcagtgccgagggcctttgcatagttttcgaactcctctcccctaacgtggttttcggcgagatagaaggcgagcctctttatcctccccatgaagtagccgtgaggtaagtcgaagaagatgtgtgagcctatctttatgtcgtttatgttggcgtagggagtgacgtacttcgcgattctcctcatgtcggggcttttcatgactatgccctctcttttttcctcgctgagccactcaataagctctttcagctccccaaccttggaagagtcgtagaggccgaagcgctccacctgcgggattccgtactcctcagccagcctgtacctttcctccgccggaagactcctcccggttcccttctcttgaatatcgaagaggaagaactcaatgtcctccttgacgtagggcggcccctcaacgaggtaggggctttcaggcccggccatctcaccgaccaggacgaggtttggatagtccttgaagaagtcgaagttcacgaagtcctcaatcctctcggtcgtgaaggggcagacgaagccgcctcgcgttatcgcaagaatcttatcctttaccttgacgacgcggacgttgtacccatcaaccttctcctccacgtagaagggtttgttcttgaaaacgcgccttatgccgttttcaagctggacgacgcgctttatgtgtggaaaaccgagaacagcttccccagtttcgaataccacagtccccctcctgaagttcctcgccgaatccctgaagcggacgtacctgattccctcgaactcgtcctcggctaaggccccctttccttcaaggacttccagcctctcctctggaaggcccagcttgaggagcaggttcctgaagtacgagcttaccatcctctcaccaccagtaagtatggcagcatcattaataatcattattatgaatctgcatcacccagaaacacaagacaaaacgtgaggactgaaggcagtacagaacctgcttgagggataaagcatagaaaagtagggaaaagtcggttcagagcttcatcgtggagagaaccttggtggtaacgtcgttgccttccttgtcgtagatcctgtagtaagcactgtacggaagcttcatcttggccctgtgcattgcaccaagggcgaacttgaggtgctggccgttcacccagacggtgagtatcttctggtccttcctgacgcgagcagctaatccaatcggctttccgaagggcctgcgcataccgtttccgtaacggtcggccttccttccggtagccatcgggttctcacggagaacctggaacgggtaaacccttatcttgaagtggtagttgctcctaccgacgttcttctggaggtatctgttgacctggatacggatggcctcgagggcgttctgcctgatctgcatggcctgctcggcgtgaaggctcacctcgtactcgaactcggctgagaggttgcccatgtcgaagatcgttatctttggaccgggggcaccgcggatgtattccctcctcgtgtaagcgggcttgtcaacgtccctatcaatctttgctggcctaagtcccatactctcacctccaaatgagcgtaagttaaagcctaaacttagctggccatcgcttttataaaagttttggatggtgaaatctccaacagagtccttactccctcccacctttaagcttaacggcctgaattagaagggccagcgagaccggcgtaaatgccaaaagcgccccgttcaaggtaaccccaatgtggatttctcctattgagtacacaaggccaaagaaaacccctccgatgaaagtcgataggttctggacaccgttaaccccgcctatggccagggaggagcggtggtagctggcgagcaccttcctagatatgggcctaaagctctggaagccgaagagcgcgaggaatattccgaggaaaacggtgaacgatgttttaacggccgcgaggatcggagaaatccccgcaagtacggccgtcagctttaccatcccaacctcgctgaccttatccgcgaaccaggaggagaagtagctgagaagggaagcgaagaagccaacccaccccagcagggtcgcggtagttgccttttccagtccaagggcctcggagacgtagacgtacgttatctctccggaggtaaaggccactatgaccgccatcagggaggctatcacgaggacttttctcgggtcgagggagggcctttgagagctctttttctcccttttcggtgctacccagtcgttcaggaggatgtaagcgattatcattatcagcccggtcagcacaaagaagacagaagatacccacatctggccagaaagtcccaaatctattgtgtaggcataaacgtagttgccgaggagggaagcgatgctgccgaaaaagaagtaaacggccgtaacccgggcccttatctcctgtggagccgccacggcaacgacgaactgggccatgggccagctgaggccgttgagaaagccgttgaggagctttattccagccacctgaatccagttagaggtgagggggtagaggtgaacggccagggcgttccccatcatggcgattccgccgatgtggaggatggacttcctcttctcaaggaggaggccaccgaacaccgaggaaaaagccctcgccagaacaaaggacatggaaactattgaaaccgccagcatgctcgcgctgagcgtgtccctcgtgtagaaggctatggcgggtgtggcgagacgaaaggcgagagtgcccgtgaaggcagagagcacgagcaggacgatgccggcgagtcttctccgttccatcagaccaccgactgaacgtttgagtacctgtttaaaagtcttgggtggagtgaatgaaattctcattaaagatgaagtttccgattaactttcggagagcctttgataggtctaaagcaaaccctttttacccccttgagcaactaagggcgaggtgataactatggagctccactttgacatgacctatgaggacgcctacagagaagtttacgagatggtgaagccgaagtacaagctctttacagccggtcccgtcgcgtgcttccccgaggttctcgctattatgagcgtccagatgttcagccaccgctctgccgaggcgaaggccgttcacgttgacacgctcaacaggctcaaggcctttctcgaggccgacaagggggagataatactattcccgagctccggaacaggcttcatggaggcagcagtcaggaatacgattccacgcggcggaaaggttcttgtcacggttattggagcgtttggaaagcgctttgcagatgttgtgaacgccaacggaagggaagccgttatccttgagaaagagcctggaaaggccataaagcccgaggaactcgacgatgccctcaggaaaaatccagacgtccacgcggttacgataacctacaacgagacctcaaccggtgtcctcaacccgctccccgagctggccaaggtggttcaggagcacgacaagctcctcttcgtcgatgcggtctcagctatgggcggagcggacatcaagttcgacaagtggggtctcgacatgatattcgcgagctctcagaaggccttcggcgtcccgccgggactggccgtagcggctgtcagtgagagagtcttcgagatagccgagaagatgccggagcgcggctggtactttgacttgcccctctacaagaagttcaacgagaagaagaagggaacgccctcgactccaccgctcccgcagatattcggtctcaacgtcgttctcaggatagttgagaaaatgggcggcaaggaagcctggctcgacatgtacaggaagagaagcgagatgataagggaaggcgtgaaggagatgggcctcggaatcctcgccgagccgggctacgagagccccactattacagctgtcgttgtcccggagggaatgaagggagttgacgtttacaacgcgatgcgcgagaggggcttcgagcttgccaagggctacggaagcgtcgccgagaagaccttccgcattggcaacatgggttacatgaccttcgacgacataagggagatgctcgacaacctcagggaagtcatagaggagctcaagaagaagtgattccaattctccctcttttccccttcttatcccccataattgaagaatttggctaaagtacgagaaaagaaaatcgatggttaaagaatctggatcagctccccgtccttgaccttgtaaatcctgtttatcttcctgagcccggttctccagtccctcgccagctcgacaaccacgtcaaacctgttgaaagtgtcctcgtctatcctgagccagtgcataacctcgcctttgatgtcatcagtcagcgcgagtgacgtcacaataaacgcatagtcgtctattagggtcttgagtatcgtagcgacgtcaaccgtgtgaaccgtatcgatgacaacgtaatccgggttgatgcgccttattttctctatgacttcagaagttctaacatccgtagagcgcctgtcgaactccgtgtcaacgacctcgatgttgggcctgaagggcttgaactcaccgtaggccgtgataacggcgatcttccattcgtcggggacgtagtgaaggagagcctcaacgagctttgtctttccgctcctgctcgttccaactatgaggatgtcctttttttcgagaactgcctccctgagaacttccagctgttcgggccttgcggaaccgtacctgacgaggtcttcgggggtaaagatgtagactcccatgataccaccgattttagttgtttctcagtggttataacgatatcgagtctcaaaacccggaaaagattgaacactgctatcctgattggcactacattcttgtctttatgtcaaaaatttaggaaataatctgttaaaattggcccaaatgacagctatttttggataaaagacataaagaagaagcgctcaattatccaccggtgatgctcatgaacgcagtccagatggtaagcaggagaatagaacccgttgttagggtgcagaccgaggccataagatacctcaccagcgagctgacttccagagggtttaggtggctattaccagtcatgctcagctcgataacagacccgctctggcccgacccggccgcgagcaagatgagagcgcctgagattgaagcgtatggcagtaagctgaagctcatgcacagcatgatcctccataagcagtttgctgtagcaatgggtctggaaaagatcttcgtcctttcgccaaacatcaggcttgaggagagagaaagcgacgacggaagacacgcctacgagttcacccagctcgactttgaaatatcccacgccagcatggacgacgttatgaggctggtagaagaactaatcgtgggcctgttcagggagctcagggggccagtgtgggaaacttttgagagagaactgccgagagtgaagcggcccttcaaacgctttacccttgaagaagttattgaggagtttggcagtgaagagaaagcaagcagagagatgggcgaacccttctggataacagacataccaagggagttctacgacagggaagtcgatggagtctggaggaactacgatctctatctcccggaaggctacggcgaggtctccagcggcggcgagagggagtgggagtacgagaagatacagaggaagattagggaagcggggctgagcgaagaggccttcaggccctacctcgaagttgctaaggccgggatgctgaagccgagtgcgggggccgggattggcatcgagagactggtcaggtacatagtcggggcgaagcacatcgccgaagttcagccattcccgagagtgccgggaattccggcggtgatatgagcttatcgttcaatttttccctcaaggttcagctttttcaggacgatttcccactgcctctcgggaacttcggggggagcggtaagcttctcagccctctccctgtccattaagccgtacctcacgagggccgctatcctcctgtgctcaaaggagtgcccgtgaaccttgtagtagcgctcaagagccgggccaagaacgaggcagttggtcgtgtagcctgggagctcagggaactcaaaggggagcttttccaggatttcaaacctctcgcgctccgtcatcagggagagtagccttatctggataacaccaccgctcatgagcctgtagggcttgtggccgaagggaagctcatggccggtgatgatgtagcggtagccgtttttcagggcgtactttcggagtctctccatcgtcctcctcgaacaggccctgcagggactttgggccttcagcagggcctccctgaagatgtccgagtagtcgtagcggaggattttgaagaggactccaagggcctcggccatcctccgggcgttctcgatggcttcctctgccattaacccgtggtctaccattacagcctcaagctccgggactttgtagacttccttcgccagataaagggcaacgacgctgtccttccctccagagtaagccacgatggccctatcaactttctccatcagctcatcaagttctcttctgattttctccctgtcaaagggatgctttagataaacctggcactccctacatatcggatttccgttgattatgtctatcgtcgcagtcctctcatcatgaatgcagattgaacacttcagcaccactaacccccactcggtcggtgaatgggggtcttaaaaacacttctctctttacttcttttgaaagcctcgccgttcacggcggggagaaggtcagcttgattcgtttatcaccacctttaacctgcgtctccagaagaactcgaccaagaggtacgcgaggacaaccacccacccgattgcagaatacgccctaaggcgcataaacgggtcgcggaactcggcgtccaccgtggatttccccgagacagtaatcagcgtaagccccgtgcggtcgtccctaattggttccacaagctttccgttcaccctaattttccagtgggggtagtagctctcggatatccgcacaagcatcggtctcgacggtgagagtccaagcgagtactcaccgtccgatctggaaaagagcgtgtagttcaggcttccatcgatccctgcgaggccgaagatcaactccgcctccttctttgagttccagtagaggctgtggtacaggaggttgcccccaacgaggtagagggtgccgtttccaagcttcaccaaaccgattatagccttatccccaaccgagaggagcggcgtcacgttctcaaagacgggaccgtaccagggcattccctcgtactcgaagggggcaaagatcgagacgttgaagacatcagagcttaggcgagaattatcaatgcgctccattacgccgcacacaccaaagaggcatccgctcccctcgggaacccatacgaccgtaccgccgttcctcacgaagttccagagaagaccctcctcttcctttgacgggtttccagcgtaaacaacgccaacggaacctggtggaatcgcagcaaggttagacggatcctcaaagtaggcgtagtccaccgggaggtcatagaagtttccaaggagcactgccccaacgggttcaacgaaactgacgttggaggtgtagatccaatagttacctatcctctcaatccgagaatagtctttcacagtgacgttgatggacgccatcaaaaacttcgcagcgtagatcttgaggtataaggatgcatcattaccagtggacagagcataccacatcctaaggtgtccctcttctgcgggatccccctcgtggtaccatccgtttagagtagatttacccgtaagaacgggcaggtagctatggtgtgaaacacccggatgcactacaaacctccaatcttcccctggctgttcgcggaggaactcggcgacctccatcaagtccccgggataaggcgggatgggctcggcatagggcagtgcaccgaagatcaaaatgcccacagataaggctccagcaacgagcctccacttaagttctactcccgttaaggcgtcggcaacgatgaggggaaccagcaggttgaccatgtccatccatctatactggggtatcatcgagagaaccggaagggaatgaatccatggggtcggcgagtagtacccgagcgcgaggtagatataaagtgcgatgaggccaagggtgcggcgctggagagtccccctgaaataagcaacgataaggaacgctgaaaagacggcggttgatgctatccccaccggctcaagaaagcgcgaaggcgacacgctgtaactcttgaagagccaagaatactggtatatcttccaaaagtttgtccattctctctctaagaggaatgggacgtaccaaaaagatgtaagtgccacgacgattccgccgaccttgaaaaagtttgagagaacgcgggttttcctgaagttttcaaagagcagtacgagaccagtgataacgagcggaaccatggccgagtgatggatcaaagagataaccgagatcgccacggcggatgccgccaggtacctttcacgaatgtcaaccgcccagagaagtgcgagaagaaagaggggaaacaggtttattgagttggccctcggaaagttggcctcgatatatgcaactccaaggtgccagggaaagagcagaaaaacaacgggagcaacgtacggctcgcgtccggtcctcctcaggtagaagtgtagcgcgacagcacccacgaacgaggtcagcatcagggttgcggcgtatccccttatatcgctcccgagcaagatgccaaggaaagcccctatgaggtacgacaggggaggataaaatctgaggaacggaaagcctgagtaccagtcttcaatccacggctcccacccatcgctcatgagcttgtgtatcttgaatagatgaccgttgccgtccgtattgagggccgggggagacggagcagtgaacagcgggaggtataagagcaccgcaattaccgccagaaggatgaagtaggctctcctcaagacgatccctccaggagttcgacgagctcaacaagcccctccaggttcgaagcgaagaacgttgagtgcccatcggtgccaagccaaagtcccctaacaaccttcaggatttcaaccctcccccaagaagcatctatgaagccgctcggcacgcctttaactggaacgttggcgacacctattatcaccgcctttcgaaggtgctcttcgtggaggatgaggtcactgagaacgaatttcaataaatcaggttcaaaccacaccgttaccgtgttttcgggataatgacaaacgagacgtacgttcccgccgtcaactgagtactcggctaggtacctgtccctgccctgccaagcactcaccctgttctccctcagaaacttgtccaggaacttcacaaggtaggcaacgtttcttatttgtaccaccgccatttcaaccagtaggtattttaagcacctcaaataaaacccttaccatgaaaccggccctgaagtttcaatcagccctctatctgtacattctgataaccatcggactgacactcatagttccgccggcctatgcactagaggcggtcctgatattcctgttcctaattgtgttttctggaacgatattctactccttactgatcgctgcctcaagacgtgactatccctttaaagttgaagcccataagggaaaccccttctttgaaccgctcgtttacgtcctgattcctgcccacaatgaagagaaagtcatagagataacggccagaaccgtactcaaccaggactaccacaacttcaagctgttcctgataaacgacaactccactgactcaacgaaagagatcatggagagaatagcctctgaaaatccaaaaagggtcgttgtaattgacgttccccccgaaaggggaaggagcaagccaagggcccttaattacacccttgaactaatagaacagtcaagggatcaccccgattacgttttcattctcgatgcagactacctcttaccttccaacgccctccgcaccctcgtcgggataatggaaaatgcccccgagtacgtcctgggcgttcaagggaacgtgaggcctaggaactgggacaggaacttcgtaacaaaattcataacccttgaaaggctggtgggcttcaacgtcgccatagagggggacatgaagctaaacgaaaacgggaaatacggtgggacagttgccctcctgaggttttcacaccttctcaggctcggcatgttcagggaggattccgtcactgaggacacagacctgtgggccagggccatgatttcgggctaccgcttctggtactaccatggggtaatcggctgggaggaggccgtagagaccttgaaggactacataaagcagaggtcgcgctgggcacagggccacttccaggtaatgctcgattactactggaacgtcctgaggagctgctccggaatcacggaggggtttatagagcacttttatctaataagctacctcgttccagtgttctggttcctctcggttgtcttgaacggctacatcatcctgtcaggcaacgtaccgctcatgctggccaaacccgggctgttccttgccgtctcgataaccgcgtttttggtgttctgggcatcggtagcgtattccaactgggtggagatgaagagacacaactaccacgtgccctggagcttcgtcgcggcgtatccctgtacttcatggttttcgtccttgcgggggttgtgtacaccatgaggggcctcacaaagctcctgataggaaaactcacatgggagaagacgcagaggttcacttgaaggggtctttgagggagagcctatcaaagtcgcctcctattaccgaggcataaagaacggacgccactttcaagtcatccctaaagagtcccaggacgtactcaactataccctttagcagcagcagggtggcaacgagcgcatacccacccctgagcacgtcggcagtgtaaaagattacggaagcaaggacgtggactgaggcgtatgccccaaagggagggctgaaatattcctcaagggcacggaaatattggacaaacctggttttccttagagagaggtaaacctcacggtacatcaggaacgaggcaaagaaaaacatcgacgctacaaggtaaacgatggcatgggggagactggcctccataacccagaacgcggtaaaggccgaacaaataaccgcactaacaagcagcgctaccatgtagaatcttagaagggccagcacgcgccttcgttccccaggaaactttaccacgaccctcatttttccaccctgaagtcaatcggcttttccagcctccagaagcggcagaacgaacagacctctccgctcgacggcataccgcagaccttgcactccctaagctcggtctctttcagctcggcctcgaagaggtgcttcttcctcaggtagcccttgacgaagtttatcttcgttccgggcctcttctcctccatctcgttgaggattgccttccactcgagggtcgtggctcccctcgcatagggacactcgtctatctcgtactctatgccgttggccaaagcgtaggcaacaacctccctttcggtcacctcgtagaggggctttactttcttcacaagctttccgttgaactgggagggggttaccgggccctgcttcgccaggtactgcgtgttccagttcattatgttgttgaagatgaagctcgcctcatcgtcgaggttgtgaccggtggcaactgcgtcgaagccgttgtcgtaggcgaacttgttgaagatatagcgcttggttaagccgcagtaggagcacgtcggcctcctcgttctcacctcgccgataccatagccgagaagctctttgagcctgacaatgtgaaggggagcacctatcttctcgcactgctccctagcgtatctctcacccttctccgagtactcgccgatgccgaggtttatgtggaggcactcgatattgtagccgagcttcttgaggacgtgggctgtaactgccgagtccttaccaccactgacgacgaccaggactttttcgtcgggtttgagcatcttgtagcgctctatcgttctctttactttcctctcaaagtactcggtgaagtgctcctcgcagaggtacatttttggatagtggagcttgatgaaggctggtctctcacagaacttacatttcatcggcattttctacaccagcagagaaaaagaaggagagtttaaaaaacctatccattgagggactcaacaacactcttccagttgcccggcttcctgaagtccttctcagtgtaaagaccttccttcttgagtatccccctcgcggcgagaaggccagtcgcggcagcgttcactatgtccctgctcagcccggccccgtctccagcggcaaagatgttctcgatgctcgtctcaaggttctcattcacctctgctctcatcgcgtagtacttaatctccggggcgtaaagtagggtgtggtcgctggcaacgcccggaaggactctgtcaagcttctcaaggccctctatgatgtttgtgacgacgcggtgtggcagggccatcgctatatctcccggagtaacgtgcttgagggtcggctcaacgtcgctcctccgtatcctggcccaggtgctcctcctgcccctcctcaggtctccaaggcgctggattaggggttttccgccgcctatagttgtagcaagctgggcgatgctctttccgtaggctgtcgtgtcctcgaccggctcggtcagttctatcctcgtcaggaaggcgaagttggtgttgttgctcttcttttcgtgcatggagtggccgttcacgccgacgtaggaatcgtacttctcctcaaccacgaagccgttcgggtttgtgcagaaggtcctcacgaagtcgtcgtaggtgtctgtgtagatgtggaacttggggtcgtggtttatgctcgttattggctccataactatggccggaacctcgacgcgaactccaacgtcaatcggcccgtgccttgccttcagcccaatcttctgggcaacgtcgtggaaccagtcggcgcctcccctccccggggcgactatgatgtatctagttctaatctcaaagacgtcctttccgcgctttaccttcacccaacccttgttgaactcaagggccttcgtccagagaaggaatttgacacccttgctctccaggtatcgcttaatgtcgcctattacctcgggcgtcctgtcggagcctatgtgcctctggattatcgggatgaacttcaccccagcctgggcagccctctgttcccagtacttgacctgctctggatcgcccttgaagaggttccttggggccttatgtctcaggagaatctggtcgacctcccagacgagctgccaggcgtagttctcgtcgttggtcagctccctaaggtcgccgccgatgtccgggcggaggtttatcgtgccatcgctcagcccgcccgcgccaccgacgccgctcattatgtggcagggctggcagccgacacagtagccgagctcgtacattgggcacttcctctggtcaacgtcgccaccctcgtcgatgacgagaaccttaaaatcgctcttttcggcaagctcgtaggctgcaaaaaggccagcggggccagcaccgattataacaacatcgtacgcctttccgcttccgtttccagaaaccatatttcccttaccgatgtctatggccattgccttaaaaagtttttggctaaaattagtcaaaaaattcaaaagatttcgagatatttaaacatttttatgtcaaaaaacgcccgaaacatttaaacgcattcagacaatagacttgtaccagtgagtacaatggaggacgtttcaggtgtctcgaatacaaaagcaaccaaggccaagaaagtccacataatccacagcaagaggcgccttctgatgctccagagaaaggaggagctgagccacaacatccgctacatctcaaaggtcccggtgagcctcgtgatggatacggagttcctgacgcttcacccaagtgactcattatccaagctcgttcaggagttgaggggagaggagagctccgcggttgtcatcgacggggaaggtaagcttctgggcttcgtaaccatgaaggatctgctcaacttctttgcaccgccgaaaaggtactccatagtgggcttagacctgctgaagaggtactccatcaacagagcttcccgcgttgaggacataatggttaagaagccgataacgattcacgttgacgaaaacctgggaagggccattcaaatcatgctcgaaaccggaaaacaccaccttcccgtcgttgacgatgaaaaccgcgtccacggcgtccttgaggttaaggacatcatccggctcatccgcatagtttcgtactgaggtttggcaaccactgcagggttgaataaactgcaggggatgacaatcatggacgtgttcctggaactggcgctgatactggtagttgcaaagctgttcggatacctcactgttcgcctcggctttccagccgctctcggccagctcattggggggattctcatagggccttctatactcggaatagtctcctacgacgaggccgtcaggctcattggggaactcggtgtcgttatgctcctctttttggccggtcttgaaacggacatcgaggagttcaagcacgtcgggattcctgcctttatagttgcggcgatgggcgttctcgtcccctttctcctcggctattttggcgccctcgcctgggggtattcgcacgtccaggccctcttcctcgggggtattctcacggcgacgagcgtcggcctgactaccagcattctgatggagatgaagaagctaaggacaagggtcgggacaacgattttagctgccgccgtagttgatgacgtcctcggcatcatcgccctgacgatcctcgtggggataaacacgcgtggaagcgtctacgccaaggacctcctcataatcattggagaggtagcactattcttcctcattggccttctcgtggggactcccgcggttaaagaggccctgaaggcgtcggaaaagataaccctgcccgagacggtaacggccatggcaatagcaatcatgctaatcttcgcctaccttgccgaacagttccagatagccggaataaccggtgcttacttagctggaatactagtggcaacgaccgaggaagccaggaaagtggccgacaagacggtgacgatagggtactccctcttcattcctgtcttccttgtgagcatcggaatagagagcgacgtcaggattctaaccacggctggaaccttcgccctcgtctatgccctgctcgccgtagttagcaaagtggttggctgtggactcggcgcactctttgccaagttcaaacccattgaagcgatccaagtcggtgtcggcatggttccgaggatggaagttgccctcatcatggccaacgtcgcccttagagaaggcgtctttgacaggggtgttttcgcgattccggtcacaatggtggtgataacgacgattgtaaccccgttcctcctgaagtgggcgttctcaagggagtagaggcggtaacatggagatactgctcctcatagccataatgctcgcaacggcaaaggtgatgggctacctcttcgagaggatcggccagcccgtcgttctgggccagatattcgggggtctgttaatcggcatcttcttcgaaactaacccggtcatcgcccaattctccaacctcggtgtcctgctcctcctgttcatggccggcctcgagagcgagctcgaggagttcaagcgcgtcggaaagcagagcgtcttcgttgctggagtaggtgtcatagttgcatttctctttggattcggcgttgcatacttctttgtgccgttccatgaggcggttctctacggtgcattgatgacgcctacgagtgtgagcataaccgtcaaagtcctaatggagctgaggaagctgaacacgcgcgaggggacgacgattctcgctgctgccgtcgttgacgatgttcttggaatcctcgtgctcaccgtcgcgatatcaatgattaagggaggttcggttaattattctagcttggcagaggtgctcatctcagtttcccttctcctgttcttcttcctctacttcggcccggagattgcagatagagtcttccgctacgtctcaaagatcgacctccccgagagcgagactgccttcgccctcgtcttcctgatagtctttgcgtacctcgccgagcacctgaacctcgcctcgatcctcggtgcttacctcaccggccttgccctcggccagattccgaagaaaaaggccatcatggagcatatgaacgtcctcggttattccctcttcatcccgctcttcttcgttgaggtgggcatgaggatagagttgtcctacatcctccacgcgggtctctttgcggttctctacaccactgcggcaatagtcagcaaggtaatcggctgtggacttggggcgagacttggcggcttcgactgggcggcttccctgaggataggcgtcggaatgataccgaggatgggtgtcgagctggctatgctggccgttgcgatgtcgagcggcgtaataagcggcgatgcccttactgtggcaatcctgatgatcttcacgacgacgataataacgcctccactcctcaagtggctctactcaaggtagctcagacaaccgagtgctcatcactgatcagccagtgccggtgtcatcatagcaagggaaattggcatagctttttaaatcccttttccaacgcgacgatatgagcgaactggggacgatactgagttcagctttactcatgctcatcatgatagacccgagcgacaagatactcctagttacgttcctccgcgaagacttccacatagaggacataaaagccctcataatcagggcaaacctcatcgggttcattctcctggccagcttcgccgtcgccggccagataatcctccaggagatattccacattgatataaacgccctcaaggttgcgggcggtttcgtcctcttcaagataggccttgaggccctcgagggcggtggcatgttcacactcaagagggaaaaggacatactggctttggcggccgttccggtggcaatgcccctgatagctggcccggccgcgataaccgccgtaataacaatgacggctgagtacggctacttcgtctccctcaccgcaacggccatagcaattctaatagtcgcgatctcaatgttcatagccctctacatgatgaaatccgtgaacaagagcttcctcagcataaccatcagaataatcggtctcttcatcatggcaatcggcgcccagatgatggtggaaggggtcatagggatataccttctgatgaccggagcgtagtttctgattttcattcagcaacccttttaacctccaaaaccctccttctgccaggtgttgaaaatggcgagacttgataaagtcaaggggacgagagacttactccccgaggaaatggcgaagaggagatgggtgtttgagagaataagggaagttttcgagggctttaacttccaggaagttctaacaccaacgtttgaatataccgagctgttcaagctgaggagtggagaggaagtcgtcaaacagctctacgccttccaagacaagggcggaagggacatctctctaaggccggacatgacatcaagcgtcgcccggctctacgtgaacaggttccagaacgcgccgaagccgataaagtggtactacatagcgaatatgttccgctatgaggaaccgcagagcggccgttatcgcgagttctggcaggcgggagtggagctgataggaagtgacagagtggaggccgatgcggaggtcatagccctcttcacccagagctacctcgcggtcggccttgaggacttcacagtgaacatcggggacagaatcctcctcgacgagttcgccaagatgctgggcgttgaggacgatatcggccttatgaggctcatcgacaagaaggacaagatgagcagggaagagttcgtgggggcgctcagggagttcgggctgaacgatgatggcgttgagaaagtcctctcgctgatcgagattaaaggtctccccgatgaagtccttccaaaggctgaagagctcttcacgagcgaggaggcgaaagccgaaataaagaggctctacgagctcgttgaccttctcgatgcctacggtgtctccaagtgggtaaggatagacctcggcatagcccgcggtttcgactactacaccagcgtcgtcttcgaggcgatagcccccaacgacctcggaataggctccatcggtggcggcggccgctacgacaacctcatcgaggtttttggcgggaagccaacccccgcaaccggttttgccattggcatcgagagactcatcccgatacttgaatggaaaggcctcctccctgagatcaagctcaggccggacgtttacgttattccaatcggagatgatagagaggtgaagaagactgccatagagataacccagggcctcagggaagccaccgtgagggcggatattgagcttactgggagaaagctcagaaaagccctcgactacgccggaaagctcggagtcccctacgtggttttagtcggcaagaaagacctcgaagctggaaaagtgaccctcagggatatgaaatcgggcgagcagaagagcatagagaaggaaagagccgttgaggaaatcctcaacatcttgggagtttaacatttcctagcttcttttcccgttttactgttaatggattgtccttgtaaaaaacaaaatcagggacccctaacactccagaagtagttgatcacctcctccgcgagctgtttggagattatcttaacgctaacctcgtggttccagtggagggcggattcactccagttgtggcttccaaggaagactatcctgccgtcgacaacgacaatcttggcgtggagggtcgttgatggggagtcgtatgaaacgtcgattccattggacttaaggtagttatacgcttccctgttggtatctaggctgttctccagaagaatgtggacctcaacgccgcggcgtctggcgcggatcagtgcgtttatcaaatcgttggcctcgtccgaccagtcgtctgggtcgtagagcatcgagaacatcattacgtatatttcctgcgttgcgccatcaattgcctcaatcgcctcctcgtagtaatcacgctctatgaggagttcaacacttccatcggtgtaagtcctgttgaggacgtcataggtttcattgagcttcagtcggcactcttccagctccgaagaaagctggtcagaggttaccctacactccttgagctcctcttgagcgctttcaagctctttctggcagttctcaagtttcaaactggtcgagttgcaggttgagagatgagccagacacccattatactcagaagtcaggacggccaacctgctctgggtaacgttgagcgaatacttcaaaagggaggcgttgctgcggcactccctcaggctcgcgttcaaaagctctaccttagttttgaggtcggagagctctttactaagatcgcttgagacgttgcggacacacttttcttccgaaacggttgctaccgtggtccttgatgcgggtgaatagttagaggagttagaatgagttccaggactaggggtgcccaagcatccagccgctaccaaaaccagcaccatcaaaactgaaattattcccctcataatgggtcactgcggaagaactagcttaaaagtatttttgtagtcagagcttcaccttaaactcctttgccctccttttcatcctccaggcttctaactttctcacgaatggacaccttgagcgccatttcaggtagaggactttaagtctgctcttcattccgaccaccaggtttttattcatggaaaggtttaagccattaacggtttacgggatgatgagtctggagccccctgagaggtgaagaggtttcgcggggctgaccggcatgataaaaagaaagctctgcagggagtacgttgaggagatagagaggcttgaacgctcaatagtagagttagaagagcagataaacgagctgaagatgcagctccgccttaaagtagaggaagccaacagcctcgcgatagagaacacgagcctcaggcacaaacttgacatgatgaagaaaagggaaaagtacctcattgaacttctcaagaaatttggagtcccctttgtcatcgttgacgaagacgagttcgaggacgtggatatatcagaatgaaccgatgatacgttttgctcaaaagctcttgagactatatcagcttcgatgattctccagtagcagagtcaaacggtttgtggtaccaagatcggttttcataaacatcaacatcggacaatataaccaagccatatcctcagacagtaaattttttatgaaaatgtgcttatcttataactaaggtggttagtaagtgttggggcggaagagggttctagtgatgctcttgataacgatcattggcgtaagcatcgtctcactagtagttgcgataacctggagacttagcgaggaggaacccctccgaatctttggttatgatgtttacaagtttgaaggctcgggccactacgccatcttctacccaatgccagacgggacaataaaactcctaaaaaccggaaaaatcggaatcttcccaacttttgtcaaggttcccagaaacgcgtggctaaaagagtacgctaacagagaaaacacgctaaaagccatgccaaccccgatagtgatattcgtgaacgataaaggattgggaatagcaagcctcaaaggaagcaaagtaaaactcaaagaactagaaatcccggagatctcaaaaattaccactgcatcagcccactcctgtcccaaggattacatccccgaaggataccgctactgcatcccaaaaaaccccgaaagaaactggattagagtgatcacctcaaaaactgtaacagaaaaaatatccttcctcggactcagaatagacaaccacgtcctaaaagacatagacttcgatatgaggctattcctaagcgaagccacgtactcgcactggaccgctggcatcgacgtcggaccagtaacactcaccacgacaaaattcggggagagcttcaaaggaaagggcctgaagctggagtacaccaccccccgcgaagtcaatcctcaaagctctatgtggtctcgttatgtgaatctggacgtcaagtatgtggttaccgtatatggtgttctcgcctatgaccgttatactggtaaatatactgaaatgccattaatcctcacttacccactcgaaatactcaccacgggcagctacaaaatctacgaaaccccggacggcagtcaaaagtatgttgagtccaagccgggatcaacgttctacactccaagcataaccagagaaccgcactatctagagattcctggctctgcagattcagagaggatattgataaatcaaggggacggtagggggctcataattgacgagtggctcaacgaaagctggcacctttcgagtgagtctagcttttcaataccgatagggccggccgcggttaaggccctggaaaaagagggagtactgaagaaatacccgcaagtccgcagaatcctaaacagcatatcactaaccatcggattccacaaaacagcaaaccaaaggtcaatgctgatttaccgcctgcaggcgactccgcgggaggactgctatgccttaaggtactatcaaaaactggacgttgccgaggactacaataaggtgaaagtgccaatgttcctggttacagtgacgaatggaaaatcacccgggttctgcgacccgagaacaggcctctgcacaaccagcactggataatcaagaagcaggccaatgtggcattgttttctgtttttatccttctatacctcgcctgttctttcttcctatgcacctcaagtttcagccagccggaacggaaaccttaattaactccccctcttttttaggttcagctaaatgaacgggtgatgcttatgagcatggacatgacaactcgaatgttcaaggaagagggatggataaggaagaagtgccccaagtgcggtaagtacttctggacgctcgacccggacagggagacctgcggagacccgccgtgtgacgagtaccagttcataggaaagcccggaatcccgaagaagtacacactcgacgagatgcgcgagaagttcctgagcttcttcgaaaagcacgagagctatccccacggcagggtcaagcgctaccccgtccttccgcgctggagggacgatgtgctcctcgtcggggcttcaatcatggacttccagccctgggtcataagcggcgaagctgatccccccgcaaacccgctcacaataagccagccctcgattcgctttactgacattgacaacgtcggaataaccggaaggcacttcacgatattcgagatgatggcccaccacgccttcaactaccccggcaagccgatatactggatggacgagactgtcgagctagccttcgaattcttcaccaaggagttgaagatgaagccagaggacataactttcaaggagaacccctgggcgggtggcggaaacgccgggccggcattcgaggttctctaccgcggccttgaggtggctacgctcgtcttcatgcagtacaagaaggccccggccgatgctgacccgagccaggtcgttgagataaagggagactactacgtcccgatggagacgcgcgtagttgacacaggctatggccttgagaggctcgtctggatgagccacggaaccccaacggcctacgacgcggttctcggctacgtcattgagccgctcaagaagatggctggagttgagaagatagacgagcgcatcctgatggagaactccaggttggctgggatgttcgacatcgaggacatgggcgacctgcgctatctgagagagcaggttgccaagcgcgtcggcataagcgtcgaggagcttgagaaggccgttagaccctacgagctgatctatgcgatagccgaccacacaaaagccctaacctttatgctcgccgacggagttatcccgtccaacgtgaaagcgggttacctggcgcgcctgctgataaggaagagcataaggcacctccgcgagctcggccttgagattccgctcgctgagatagtcgccatgcacatcaaggagctctctccgactttccccgagttcaaggagatggaggatgtaatcctcgatataatcaacgtcgaggagaagcgctacgccgagactctcaggcgcggaagcgacctcgtgaagagggagatagccaagctcaagaagaagggcatcaacgagctcccgctggagaagctcatactgttctacgagagccacggattaacgccggagatagttgcggaggtcgcggagaaggagggcataaaggttaacatcccggacaatttctacaccctggtggcgaaggaagccgaaaagcaggccgagaagaaagaggcggcggaatatgtcgtagacttcgagctggtcaaggacttaccagacacgaggacgctctactacgaagacccgttcatgaaggaattcgacgcgagagtcctgaaggtcatagccgactgggttgtcctcgaccagactgccttctacccggagggcggcggtcagccctacgacacaggcgttttggaagtgaacggtgagaaagttaaggtcacgaacgtccagaaggtcggaaaggtcattctccataaggttgagaagccggagctcttcaaggaaggtgtcaccgtccacgggaggctcgactgggacaggagaatacagcatatgcgccaccacactggaacccacgtccttatgggagcgctcgttcgcgtattaggaaagcacgtctggcaggctggctcacagctccacaccgattgggccaggctcgatatctcccactacaagcgcatcaccgaagaggagctgagagagattgagaggctcgccaacagggtcgtcatggagaacaggaaggtcacctgggagtggctcccgaggaccgaggcggagatgaagtacggtttcagactctaccagggcggtgtcgtcccgggaagggtcatcagggttctcaagatagaggactgggacgtccaggcctgtggtggaacccacctgccgaacaccggcctaataggtccgatcaagatactcagaaccgagaggatacaggacggtgtggagcgcatcatattcgcggctggagaagccgctatcaactggatgcaggaaaccgagaggctcctcaagaggacggcagagatattccgcgtcccgcccgagaaggtgccagaaactgccgagaggttctttaacgagtggaaggaggccaggaaggaagtcgagaagctcaggaaagagcttgcaaagctcctcgtctacgaactccaggagaaggtcgagaaagtgggtaacgtagagttcatcggagctgtagttgaaggaacaatagacgacctcagggaggctgccaacaggctcaggaaggagaaccgcgtcgtcgtgctgataagcagggaaggtcacttcgtggttgctgtcggagacggcctcgacctcaaggccggagagctggcgaaggtgataacgagcgtcgccggcggtggtggaggcggaaggaaggagctcgctcagggcaggataaagaacccgctcaaggccgaggaagcgattgaagaggtcaagaagatgcttggatgacttttatttttctatgccccaaaatttctccattcttgcctttttcttttgagagcttgtccttaagggcgggaagtcaaccccctacagcctacccaaagtttctgtatgcctgtgtgatttacattccaaatttaatgattcatgaatacaactgagtgaattgtcataccttaacgtatagtttaacaccacaagttgcaaaaagcattataaaaacaataaagtacaatagagtgcatattggtacgttgaaatgggagggtgcacaatggaagcccagactcaaatgttgattgttctggttgggtatcttttgtttttgataagcgtcggtatctaccagggcaggaagaccaagagcagtaaagacttcgccatagccggccgacagttgcccggatgggtcgccgcactgtcagagcgcgccactggagaatctgcatgggctcttcttggactaccagggtttgcgttcgcggcgggcctggcggcaatctggccagctataggctgtgtcctcggaatcgtcgtcgcttgggtaatcttcgctcccagactgagaagggaggccgaaaaatacgacgcatcgactttcgtggactacatagcgaagagacatcccgacgctgaaaagtggataaggattctcggcagtctgacgatagcgttcttctttttcttctacgtcggtgcacagttcataggcggcggaaagaccctaaatgccctcttcgacattgaccccaagattggaatgatcatcacagcgatgataatactcccgtacacggtagcgggaggcctgaagagcgttgcgtacacggacacaatccaggcaatcgtcatgatagtcacgctcatcatcgccccaatagttggaatccactacatctccacgcaccatgatgtctttgctcactcggttactgaggcgctcaaagcttccggaccagaatactcaacgatactcgggggactcgccgggagtgcggcaatcatattcgtgatagccgagttctcctggttctttggatacctcggcggaatgccacagctcagcataagattcatggcaataaaggatgaggaaaacgccaagctggccagaaacgtcggcgttgcatggacgataatagcctacataggtgcccttctaatcggctggatcggcatagcgatctttgggccgagcggactcgcggatcaggagcaggttatgccggaggtaatgctcaagctcttcccgcctgccttggcggcggtcttcataacaggcgctgtagcggccatgctctccactgcggactctctcctcatcctcgcgtcaacggagctctccgagaatttcctcaggccatttgtgctcgccaaagacatggatccacgcaggggcctgacgatctccagaatcacaaccatcgcactcggaataatagccctcataatggccttcattgttccgtcggacctaatctacacaatagtcggctacacctgggcaggaatcggggacacgttctcggtcatagtgatcctgactctcttctggaagaagttccacggaaaggcggtcccaccgacgataatcgcaggactgctcttcacggtattctgggtcagctcgggtctcgatgcaaaggtctcagcgaggctgatgacgttcatagtgactgccatcgtggccgttgttgcaacgtacgccataaagcctgagaacacccggacaggggcatgaattccccaacgtttctttgctttttcaaaagtcaaaatgggaaggtctgtacccccaaattctgaactcagtatgccctcctgtaaatctcctcaagatcctcaacgctcagattccccggcgtgacgtctataacacccttcatcatcctgtaggccgtttccgccatcttcggaatgtcctcctccttcacgccgagctccctgagcttcttgttgactccaaagagactctggaagtcgcggagcttcttgaccgcgagctctgcagcctttctgtcgttgctctcgtagaccccgaaaacctccctgccaacgattgcaaggcgctcgtaggcgtgatcgaggatgtactcgaacaggtatggccccaggatgcacagtcccaacccgtggggcacttcggggtagaacccgctgagcccgtgttcgagagcgtggttcgctataactcccgttagggtctcggttatccccgcctcggtgctcgcccaggcgagctgggttcttgcttccaggtcttggaggttttcgtaggctatcgggaggtaggtaacaactcgtctcatcgagtcgagggccaggacgtcggagtatggctgggccctgacgttgaggaaagcttcgatggagtggtagaaagcgtccatcgatgtgtagacggtctggttctgtggcagggttaccatgacctcagggtcgactattgaaaacttcggaaagaggacatcgtaccctatcccctgcttctccttcgtttcagggttggttatgaccgcgtaggggtctgcctctgtgccagtcccgtgggttgtggggatcgccactatcggcagcgccccgctcggcttttttcctccgccgacggccggaacgtagtcccagtacttgcccccgctcttggcggtcatggctattgccttggcgctgtctatcgcgcttccgccgccgagccccacgacgaagtccacattctccctcctcgcgagctcagcggcttcatccacgtgggttgaaatcggattcggaatgactctgtcgaagacgatgctctcaacgcccgccttcttgagaagctcctgaaccctgtagaggaggccagttttcttagtgctgctcctccccgtgaccatcagggcctttcctgaaagcccgtgcctttctaaaagctcggggagcctctttctcccaaaatttttgttcgagctatcgcaaagattttgaaggaagggtagaaaaaaggaggggtgccaaaaattaaggtcaaaactctgacccgccagattgtagagctttcagaaaagcttggtcttcaggccgttcccgaatacagaactccagacggcacgagaatagacgttgcaattctcaacggagatgagaaaattctcgccatcgagcttgaagcttccttcaagtggtttccccaaagactcctctacgacgtcgttaaggcacagagggcgggtttcccagagctgtgggtggtaacttcaatgccccaaaagcccggctggattgaggggtacgcagaagagattgggataaaactcaaattaataaaggagaaagaagtccttcagctcttctcttccttgcggtacttaatgtagatgacatcttcactgtgccagaatgggagtttatcgccagttattttgatttctggagttgccccttcgtagatcactttcttggtgagatcctccggaagctgaaaatgaacgtaaacttcctgaggagcgtctcccttgtgaaccttaaccttgaacgttgtctctcccttaaactgctcggaaccatagcggacgaggtaagtggtgccctccgggaactcaatcttaagctcgaagttgtccacgtgcgggctaaccttcattgtgaacagcccaaagccgtcctgggtaacaaatgtaacgctctggttatccacgtaaaagacctccgtgtactctatactggccggtggaagctgggcggtttcaaaggcataaaccaccagcgctattgtgatgactgccatgatgacgagagctttgttcatagtggtccctccaaataggttacgcccattccgttattaacccttttgtgtaggttgttacgcgccatgatgaagaaaatcaaaaatcaaaggccggtcggctcgtcgatgaaaaatacatccagcccgaacttcttcccgaggactggcatcagggccttaacgccaagggtctccgttttgtagtggccggcaacgagaacgctctgcggcaggtcaacggccgttaggtagtccgcgtgcccaaactcccctgttatgagcaggtcgattccctttctccaggcctcttcaagggcaaacgcccccgccccgctgattgctccaacggtctttatctccctcttcccgaactcgtaggccctaaccgtcgtgtcgagcttctccgcgactatctgcgcgatcttctctatgggctgaggctcctcaaactcgccccagaagcctatggtcagccccctatactcgccaaagggccccttcggctccaggccaaggagtctgagcagttccacgttgttccccacctctgggtgggcatcgaggggaagatgggcaacgtagaggttcagaccgttctctatgagagctttcagacgcctgtagtgcacccccgttacgtactctaacccgccccagatcatgccgtggtggactaccatcatgtcagccccggctttagcggcgcgttctatggttctgagtgtagtgtcaacggtgaacgctaccctctcaacttcttcattcccctcaacctgaaggccgttgctcgacttgtctgggtaggcagatatgtttaggtactcgtcgaggaaagagacgagttcatcgcggttcattctgatccctccaggagttctctaatcctgtcctcatctataaccttaaccccctcagggacgtgcttgaaactcttaccaatcaggagatagtgggcttcccccttccagccagtcagctctacattctttctgagttcttccacgagtttcttcccattctgggcacggtttctccatttgcactctccgaatattgcgcgctttccggtctcgtcaagggcgacaacgtctatttcgtacaccttcttaactccgtcttccctgtaatatccccagtgtcttccgatggtcgctggcctgaagggcagttcctcaaggagaaccagctccctgcaggcgaagtcaaacctcttgcccatgtaatcgcccagcccctttttcacttcttcccacactttccttctctcgaactcgtacatgctcagctttggctgaacgaacctgaaccagaaagctatcagcgggtggcttatgtggaggatgctccttttcccaagaactgccctgtcgtagtcaacaagtctgaaatagtaaacgagctccctgagctgtctagtcagagaagtttcgtccctgttgagatagccggctattccgcttatcgaggtggccccgttggctatggcctccaagatatcatagtaaaccccagatctctttccgaactcaagggagagcatcttgggcacttcttcggcgagaggggcgtattcctcgaaaaacagctccctcaggatttcctctgcgcttctcccttccagaccttcatcctcgatggccacccagtagcgcggaaagcccccgaacaccgagtgaaccttaaagaaatcgtccagctttacaatatcgagttctctcgccatttcgtagctcccacggatgtccagcggcttaaggtgaatctcacgctttattctcccgtacaggggctcctttgaatccctgaacagcttttcgatcatcccgatagttgaacctgtaaagatcaagaggaggtttttcctctcctcgttctcatcgatgagcctctgaagggtagggtaaaccgagggctctacaaacctgaagtcctggaactcgtcgaaggcgaccactccttcaaacctctcaaagagaacctcaaaaaaatcgtcccagctttctattctctccctcttcgttatcacgcccttttcccggaggatgttttcgtattccctgagcaaccctgtgcttcccttctcccgattaacgaagaaataaatgtctttctcccctaagaattctctcaagagccgcgttttgccaacccttctcagaccgtaaatggctagggtgtagagcttttttctgctcctttccctcgctttacgcaagacctcaagctccctctcgcggtcgataaaccgcattatattcaccaactgaattattcactaactgaatataaacttttcctcaattctgtctccaaacccttttaaaaccgcccctcaagtagtgccgagaggtgttggtatgggcgagatgagagacggtgagaaattcaggagggcagttgaggagatagcgagagccgtgttagcgggtgagataaaggatagggacgagctcaaccgctacaagatcatcgtgtcgcggaagtatcacctttcaaagattccaggcaactcagacatcctgaaggccattccagaggaggagcgcgacagatttagggaactcctcaagaggaagccgacgagaaccatcagcggagttgccgttgtggccatgatgacaaagcccttcccctgcccgcacggcaggtgcatctactgcccgggcgggccctcagttggttcgccgcagagctacaccggaaaggagccttcagcactgagggcggtccagagcgcttaccatccatacatcatcatgatgcgcaggctaaaacagctcaccgacatcggccatgacgttgacaaggtggaagtcataatccagggcggaacttttccggccgttgacctcgactatcaggaatggtacgttaagtgcgccttcaaggccatgaacgactttccgtacttcaaggacatagagaaccttgaggagaagctcgtgaggctcatagttaagggcgacaagtctgttttcgaggaagaccccgagttcaagagggcctgggagctgacccacaggaagccctactactacctcgaagacgagcagaggaagaacgagaaggccaaggtcaggatggtcggcctcactatagagacccgtcccgactgggccttcgagaggcagatagacaggatgctcaaactgggaacgacaagggtcgagctcggagttcagacggtattcaacttcatccacgagaggactaagaggggtcacggcgttgaggagataataaaggccacccagttgcttcgcgatgccggcttgaagataaactaccacataatgcccggcctgccggggagtaactttgagagggatctgtacaccttcaggaagatattcgaagatccccgcttccgcccggacatgctgaagatctatccaaccctcgttaccgcagatgctcctctttacgcatggtacaaggctggcaagtacaggccctacacgacggaggaggccgttgagctcctcgttgaggcctacaagctcttcccgaagtgggttagggttatgagaatccagagagacataccggctaagctcatcgttgcgggggttaagcactcaaacctcggccagctcgtcttcaacgaactgataaagaggggaatacggccgagggagatccgctttagggaagtcggccacatgatgcagaagttcggagtccagcccgaggttgaacacataaaactcctccgcgaggactacgacgccgctgggggaagggagatattcctgagtttcgaagacgtgaagaacgacatactgataggctttatccgcctcagaatcccgagcgagaaggctcacaggaaggagataaactgctgtccgtctgccatagtgagggaactacacgtatacggcccgctcgtgcccataggtggaaagccgaagtacgagtggcagcaccgcgggtatggcagggagcttctagcagaggccgagaggattgctcgcgaggagttcgaggtcaagaagatgctcgtcatcagcggcgtcggtgtcagagagtactacaggaagttcggctacaggaagaacggaccgtacgtggcgaagagactcgacaaggactatgctgagtacaaaaagagcaaagagttcgacgcacacctgaacacctaactaccggagagcatctcctcttccattcttttaagttctgcttttttaacggcctcttcgtgctctttatcgccctttatacccctgacgcgctttgacagatttaagagtgcctcttcgggaccgtagcagatcaaaatgtctcctggaagaacttgagtgtcgcctcgcggtgcccccaagtacttctcgccctcgggggtcttcctaaatattccaagcactaaaactccctctttgtccagttcaagctctctcagcgtcttgttcgccagccagctgtttctcttaacctgtatccttgagatcgaataccccctcgagagtccaagaagctggttgtagtcgtaaactttgagctctggaaacctcttttcaaggaacctctttatgaccctcctcatccacctctcgaccctctttgaggtgaagaagacgtataggaagacaagactaacaacgagtattacaagggaattcagggcttcccctctgctctttccaacgaaagtaaggacgagcgtcgctattgccgaggttattccagcgctcccaaggaatatcagaagcctgataatctttctcctgacaggatgggagaccacgtattcgctttcactcgttgtgaaccccgtgccagaataggcagactgtgcctgaaaagctgccacatccctggataggcccgtcagctcgagggctattgcgcctatcctgacgattattacagagagcacaaccacgagaataaaggaaagcagggcaaacactttccacatcacccgcctgcagcttttgcctccgcctcatgctcgaccttggcagcgagggctatcgctatgtagttggcaccggccattataaggtctatggatatgaacaggccaaccgcccagaggctggaccacggccactggaggactatcagcaggcccagaaagacagtcagaactccagagagcaccatgagtgcccactgggagacgtccttgttctggaaggcaacggcaatcctgagaaagcctatgaacatcagagacaggccgaggataagcgtgtatattgcagtcgcgaggacggggtttatcattgcgaagattccaccgaggacatagatgagtcccattacgatgtgtaaggttctgctcttccactccctagcctttgtgataccctgaaccatctggagaactccaccgacgaccatgaacgctccaaagagagttacactggttatgctgagcaggggcagaaccatcagcccggcaactccaagggttatgaatatcagtccaagtccgagcatccagacccagttcttcccgacttctccgtacttcatctgaccacctccagattattctcaccaaaggttaatttattggtttaaaaatttttctgtatttgtgttatcaaaatagcaatagtctcgatggaaatctgcctcggattatgtctcaaaaaagatgaaaccaaaagccgccacaattagcggcggccgtacttccgtagaaggattcccaggagcaccagagcaccaagaattaccgctataccgatgtattccgagccgccacccttcgtaacagtgactctgatcttctcctctgacttgtcctggtcactgactgctgaaatcttgacaacgtagtccccagaatcaacgtttgcggggactgtaaactttactgtgaactcggccacttcgtccctccctagctctgacatcctctcaggggtgatttgggcctttgttttccagtcctctggtagctcaacattgagtttaacattggtgagtggactcgttccagtgttgtagaccctaacatggagctcggcactctttccagcttctattttcagactgtacttgccaggggatagtgctattccatagctgcccgagagggaggccgtgaagtttaagattttctcctcgccgcttcccagggaggtgattttgagcgccgcgtggtagtccccgatttcggcggtgtcgggtgggatcaaaacaacgtacagccgagtatccgagccgctctcgacgtacacgcttcccatgccccttctcgaactcgggtcgtcggtcacaagtgccccccatccctcaggagctttcaaatcgaacgtgtatgtatcgtcgttttcccccaggttcttcaaaacaacctcgtaaacgaacacatcacccagaactccgctcttggttgggctaagtgcatcggcggtaaagtagtaggggagctttttcagcgagactttcacttcaacctcagaacccgcggttaccctgatcgtccgccttaccgtattgtacgcatccttcgtgacgatcagagtgtattccccttcgggggcttcaataacggcggttccatcggagagcgttctggcagagacaacggtttcgccatcacgaaggagctgaacagaggcccccgggatgtagtttcccgactcgggatcgagtaccttaacggtcactgttccattctccccagcatggctttttgatacgtagactgatagggtagtccgcgcgtctccggcgcctacctcaatgggataccagccaaccgaagcgttgctaggcacgctgacgaggagctcaacggtgctttctccagagaggtaaactcccctaacgaagtcacccccggccaggaacttcccctcccatccagaagggagggtaacgttgaggggcaccgtgacgggtaccttcgaagaaagaacgagcgaaaacgagacgttcctgcccgcttcaacttccttaacggggtaaagacaggttatctcaacacccccaccaactacagtaacccacagagtcagctcggagtcccccgcttggaggacaacagggtacttcccaggacgggagggaggcctcaaaacaaccgagacctcagcggtctcgccgctcttgaggtacaccccatcaacttccgagttgccggccagaactttcgcatcccaccccctcggagctgttacgaccaccggaacgaacccttcctggccgaggttccgtacccgaacggtaaacacgacatcctcccctggctgagtaatcttgctgggaaacctgctctcaagctggatgttggatggttgctcccccatgctgatgttttccccatagaggacaagcagcactgaactctcagaaaagctcaagctacccactgtcaggtttatccccttcactacctcgatggtgtctccataggaaagcacgtgagtagtccccttgacctgtactgccacccgcccgtcctctgaaaagtctaggaaccgaaccgtaaccccgttcacggatatactctggccagtatgcaggacaatggtaaaggtctctgccgaggccagagccgaagtggcaagcaacactgcaaaaaagacgataaagatgcgcctcatggcgatcacctgatctcagccctcacgaagcccaggtatgcaataaccgtccagagcacgaggtatgccaccatcattccgagctccttcttgacgaaggacaggctctctgagaggctgtagctcgggggctcctcttcatcaaagtctctatcgtaataaacgaaccaatcctcagagcccttctctgggttgagaacgtactcagacacctggtcgaagtcatattcaggcgatattatctgaacgtactctatagttttccagtactttttgctccactcctcaattttttggctgtactcctcctgcagtacctccatctttttctgaatatcctccatctttgccatgtcttcgggggtcacattttcactgctgaatatgcgctccatttcctcgtagtaagccctcagctcctcaggctcctgcggccttggaccggcgacgccgtaggcaacgagctccgccacggggagggttaaagtggtgagaattaaaaaggccactaaggcgtacatgagggcgctgccacttgagctggagtgggccgaaaacgccacccccattgtgaaaaagaccatgaagtagaggtacattacgaggaagtacatcaccatcctagcgtagctgtcgatagtaacgcctatccacaggagaagcccggtcattatgagggcagttatgaggacggagaccgccagcgttatagcccccccaagtatcttccccagtatcacctggtctctgaagacgggatgccccatcagaacgttcatggttctgttctccttctccttcgtcacggcgtcgaagccgagggctagggcaaagatccctccaacggagccgataaggtagttgacgccccagaggacgtggtacaccttgggagcttcatcatccccgcccggcatgtacattccgtacaggtccagtttaaccaggatcagggacagtacgactactgcaagaaggaaaccgaacactacaaagaaccttttactcgttagattatctctaaactctttttcagcaatagcaccgatcatagattcttccccccataaacaagctccatgaacacatcctccagggtgggttcctggaggtgaacgtcgagaaccgtgtacccggcgctctccaacatcctgaggagctcaaccctgatgtccctctcagaataaaccacaaggcggttctgaccctcgagcctaaggtccgctgcgtcgagatcaagcgagccaacgtcaatcggctccactgtctcggcgactatcatgtaccttccctcaatgaacttgcgctttatctcgtcctgactgccgctgatcaggagcttccccttggagattatgcctatctcatcgcttatgatctctacttcagagaggatgtgacttgaaaacaggatcgtcttcccatctttcttcagatccctgagaacgtctctgagctcaactacgcccctaggatcgagtccgttggtcggttcgtcaaggaacaggaccagtggatcatttatgagggcctgagcgagaaggagtctctgcttcattcctgttgaaaagcttccaacctttttgtccgcgacatccttaagtccaacgagctccagaagctccctggcacgcttctctgcctcggatttgggcatcctgtagaacttggcgaaataaagcagattatcaagggcgctcatgttggggtacaagctaccctcaccaggcatgtaaccgcttatcctcttaacttccacagggttctcctgaacatttatgccgttgacgtacgcctccccctttgtaggctgaattagtcccaggaacatcagtatggtcgtcgtctttccggcgccgttgggcccaaggaagccgaagatcgttccttttttgaccgcgaggttcagcccatcaacggcgacggtgtctccataaaccttcgtcaaaccccttgcctcaatcatgttcatactatccaccatcaatcagtaacaacttacagttataaattttttgactgaaatagacacgtattagttgatattgatgaatattaaatccaataggtaaggacaagtttttaaggcacatccatgaatggggagccatgcgctttaaacccaagccatttacagaaccggttggcttccgctgtctctactgcctcgactgctgcagggggaggcacgtctacctgacgctaaaggacatcgaaaggatcgccaggactgggaaagacccacaggacttcgtgactttctccattgaaggcgaaaaaatccgcttcgtgctctccgttagggagtgggacttaggctgcgtcttccacgaccccgaaaccggaaagtgtactattcataaggccagaccccttatctgcaggatttatccattcatggtgtcgaaaaagccgctcggcgttgaaggggagaagtcctttgaatacaggggagaaaggctctggctatactacgacgagagctgtccgggagtaaacgcagaagagccagaaaccacgataacgccggaggagatagcggagctcgggctagagttcgaaaaggagctggaagagactgatatggacggtttagccgaacttcttgagaggctgtgaacgctcacgtttttaagtaccccgcctaaatttccccgatgacccaggaagaactccgctaccggcgtgcctcatcatgggagtacgacctcatcctccgtgaggcggaaaagtatggcgagcttagacatcacttctttgcagtagttgagggcaagttccgtgacgtttatgctgtgaatgagagggtgtggagagagatagagagcctggatctcaagccctacgcctacggaactttcgtcggcacgataaaggtcgataaaaacctcgtcgagaagttctatccaaacatagagttcttctacttcgtagatgtgcagaagaactacgcagttctaagcccaaaggcgggctttctcttcacgaccggaaaggacgtgcctaagagaggtgtaaggaagtatgactggcagggcaccaaaaagctcgtgatttacgacgaaaacgggataatccttggaataggcagaataaatccagggagcagaaataagttcattctcaacgtcaccgacatcggggagtttttgaggagaaagaggtaacttatcaccctcatttttagaatctgttctcccgataaaacatcactgtttactaaaaatttttataaaatttagatactattaaaaagtgtcaaaacctcaagaaaggtgatacatgtgaaaaaacccataagattaagtttggtcctcctcctagtgagtttgatttcagcggccggcgcgtccgcttgggtctcaaagcccaccgttctatcgtcagaatgccaaagaatgtatgaccacgacacagataccccccagtggggccaagatgagtgggtctgggcaggtgtctccggatggctgatcatatgcaacgggaggataaccgtagacaccccaaccgtgaaacacgtcgcgtactggtccagcgtcaccgttgacagatcccgcgtccaggagtacacgggagcgaaaatatcctttaccagaataccctacgagaggcacaacggcgaaaccggtggggcacttgcactgattccccacttttataaacgttgaacccaggtgacgccgcgtgcgggctaaaatcattttcgttcttttgtttttgattctcgcggagacggccactgtgtccgccgccccggcctggcttaaatccggaacctacgtgacctatgcagttatcgttccgaaggacgcgaggttcgggacaaacagcgttatgatcaagctcaacatgctcaacggacgctccttcgaggcgctttatccttacctcacctggacgatggagaggaacgtctcaagggatgagaactacgtcaccgcactctggccgatgggaacttcttacctgaccttcgagatcctctccgtgaacaacgacaccgccaaaatcctcgtcacacttgaactccacgatgtcgttgttgaaaggcccgacctcgcgaacgctagcaagctcgtgctctcagaggttctcactctcgacctgaaaaacgggatgtacatgcaaaacggcacacccgttgccaggccgagctttttcatagacccatccaatccacccaaaccaggcgcactcctgttgaacgtcaccgtcccggaagggggagtctgggtaatgagaatcaaaaacctaagttactcccgctaccgggacgttgaggttttgacgcacctgcgcacgtttaatcccccctttatctacctcgaatccgacgtggtgaggttcaacactccacggcccggactacagcttctcggggggtacgggcttctctgccctctacgaccccccaacggcctgatgatagcgtccgacatgttctcaactcctcctgagctagttctaatgggcgtgatcagttccacgatggaggacgtgaacgcctcgcgggccctccgcaggtttcttgccgaaggctcaaacaaacgatggctccagggctggaacctctacgcgaccaacgtggagtttcaggatgaacatcccttcgagagacccaacagtcccttcgtatactacctcgttcttctggccattatagccctcgcagtcggtatcagggacttctggaggtgggttcgatgaaaatcctctgctgggagctcgaagacccgctcaacctaacggcttttgccttcggcttcctgctcatcggaacttccctcttcatccggggaatcagggtctcgacccatttcatagcctccccaccgagcgaggacatcatcagggcttcttcctggagagccatgggcatcaccgttcccctcctgtccgatgaggtttacaccaccttcatgctaactgcggttctcctatcatcgctcgtcctgcggaacgacaggacacacgctttgctctctcgctctactccttacccgtagggagaaagaaacttgttctcacaaagattctgaccgttttcataatgctctttacggcatccttcctcccgttcattctgacggtcacctacatcttcggcgataccggtgacttcatactcaccgccctactctcgaagggcctacttcccctgtatctgttctattgggccctagccgttctctacgcggtcgcggtttcttccctggtggcgttggcctctcccaacaccttcgtctcaataatggcagggcttgcccttctccacgtcccgttctccctggggatatcctttctgccccccacagtccttaacttggcgatatttcacgcttacacttcaggtacttccacttcaggctgggtctccgagttggcctcgtccgctttcatctcctgcgttctccttccccttttcctcatcagactgacactgtacgtcgcggaaaggagggacgttagatgaggttccccaggctcatcctcttccttatcacggccttcacactggtggcgctcacggttcagcacgtcgagctctcgaagccgtattcggactttgcagttggggcatcgtgcaccgtcgttccctccgcgagggttctcgtcctcaacgtgaacagtgagggccactactcggtgacattctacgaccccgttgaggatagggtcgtcaaatccaccgtccaagatagtgggagaacagttgtcgagttcaaccattccggcccctactgcgtcgtagtctcagctgaagcacccacttccgtggcgatctccggccgggagagttacccgtcttcaaaagccctctcaatcgagtacatcacaggaggtacctctgcccttctcttcacccttctgggggtgaggagatgatcattcgggcagagcatctaacgaagcattttggccacgtaatcgcgctcgactccttggaccttgaaattgaggagggagttaccctcattatgggacccaacggtgggggaaagagcacgttcctgaacctctgcgcaggaacttatcgaccgacggccgggaccataagggtgttcggcggtgacccctgggccaatgaaaaggttagggtgaagctcggcgtatcctttgaccctcccgccctgccaaagcacagaacgggccgtgagtggcttgagttcctggctggaatccgggggagcccactgtcggatatcgtcgaggctttctccctaatgggctttctcaacaggaggatttcaacttactcggcagggatggcaaagcgcctgagcatagcatccgcctttgtgggtactcctgagctgattctgctggatgagcccctcgccaaccttgactttgacgcgatacccgaaatagcgagcctgttgagacgttttgcctccgagggtatctcgatggttatagtctcccacgtatggaagcccttcgtcgggttcgccgacagggcggttgttatggctggggggagggtgaagttccatggggaaattgaggaggttgtttctgctctcaatcttgtttagcgtcctgatgacgccggtgtcctcagtgccggtcctctttcagttccagggacagatcagcgtggggaacctgagcgcaaccgcccctgtcctgctcaacctaagtgtcggggagtggcaggttgaggcgtctattggagacatcaccgttatcttcaacatgagcgttgggagtgtacccctggttgtggagatcaacggctcacttttggacgattccctaaaagggttctcaagggcaatcgttttctctgatgggaaaagagtcccagcgcttgaatcggaggaaatgccctcagcgtcatcgccggactggaccaccggtgagggtgcaagcttaatgataggaccatcaaagccagtccctatggggactgtcattctttcacactctacaagagaatatctcctccttcccggcggccttcctgtggctgccgagtatgcgggtgttaagaaatactgtctaatcgatatatcaggagataagaacagctggagtgcctacggcagctgctcccgccagccgattagcaacgctactatcccggttccagtaggcataacttcaaaacctgccaacgccaccgtttacgtcaacggctttcatcttttcggtgagtggtttaccccgatgaggctctacctcccctttacctcccggctgagctcgtacaacgtctcgctcggcaccaacggctacccatttgtctctggcgtcgtggtttccgccgggaggaacctcactctccaggtagaccttctagcgctgtctaggtcggtttcgattcatccaaaggaaggaacactaagagtctcaacgacgcccccgaacgcaagtattgcaatttttgctggaaatcagaaggtattctccggaagaagcccacttaggctgtccctccctgcgggtacctataccatcagcgcctatctggcaggatacggaggcgtcgtgaagaacgtgacggttccggccaacggaagtgtctcgttgaacatgactctcagctccctgccggctgagctcaacgttgtcacggttcctccgggggcgaaggtgaaggtcgggaacagaacgtgtacctccccctgctccctaaacctgactgccggtgtttacaacgtttcggccttccttaggggctaccttccgaactccaccctgatccacctgtcccctggcactttcagaaacgtctcgctgaacctggttaagatgccggtcctcgtagttgcgacctctccagctggagccaccgttgaagttggcggaggggaatgcattacgccctgcaacctctccataatgccgggcaaccacagcctcaaggtcgagaaagggggctacgaggaagcattcatgataatcactctcagggcaggagaggtgacccacatcaacatcacactcagaaaaacttctgataaaattttcactcgaactcccataaaaactagcccaacatccaacaaaaaccccgaccaaggatacaaggagataaacaataaatggctccttccggccgcgctggtactgctcctcattatcgcccttgtcctcaggaggaagcgctgacttttcttacccaacgtaatctttttaagcccttccacacaggaacataatggtaactaaaagtaaatttaagggggtggtcacgatgatcaagagggtaaagaccggcatcccgggcatggacgagatactccatgggggaatacccgagaggaacgtcgttcttctcagcggcgggcccggaaccggaaagtcaatcttctcacagcagttcctctggaacggcctccagatgggtgagccaggaatctacgtggctctggaagagcacccggttcaggtgagacaaaacatggctcagttcggctgggatgtcaggaagtacgaggaagaaggattattcgcgatggtagatgccttcaccgctggaatcggcaagagcaaggagtacgagaagtacatcgtccacgatttgacggacatcagggagttcatagacgtcctcaggacggccgtcaaggacattggagccaagaggctggtcgttgattcagttacgacgctctacatcaacaaaccagctatggcgagaagcattgtgatgcagctcaagcgcgttctggccggcctcggggtcacgagcatcttcgtcagccagataagcgttggtgagcgcggtttcggtggtcccggtgtcgagcatggcgttgatggcataattcgcctcgacctcgacgagattgacggcgagctgaagcgctctctgatagtctggaagatgcgcggaacgagccacagtatgagaaggcacccgtttgatatcaccgacaagggaataatcgtctatcccgacaaggtcctcaagaggaaggccgtcatcgagcttgagtgaaaaccgaagggaggtgatggaaatggtggaggttccactgaacccgattggaagggaggaaatccacaggcttgagagcatactcctgtttgcgacgctcttcaggcccgaggtcatagagctcatcaaggacccggcggagaggcttacctgggttgacagcctggcagtggctgccggtgcaatagccagggagaaggctggcatgaccgtcagcgagatagccgaagagctcggcaggacggagcagacaataaggaagcacctcaagggcgagacaaaagcaggacagctcgtcagggagacctacgagctcatcaagcagggcaagctcgacgagctcgtaaagaacgttgaggttctagccaagggcggccagctcgttgcgatggaggagtacgagaagctcaagaaggagaaggaggagctcgaagcaaaagtcagggagcttgaggagagggtcaagaccctcgaggaggagaaccaccagctcaaggcaaagcttgaaaacgttagaaaagtcctaaacgacgccctggagagagtgaaggaaatagaaaagctgctctgaacttcttagccgcttccgtttccgttctttcttaatgcttcttcccaggtcattatcatgtgggtgaaggtctcgtcgtcctcttcgatgccacgctttatctctgagacgtgagcgtacttggccttaaactgctcgaggatgtagtcaacggccttctcggggttggccttggtgccgcaggtgtagacgtcgagtgcggcgtaacccttctccggccaggtgtggactgagatgtggctctcagcgactatgacgacgccgctgacccctgtcggggagaacttgaagaagtagcttgccttgacctccatgttgcccactttggccgcttcgaggaatatctgccttatcctgtcagcgttaccgagaacctcaggatcgcaaccggcagcctcaacaacgtagtgaaaacctatcgtctctatctcggtcatggctctcacctgaacctttggttgttgacaccctttttaaagttaatcccaaaatagaagggcaagtaacgggccgattctggactgagcggacatttaccgttttctatcgatttaaaccgactttttctgggtgtttttgattataactgcaatttttatcccaattgggcataaagtctaccacaacggcccgaacccaaaaaacaaacaccgaagagtgaatccatgaaatccaccactaattttaaaaccgtcggggtttttattaaccaacaagttaccgaatcaaaactttcaggggtgaacgtatggccaagggtaaaactcaaaagcccggacaaaccgccgaagttcgggcaaaaagcagggaaaagctgaggtttcttgctgaaatggagcccaagaaaatgataacctacccgcttgttgttttcatagtggcactcctcctgctggcagtgcacttcccgcccctcggaatagacctcaagggcggtgttgtggtaactggagagggaatcagcgcaaaccctgaccagctggagaaggaactgagcggctggcttggcatcgaagcccacgttgagagcttcaccagcgttagtggatcaaagggaataagggtctatgctcccgctggaaccgatcctcaaaaaataatagacatcctcaaggaaaagtaccccaacgcagacttcacccacagcgatgttcagccgaccttcggagagatggcaaagaaacagggcactagggcgatcatcttcgcattcatcgcaatggcgattgttgtgttcctgttcttcaggaacccagtgtcatctctggcgataatcttctcggcgctctccgacatgatcatagccgttgccgttatgggaatattcggaattcagctcacaaccgccacgatagctgctctcttgatgctcataggttacaccgtggacagcaacatcctcctcacaacaaaactgactaagagaaaggagtacaccatcgaagaggcctatctaagcgctgtttcaaccggcttcacgatgagcacaacaacactcggtgccctcctgatgctgtggataatatcaacctcacccgtcctggacaacatagcggctgtcctgatattcggtctgctggccgattttatgaacacatggattttcaacgcaggtgttctgcggtggtacctctcgaggggggttgaactatgaacagaaagctcaagaaaatcctcctgaactggaaggttctcctgctcattatattcctcataggctcaataggttctctctacacaaggggactcaccttcggaatagacatctccggcggtgtcgcgcttatcgcgcagacggaagagcccgttgactcaaagacaatggagctcgtcgtggattccctccagaagaggctcaacaccttcggtctaagggacatctcagttgaaggtcagggcaacagcatagtcgtggttaaggttgcaaacgtgagctcaacagaagaggcaaaccagctcaaacaggttattgagagccagggtgtcttcttcatggagttcaacggtgttgtctttggaaccggaaaggacatcacctacgtcggcccctatgagataaaatccgacaacagctgggcggttccgttcaggatatcgaagagcgccgccgagaagtttgcggagctggccaagggaaaggcgggatggccagttgatatgttcctcgatccaccgattaattccctccttgttgttcctcaggatgtcttcatgacaatgaacggaacggcctttaacgcgggcgcccccgatgcaccaccactggccgccaggatagagaaggcccttaacataacgaccataatgtacaccaaccagagcgccaccgaactcaaggaaatggcaaacggcagggcaatcgtcctcgcaggagttcccagggagctctacgacgggctgaaggatatgaacgtgagcgttaagtacatcccgagtgagccaagtgctgacactacatccttcgtcaaggaaatactcggactctacggcccgtattcgctcggtgaaggacttgccaacggtgttcctcagaccgacgttcagataaccggacgcgcatccaacagggttgaagcggaaagggaagctaaaactgtgtacaccgtgctcaagagcggttccctcccggtcaagctcaaggtcatcagcatggagttcatatctccaaagctcgggcaggactttaagaagcaggccctttatgcgggcctcgccgcactggtggcggtcctcctcatcgtttacttccactacaggaactggaagatagcaatacccgtcgcgagcaccagcctctttgaggtcataatcatcctcggaatagctgcccttatcaagtggaacctcgatctgccgagcatagccggtataatcgcggcaataggtacgggcgttgaccagcaggtagtcataaccgacgagctcctcggcggagagaggagcacaaggataaccagacgtgccggagctctcaagagaatcggaagggcgttctttatcatattcgcctcggcggcaaccaccatagcggcaatgagcttcctcctcgtgtacttcgtcggaacgctcaagggcttcgcggtgacgacgataatcggcgtcctcatcggaatattcgtgacgagacccgcctatgcagaggttgccaagtacctcatcggtgaggagtgatgtacgtcataataatgggcgctggaagagtgggatacctcgtggcaaagatgcttgaagaggacggccacgacgtaacgataatagaaatggaccgggacagggcgaaggagctctccctaatgataaacggcctggtaatcgagggagatgcgaccgacacgaagacgctggaggaggccaacataaagcaggcagatgccttcgcggctttaacgggaagggacgacgcaaacctcctagcctgcatactggcgaagagcctcaacccgaacatcaagacatccctgagggtcagcaaccccaagaacaggaggatattcgaagaggtcaaagacctgaaaaagtactttgacttcgtcatatcccccgaggagatagcggcggagtacataagcaggaacatcgttactcctggctttgacagagtcctgttcccgaaggagggtgccgagatagttaggttcaccatagacgagaacagcaaggttgcaggaaagctcgtgaaagacctcaaccttccgagggatgctctgatagtggccatctacgacggcaagggcaacctgataataccatctggagacaccaaactgccagagaagggccagataataatattcgcaaagaactctgccctcaaagaggtcaaagagctgtttgaggatagaaaagaggaatccgaataaattccaattttacctcttttttctcaaactttctagaccgaccataaactatttaaagcgattaggctagccaaagctgtcagaggaacctgttttcactgtcatcggagggacggctcatggaagacgtcatcaagcggattgttgaagcagaaaaagaggcagagacccgcattgaaaaggcagagcatgaggcaaaggagataataaggaaagcaaaggaagaagctaagaaaattgaggaagagaccatcaaaaaggccgaggaggagtcacagaacctcatagagaaggcccgccttgagggtgaaaccgaagccaagaaaatcctcgaggagggggagaaagagatttctgcactccgcgagagggcggagtcaaactttgagacagctatccaggaagccatagaactcgtcaggggggcctgatgtgttccggcccgaagagatggtaaaactcgaggtaattacacttaacaggtataaggacacccttctaacgtacctccacgaggctggagcggtcgaagtaagagaggttaaagtcgagctcgcccagaaagacactccaaacgagtaccacagaaaagccgcgtcctacagcataagcatgtccaggctcgtcgagttccttgggacatacaggaaggccgctggagggggcatcaaagagttcttcttcccgaaggaaaagccgaagagaacatatagatacgaaagacttgaaaagctcataaaagacgtggaagagttcttggggaaagtagagccagagataaaggccattgaaggtagaatgaactctttgagcacagaaatcgaaagaataaaagagcaaattggcattttggacatcctcacacccctcaatatagacgtaagttatctaagacattgtggtgtcgtggaggtaaccgttggtctcgtagacaggacaagagtgaaggagttagcagacgccctaaagaaagaaaccgagaaccacgttgccattatcaccaaagaagccagcgacaaagcacttgtagtcattgtcaacctggctagagaccatgacaaggtgaacaccctcctagccaagttctccgttgagaaactcgagattccagaaggcgagggcactccgaaggagctcatgaaggagtactcaaagaagctcgcagaaaaagagaaggaacttgaggaggccaagaaagaagcctcaaagctcgccgaaaagtactacgacgacgtcttattctacaaggaactggtggacaacgagcgcgacaagtcaacggtactgccaatgctcgcgagaaccaacatgacgttcgctcttacaggctgggtgccgaggccggacgtccagaagatactcgagggcatcaagaggataacggaaggaaaggcctacataaacgtccgtgaaccaaggaaagaagaactcgaagaaatgcccgtaaagctcaagaatccgggatgggccagacccttcgagatgctcaccgagatgtacggtgttcctaggcacgacgagatagacccaacgccgataatagcctttacatactcgttcttcttcggattcatgctcaccgacttcctctacggtctgatagtcggcatagtggcggctctcctagttaagggccacaagaagttcaacgacggaacctacaagtttgcatacatcctactctggagcgcgttcttcacgatgcttctcggagcactcttcggaagctactttggaaacgctgcagacataatgctccaatacataaccggtgatcagaacgcccacgcgtggcgcctcctcgatccgctcagagaacctatgcctatgcttctagccgcgcttgccataggcttggcacacctattccttgggtacacgctaggtttcgtcatcaagtggaagaatggagacagaaagggcgcagtgtttgagcagcttccgtggatgatcatcatcataggtgttgctctcctcgctagccagagggaaggtctcgatgcagcagcaaaggccatcctcggtactggcatagccctgtttgcggtgggcgagctggtaatcaacggtggactagcagcactgatgataatctcagacttcttcggcttcgtcggcaactggctcagctacgcaagactgatggcgctggcgctggcaacgggcggaatagcgatggtcataaacgttctcgttggaatggtctgggccataaagttcctctacatagggccgataataggcctgataatattcttcggcggccagctgttttcaacggccataaacgcactcggagcatttgttcatgccctacgtctgcattatgttgagttcttcggaacgttttactcaggtgagggtaaaaggttcgagccctttaaatccaagagggaagtctcaaagcttgaacttgaggtctagttaggaggtgcaaagagatggatccgatagtttacgtcgtgttgggcgccgcactcgcggcgggaatagcgggtatagcctcagctttcggtataggaatcgctggagctgcagcggcaggagcggttgcggaggacgagaagaacttcaagaacgccctcatccttgagggtctgccgatgacccagagcatctacggtctcatcaccctgttcctcattatgctcagcgctgggatcatcggcggcggattcaagtttgccgaagcgaccacagagaaccttgtgaagagcgccatactattcggcgccggtcttaccgttggcctcaccggtctctcagctatacctcagggtatcatcgccagcgcaggaataggcgccgctgccaagaacccgaagaccttcactcagggcgtcatattcgcggctatggccgagaccacggcgatcttcggtctcgtcggtgcgcttatcatgatcgccactggagttggcttctgaagccctctcctttttataatctttgagggggactgaataatggaaggcgcagaactgataattcaggaaataaacagggaagcggagcagaagatacagtacatcctcagcgaggcccagaaagaggctgagaagatcaaggaagaggctaggaagagggccgaggacagggcccagtggatactcaggaaggccaagacccaggctgagatggagaaacagagagcgatagccagcgccaggctggaggtaaggaagaagaggctcgaagtccaagaagagatgataagggcagttctctcggccttaagggagaggctcgcttcacttcccgctgatgagtacttccagaccctcgtcacgctcactaccgaagcccttgaggagctcaacatcgactccgccgtcgtccgctccaacgaggagaccctcaagctcatcgttgaaaagctcccagagttcaagaagagcgtttcagagaagctcgggaaagaggtcgagataacggttggagaaccgataagcacaatcggcggcgtcctggttgagagctccgacggaagcgtcagggttgacaacacctttgaagccaggattgagaggctcgaagcggatctgagggccaggatcgccaaggctctctttgggtgaggatgatgaacgtaatcgagggaatcctcaacacgacgctcggcgttgtcttcacctgggtcgggtggaagacatacaagatactctggaagtacacaccctactcctacccgaacgcaagggttagggcaatggaggcaaaactcctgacggaacagcgctttaacgagctcgccgagagcagaacccttcagaacttcgttgccagccttgaggacaccgactacaaggagaccctctcgaacgtctcaagctattcggtggaggagatagagagggcgctcgatgcttccctcgcgaagacctacgagctcatgttcaagatacttcccaagcgttcaagggacttcttcaggctcatgatggaggagtgggacgtcaggaacatagccaacgtcgtgaaggcgaagctggcaaacgagcccgcctcggactacattatcgaactcggcccgatgcttccgaaggtcaaggcaatggcggaagccaagaccctagaggagatactcgtaatccttgagggcactccctacgagggcccatatcaggagctaatcgctggaaacatcgacgtcagcacgtttgaaaccgaactctacaggatgtactataagaagcttctcaactatgcccgctcaaggaaggacgatgaaaaaactcttctcacggagttcattaagctcaagatagacaaactcaacttaatgaccacactcagggggaaactggcagggctttcagccaaggaaatacgctcaatgctcatccccggtggttcactggacgttgagcccctcttgcacatagattccatcgaaatgacgcttgcccagctggactcaacggagtacggtgagttcataaggaaagtccgtgaggaggccgagaaggacatcagcgtcatcgagagggcctttgacgagcacctgatcaaaaaggtcacggagttcgacaggttccatccgctcagcatagctgctcccctcgcctacgtgctcaagaaggagagggaagtcaggaagctcagggccatggtaaagctcataggtgatggcctcgaacctgaagtgatcaaggagtttgtgggtgaggtcgcatgaagatagccgtgctcggggacagcgacaccgtactcggtttccgccttgcaggtgtccacgaggcttatgccttcgaggaaactccactggacattgaaaggctcaagaataaactcaacgaacttattgagagagaggatgttgggataatcctgataaccgagagactggcagagaaggtcgaaattcccgatgttaagctccctatcatccttcaggtgccggacaagtccggctctaaactgggtgaaaaggccctcagggagatagtaaggagggccattggtgtcgagttgaagaggtgaaggaaaatgggaaggataatacgcgttacaggaccactcgtcgttgcggacggcatgaaaggggccaagatgtacgaggtcgtccgcgtcggagagattggactcataggagaaatcatccgccttgagggtgacaaggccgtcatacaggtctacgaggagaccgctggtataagaccgggtgagcccgtcgagggaacgggttcatccctgagcgttgagctcggtcccgggcttttgacagcaatgtacgacggtattcagaggccgctcgaggttctcaggcagctcagtggagatttcatagcgaggggtctcaccgctcccgctctcccgagggacaagaagtggcacttcactccaaaggtcaaggtcggcgacaaggtcgtcggtggagacgtcctcggtgtagttcccgagaccagcatcattgagcacaagatactcgtcccgccatgggtcgaaggtgagatagttgagatcgccgaggagggcgactacaccgtcgaggaagtcatagccaaggtcaagaagcccgacggaaccatcgaggagctcaagatgtaccaccgctggcccgtccgtgtcaagaggccctacaagcagaagctcccgccggaggttccgctcatcaccggtcagagaaccattgacaccttcttcagccaggccaagggtggaacggccgcaatccctggcccgttcggttcgggtaagaccgtcacccagcaccagctcgcgaagtggagtgacgctcaggtcgtcgtctacatcggttgcggtgagcgcggtaacgagatgaccgacgttcttgaggagttcccgaagctcaaggacccgaagaccggaaagccgctcatggagagaaccgttctcatagccaacacctcaaacatgcccgtcgctgcccgtgaggcttcaatctacacaggaatcaccatcgccgagtacttccgcgaccagggctacgacgtcgctcatggagttcgacacaagatgggcagaggccctccctgaaacatgcccgtcgctgcccgtgggaggcttcaatctacacaggaatcaccatcgccgagtacttccgcgaccagggctacgacgtcgctctgatggcagattcgacttcaagatgggcagaggccctccgtgagatttcaggccgtctcgaggagatgcccggtgaggagggttatccagcctatctagcctccaagatagccgagttctatgagagagctggtcgtgtcatcaccctcggaagcgacgagagggtaggcagtgtttcggtcataggtgccgtttcaccgcccggcggtgacttcagcgagccggtcgtccagaacaccctccgtgtcgtcaaggtcttctgggccctcgacgctgacctcgcgaggagaaggcacttcccagctatcaactggcttaggagctactcgctctacatcgacgccatccaggactggtggcacaagaacgtcgacccagagtggaggaagatgcgcgatacggcaatggcgctcctccagaaggaggcggaactccaggaaatcgtccgtatcgtcggtccggatgccctgccagacagggagaaggcgatactcatcgtcaccaggatgctccgtgaggactacctccagcaggatgcattcgacgaggtcgacacctactgcccgccgaagaagcaggtaacgatgatgcgcgtcatcctcaacttctacgagaagaccatgcaggcagttgacaggggggttcctgttgacgagatagccaagctcccggtcagggagaagataggccgtatgaagttcgagccagatgtggagaaggttagggcgctcatcgatgagacgaaccagcagtttgaagagctcttcaagaagtacggggcgtgatgatcatgccgggtatggagtactcaaccgttagcaagatttacgggccgctgatgatagtccagggcgtcaaaggcgttgcttacggtgaggtcgttgagatagagaccgagagcggcgagaagaggaagggacaggtccttgaggcaagggaggacatggccatcgtccaggtcttcgagggaaccagagacctcgacatcaagaccaccagagtccgcttcaccggcgagaccctcaaggttccggtttcaatggacatgctcggaaggatattcaacggtatcggtaagccgatcgacggcggcccggagatcatcccggaggacaggcgcgatgttcacggtgcgccgctcaacccggtcgctcgtgcctacccgagggacttcatccagaccggtatctcggccatagacggtatgaacacgctcgtccgcggccagaagctcccgatattcagcggttcaggtctgccgcacaacatgctcgcggctcagatagcgaggcaggcaaaggtcctcggtgaggaggagcagttcgcggtagttttcgcggccatgggtatcacctacgaggaggcaaacttcttcaagaagagcttcgaggagaccggcgcaatagagagggcggtcctgttccttaacttggcagacgacccggccatcgagcgtatcatcaccccgcgtatggccctcacagttgcagaatacctcgccttcgactacgacatgcaggttctcgttatccttacggatatgaccaactacgccgaagcccttcgtgagatttcagctgccagagaggaggttcccggaaggcgtggctatccgggttacatgtacactgacctggcaactatctacgagcgtgctggtcgtgtgaggggcaagaagggaagcataacccagatgcccatcctcacaatgcctgacgacgacatcacccacccgattccagatttgaccggttacatcaccgaggggcagatcgttctcagcagggagctccacagaaagggtatctacccaccaattgacgttcttccgtccctcagccgtctgatgaaggacggtatcggtaagggaaggacaagggaagaccacccgcagctcagccagcagctctacgcggcctacgccgaaggtaggtctctcagagacctcgtcgcagtcgtcggtgaggaagctctgagcgagaccgacaggaagtacctcaagttcgcggacaggttcgagagggagttcgtcgcccagaggtatgacgaagacaggagcatcttcgaaaccctcgaccttggctgggagcttctcgctgagctcccggaaagcgagctcaagcgtgtcaggaaggagtacatcctcaagtaccacccgaagtacaggaagaggggcgagtgagccccttcaaaatttttaggtggtcgagatggcagagctgctcaacgtgaagcccaccaggatggagctcctcaacctcaagaggcgcattactttagccaagaagggccacaagctcctcaaggacaagcaggacgccctcgtcatggagttcttcacgatctacgacgaggcgctccgcctgagggaagagctgaacgagaagatgatggaggcctttaaagccctccagagagcggaaattgacgtcggtacactccgcatgaaggagataagcctctcagtcaagccaaacagggaggttgaggtaaagaccaggaacgtgatgggcgttccagtcccgctcatcgaggccgagtccttcaagaggagcgccggagaaaggggatacgccttcgtctcaagctcggcaagggtggatctggccgcagaaaagtttgaagaagttctcgaccttgccgtccgccttgccgaggtagaagagaccctcaaaaggctcgccaaggagatcgaggtcactaagaggcgcgtcaacgctctcgagtacatcataattccgcgcatggaggcaaccgtcaagttcatcaagcagcgcttggatgagatggagcgcgagaacttcttcaggctgaagagggtcaaggccctcattgaggccagaagtggctcttaagtgtttttcttttttgttccggtttatgtaggttcttatgtaggcaaactgcttaaatatttcctttgttaaacttttctggagagtggtggctatgggagaatacttcatagaacctggactcgaccctcgaaaagaccacgttctctacagggatgaggagcatacggtcgtttacctaggcacccaggaaggtggtgaggacgttgacgtcaacagctatctgatagtcagcagagggagaggtttcctcctggatccaggagggtacaagatattctcaaaagttctcgcaaacgcctccaagtacgtcgatccaaggaacatagagtacatctacatctgccaccaggatcccgacgttgccggaagcctccccctgtggagggagataagcaacgccaaaatagttacccactggctctggacgaggtttctgccgcacttcggctttgaggactccaagagtgtaacccacgagcttcccgatgagggcgaaaccctgaactttggcgccactacgcttgagttcatacctgcacatttcctccacagtccggggcacttcacggtgtacgaccgcaggagcaagtttctgtttactggggacataggaatagccctcctagacgatccctacatagtcgttgaaaacatggaaagacacatacaagctatgaggcccatacacgagaggctcatggcgagcaacagggccataaaggcctggctcaacagggtgagacacctcgatgtagaggctatactgccacagcacggcgctataattccaaagagacacattccaagattctacgacttccttgagaacctcaagtgcggggtcgatctgctccgctgaggtggtagcatggatatcaggaacatagaaaaggcatcgagcgcacttgcacaatcggttagaataaaaacctcgagcaaagagtccagcaggataatcagtgagctggcggaggaaatcagtgggcagttcatggataacaacacgaccataatagagaacatcgccaagctttccgaggttatggagcagcttgaaacgtttcagcgggactttcttcctttctttcagcgttttgagaccttcgccaaggagtttaacaccctcgtggaaaacctggagtacgtttcaaggataagcgactcaatagcaaccgttgcaaagcagacaaacctcgttgccttaaacgcctctattgaagcggcaagggcgggcgacgctggaaggggtttcgccgttgtggctgaggagataagaaagatggcagtccagacgatggagctggccaaggagataaaggacttcaactccaaggtaatgaaccagcttgaaactctgagggatgcactggcggttatggacagaataaaggagggaacagaaatccttggcaaagatataagcacaatagttgagataagctccgtcctcagtgagatctccaaggagcaggaggaaatcgttaacgatatcaaaaggctcaacggaatagcggtcgccctcaaaaagttctcggaaatgcaggacagatacaataaagaactagcgtccctgcttaggaatatggttagcgaatactcgaaggagagtggtgcaaatgactgaaaagctgttttataaggatccctaccttcgtgaagctagggcaaagattgaaaaaattgaagccgtagaagacgggaagataagggttcttctcgacagaacaatattctacccagaagggggtggccagccctcggacagggggattatcgagggagacggtttcagggttctagtcgagaaagtcagcggaaaagaagagatatggcatgaaggaaagttagaagggaggctgccagaggctagggaagaagttaggctcgttctcgactgggagtggagatacgagaacatgaagaaccacactggccagcacgttctttcggcgataatcaaagggctctacggggcagagacaacgggcttccagatttttgagaactacaacaagatcgagattgactatcctggagaacttacgtgggagatgatacaggagatagagagaaagaccaacgaagtcatctggggcgatcttccggtggaagtggaggagtaccagtacctcccggaggacgttgtgaaaatcctcagaaagcatgtcagcaaagtccacgacaggataaggatcatcaaaatcggaaccgttgatgcaacaccatgcggaggaacccacgtgaagagcacccgcgagattggcttcctcaagatactcaggttctacaggaagagcaggaagctctggaggatagagttcgtcgcggggaacagggctttaaggacgcttaacggtatcctgtcggattactggaacgcactagacgagatgccaaacaaaaacccgcctctagttgaaaggattcaggagcttaaagagacaatggacaagctggaggcagagaaagatgaactcaaggaggagctctgggaatggaagggcaagtacctcctagagaagtccgagaagataggggacatcagagtggtaaccctgattgaaggcaagcctatgaaagaagtccagggctttgcggtgaaattcgttgagaagaaccccagaacggtactgctcgtggtaggagagaactatgtactatttgccagaaacgaggatgtaaacgtttcaatgagggagctctttgagcgagtggcttcgcagctgggaggaaagggcggaggaaccgacaacctggccagagggaaagttgatgcagagccgagagtaatactgcagaccgccagggacgtactaaaagaactgctggagggttaagcgggagaaaggatataaacaccgaacacgaaagtatggacaccaatcacacgttactaactcaaaagtggtgatcacattggatcaggcaatccccaatgttgaattcgtggacttctcacatctagtcgagacaatacagccaggtgagacggtactgatagagcacaggacatcatacgtcccagaattcacgttaaaactggtcgcagattacaccaaggagaatggagtacctctcgtaatagacgacaattttgacacgctgtacactctaatcctccacctcaggctcatgggcgtggaagtcgaccttgaccatgcatacgtcataaaaactgggggaactcacaatatcggaggaaaagtcaagcggatagagttccatcccgacccgagggtgttccttagaaactacaccaacgcaagttctgagattttggttgagggaaaaacacctgcgataaatctggttcttgggttagaaaacatccttatgatcatgcgcgattccagggacttctaccgacttctgctaagcctccagagatacgttgggaacaaaaatagaattgcactctacctgataaacaggaacatagtcgagagcatgatgcccggcttcttcctcccagagcttgagaggatagcgactaccgtcatcgaaacgaactcctaccccactggtgcgattctgacgtttaaaaagagtattaatcctgccgtgataggcaccactgttggaatagacgtgggagggatcgttagtggagaacgaaaccagaacccatgattattcaagaatcccatttttccaaggcaagaaccttaaaccaggtagtcttgttcttattgaaaacatctcctccccaggtgcgaaactgagcttctatgcacttctaaaggtatccaaggaaaaagggattcccctgatcgtggaagacatattcgacaccctcccgatttacgtaaaacacattgagctgatgggtttccatgtcccatcggaaagcattaacgtcattaaagtggccgggatagatagcgttgggaacgtcgtggaaaagctatcttttgaggccgatccaaacttctacatcccgaagaaggagagagcagtttcaaagattgtcggagataatactccccacatcctcctcattctcggcctggaacggttgttaatgttccagcgcaatctgcgtgacctgtatccaatagtgaggtacttcagggaaaacctaaactccccgaacagggccacgataagcatcatagaaacgcccgtcctgaatagcattaagccaaacccactgccaatgctcgaatcagtcgcctcttcagttatagagctctacatggaaaatgaggcactgatagtacgtcccaaaaaggccctctcactatttaccgtcaatgctgagaggttcaaagtcagcctgggcgacatcgttgaggtgctgagggaatggtaaggatactcgggaggaaacgacataaaggggaaataatagcgtcaaggtaccccgttggaaagttcagggtcgagaaagtcctaaaagtcgcgttcagagaggttttggtgggggaagtcctcgaagggattatatatcccggctacaagctcaaggggtcgagcgttggggtcatcagggctattgaacgagagcacagaaaagttgactttgccgttgctggagacaaagttgccattatgatggaaagcccaacaaaagccgaggaaggccagattcttgaggtttaccagtcgtgaggtggttaagatgataatctgggacgaccacttccacgttgacccgtaccacggtctctttctggaagcggtgaagcagttccacagggcagggggaacacatctcgtcgttgtttacaaaacagcccacgactacggatttccaggacttagggctgaggacttcatgaaggcgatggacttccacgttgaactcgtcgaaaagataaaccgggagacgccggttaaggcctacgccgtcgttggagtccacccggctgagttcgactacctggcgaggcagaaggggcttgagtacgccaaaaacgaagttatgaaagccctggagtacgcccagaagctctgcctcgagggaaaagcgataggcataggagagataggaagaccccactacgaggttccagcggagatctgggaagcgagcatagaactgatgaagtacgggatgagcctagcgaaggaagctgactgcgccgtccagctccatacggagagcttcaacgaggagaagttcagggagcttggggagtacgtgaaggaagtcgggataaagccccacaaggtcgtcaagcacttctccccacctcttgtgaaagtggcagaagaagttggggtcttcccgagcgtcatagcgagcagaaagaacatcgaagaggcaataaagcagggaaaccgcttcatgatggagaccgactacatagacgacaaaagaagacccggagccgttctcgggccaaagaccgtccccaagaggacgaaggccttcctccagcagggcatattcactgaggaagacgtctacaagattcacgtcgagaacccgaaaaaggtgtatggagtggaaatagaggggtgaactcaggagaaaagctccagcggagagtaaccctccacaaccttcttcacttccagctccatcccgaaggcgtttgtaatggttccttccttggccgcccagaggcccgcgggaagaaccaacacgtccccatcgagctccctctcggcccttccaatcactacgtaggccttgctctccgggattccgactattccagcccttatgagtccggcggcgttaactccctcgtggaggatgagcgtcggggcttcgagaggctccgctggcccctcgagtatagcaacctcgtagtcttcctcgaccacatccttgtccttcagcaggagctttaggagcgggtacttctcggggtcggccttcaggagaacgcgctttgcctttctaatgtcttcgaaagtcgcggttgaaagccctccctcgaccgttgagcctatgggaatgccgcgcttctcggcgaactccttaaagaaggctatctcctcgttggtgagctccggagtgagtatgagcgcgtagtccctctcggctatgaacctcctagcctcctcccagctcacgggctctccgtttaggagtggtccagctaagtcctcggcccagggtctcatgaagcggcagacgtcgcagaggtgtccgttccagccctcctcaaccctcgaagccctaacgagcatgccgtcgtagacctctatgttcatctcgcacgcaaaggaacacccgttgcagaccgttttaacgggggttgtcttccaaggcccgggcttgaggaagggaagcttctcggttatcgctccaacaggacagaggtctgtcatctcgcctatgaagagcccttcagcgtccccgagagtgtcgcccaagggcggagagatcatcgtcttgaagcccctgaacatgtagtcaacgacgccctctcccgcaacctcgtgggtgaagcggacgcactggccgcagaggacgcacttgttgttgtcgagggtgacgaacgggtggctctcgtcgagctcgaacctgttcccctccccctcgaaggcgtcctgcctcgcgttgtagagcgtggcatattctctcagcttacagcggaagacctccatacagccgcagctcatacagcgctttgcctcctcaagaacctgctcctccgttaggggaggctcaacctcctcgaagttctgcttcctgacctctggatcaaggagctccaccttcgccctcggccttctctccacgtgctcgtagtccttctccgtggccttcttccagtggttgtatggcctgaggtcgaagagaaccctgtaaaggtcttcatcgttcagaacttcttcgatgtgcttctcgggttcaagcagaacttccctcgccttctcaagcttgcccttgaggtagaggtctatcattatcgccgcccttcttccggtggcgatgctctctatgacggtcgagggaccgaggacgaggtctccacctgcgaaaactcccggaaggtttgtctgaagggttacatcgtccacaatggccttcccgcgcttggcctcgatgccgagactccttaggaactcctcatcgcagtactggcctatcgccaggatgacgttgtcggccttaacgcggaactcggaaccctctattggtatcggcctcctcctgccgctcgcgtcaggctcgccgaggcgcatctttatcagctcgacctcctcaactttgccgtctccgagtatcctaaccgggttcgtgaggaacaggaactcgatgccctcctcaatggcctcctcgacctcgcgctcgttggccggcatctccgccttggagcggcgataaacgactgtaaccttagccccgagcctcagagccgtccttgccacgtccatggcagtgttcccaccgccgacgacgatgacgcgctcgccgagcttcacttcttcgccagtgttgaccatccgcaggaactctatgccgtgcatcactccctcaagctcctctcccgggatgcccatcctcctgctcttccaagcaccaacgccgagaaagacggcatcgtacttctccattaactcatcaagggttacgtccctcccgagggcagtatttgtcttcacttcaatgcccgtctcgatgacggtcgcgatgtccttgtcaaggacatcccttgggagcctgtagggtgggattccatagcgcatcattccgcctagctcgggcatggcctcaaagatggtgacctcgtggcccatcgtgcgcaggtagtaggcgcaggcgaggccagctgggccgcctccaacgacggcgatgcgcttccccgtcgaaggcggaatctcgggtatccacgggccgtgctcaaggtcgtaatcagcggcaaagcgcttgagctgccttatcgccaagggctcgtcaacgagattcctcctgcaggcctcctcacagaaggcagggcagacccttccgaggacggcaggaagaatgtacttctccttcatcagcttcacggcctcgtggtacttgcccatcgctatgagagctaaatacccctgaacgtcgctgtgggccggacagccgtcctggcacggccctatacagtcgccgtagtggtctgagagaatcaactccagggcggtcttcctcatcgagacaacttcgtccgtgagcgtttcaacgctgagaccttccataggctttagggtgcaggaggttgtaacgcccctcggagtgctaacgaggcagaggcggcaggagccgtaggggtcgagctcttccgtatagcagaagccagggacgtgggtaatctcccttagaaactctatgaggggctttccatcaggaacctcggtttccttaccgttgagaataatcttgaccatcactcctccctcccggtgaggatttcaatggcgttgaagcggcacacttcgtagcaggtaccgcacttgatgcacgcctcttggtcaatgaagtggggcttgagcctctcgccgctgatggcattggccgggcagaagatggcgcaggcggtgcagcccgtacacttatccgttattatgacgtaccttatgagcggcttgcagaccttcgccggacagcggccgtttatgtgctctatgtattcttccctgaagtagcggagcgtcgttagaaccgggttcggggcggtctgcccgagaccgcagagcgagccggccttaacctgataggcgagccgctcaagcttttcaaggtcctcctcggtcgcctctcccctagtgaacctgtcaaggatttcccacatcctcttggtgcctatgcggcagaaggtgcacttaccgcaggactccttgaccgtgaagtcgaggaagaacttggcgacgtcaaccatacaggtgtcctcgtccataaccaccattccgccgcttcccattatcgctcccgttgcattcacgctctcgtagtcaacgggagtgtcgaagagctcctctggtatgcagccgccggaaggcccgccgagctgaacagctttaatcctcttacccgtcttcgtcccgccgcctatctcgtagagtatctccctaagcgtgattcccatcggaacctcaacgttgccgccgtgctttatcttgcccgacagcgcgaagaccttggtgcccttgctcttctccgtcccaagtgaggcgtaggcctcccagccatgccttattatccagggcacgttcgcccaagtctccacgttgtttatgttggttggtttgccccacaggcccttctgggcaggataaggcggcctcggcctcggcattccgcgcttgccctctatggaggcaatcagggcagtctcctcaccgcaaacgaaggcaccggcgccctctttgatgacgatgtcgaaggagaaaccgctcccgaggatgttctcgccgaggaagcccctctccctagcctgtttcagggctatctttagccttcttatcgccagcgggtactcggcacggacgtatatgaagcccttcgttgccccgatcgcgtaggcgccgattatcattccctcgatcacgcggtgtggatccccttcaaggacgttcctgtccataaatgccccaggatcgccttcgtcggcgttgcagataacgtacttctcgtctcccggggcttggcgagtgaacttccacttcaggccggtggggaagcccgcgcctcccctacccctcaggccagacttggtgattatttcaattatctcctccggatccatcttaagggcctttttaagcgcctcgtagccgcctgcctggatgtactcgtctatgttctcggggtcgatgtagccagagttctcgaggactatcttcttctgcttggcgaagtaaccatccacgtcccacgtcttcctctcgccgttctcccaccagtcgcgcttgactatccactcctttatgggcctcccgttgatgacgtgctcctctatgatcctcggaaccttctttgggtcaacgtggccgtaggttatgatttcgtcctcagtgattatgtccacgaggggctcgcggtagcacataccgacgcagccgactatcttgagcttgatgttgaggttcctcttctccagctccgccttaattgcctcgtaggtctccctggcaccggccgctataccacaggagttcatgccgaccgctatggccttgatctcagacatcgagcttcccctccttgagttgcttgaccagcttcctcaccttgtcgggcgtgagcttgccgaagaccttctcgttgatcattattaccggcgcgaggctgcaacagccgaggcaggcgacgcgctcaagcgttacaagcccgtcctctgtcgtctgtccttcctctatgccgagctcctcctttagggcctgggctatgttgacggcaccgttgacgtggcacgctgtcccgtggcacaccttcaccacgtacttcccgagcggctcaaagcggaactgcgcgtagaaggtggcaacgccgtagaccctgctgagcggaattccaaggtagttcgcaatctcctcaagaacttcccgcgggagatagccgaagcgctcctgcgtcctctggaggaggggaataagcgagctcggctcgggtggataagagcggatgtaatctaagccagcccccatttttctcacccattaatcacatgttagagaaatctgagcggtgatgtttataaaagtgcactaaagtacaagtttttaacaaaaagtttagaacactaagttcaaatccccacagacaagaaaaatagagcagactacaaaactgattttaccactctcaaggttcctggctttccgacctctccttcaacctcgaagacattcccgaagaacttctcaaccacccagacgttcgtgacgagatggttcgttatctcgctgactccaacctcgccgcccgcgaaggccaggaacggtatgagctggtcgccgaggaatctgtccgctgccattcccgtcttcaacgcctcgatgagttcatcggcggcttctctgcctacgacctcagccggcttccccctcttccccagtgcatccccaccaagcctgagcttatccgtctcagcccagaccactatcccgctccccgggccgagagagcgagaaacctcggtctctatctcaaccggcgcactgtaaacctcactcagcctctccctagctgcctttgcctgcctctccgcgacgtgggctggaaggttcgtcgcgtggcttatcccggcaaaccactctatcctttcccacttcagggctttcaaaggcttcttttcttcccaaggctcaatcctacccactaccagcccgccacccctggggtagtggccgcgcctctttatctcaagctcgacctttatgcccatcttttcgagagcgtagagagtaacgtgcttgagataatcgaccggcgggctccaggggacgtccgtccctcccgttatctcgaagctgccaccgatgaacgccatagctggaagaagggcttgaaggacgagcgtaatgctcccagcggtttttatgggaacccgtacgtgctttggctctgccttcccgggaatgaactccagctcggtcgagccgacgcttgcccccttgatctttgcgttgctgagttcttttagagcgagaataccatggaggtgctggggcctcagcccggggttcggcctgtttgcgcggatgttgtaaatcctgaccggcttgcccgtgatcaccgagagtgcaacactcgtcctgagtatctgaccgccgccctcaccgtaggagccatctatttcaacccactccatactctcacccgattgatgttgatagccagtcctaaaaacctgacgaaagtgttttcagtgaaaagtccgacctttcactggtggaagaatggacgagcttgagttctgcctgaagagcataagctaccccctcggcatgctcctcgaagggaaggagcgcaaagctggagatgtcgtgagagtctcaagcaaggccattaccctcccaaaagtcccgtttgctgcactctgctacttaacaggcctggccctattcgattcactggaattggttgataagaagaggctggctgaggactacgatgggttggaggcctttaaaaagaagctcctcgcctcaaagctcggggaaagcctaaagccatatctcacaaacccgggcctctttatttccccgtttgaaaggctctcctttgactggcttgagtttcagaagaggaaggagaaagtcgaaccgcacctcaagcgactgagagagctaattcgggaaagcaggagcaggaaggagtacctcgaaaggacttcgttcgtgagagaactgaccgttgatgaaggacttcttttgggatatctagcggaaagcgagaaggaacgcgagctgataaactctgcactcggaaagcacaaccatgactaccgggaaatggcgaagatgtacttcaaagcccttcgaggttgagtctaactgccagcttaagggcttcttccctctccactttccacttctccacgatcgcctcaacaaggcgaacgagtgctctaacgttctgcatattgagcttttcagggggatatgaggagaaaaacgaaggatcaacgtcaattccgagccttgaagagagttccgccgagaactcctcaacagtgagcggcggcaatctcacgacaaccgcaaagtcgaggaaggagtatctcctcgcgtctttggtctcgaccacaactgggtaatccctctcctcggcgagaagttcggcgactttctcaacgggtggctctctgagaaggagagcgttttcaggaaggaactccgaaatgtccctgccagaaaggttctccacgagggtgtcgacccccagggagagaacctcctcgggctcgggaagactcccggtttcctctttttgcggcggtttctcaacctcttttccagcgattgaagagtacaggctctcactgacgagggttatctgatacagcgtttcaacgccgtccaggtagaggatgccgttggagagtagcctaagaccaagcctggcaagtgccgagctaagggccgtctcgcttctcgttgttatagcttttctgtcgccaactggttcagttcccctgcttaccagccggtagtcggtagggaagaggcccttcgcgttgaagaactcctcaaggacccgcttagccctctcctcactgacggcatagattcggacgaactcaacgctgtccctctcgtccacccctatgaggacgacggcatcccgccgctcctttggaaggagtatgtcctccattttcaccgccttcgggaaaattggaagattaaaggctcatggcgccgagaagctccccgttgtcgatgtttattatctgcacttccctctttctggtatcgaggagagcaacgctcttcactccagttacatagccgcagacctctccaggatttacgaggacggttctaccaacttcctgtatctcgtagcggtgggtgtgaccgacaacgacaacatcgtagagcctgctgtgggcgagggccttgaccaaaacctcgttcgtaccgtgcgttacggcgatcttcatcccatcggcctcaagctctatcagctcgtcgtaaattcccaaggcctcgtagagaccctttctctcgccgtcgttgttgccaaagacgcccttgagaggtgctttaagtttcttaagctccctggcaacgaagggcgcaacgtagtcgcccgcgtgtataaccaggtcaacgttcctctcgttgaagaactcaaccgccttccttatggccggcaggttgtcgtgtgtgtcgctcataatcccgatcaacatctctgactcacctggagtaatttagggagaaggcttatagggttatcgtgaactgccctgacagaatgatcaaaaatggccagccaatctcggttcattcaggcccaaatgtattcgggaagatttattagacgacgtgacaatccttggaaaggtgcaaatcatgttcacgggtaaagccctcatagccgtcaaggtcatgaagccattcggagactggaagagcggagatatcgtcctcgtggaagactggaaggcgagagagctctgggaagcgggggtagttgagatagttgacgagacggacaagataatcggcgagatcgataaggtcatagcggaggaaagggagagcgagcccctgactctccttccggagggactctacgagagggccgagttctacgcctattacctcgagaactacgtgaggctgaacccaagggagagcgtcgatactataaacgtcaagctcaccaaacttgcgaacctgaggaagaagctgagggatctaaagctcataaggttcaacaagattctgaaagccgtgatgctgaggccaaacagcctggaacttctctcgaggctcgctcccgaggagaggagaatatacctccagatgtcgaagataagaaacgagtggctcggtgatgcctgatggacagggaagagatgatagcacgctttgccaagtttctgcgggagtacgttgacgatgagggcaacgaggtttacataaaccgcctcaaagacctcctcacggtcacaccaaagcgctcgctggcaatcgactgggcacaccttaactccttcgatcccgagcttgccgacgaactcttaaacaacccggaagaggccatagcgagtgccgaggatgccatccagatagtcctaagggagccgcctctcctcgtggagagggagtttaaagtccacgcccgcttctacaaccttccgaagaccctcctcgtcaaggagctcggaagcgagcacataaacaagctcatccaggtagagggaataatcacgcgtgtgagcgaggtcaagcccttcgttgagaaggccgttttcgtgtgccgtgactgcggcaacgagatggtgagacttcagagaccctacgagaacctcgttaagccggccaagtgcgacgcctgcggaagcagaaacatagagcttgacgttgacaagagccgcttcctcaacttccagagcttccgccttcaggacaggccagagagcctcaagggcggccagatgccgcgcttcgttgatgcaatactccttgatgacctcgtggatgccgcccttcccggtgacagggttctcgttacgggcgttctgagggtcatcctggaacagagggagaagaggcccatattcaagaagattcttgaggtaaaccacattgaacagctcagcaaggagatagaggagctggaaatctcaccggaagacgagcagaagataagggaactggcaaagaggaaggacatcgttgatgccatcgttgattcgatagcccccgccatctggggacacaggatagtcaagaaggggatagctctggcactcttcggtggcgtccagaggactctcccagacggaacgaagctgaggggagaaagccacgttcttttggttggagatcctggagtagccaagagccagctcctccgttacgtcgccaatctggctccaagggctatttacacgagcgggaagagttcatcggcggcgggcctatgtgttgcaccggattcaataatcaaaacgaatcttggacagttcaaaataggagagctggttgaaaaggccataccagaaaaagttcaggactacaagagcgttaatgccgaaaagctcggactctacattaaaacactggatggtgatatgagagtccttagactgtggaagctcagagccccagagaagctgataagaatagaaggagacggattgagtattacagtgacacccgagaccaagctcctgactcccaacggatgggtagaggccagaaacgtcgatggagaagtcgtcactgaaaatggcccagtcaaggtctccaaacaggaaattgaatctccccacgattacgtctacgacctcaccgttgaaggttctcacagcttcatagcaaacggtttcgtcgtccacaacactgcagcagccgtccgcgatgagttcacgggctcctgggtgctggaagcgggtgttttggttctcgccgatggcggattcgccctaattgacgagttcgacaagatgagcgaccgcgacaggagcgcgatacacgaagcgctggagcagcagagctaccaccacgactttgagctcctcttagctgacggcaggaaggtaaagataggagagctcgttgataagctcatcgagaagaaccgcgatagggtgatactcggcaaggacacggagatacttcccgttgaggacatcgagcttctggcttacgatctcgagaagagggagatagtaaaggtcaaagcagacagggttagcaggcacaaggccccagagaggttcataaaactccgcttctcgaacggcagggagattactgtaacgcccgagcacccagttatggtgtgggagaacggggagataaccgagaagcccgccgagaagatcacacccggggacattgctcttggcgttctcaggtatcccattcaagtggatggaaaatttaaagaacgctacagagacatgagagaagccgaagattaccaggattatctctactctcgaggagtggtctcgaagatcaagagaactggcatatacttcactgttgaaaaggccaggagagcccttccaagggagcttgtaaaaccgctgatcaatgcaggcaagatactccgagtaacacagacaccaaaagagcgcgccagcttcaatcaaaagctcgtgagggaaaacatcatcgaaggttatcttcagaggattatagaaaggatggatgagcttgagaggctctccagagaagaccccgcgaaagcccttgaactcctgccaaagacccagctttactataagtacgggataacgtacggaaaactcaaaaagctcgcagaagccagaaattcctgggcagagggcataatacagagtgcggttgcggagagaatctccctcgctaagagggagctggaagagttcttcaagtggtggaacgccaacgtgaacttcctgaaggtgaagtgcgtcgaggagatcaaaaacgaccgctgggagtgggtctacgatgttacggttgagccgcatcatctattcgtttcccatggattagtcctccacaacacaatcagcatctccaaggccggaattaccgcaactctgaactcaagaacgaccgtcatagcggcggccaatccaaagttcggaaggttcaacagacacaagagcctcccggagcagctcgacctcccgccgacccttctcagccgtttcgacctgatattcctgctcctcgacgagcccgacgagaaagtagacgccagcatagccgagcacatcctcaaggtcagaaggggcgaagctgaggcggtgacgcctaagataccctacgatctgctcaagaagtacatagcatacgccagaaagaacgttcaccctgttctgagcagagaggcaatggaggaaataaaacgctactacgtcaaaatgagaaagggcctgcggagaggagatgaagacggcgtccagccaataccgattaccgctagacagcttgaggccctcatcaggctcagcgaggcccacgcgaggatgagattgagcgaaacggtgacgagagaggacgcgagggcggcgatagagataatcgaggcaatgatgaagacgatagccgttgacgaagagggcaaccttgacgtctcaatcctcgaagtcggcaagagttcaaagaagataaacaagatcgagaagcttgttgacatcataaaatcccttgagagcgagggagagttcggagcgccggaggagaaagttatagaggccgccaagcaggcagggataggaaccaaggcggacatcgagaagctcctcaacgagctgaagagcgacggcagggtctatgaaccgagagctggattctaccgcgtcatctgacaaaggttataaagcgaagtgaagaggtaagtaggaggtgagaaaatgagcgagaaggtagacttttacgactttgagaagctcctcgataaggcttatgaagaactcccggagaacgtcaagcaccaccactcacgtttcgaggtgccgccggcacaggtcacgatagccggaaacaggacgatcatagagaacttcgtggacatagccgaggccatgaaccgcgacccgaaccatctcctcaagttcatcctgagggaggtcgctaccgctggaaccctcgagggcaggagggcaattctccagggacgctttacgccgtacctcatagcaaacaagatgaagaagtacctcaaggagttcgttatctgtcccgtctgtggaagcccagatacgaagattatcaagaagggccgcttccacttcctcaagtgcgaagcctgtggtgctgaaacaccgatccagcacctctgaagtgccttttctccactttttgtatcactctcggtgaaaagagagttgtgaaaaacgcttttaaactttacaaataacaaaggtcagcaaaaacagggggagttctcatgagcatggaggagaagctcaacgagctgtatgagaggaaaaagaagattctggagatgggtggcgagaaggccatcgaaaaacagcacgcaaagggcaaactaacggccagggagaggattgaaaagctccttgacccgggaagcttcgtcgagataggaatgttcgtaaagcaccgaggaactgagttcggcctcgacaagaaggaactgcccgccgacggcgtcataaccggctacggaaccatcgacggaaggctagtcttcgtctacgcccaggacttcacggttatgggcggttccctcggcgagatgcacgcggcgaagataaagcgcattatggagctggccctcgaagccggagctccggtcataggcctcaacgactccggcggagcgaggattcaggagggcgttgactcgctcaagggctacggcgagatattcaagatgaacacccttctcagcggtgtagtcccacagataacggcaattatgggtccctgtgctggcggagcggtttacagtccggctattggagacttcatcctgatggtggacagcgattccagcttcatgttcatcactgggccgcaggtcgtcaaggccgttacgggcgttgaggtgacccccgtccagctcggtggtgctatgatacacgcccagaagagcggtcaggcccacctcatagggaagagcgacgaggaagttctcgccctcataaggaggctcctgagctacctgccgtcaaacaacatggagaagccgccgcgcgttaagacgaacgacctgcccttcaggaagaccgagaacctgtacaacatcgttccagatgacccgaacaagggctacgacgtcaggcaggttatctacgagatagttgaccgcgacgagaacggaaacccggacttccttgaaatactcccgtacttcgccccgaacgctgttgtcggctttggaaggatgaacgggcagactgttgggatagtcgccaacaacccgatctatttcgccggtgttctcgacatagacagctcggacaagatagctcgcttcgttagaacctgcgacgccttcaacatcccgatagttaccctcgttgacgttccgggctacctgcctggaacagaccaggagtaccgcggaatcatcaggcacggagctaaagtcctctacgcctacgccgaggcaactgttccaatggtcactgtcatcctgaggaaggcctacggtggggcttacctcgctatgggaagcaagcacctcggtgccgacttcgtcttcgcatggccaactgcggagatagcagtcatgggtcccgagggagcggccaacatcatcttcaggaaggagatagccgccgccgagaacccggaggaggtaagacagcagaagatacaggagtaccgcgagaagttcgccaacccgtacgttgctgctgcacgcggctacattgacgacgtcatagacccggccgagaccagggcgaagataatcctggccctcgaggctatggagagcaagagggtaaagctcccgccgaagaagcacggcaacataccgctgtgaggtgtgaaggatggacgtcaaagccgtcatggagggccttaacataactgtcataggtgttgtagtggtctttaccatactgggaatactggccctcgtcctctacttcgtgggctggctcgagagaaggttggtggagagggaaaagcccgctaccgcacccacaccagcccccactcctgcccctgtggaggccaggcaagaggagaagccgaagataccgccgagagacctggccgttatcacagcggctatactcgcttacacggccgaaaaggccagccagctcaggcccctgccattcaggaggaaggtctcagattcctggcgcctctacggcctccagacccagatggaagatgttgaagacttcaactacgagatagggaagtggtgagaatggcgaaggttaaggtcatcgttgagggtgttgaatacgaggtcgaggttgaggaactgcccggaggaaagttcagggtgagctttgaggacaagacctacgaggtcgaggccaagggacttggaatagacatgagcgctttagcaagtgcccaggtctctgctccggcccctgctccaagtaccccctctgcaccgtctccggttccagctctcgcaccagcgccggcaactccatcaccggctccagccgccgctggtgagggtgttgttacagccccaatgcctggaaaaatcctcaagatactcgtgaaggaaggcgagcaggtcaagaccggacagggactcctcattcttgaggcaatgaagatggagaacgagattccagcaccaaaagacggtgtcgtaaagaaaatcctagtcaaagaaggcgacaccgtaaacaccggagatcctttaatagagatagggtgaaggactatggcaacgttcgttgacttcatcaacaccctcggcctcctccacctcacggtagggaacgtcgtaatgatcctagtgggcctgacgctcgtctatctggctatcaggtacgagatggagcctctcctgctcctcccgataggcataacggcggtgctcgtcaacttgccgctctcccatgtagccaactggccggtggccgtgaacctgcccgagaacgtcagcgacagcatcttcaagacgatagcctacatgagcgagcactacggtgagccgggactcttcgacctcatctactacctcctcatcaagactgaggtagttccactactcatattcttcggcctcggagcaatgaccgacttcggaccgatgatagcggatccaaagacggccctcctcggagcggcggcgcagataggtgtcttcgtggccatgctaaccgctttggctctcggcttcaacctccaccaggcggcaagcataggcatcatcggcggtgccgacgggccgacgactatctacttaaccaccaagctcgccccggagatactcgcggcaacggcggttgcggcctactcctacatgagcctcgtccccctcattcaaccgccaatcatcaaggccctcacaagccccgaggaaaggaagatacgcatggagcagttgaggcccgtgtcaaagagggagaagatactcttcccaataatctccatgatcgtcattgggcttctcgtcccgagcgccgcgccgctgatagggatgctcatgataggcaacctcttcagggagagcggtgtcgtggaaaggctgagtaaagcggcacaggaggagctgatgaacatcgtcacgatcttcctcggactcggtgtcggctcaacaatgcgcgctgagagcttcctgacagcccagaccttaatgatactcggactcggtgtcgtcgccttcgccagtgcaaccgctggaggagttttcttcggcaagatcatgatgaagctcagcggcggaaggataaacccgatgataggcgccgccggagtttcggcagttccgatgagtgcaagggtcgtccagaggatcgcgagggaggaagatccaggcaacttcatcctcatgcacgccatggggccaaacgtcgctggagttataggaacggcagtcgttgcaggtgttttcctcgcccttctgggctgagccttttcccttctcccatcttccaaaacattaaaatacaaagagggcgctttagatagagcggtggtgaaaatgagagtaaagaccctaatgacgaaggatccggttgtaattcagctacctgcaacgagggaatacgccatcgagctgttcagaaagcacaaggtacgctcattccccgtcgttggaaaggacggaaagctagttggtatagtcagcatcaagcgcgtcctcctccaccctgatgaggatcagctggccatgctcgttaagagggaagtcccaaccgtcaaggcaaacgatgacctgaagaaagccgttaagaaaatgcttgaaatggactacaggcgcgtcgttgtggttgacgatgagaacagacccgttggcattctgaccgttggcgacatcgtgaggaggtacctatcaaagaacgaaaagctcaaggaagtaacgatagaaccctactaccagagaaacgtcagcgtcgtgtggcgcgggacaccgctaaaagcggccctcaaggccctcctcctgtgtaatgcaatggccataccggtaatagacgacgacggaaacctcataggcatggtggacgagactgacctcctcagggacagcgaggtcgttagggtaatgaagagcaccgagctggcagcttccagcgaggaggactggatactcgaaagccacccaacactgctctttgagaaggcggaacttcagcttccaaagaagccagtcgaggagataatgaaccccaatgtcgttgtggcgacaccccacatgagcgtctacgacgttgcccagaagatggtcaagtacgagatagaacagcttcccgtcataaggggacaggacgagctcgtaggcatcgtaagggacatggacataataaaggtaatcctgaacaagtaaaaggctttaagctttcctcccttctttactttggtggtgttcttgagggagatcagggtttctcttatcggttttggaaacgttggaagggccacggcaggggttcttctcgaaaagagcaggctttttgaggaacgttacggagtaaggataagcgtcgtcagcatttcagacaccagcgggacagtctggcttcccgaggggatagaccttagggaggcccttctcgttaaggagaacttcggcaggctctccgcgtggaccaacgactacgaggtctacgagctaactcccgaggagatagtcggggaggttgactcggagatagtcgtggacgtcaccaacgacaaggaggcctggacgtggcatctcagggctttgaaggaaggaaagggcatcgtaacgagcaacaagccccccctggcataccactaccgagagattctcaacgaggctgaaaagagggaacttccatacctgtttgaggcgacagtgatggccgggacgccgatagtgggccttcttcgggagaacctgctgggtgatgacgtccagagaattgaggctgtactcaacgcgacaacgacttttatcctgacccagatggagatgggtctgagctttgaggaggcacttgcgaaggcccagagacttggaatagcagagagagacccgagtggcgacatactcggcatagacgccggctataaggcaactatactgcactgccttgcattccatccgataacgtacaatgagatagaagtcaggggaatagcagaagtcacggagggagatattgaaagggcaaaggcgaagggaaagacaatccggctggttgcgaggatagaaaagggaaacgttgccgtagaacccgccgagataccaaaggaaagcccgctcgcggtggaaagccacgagaacgcggcagtcataaagaccgacctcctcggggagctcctcataaaaggagcgggagcggggctcaaggagaccgccagtggtgtcataagtgacgtgattaaggcggcgctcagactagtttgagcttctctccctcgaactcgatcaaaacggagggaaagaagcgtctcggcaccagataaaccgcaattacctccccacgaacctcgattgtgttttttcctggaagaaggggaaaagttttcctttcttcaccttcaaccacaacctcagagaagttccagcttgggtatatccgatagaccgagcccccgacatcgagttcaacggcagggatgccgagtctgtcgaggagaatgaagaagagtccaatggccagaaacatcaggaaaaggcctggaccagagatgagatagctcactatggcaatgacaaagttcaataacgcggagcgcacaagaaacctgcgtcgcctttcatcaacaaggcggatcttccgcatcgacccaaactctttttaatggttcatatacctttcgaacggtggaagcatggagcacgtcatagccctgcatcaggtctacgcggagctgatattcagaggacttaagacggtggagctcaggaagagcagggccttcggtgagggggacatagtcttcctctatgtagcaaggggaaacccctacgagctcagggataccctgaggaggcttggcctccacgaggagcagactctaacgcagagggggacgatagctggcggctttgaggtaggcgaggtcatcaaggccgacttagagaccctctgggagatgacaaaggaggccagcgggctaacgttggttcacggggagaacggtaggaagtggctcggcaattacataagggagtacggctacgccttcacgatcgagaggccgttcctcttcaaggagccgatgagcagggaagaaatgaaggagcgctatggaatccacgtggagggcataatccacctctcaagaaaaacgagaaagccgtgggtgagggccctcattgaagaccttctcgcgagggacgtcgtttacctctaactcccatcagagtttccttcaccagtgtccttcttctcttcctcaagagcgtcctcttcctcgacttccgggacgagaacgtacgggccaaggctcagcttatttatttcctcctcggtcaagagcctgctcttcaccttctcacctataagggcgctgttgccgagcggatccattatccgcaccgttatcggcttcttgccttccttaacgtcctcgatgtactggagtatctcgtcggccttcttaacggcctcctcgtcgccctcctgcctcctgaactccctggccattaggagggtctccctgaccctttcaaggactccttcaacgttggtgataaagccctccgaagctgggccgggctcgatcttgacgccgatttcgtcaagttctatcgtcccgctcttgctcctgacaacacgagtgaagagatccttctccccctccactttgacagtgtagagctttggcggcctgtcttcgaggatcatgacgtcggcgttgcggtagccgcatttctcgcagattatcgtgctctccatgaccttgccgaagtagggtatctcatggatgtgctgaatggccttgagtgtaccctttccaccgcagattgggcagtcaccgagggatataacctgaacctcaccgagatcctcgcgaacttcaactttctgtctcttctcgccgttttcacccatgagcatcaccgaagctaaagtaccgagaaccgtttataaattcatggtagggttgaagaagggcgagataaaagataacctcacttggcgattcttatatcgtttggcaggaggatgagctttatctcatgtttgcagaccttggcggcctgtccgtcgagggcactgaccatacccttgagctgctggacgaccttctcgagtacatcgggcctcttctcaaggggagtcaggtcaacgagcacgatgttgccgttctggagctccctggacaccttttcgaggtctgagtagctggtgacagttatcttgtgcagatacctaagctgaggtttaacgagctccttagcaagaacatcctcctcaacagggatgacctcaacctccgtcctcgtgggagcgggagccctttcacctttaacctccttctttatgctgggaggctttacagttggctttatatccttcttttttaagctgtcaaacagtcccataactattccccccgattgaccgtgaactgtcttactttttgatgttttcctttatagctctttcccaaactccgatggactttcctcaagaagcctgaacaaacctatgaacgaaagcacaaacgcggtcaaaccaaacacaaccaccacaaagcgaaccggggtcttccccctaacggtaatgagatacagtccccagacaacgagcgccaagccccacatggcagtggtcagaagaagatccttcttgcgctcctcgcggaggaggagatagagcgtccttaccgcgaacccaatgaaaactaccgccgccagtgccataatgacgtccatagcgaccacccaaaacagaaaagaagagacatcaggcccttccgacggccttcagaaccttctccctaatctcgttgcccttcttcagggcaacttcgagggcgtacatgacttcctccatcttaaatgctcctgcctcgcccttctgggccgctgagatgtgtcccgtctcgtcggtcgttatagtaagcctgccgtccatgacgcgctcctcgtcgaggctcgggtcaacgactatggagttaccgatcttggcgaaggttacagggattgggacgtggttaactgggagaggctcgtactcgtcgagtatctcaacctcgccagtttcttcgttgtagttgacctttggcagcttcgtgctgaggagagccgctattgcaccgattccgctggcgtcgaggaggttgccgccgtggtcgagaacgtggacgtctatgaatataaccctgacgagcttgccgggaactataacgagcttctccaggtcaacagcctgactctccctgatgcccctgtcaacgacgcgcgccagttcgattgcgttctcgtctggcgggccgggttcaaatgtcggtgaggcgagcgggacgagctcaacgtttgtcgttatgacgcccctgtcgggcaggtcagggaagggttcgccaagttcagccttaatgcccactagaacttgggtgtcacccagcctgacccaggcggagccctcggccttctcgataacgttgaccttaatctcaaggtcgcggtagtcctcaaaggagcggccgtctattctcttgccctcgcggagcagttcgatgatgtgatcgcgcattatgctggccatgacttccatctcactcatttccctcaacctcctgggctattttgaggtacttttccttgagggcctccctctgcttctggtaaacggccttggcgccctttatagcaagtctcactgcctcaaggaactcatccttcgtcaggtagccgtccatctggaggagagttatgtcgttcttgagcggcattatggcaaccggtacgtcagcttcaccgtagttgtcctcctccttgttgaggtcgagaactatctcaccgtctatctttccagcggcgcacgcggcaaccaggtctttcattggaatacctgcatcagccagagctagcgaagcggccgttattccagcaaccctcgtaccggcatccgcctggagtatttcgatgaagacgtctatggcagtcctcgggaacatgtgaaggagcaacgccggctcaagcgcaccccttatgaccttgcttatctcaacgctccttctgtccggcccgggcttcttcctctcctcaacgctgaagggcgccatgttgtaccttaccctgagtatagccctgtccggcctctggagatgcttggggtgtatctccctcgggccgtagacggcagctagaaccttgttcttgccccactcaacgtacgccgaaccgtcggcgttcttgaggacgccaacttccatcttgataggcctaagctcgtacttctttctaccatcaatcctcttaccgttctcatcgatgagctttaatccttcaggcctgcccatcatcttctccaccctcttctccgttaacctcggggatttcctctattactccctgctccttaagctccctgagcctgctaaggaggaactccttaacgcggtcggtaaggccctgggtgtggctctccctgtcaaccttgagtattgcctcgattgcgagccgctcaagctcgtcgttctttccgctgacccatacccatccattctgccccacgattatcctcgttccagttagggtctttatcatgttgatcatcgaaccgcccttgcctatgagcctggggactttggacggtgttattgtgacaagctggccgcccctgagcggtccgcccttgaagggcatccccttggtcgtcagatcaatctggtttacctcgttgaaagccttaactttggcgtagattatgtccccgatgtcgaatatcttcctcaggtcggtcttgagcaggtctatcctctcttcaacggcatcctgaaccctgaggctcgcctggtagggtgctccgatgtccacagtccagctggagaacttgacgtcaacgatcttccccaggacgttgtccccaacctctgggatataggggccttcgagtggtatgacccttatcacgtttcccctgatctcaacgaggccgatgacggtggaatagattgcgttgccttccctgaaagtccctcttccgttcttaaaaggcccctgggcgagtaaagtcccagggacaacgagttctctgggttttacaaaaatcttcttcataggcccttcctctctaacagtttagttatcgcttcgccctttgtaagggcgttgagcttttcataaaactcctcctcaactccaccgggtatctcaatcacgaacatccaggagccgtcgcttccccactcttccctcttgatgttgccgaacttcctgacctctccataggccctcccaacgtagtctccaggtattttgaccgctatgaccttgacctcaagctttagcgggagtatcggccttatagccttgatgacctggggaacctgagcctcggcatctttgaatatgtcgatgtgcactcctgcctcttccatagccctgagaattctgtcaaccgggtgcggataaccagtcctcgggtcaaccgcgtgcctgtggatcaccgtggctatgtagcgctttttgtcctcgagcatctgcctcctctgctcagccgtcagctgaacctcaccctttcggaggattatcttggcgacttcgtacgggtcgctggtgccgaatatcttctccatctcgtgctcgctcgccttgtcacccttgtgggcgtccttaaaaacgtagggagtggcgaggatctcctctatcggaacgtccttgccctccttgaagtccctagccaggtaaggatcgaccagtatctcgaaagtctcaccatgggtcttcagacgggcgatgacggccttatcaacacttatcggcatcgcccgtcacctcagtagttctgatcgagttcggagtagtcttcctgtttctcctcaacctcttcctccttaacttcctggaggatctcgttgatgtacttctcaagctcctccctcgggagcttcttccagcgcttctcgtccatggttatgtaggcaacctctataccctcagcagttggctcttcgagggtcttcgcaagggcaaggattgcgagctttatggcatcgtcttttccgatgtcgtccctgtagtgctcctcgaaaatggccatggcggtgttcctgccgcttcctatggcaactgctttccactcgaagtaggcgccgctcggatcggtctcaaaaagctcgggcttctcgtttacgcccgccataagcagggcggcgccgaagggcctcacaccgccgtactgggtgtgggcctgcttaaggtcgcatatcttcttcaccagaacggtgagcgggacgggttcgccgtaggtgaggcggtaaatctgggcctcaagcctggccctgtcaaccaaaaccctggcatcggcaataatgccgctcggagcggccgctatgtggtcgtcaatgaggaatatcttctcgtaactgctcggttcgatgagcttgctggtgatcctcttctcaacggcgaggacaacaccgtccttccacttaacaccgacagcggttgctcccctcttcactgcctccctggcatagttgacctggaagagccttccgtcagggctgaataccgtaatcgcccggtcgtaaccggcctgcggtggtacaaacgccatttcacatcacctctattccctttactcctttagcttactctacgggccatctattaagcttttctattctcccctaaaagcgatgaccgccatcctcctggcggttctcctcgcaagctccagcgggatgaaagacactgcaaagatgaccgctcccagtatcagggatgcggtccatcccaggggcttaaagataatgagcccaaaccctaccagaagcaacagcaggcccgcgaggagaagctttcggtaagcaatttcgagttttttaagttcttcactcatgctcccaccgggggactttttaagatgggtggttttaagtctttggtggttctatgaagtgtccgttctgcagtccaaaaagggaaaacctgctgtacgaagatgagctgataagggtaatcctcgatgaatacccagcgaacagggggcatgtgctcgtcgtcccaaggagacacatcgaagcgtgggaagagctggacgagaaagaaaaaatcgccctaatgcagggcgttgacctctccatgaaggccctgaaacagaccctaaatcccgacggcttcaacgtcggcatcaacctcggagaagcagccggccagacagtttcccacatccatatccacgtcattccgagatggaagggagactgcaacaggccgagaggcggagtgagaaaggcagtactggatatcgaggacgaaaacttgactatgaaagagcgctgggagaaaaacaggctagggagagaagaagtagaatccttaaggaaagcctttctcagtctcctgggagagggtacttagcctcgttctttctgattttcctgccaacggcctcatccaggtctattccaagctcatgcgccaggagtacgaggtaaattatgacgtccgctatctcatccgcgacctcctcctttttctgaggattctttacagcttcgaggatttcctcatcgctgagccactgaaagtgctcgaaaagctctcccagctcaaccacagcggagatggccagattctttggtgtgtggtactttttccagcttctagcgtccctgaattcaacgactattctttcaagctcacggaagtccatacccatcacctcagtagaagtgagcctcgctattcctgaggagctcaagaagtttgaggaacctctccagctcctcccttgagaagtgctcttcggcatccgtctcgggatcgagggatagaagaaattccctggcctttaagaggtcgtccagatcctcctgaagctcaatggcccgctgggtgaactccaggctcgtgtagggtgtctccatagccctctgctggttggcaactatggcgatcttgagactcgctatggcctcgtcaaggatttccaccaattcttttattttcatagacctcacaaaggaattcgtgctctaggtatttaaagcctgcgagaatactttataaggttcaacgcagatacaataacaggtgtccacgaatggacttcgcgcttttcatggaaaggtatgggtacaagattctcctcgtgatcatgctctccatcgtgtttgggatcatcggaatattcgttggtgcggtgtttgtgaccttgaagtcatacggtctatacgttgggggaatgatacttatagtcacagcgatttacgcattcacagttagaaggaaatacttgcagtcttacggtgacgcaatgggcaagtacttctacgacccgaagcagggaaagagaccttaataagtcgaatatttttcggcttttttgggtgttttcctgagcatagagttttaaccttattcacggaaagcctacggtggtcatcgtggaggctctaaagaacgctccttctaacgcttcacttggagtatcggctaaaaaagagagaaagctcctcatgggaaacgaggcgattgcctacggcgcacttgaaagcggtgttgtctttgctaccggttatccaggaaccccctcaaccgaagtcatcgagacaatagcgaggctgaagccggaggtctttgccgagtgggcgccgaacgagaaggtagccttagaagaggccgctggagtggcttatactgggctaagggccctcgttacaatgaagtgcgtcggcctaaacgttgccgccgacccgctcatgagcctcgcctactccggcgttgagggtggacttgtaatacttgtcgcggacgaccccgggccgcatacgagccagaccgagcaggacgacaggtactacggcaagatttctctccttcccgttcttgagccggctgatcctcaagaggcccacgacctcataaagtacgcttacgagctgagcgagagatacaaagtcccgataatcttcaggacaacgacgagggtgaaccacacaacggccgacgtcgaggtcggcgagttcgtcgagcttaacaggaaacccgtcttcaagaaggacattgagagatacgtgagggccagcatggaaggcaacagaaagaggcacaagtggctcaacgagacgctgaggaagatcgaagaggagttcaacgagatgcccttcaactgggtcgaagggaaagaagacgccaagctgggaataatcgttgagggtgcaccctacaactacgtgaaggaggttctcccgaaaataaacgccgaattcaaggttctcaagctctcaactccccatccgctcccgaagaagctcgttgtggagttcctgaagaccgttgaagaggctatagtaattgaggacggcgccccgttccttgaggaggaggtcaagatagccgcctacgaggctggcctgaacgttccaatctacggcaagaggacgggacatcttccgcttgagggcgagcttacgccttcgctcgttagaaacgccctgctgaaggtcatcggcgaagaaagtgaggaatacgtaaagcccgaagaggttgcctacgccgagaacttagctccgaagaggccgccagtaatgtgtcccggctgtcctcaccgcggctcatacagggcagtactcgatgccctcagagacctcaagctcggccgctacaaggttccaatacacggcgacataggctgctacgccctatccctcctcccgccgcttgaggccatctggaccgaatacgtaatgggtgctagcataagcctcgccaacggtcaaagcgttgttatggacaagaagatcatagccaccattggcgactcaacgttcttccacaacggaatccagccgctcatagatgccgtctacaagaacctaaatgttctcgtgatgatactcgacaacagaaccactgctatgacaggccaccagccgcacccgggaaccggcggaagcgagacaggaaggaagttcaacgagatagacatagaggcccttgtgaaggctctgggagtcaagtacgtcaagaccgttgacccctacgacctcaaggcgacgagggaggctataaaagaggcgatgcagatcgaggggcctgcggttataatagcgaagcgcgagtgcgtcattcctgtgataaggcgcggcgagatcggagaactcccagtggtcatcgaggacaaatgtaccggctgtaaggcctgcatactccttacgggctgtccagcgctcgtctacgaccctgaaacaaagaaggtcaggatagacgagctcctctgtactggctgtggagtctgcaaccagacgtgcccgttcgacgccatcaagttcccgagcgagctgaagaagggggcctagccccttacaatttttaagaagggaacgttgtcaaagtcgctgtcaaaggttgctattttcgttattccgtgcttaacgcacgttgcaacgattatagcgtcgtttggaagaagtccgtactccctggagatatcttttaaaatctcaaaatcgtcttcctcttccacaactgttattccagaaagctgcacaagttccataaccgtggagtaagcctgctcaagcagatactgcccttcttttagcttcgcgaacttctttgcttcataaacgttcgttatccccttatcgcgggccagtcttctgaagacaacgtacacagcctcgtttattgcgactttggacgttaccttctcaggcagttcaagaattctctcagcgttctcgcttatgggcgtctcaaagaggtacgaatagagcacgttggtgtcaatatagatcaccgaactcagcctccagctcgtaggctttgagttcttccatttcggccttacccaggatacccctcaattttctgaaatcctcagaggtctttctctctagattttttctcatgagctggagtttgacgacctcgagctcaacgagtctcctaatttcctcgggatcaacgtcagcaggaacggttatcttaaccgttacggtaggcacactccctcacctaggaacattaactcggggagacctttaagttttgtcctctaaaataagcactgcagaccaccaatttttccccgcgagctgaagaagggggcttaagcccctattctttccacacctcaagcaccatgtatcttctcacaagcggattgggatagagttcccagtttattccgtcagtattggtctcaatttttccgaagagtccgccctctctcgggtcgaggctctctccgtatatctccccgggttttatatcgactctcatgtacctaggcagcccgactaagacctttccgttcttcctggcgtattctattgcccacttggcagtgtatattccggagtatatctccgctatcctgacgggaacgctccactttcctatggcaattatctcaatgccagtttcttcccaaagcttctttgccagcggctggaggtctctggagaggtctttccagacttccttacctctatcggttatgccaagcgcctctatcgttggttcatcgagcttcctgacttctattcccccaattgtagagtcaaggtgcacgacgtcgggcttaacttccctggcaagttcaacggccagataggcctcgtccctgatggcctgcctgccgctcatgtcgtagttgaaggggtcagcgtacttgaccctgctcagcgaagccgtcctgtagggcttttcaacgagcacggcgacggtcgctatcagccctagggggttatatgcatcatcaagaagtgcaccacccgtgtcagcagcgactatcctcatggtaaccaccgaataccaatatactttcacatccaaaactaatatggggtatcaatatgggagacgccacgatttatgaagttttgggaaggtacgttgatggcctcgcaaaagctactccagtctgcatcgcgtacgggagagcgcttctgaatggggagctgataacacccgcggaaaaacctgtcaaatttacagttttcatgtactcccaaaccttagaggtcgatgccatatggagtgaagaccaccttggagggctttcgatcagaggtactcccgcacttcctcagaaggggtcagtggtcactctgcagttccctatacgagaaggagaagtcctggtagagctgatgggtggaagagaaatagggagagccctacggagagtgtcatcgttttgtatcgagggaattggaacagtgatgtgggtcagaggttagtcctcgtcaccgctcggaactcggcaaactcatcattccccgaagcctctcgagctcttcccttaaagaccttaccttttcttcgccaagagcactccccgagtacctccgtatcgcatcctcaagctctgggaacccgccaagaaatcctggaagccgctcgggtggaaccagcatgccagtgctccgatacaccacaatcgctgccagggagtaaagggcgtttagatacgactcgtaggcaccgctgtagtctccgcgggagaacatcctatcgccttcagcaattagcttttcaaacttcgagagcagctctttcatcccaaccaccgggaggtttttataatcctgactaaataaatcctccgggaaaacatgagggctgaaactgcagtttgggcggctgtcattgcagttatcttgtacgtatcatggagggttattcttccctttcttgagccgcttttcttcgggcttattctagcctacgctttctatcctatccaccgaaggttgagaaaattcgttggaaaccgtgagtcagcggccttcatcagctttaccttcctcgttctcggaggaaccttaacgtttgaactggcaatgatgtccctgaagttggcatcatcgtttgctgggagcataagggatgtcattaactggattctaactctcccccttccagaagacgctaggactttcatcctcaacatcaaggctgaagcaacaacaagaatagctgagtacgtctcaagcagggcgttttcgataccgctgtacgtaattcaactcaccgtgttctttcttgccttttattacgggctcgcatattcagagcagatagcacgaactatcagagaacttctgccggaagaaaaccgggaattgggtgaggaaatactcaccagcgtccacaaaactctctctgccctcgtgagggcatggctcctcctgaacgttgcgaagggcatcctgatgacacttggatacatagtctttggcgtttctgacgtttacaccgcagtcatagctggtttcctgactttcgcgttctccttcgtgccgctcttcgaaggctggatgatatggctggcggcggccatatacttcgccctcaacgggatgtacctccacgccatcggcatctcagtctatggcgcctttctggtctcgccgatgccggattacaccataaggcccatgctcgtcgccagagacacagaactggacgagaccctggtcttcattggaatggtaggcggaacatgggccatggggcttaagggcataataatcggcccaatcgtgctgaacgtattgttagtcctcataaaagagtggaaaaagctcacagaatcttcacaccagctctcttcatctcctcaagggccttcttctcgtcctcggggttgatgcccttaactgcatcgctcaggaggtaggtctcaaagccgtgcctgaccgcgtcgagggctgtcgccttcacacagtactcagtggcaacaccgcagatgtaaaccttctcaacgccgttctccctgagaatctccgcgaggttcgtaccttcaaagcccgagtaggcctccttatcaggttcggtcgcctttgagattattatggcgtcctctggcaggtccacaacgaactccgctccaggagtgttctgaacgcagtgtggcggccacggcccgcccctctccttaaagctgatgtggttcgggggatgccagtccctcgtggccactatgagagcacccttctccttgaactttttgatgtactcgttgcatttgggaatgatggtgtcgccctccggtactgggagcgcccccccgggcatgaagtcgcgctgcatatcaacaactatgagggcctccttcggcatagaacctcacccgattatatatggaagttgagacttaaaaggcttaaacggaactcagaactctggaagcctgtccctgaacttcgacatatccactcctttctccatgccgaacaggtacgctaagatggcctcgtcgaggtctccgtagcgttcgcgcatcttcttaacgccttccagaacctcaagttcgccccatccaagggagcgggcaatataagagaccatctcaccgagcagggaaccagcctctttctcttcttccaacttttcaataacgacaaggagtttcccttcactctcctccagaagaccttcttcgatccattcctcgatggcctttttggcctcagtgggcgacatccttctgagcctgaagctgagaataccaactaactcgctcctcgtgaactcaggggagcctttaatctcgatggcctcctcaagcgggtgcatatccatcaaacttattacctccccagatttaataaacctggtggttggaatggagataaggacgcataagctcgcctcggagaggcttcttggaaagcccgtgaaagttggaccgcccgaagctgaagtcattctggaaactactgaggagatggccgttgacgaatacggactcgttcacggcggcttcacgttcgggctggccgactacgcagcgatgctggccgtgaacgagccgacggtcgttctcggaaaagcagaagtgaggttcctcaagcctgtgaaagtcggggagaggcttctggcgaggacaagaattttagagaactcaggagggggtgtgggggacggaacgtccccccaaaggaagaaagtggtgaagggtgaagtcttcaacgaaaaaggagaaaaagtgttcgaggggacgttccactgctacgtcctggagaagcacgtgctggagaagggttaagaaagcaaaacaaccgctccaaacaaagccgcctggagaacgcagagagcagtaagagtccagactaaggggttgaacttctcacttttacggaattcttcttttctggccagtaatatcgacagaacatcgaaggtcaaaaaggacagaaagcctactgcatccatgcgaaacgccattagcaatgagagagtcagactcagaacgccgaccgcagttagaaagggagcgatggcccctagatgcttgatcttctcgggataaagcaggccagcgagcaggaaaaacgacagaggtactggaaggtagaggaagaatataacgatcatcagaccaaaggacacatacctaccctcgttctcagctggaagttgggggagtgaaaatctagcgtggagaaccatcagtatctcggccaccagcatcagaactccgatggttgcgaaaagtacggggagtgctctgaacctcttgcccttcatcagtggtaattagacagaaactcttttatacatttctatcgaaatccgatatcggtgttcgatatgataaagagggttctcctcggcttcatgggcatccatatactccaccacgcgagcaaaggagaggtgacgggctcgttcatgatggaagagctgaagagacacgggtacagcgtgagccctggcacgatctatccgctccttcacaggatggaggagttgggcctgctggagagccagtggggagtcaaaaacggaaagcgcgtccgactttacaggacgacacccgagggggaggagcttctcaaacgggcaaaggaaaaagtccgtgagctatgctcagaactcttggaggagtgagccatgggaaacggagaaaagggtacaaatgagcgaaaaatctttggaataagctggaacgtcttcctgctcggaatagtcagcttcctgaacgatatgagcagcgagatgataagcccaatagtgccgagctaccttaccgacgttctcggggaaggcaagcttatcagcggttcgattatgggtgccatagagagcatgagctccctcttcaaggtggcgttcggctacgtaagcgaccgctttaagaaaaggaaggctttcgtattcatcggctacgcactctcaaccctcgccaagggggccctggctttcacccgctcttggtgggactttctgacgctgagggcacttgacaggataggtaagggaataaggacggcgccgagggacgctctaatagccgagtcaagcgagaaaggtaagagcggcaagtccttcggctttcacaggatgatggacacgctaggagcagtagctggcccgctcgtcgccataggcatcctcaagctcctcgaaggcctgccggttgaaaaggcctaccgctacgtcttcctgctgtcagcagttccggggctgatctcactcttagttattctgctcttcgttaaggacagaggggctgaggtcaaaaagaagataaccggaatctcaacgctcagggacagaaacctgcagctcttcctcgcggtcgttgcccttggagctctcggaaggtacagctacgcctttaccctctggaaggcggaggagctcggctacacggtcgttcaaggaatggcattctacgccctcttcaacacaatctacgcgctctcggcatacccaataggcatctactctgacaggctcgggaagaagaggatgataacggctggctttgccgttgcagccttggcttccctagcctttgcctacgccagagacctggcaactctggttggtgcgttcgccctctacggcctctacatagcgattgaggacaccgttccgagggcttacatggcagatctagccaaggactacgaaaagggtactataataggtgcctaccatacagttttcggtctcttcgtgcttccggcttcggtgatagctggctacctgtggaagacgtattccctgacatacagcttccttttttccgcggcgatgaacctgctggcactcgtccttatgttgctcgtccccgaacgctgatgtcattttgacaaacttttttccaacattcccatattttttgtcaaaaagactaaaaagggaaggacgtagaagatgcgggtggggacatgaaacttctggttctcggcacggggggcaccatagcgagtgcaaagacggagatgggatacaaggcagcgctcagtgcagatgatatccttcagctggcgggcattaggcgagaagacggtgccaagatagaaacccgggacatcctgaaccttgacagcactctcatacagccagaggattgggtgactatcggacgggcggtttttgaggcttttgatgaatacgacggtatagtaataacacacggaacagacacactcgcctacacttcttccgcccttagcttcatgataaggaatccgccgatacccgttgttctgaccggttcaatgctcccgataaccgagccaaacagcgacgcacccagaaaccttagaacggcactcacctttgcaaggaaaggatttcccgggatatacgtggctttcatggacaagataatgctcgggacgcgcgtttctaaggttcactccctcggcctcaacgcctttcagagtatcaattacccagacatagcctacgtgaagggtgacgaagtcctcgttagacataagcccagaattgggaatggtgaaccattgtttgatccagagcttgaccctaacgttgtccatatcagacttactccagggctttcaccggaggttcttagggcagtcgccagggccacagatggaatcgtcctcgagggttacggagcaggtggtatcccatacaggggcagaaatctcctggaggtagtctctgagacagcgagagaaaaaccggttgtcatgacgacgcaggctctctacgggggagttgatctgacgcgctatgaagttgggagaagggcccttgaagccggcgtgatcccagcgggcgacatgacaaaggaagcgactttgacaaagctcatgtgggcgctgggacacaccagagatcttgaagaaatcagaaaaattatggaacgaaacatcgcgggcgaaatcactgggagttaagcaagctttttcagctcatcatctcccacgataaggggtctctttgactcaatgacatagctgagctcccaggttacctcgcctttgttcatcagctcggcgtagcgtctggccttctcttctgcctcttcaaggctctcagcctcaatgatcctcctcacataccacttcctgtctccaaagcggagcttgaactctgccatgaacatgggcaccaccggaaaacctaacgttcacgtgcttaaaaagtttgagaggctacataactcaaagctcggcggccatgtaaacgccgtcccgctcaaaggcctcgtaggttttcgtgccttcctttgtgtgcagctcaacgaccacttttttgggcctcttctcaacttcgacttcaacctttctgtcgctgagaacctgaatgtaggcatctccgcggcgctcgaactcaaagaccagggtatctccgtcccagcggtgtcccctaaaatcgacaccgcccatccgaaacgtaacttccagggtaaccttcatgtttgtacctccagtactgatagagggcgggagttataaacgttgacattctaaagtccaaacgcgccctttatgccgttgattatcatctgaactgccattgatgtcagtatcagacccatcatcctcgtcatcaccttgatcccgacccgcccaagccgggcctttatcctgttggcggagcagagaacgaaccagacggtaatcccaatcaggattatcgtcagaattaccgcgaacctctgaaggttggtcgtgcttttggccatgtagagcataaccgtcgttatcgcacccgggccggagataagtggtatcgccagcggaattattgcaacttcctcaagagttacaacttcctcgctgaactcctcggtttcttcgttgctgatctttaccgatgacagctttccggagagcatatcgagggccatcctgaataacagtatcccacctgctatggcaaacgcatctgtgctcgacccgaagaacttgaatatccactgcccgagcagggcgaagaccacaagggttgcaactaccgatatggctgtcttagatgcgatctccctccgctccctccaggacaggtcgtgggtaacgctcaaaaagacggggactgcacccacggggttcgttatcgcaaacaagcctccgtagagaagtatcagatacttgagaaactccaccacttctaacatgccaccaccaacaccgatatgttaaagcggttaaaaatgtcccgcccaattgagcagttacaacaaaaacttttttaagggcaaaagttactttttattgatgtattatgggacacacgatttattataatacttcgatacaaaaatggtgcggattcaagaaattcatgaggagagtatgttctggcgttggttatcagttaaaagaagagaaaggaactctcataatatttccccagaagaggggcgtcgaacccctcagaatcaaaaaagagggggatggcttcgctaagaccaacctaatcgagccagagcactcgatatacctgctgatacttcactcggtttcgtcctttggctcggtctccgtttgggaggattgagtgtcaaggtaaacttcaagtatcctaatgggtctggagctcctgaacacccgctcttccacgagtagcttaacaacaaccccaggctcggcatcaggaaccgcgggcacccagtaatagccgggtttaacgttggctgccatgtcgtcgtggacaaagaccttaaccaggtcgttcttgacttcctcgacgacgccgtaggtgtagtccctgccgtagcgagacttaaagtagtgacggaaaaggataactacaagtccaataacgccaaggtatgcgtagtaccagtaggcatccagagatagcctcctcaaaagtacgtatcccacatacgaaacaaaagctatggtgctaaccacaagatagaacacccgataagcctcaaaatccaaaatgtaatcagagtaccgcacgagaataaatctcaaaactaggaaatagaaagcgctgagaattattagggctagaaagtaaccgagataagctacaaccacgccggttactaggtatcctaagaatatcaactggagcagcaaactagtgacctcatggggagtcatccactgtttttgtattggccacgacttgggtggacgagctgaggggattggcttgagcatcattttcatgactccagcagttcttttagcaactttctctactctctccccaatactataaaggatatctcccacgtccaatttcattcacccggatgcattatcaaatagggcctttttagtataattatcgagttggaaccgtcgctgttcaggactaacaggcgttccggtaacattacagctatacgggggaactacgcatttgaggaagtagtagtcaacactgtcatagttatctgggattgagcccccaatgctctgaatagcacctagaagcgctttatcaatagttcggttaggaacaataaacgttgtaaggcccacaggagtgggcttcatcccaagggcattttgaaaagtctcagcaagatgaagataatagctgtggtggccatttggattcgtgttcacagttccttcaaatctctcaagcacagtcggatagtatactcctgcagaggcattgtcatagagtcctacatagcaccagttcaggacaagttcgtttatatcctcagatttgttgacattatagtaaccatattcttctccaggatacggaattctacatggttctattattcttgtgtatagaccgttcagcattctaacaatgaacggatcttcaaaaccctcaacacttactatcgagtacacgtaaccgttggcgggaaaatcgcccgagtaccgtactctacctgagctatcagttattgttatattccttaacttcactctaacagcaacgtggaacgagtcaacaggcccgataagcatctccatgtgagaattaaaaagttcctccggggtagatggctcaatactcatccccattgaggagagataattaacaaaattagaataccaggactccagagtgacaccccccatagtaggactgatattcccacctattgttccatacttcataagctcttctagggcttcagatgcatttgagacaaagctgtggttgataacgtactcagtgagggcgatgtatgccctcttgaagctcaaatcaacggcattctgaaggtcgtcccttagggtgacagtgctgaaatactgcctctccatcagacccctctcagcttgattcacaacgacggcgctggaaatgctctcgtaagttgcggcaaggagaaggagtggtatcaggaggagcagcacggtcatgtttattaggtaccccctgcgcatcagcctcccctccatatcctcagggtaactgtaatgggctcaatggacgttggaacgttcctgatgccaatggccttcccctcaatcccaaccagccggatccttatggggttcttacttccacccggaatgtatctactgtccccgagatgctccttccacagcctctcgtccgcccccagctgcaggaagaggcgcacaattgcatcgtccaaggcatattttgagggatccaaatcctcaacagattttttgaggggggtatccgagggcttgcagttcccgactatgacgctgtctctagtgccatcaccgtttccagttaggtcgtaccagtatgttaagttatacccacaggcattgtcttgggcgtagtaggtgaaaacttttccatagggggcgtagccgttgaggaaatagtggacgattgcgcgacttaccgcgggcctgaaagtataatagtcgtctgtactctcgattttaaacttattaattgaaccattaaccattatatcctttgagattttcgtgtatgcaacgcggatcaggtatacatctaggggaaaactgagaaactccgtttgatctggtccttcgcttagggttatattattagatgtgtcaatcaaaccaggagtatagattattcctgtccatacatcaacgtaccaggggatggcctttccggggaggtagtagctgaagtgcatctcggtgtcatctaaggattccaagtcgtgagtctcctcaattggaatgtaaaatctgctcccagtaaccgtgggattgtatgatattcttatccacgagtaggggtacccatagagtatccttttgttgttccattcacgatgataatcttgccctgcatataaaactgaatcaaggccgtattcggcatcgagcatgataacgaggttgaaattctttctggagaggctttccagggtagtgtaccttagcagtcccctcattatggttgaattgctaatataaaggttgtttcctatgatgctcgtgttttcatagattaaattaaggacagtgccgttggagtagtaaaccctaacttcatgtaccccactaaaggtaaggttcatctcaatccccgttacattacccgggacgaagatggagttaagatagtagataccagtacctttgctagttacatcgtagagttttattaacccagggtcatcggcgtgcggcgttgaggttacgtaacccagatcaacccagctaccgcttcccaggccaacttcacgagagtcgtcataacgcgagactttcaaatacactgtattagtttctggccatattgaggataggggtatcgtaaggttaccttcggagttcttccaagtcttgttgttgaatttgattacatcaaaaacgttcccgtcttgtctagtgtacacgctgagtactccataccttggcctagtatcggagggaaggtctatatcaaatttaatatcaatgttattgttattgtaataatcctcatctctacaggagtagcctggtataatttcagcataaacaccccttatgattctcgctgttctggtatatgccttagaagacgagataacccagtgcccccctaaccaactccgcttccatttccgagttatttccacatagactcccgagttaagaacgatacccagctggtccccactggggtattcaaacaaaatcttagtcactttatatttcctcgtattgccaacactactcaagtatgaaagatatagctttaaactatacccatctttagatagagtaacaccccctttgtatgatacactccacccacctaaatcgacgtttaagtccacagtaccaccactgtaccttcccataacccggaatcttccagaagaaacttgagttggtttgcctgaaggcgtctggtactgaatggataaagaattaacggatagggtataaaaattgtaatcatgtccacccggccggggattggtgcaataccctcctccagcaagaaccctctggattccgacgagctttctctgctctgtcaggaccttcgtcagataagccttcgcaacataacccctagggctctggttgaagagataaccactgaccatcatcgtagccgttccgacgtcactggcattctcataggagttgtcaaacgtgaggaagggatccgtgtagttgttgattatgagctgatatttgtagcccccagctagatccctcaatatttcaccgagtattaaacttgcgtatcctttaaactcaggatgcttgactgaaagtgcccaatatgtggccgctatctggaggggaggcatctttggatcaacgtacgttagatttagggttccattggaaatccacgtattgataagcgagggagagacgagctggtctaggggaacagtcctcaatgtttggaggattccttctgcaagctgtttgttttcggcacgcaactgagtagcgtaaatactagaagagttctccgttactgcaactacgctaaccaaaacgagagaaaccagtacaagggaaagaatagcgtcaagagtgaacacaaaaccccttctcatatcactcaccccatacccagagttttaaaatggccacacgataaatcggctgcataacggcaccaatattaccaacgtcctcaatcttgacctgtgggaacgtgttatgatacacccacagtgagaacgttataccctcacccatcttagatgaggatggtacaaagcacttcatgggaacgataaggctatttcctgtcctctgcactacacagtcttgaggggcttcagtatagttgaacttcgggataagggtcaagagtccatagtacaatttagagttatttctaacaacgaccatcacagtatacccaacgtattccccggtactgaacgaggagataagggtgaaattaccgtcggaatccggaacagtcacattgagtgccccgagaggcatccatgaaaacattccctcataaagcaaaacttttttattgcccgcaacggtatagctctggttgtacgtcctatatgacacccgaacagtcctctccgaatgctggatccacgttgagttttccatagattgttcaattaagttttcattgctcacaaaaaatccgcccaccatagagatattaacccaagcagatttttctggagaaaactcataagttacgttaacgctagtaacgttaatactaacggagctaccctccccagaggctctacattcgggatactggaattccggagcggggggcataagcagggaggggagatcgaagtcaaatgcctcgtccttatcagggggaagagataacgagcctgtgccgttaatctggatgtcaaagttccagttaacggacatcatttcaaattctatttgataaaaccatccttcccaaaaatcatcccagtaataatacccaaggagaatctcgttgttataaatcaatacgtctctgtgcttccatcttcctgtcattaagttgtacctgtatccatcaaaagaatagctactctggcttgtcccagtcccattcattgcgtaccatgtgtcgcctttggcatagagccatccatttacgtaaaagggattcccagactcaagcccgataggaggctgagtatcgtagtactcgtaaacatttcccttaactatcaaagtcccccttacagtgagtttgcccgaaacatataggttgccataaacgataagtttactgttccaatctatggtaagatctccatcaacatataagttaccataaacaaccaatcttctgcccgaatcaattgtcaagtcgccattaacgtgaagatctctgtggaatatattagttcccgctaccttcatatccccattgataaacgcgtccccgtatacatcaacagtagtactaggattctgggaaaagtccccattaacgtagagctcgtcttcaacctttaagttcccagatggcaaactcaatgagccattgacaaaggccgttcctcccacgtagactctaagacttgactgtccattaaagtttccatttacaaaaaggtttcccccaacccacagcttcccactgtttccaacagtggcatcgccaccgacatagaggtcattagaaacgttgacgttgccgttgctctgaacatccagactaccgagagagtaaagactctcattaaccgttaagtatccgcttgatcgaacagtcgtatcaccatacacataaaggtttttaccaaaagttgcatgtccatttgatctaatatcaagagctccgccaatataggagtcatcttttatattggtagcataaccactgcttcctatatgggcatctcccgtaacgtagatagcagaagtcgatagccatccagccgaaccaacatcgagactgccattaacagccaaatattggcttatattaaccttaaagttgtccccaatcttagtatttccatatacacacacgtaatatggattgtaataactaccaaacgaaactcccctatgagtaaaatcaaactccccttgtgaacactgggaagcgtttatcaggacaggtgtgtccgagtggtttccaagctcacccacgctacatgccgtcagtagttcagcacctgaaacaggggatattgtatagttataaactagttggacagattgatttggcatggataccatcaacttaaaattatatccgttggagagatcccacagagcgctctgaagagagggatttccagctttcaccccctcaacaagggccattacttttgagtaatccaaattgttacccctaagcgaccttaaaccaggaacaattaccgaagctatgttcttctcccagtcttcaggttccccaggacttctcgttaaaacatccagcatgttctcggctatgttcgccctctcgtaccagccaacgagggaagttatctcgttcttaaggttctcagaggtcgctgaaacagtcccaaccaccattattattatgacgagtgacagcatcgcatccagggaaaaaatctgtcccctcctcacgggaactccccccactcgtcgttcacgctcacgttcagcacaacttcaataccgccgtagtacagcttaccgtccctctcgccgaagcccctgatttccttcagggactcaaccatggcctcgccgacggcgcccacgagttctttatctaccgttgagttactctcgccgagggttttaaacttaaccaagactgtcatactgtcttccgtttcattctggactttcagaccctcgaacacaaaccttccagataggtaatcatagtaggcggtgatattatcattaaggcagtcaaactcagtcctgttctcggctatcactccaacgctgacgtacgatgcgacgtccgaggcgaccgacctaattcccgccaggacagaaacttcggagttgttctgcatataggaagggagaataacgactacccccatgaagataacggccattatgaacagcatttcaagggccgtctggcccctacttcttaacgcggacatcaatggcacccgccgtttggttgtaggtggcgtaaacccagagatctggggacgtcgagttcagcgtaacattggtagtcgccacgaggggaacggggaggttctgatagaccctgtagtgttcaccccctattaccgccgagacatctaggcgtccagatgtggagttgagcacgacggttattttatcgccagccctaaggttcatcggcacagtttttttaacggaaaagccaggcccggaagagtaaactttagtcactgtgtccctgagatcaatcgcaaagaccttgagctttgacgtcttgtccgtgagctccgcactctcgacctggcgggacgcaagggaaactaggctgagcacggtgagggtaatcagggtgaaggcaaagatgacgtcaatgctcagctgtccgcgtcccatcacgactcacctgggttgatgtagatgtgtatctccccagcggtctcgttataggtccacatctcgtcttgatgcggattccaccccggagtccactccacaactatcttcaggtaggaaggcaacgtctcggggggaattacaagaccatagacagttgtggaggtgctcgacccatcaagcttaatttgagtgctgttcccaaaggtggagttccaaacggtagagttcccgaggaggttgacggcgtataaggatctgctccagaatacgctcttattgtcgccactcagagcagcgtttgttgttcccgttctgtttatgatcgtaatataaaccccatagtcacttccatagggcccataggtgatgaatattccaggatcagtaacgctccacgctctctcaagataggaggggttcctaagataaaccagcttgacgtaggatgtagccttggatcccgggccctgggcatagacctggctgatcgtgttcgagatcgtatttgcaaggtttttctcctcaagggccgtctggattttgagagtttcgaccgatggagtaccctcgctaaacgacgtgttccgtatggagtacaggagtagtatcgtaaacagcccgaagattattatgaactcaagcgatatctgaccccttctcacagatgttcccctccgttcactacccaatacggcaccctctatttaatcattgccctccacttctacaacaaaagtaccagagcgctggttaaacgttttgacgccaaaataatcgtttccaaagagcttaaagcgatagttctcaggccttagcccatgccttctcacgagttcggccatctcatctatgaagagctgagtcagttcgtagtagctgagatccattctatccctaatccaccatctaaggaaaagaaccagcggagcaattgacagaactgggagtatgacgagagacccggataacaccaaaaggcctgttgagaccgcaatgacagcaccatatagggcataggcagttttttcggccttcttcaaagtctttaccttcttcactttagcctcccagatgtcaagaagggcaggattgtagaagtcaaaggccgtgtgtctcttccctttcgctattctctgcctgattagatcatcccagtcatccgtgtagtatatgacttccccacgaagcctggcccgctcggcatctatggaggagattatcctgatgatatcctccgcactctcgtgggctatgtgggaatagacggacttctcatcgaggtcgagggcagcttcaacagagtcctttactatgctcatcgggatacctcccgatactctgcaaatccctcaggatcgtctgagcctgttgcctccaaacttgggtatacatcatcaaagtcgggaaggccagtgagcagttccttcttctttgtttcggcctcgctctttgcctgcatgaaagaccttgcgtattccttagccgtcctgacgatgttctcaatgctcttgctctcgtatattccactcaagagcgtgacgacctcgacgtccctttcccgaggatccgggtagaaccccctgaatatctgcttgccccttattttcgatgtgagataatccagtgcctcaaagatatcgctggccttcaaaacctctggcggtccgtggatggcgacaagaccgtagagggcagattcaatgttcgcatccaggtagagcccctcgctttcaaaggacttgatgatgagcctggagaggttctttaccttggaagcgtctgctttggcataacctacggttgcaaagctaccaaatgccttcagaacgaacttcaggtcgctcgcgtcgagggtctgctcaccgggcacgtccacgagagcaagcagggaggctattctctcgacaatggtgtagtttatcttctcgtaggcactgcttatatcgtccccgctctccttgagcttgttgttgtcaatggctatgattgagtccgctaccttggagagcttgtctatcgttatagccgcgtttattgttggccttatcccttcctcctttagtgggagcgccccgatggcaacgacgagagagtccgggtattcctccttgagggcctctgccaaaaccggagttccccctgcaccagtcccgccgccgaagccgaaggtaaggaaaaagatgtccacgtcttcgtagccaacgatggaacctatcttcctcatcaccagcggcaggtcgcgcttcatggcctctcttccaagcagagggttggcattaactcccttgcccccagttatgctctcccctatgagtatcctcctgtcgtggggaatgtgcttgaggtattccaggtctcccctggatgtgttcagcgcgattgtatcaaagtcaaccagcgcaaacagatcagctatcttcgtcccgcactgtccaactcctattatcaaggccctcaagacgttatcacccctcgaaaagtattttgacttcatcaggagttattgcgccgtctccattgagatccttaacgctgaacaccacgtaggcaccgtgcagatacttgatcatcgttgggttaacgatcaggtcaattgccgggagaacttccttctcggccaagagcactagaacataaccgtcctgggttcttccagggattatggctactagattctcctttgagtacttttgaccatttatctcgacgtagttgcccgcaacagagatattgacataggggttgtagacgcttgtgtcaaagctaccgaatggaccaacaaagatgtgattgcccgtgagttctctgcccatgtcgccctctttgaggagcggtacgccgccaaaggactcaattattccgctgagtttctccgccgcggaggcataatccgggctgtaatgaatgtaccaagttccgctgcccagcttgctaaccacggacgagataaggacaggcggcaggaagcccgactccatggcaaacttgaatgccaaagccttttctactatcctgttgctgttctttatcccctggagcaacgtactcgccatatcaaagtagttcaggtcatatccatgctctatgagcagttcgagcgctctaacagtgtactcaatcgacggagaagccgttgaaacctggccgaggatgtttacgctcttcttatagtgaccccaaaagccatcctcaagcctctgagcgaggagccagtcgaggtggggcttaagtttggcctcgtccaccgtgtctgaaagagcctcaaggactagcagggtagtcggtacgtcaggggtactcatgatggtgaacggagtgaacggatagtttatgagcagtccccagccgccgtcagtaagggagagcagccagctagcgggagcattaaccccagtaatgttgaatgccttgagtaagtttattcccatcgccgtctggaggggctgtggtattgagaagaaccccctccaagcgaactctgagtacctgtattcgtttatgaaatcaatgacggattgcctctcctcgggaggcatatcggaatacctggcgaggattaaggcagtatagtaaaagtcctgggtgagcataccctctgtctcaacctcttccatagcggacttcagatgattttctgcccatgccgttgccttgtcaattgcaacctgaggcttgggagtgcaaaggctcaaaaattcgagggcataataggttggcttggcccgggaatcttctccgggggtgtaaccccagccaccatcagggttttgtagcgagagaatttcatcacacatctgggaaactgtcggatattcctcactggagatgacgtctgagagagaagcaaaggccatgaccgcaaaggaggtaggagtgacggaatccagctcagggagaggccaaattggctcggtgaggacgaaggtctcgttatgggagccgaggctctccagtatcaccagagaacgtggaagttctgaggtcatgttttcagtatacagcgtgagagcgtacgtgagcatggccctttcagtgggttttagctctcctgaaagcatggcgtaggcagtttcaataagagcagaaacgttggcgtagccgatatagtggtacgcaataagcttaagagcgaccatcttgggggatgtctcattaatggactccagataagagacggccttggatacagtcgaatcctcaatggtgtatccgtttgcacccaacccccatagcgcgacaaccgttaagtaaggctccgcaggggttttcgaaccgtatccccatccctgaccattgaaggagtctaaaaggtatctgacaccagatttaatttcaccggaaacgtcaatggtcttaagggggagatctttcacagcccccagggccgccagtgcgtatcccgtgtcgagggggttactgatttcattcgggtaataaccccacccaccatcggagttttgagcgtttttaaggtaatcaacaagctccagaatagagctttcaaccgtggactgattctcaacttttccatagagcgaagccatggccatcaagagcagagacgagtccctaacgttattgacgtaaccctgggcactagaaaggtagagcaccgactcgtccaacattgaggcgcttgcaacgggggcagtaataatcatcacagtaaggattacaagcagcaccctcgaatttgcacacataccttcaccacctaagggaaacgttgtcatgagaataaataaaagtttcccatagaattccagattaacaatgggaaatcaaaaggagaaatcaaaactcaatcactcaatctttaatgaaccttccgttcagacctcgtccctgcggatcaacgtcgtccctcattatgaggacgaccctgctcggctcgtactcgtcctcaatgtggtagccagggaggtgctttaccagctcctcggcgaaggcccttatctcctcgtgcctcggcatgttgtttatcgtgagcctgttccttgagaagcccacgaacatgtaggccttggcctcgacgaacatcgggttggcgagccttatgagcttggcgtagccttctggattgtgcatgttctcccccttgacgagggtcagccttatcacagtcctcgtctgggcgtcgctcataagcctgaggaactcctttatcctctcccagccgtcggggatcatggggacgttgacgcggttgtaggtctcaaggtctggggcggtaagcgagacgtagagctgggtcgggagcttatcttctctcttcatttcctcaagcctctcggggagggttccgttggtgactatgaatgttgtgaagcccctcttgtggaactcctcgacgagatcacccatataggggtaaagcatcggctcgccagagaggcttatggccgcgtgcttcggattccaggcctcctcgaacttctcctttgggacgttagggttgcccttgtaacccacgaggagcttcctctgagcctttatgctctcctcaactatgaaagccggatcatcccagggctggggaagctcggttcccaggaagccttccatcgggcgccagcaaaagatgcagttgtgggtgcaccaggccaaaacgggcgtcatctggaggcagcggtggctcgctataccgtagaacttctgcttgtagcagaagcggccctttgtaaggctctccttgagccagtggcagagcttgacgccgctgtggtggcccactatcgcgtagtgctgttttttgaacagctcggctatctcctcgggcatgttgggggttgatacgaaagttatcgccattagcctcacctaattcctctctctaggttcaactcaggggaggtttttaaaaatgtgatgggtcagaggtggccaattgagagattaatttttgcccaatattttatcgtcgaaaaatacttcgtcaatttgcgaaaggtttaaaagcagtcccttccttcttcccccatgttcgagagaataaagccaactggagagctgaaagcaagggagattaaaattgagtttttcgaggacgatgccagcgacgccgaaaggccgaaggtaaaactccttcacgagataaagcgctactccttggcataagcgtttatcagcacgatgtcctcaaagaagatgtgcctcttagcaacaacctcagcggttagtcccgctttttccagccttttaagagtctcttccacccccgttattgaactctggactatctgaaccactccacccggctttaggtaacagggaacctcatctatgaacctgtcgaggacttctctgccagtttctccaccaaccagggcaaggtctatcggttcttcaggttcgccgggcagatagggggcgttgaacgttataacgtcgaactcacccgaaacgttctcaaataggtcgctgagtcggaattcaacgttgattataccgtttatcctcgcgttttctctggccagttcaacagctaggggattaatatcaaccccaaggacccagcgggctttcctcgccaggaggagggcgattattcccgttcccgtgcccatatcaagggctatgtcccctactttgacggcgaggttttcagcgagcaggaaggtgtcctcagcgggctcgtacacctggggatgaagctttatcctgaggccttgatattctaggaacatagtgaaaaaaagaagggagaagttaaagcctttccgccggcttgtaaatgcgcttctcaaaggtgacgaaatctgcccaggaaacgtgggcgagaaggcccgcctcaaggttgacgctcctcgggctgaagacgttctcatcgtaggtgtagtccacaacttcaccgacgaagaaagtgtggtcaccgtagtccctcgcatcaacgaccctgcactcaaggttggcagcggcttcctttatgcttggaacagagaccttttttgatggaaccagtgtgatactcatttccttcagctttgaggggccgcttttagttcccgcgatccacacgtcatcgagcatcttcagggtcggcacgctgatcacgaactccccgtactttttgataagcccgtgagtgtaccttcttggggacacagcaacgcccaccatgaagggccggtgagagagcaccgtaacccagtccgccgccataacgttggcttcctcgtcctttccagagatcacaaggtaggtgcgcatggggtagagcagacggtacattggaatgcacctcctttagttcatatctgttatactcctgcctcaaacttaaaacttaatctcacacatgcagtcaaaattattcggaagtaatttgaaattatgaacaatttttgccaaagttcaggtcagaataatgaattttctggattgatattgacaatagtcccaaaagaaaaacaaaaagcttattagatgttcttaaatgtattttgttgcacactttagaacggaggtgtctatagatgaagaaatcaattgccctggtgctgtctatagtgttgctggcggcgctctttgcagtccctgcaagtgccggagagcagaatacaataagggttatagtcagcgtcgacaaggccaagttcaacccgcacgaagttctcgggataggggggcacatagtctaccagttcaagctgattccagcggtcgtcgttgacgtgccggcgaacgccgtcggaaagctcaagaagatgcccggtgttgagaaggtcgagttcgaccaccaggcggttctccttgggaagccgtcatggctaggaggcggaagcacccagccagcacagaccatcccctggggaatcgagcgcgttaaggccccgagcgtgtggagcataaccgacggctccgttagcgtcatccaggttgccgttcttgacactggcgtcgactacgaccaccccgacctggctgccaacatagcctggtgcgtcagcacgcttcgcggtaaggtctcaacgaagctcagggactgtgcggaccagaacggccatggaacccacgttatcggaacaatcgcggccctcaacaacgacataggtgttgttggcgtcgcccctggagtccagatctactcggtaagggttctcgatgcgaggggaagcggctcctacagcgacatagccattggaattgagcaggccatcctcggtccggacggggttgccgacaaggacggagatggaataatcgccggcgacccggacgacgatgcagccgaggtcataagcatgtcccttggaggccctgccgacgacagctacctctacgatatgataatccaggcctacaacgctggcatagtcatcgttgctgccagcggtaacgagggtgccccaagcccaagctacccggctgcctatccggaggttattgcggttggcgcgattgacagcaacgacaacatcgcgagctttagcaaccgccagccagaggtaagcgctccgggcgttgacatactcagcacctacccggacgacagctacgagaccctcatgggaaccagcatggccactccgcacgtgagcggtgtggttgcactcattcaggcggcatactaccagaagtacggaaagattctacctgttggaacctttgacgacataagcaagaacaccgtgaggggaattctccacataaccgctgatgaccttggtccgacaggatgggacgccgactacggttacggtgttgtgagggctgcccttgccgtccaggccgccctgggctgatttaaaacactttttacccttttctccatttactttccttccaaaaagagataaagaaaacaagaaagaagacgctcaatcaatgctcaagttgagcttcttcgcctgctccagcacgtactctcttatctccttcgcctttggaagctccgccactatcttgccgttctctatgagcggcttgaggagcggctcgacctttgcaccgcagacgggacatttctcaagcttcttctccacgggaacgcggtggtagtggccgttctcgcagcggtagatctgcttcctgccgctgagcttgccgcgcttcgttatcggctttccttcgacttccacgatatcaagggagaagtcaaccggcttagcgctcgctattgcactgcccacaccaaaggcatcggccacatccgccagctccttcaggctttcctcgttcagtcctccgctgaggaatattttgacgtggttgtacccccttaaatctagctcccagcgaacctcctcgacgatctttctgaagttgccgcgtctagagctgggtgtgtcaagtcttactgcgttgagcctatctccaagggcctctgccgccattaaggcctcaaacttctcgtcgcatagggtatccacaagtgccgtcctcgggacttcggggggcataacctcgtcgtagtacttccaggccttcacctggtcgccgattgttaagatcagcgcatggggcatcgtgccaacgggcttttcgcctatcatctcagctcctaggacacctgagacgccatcacagccaccaatgaatgcggagcggtctatcattggagctatcgccgggtgcatgtgccttatcccgaaggagtagacgggcttaaacttggcagctatcttgatcctgagggcggcggtggctatgccgctcgcttgactgagcatgccgagcaaagccgtctcgtagatgccaaactcgtcgtagtagccctctatctgcagaaccggttcgtaggggtggaatatcgttccttcaggcatcgcatagacgttcacagggagcccctcgaggagcttcgcaacctcttctatccccgctaaaacaccccacttccagccgtgaggaaggcttgtggtgcccacgtctgcgaagaccctcttctttatccctttctcacggaggattttttgggtgcggatgaagtagacgtcggtcgttttgcccgcctttatatcatcctcatgggcaatgtagaagtcgcgcatggttctcaccttggaaaatagttaagcccctcaatataagggtttttggtctccacagaccttatgagggacgagttcgtaataacccgtggggattcctatgagagatcctatctccaaactcgtatccctcactggaaagagggcccttatcacgggagcggcctctgggatagggaaggcaacagcactccgcttcgccgaggcaggggctgcacttgagctggttgacatagacgagctgggcctcaaaggcgtcaagaaggaggccgaagagttcggcgtcgaggtgaatacccaccgcgttgacatctcgcgtaaggtcgagatcgatgccctctggaaggcccttgaggggagagaacccaacatcctcgtcaacaacgcgggcgtctactggttcaaggactttaccgaagttaatgaggacttctatgagagggtgatgaacatcaacctccactccgtcttctggacgtgccagcacttcgtgagggcaaggaaagatgaaggcggcgttatcgtcaacgtgagttcaatcgaggcattcctgcccttcgcgaggggtctcgtccactacgacgttgcgaagctcggggtcgtcgccctcacgagggccatagccagggagtacggaaagaaaataagggccaacgtcgtcgtcccagggggtatagagacggagggtgtaaagagactcaaaaaggaggcgataatgaagttcgacaccgaaaagattggcatatccttccactttaacgcacgccttccgatgggccgcttcggagaacccgacgaggttgcaagggtaatcctcttcctcgctagcgatttagcaagctacgtgaacggggctatagttccggtggacgggggctttctgtccacatagagagcacacagccaattatgacacaccacaactcagtgtcatcgcttcccatcgtttctccgtctaaggatggcgaccgccaccaacgcggcaatagcagcaagaccgctcttgataactgcccccagcggaatgccactccttggttttttatacagcgccaaaagcatctcccgagttaagtcgctgaactgaccgttcttaaaggcgtacacgctatcatcgccgaacactaaccactctccacagcaaaacgccactttatactcacgccctttgagagaacccggcagctcaacgcccttccccgatgtgaggttaaagacgtgggttagattaaaaaagagaaccgaacttccgccggagaccacaagagggaatccaggttcgactttcaatcctgatagagtccaccagggccaggtcgctccgaaactgccgtaatccctcacgtaagctatcctgacaaacgaatcgttgacgctaagggagtttaccggatcgagcgagaggttcctgagctcgaacagctcaagccttaggctggccccctcggaattcccgaaaatcggggtggtcgataggatgtagcccttattggaggtcactaacgcgtggagttcagtgtagtcgttttcgtcttcaaaagtgcgaattttggcgaagtccgtgccgttgaacacccagactgtcacagaggaatcgttttgagattctctaaagagtatcgggctcccgatccagaaatcgggtagataaattcccgcgttttctggagtcctgttttctagcctcctattgtaagtcaacaccagcgacgaattctctatggtgaacattctaacccatccaccgtcagccgagactaccaggaaggttctgttaccatcgacggctatttcagttgagtaccagcctgtttcgctaattttgcgcttcgtgagaacattgccattctcatcaaccagatagatccaggaatcagcgaggaccaaccaggcgttgagctggggcacccatctctcaagccccgtgacgttgaggggtatgagggttccatccttcaggaggtagtccctgaactcgtaagaacactccccgtgcgcgaggtcgtcgtttggtccagcccccaggaaggtaatgtagtactccctgccgttccaggtgatatcaaggtcgttgtcggtgcacgcacttcccccacggaaggtgtgtacgagctcaaacttgccgtggcggtagagatagagcttcactgttacggtgtcccccttctgaaggagccagtattttccattccagtgcctcacgatgtactccctgccgaaggggagcttctcggcctcgaaggagcggccgtcgtaaaccacgccgtagaacccgtttgaggtttcgttgaggagcaggaacgcaattttatcgcctgcagggtaggcgttcacgatttttaagctactttcaatgcccagtgccggagcggggctcacgatcagaaaaataaagacaaaagcgagggcagcgcaggtcaccaatcggggcatttctccctcaccaggttaacattcctcaggttggtaccatagtagtaagctctattgggccatagttcgcttgtatggatatacaccccatcaagccatcccctccaatagtccaaacctctgatccggggttttattgtgtaatttgagttattaaagagctcccactgctctttatcatccctgacgagtacaggaatctcgacgagataggggagttcagggtttacctcttgttccagccattgtgccagctgcttgccgtcgttgtagccattatcgtaggactgacctcctccccgccgtgaatggcgagggttccaacgaattaacccctcgctaaaggcgggaaggtttacgggcacattacctactcccgttaccggtttcggttcagcccgagggcacggtcttgtgcccattacccctaccgcaaagcggtttggggttatgatttagaggccaaaccccttggtttttgactgtctcaaagggcagttttttgaaggacgcttgtcaacgtcctaaccaccccaaagcggagtggtaaccgctcatcggcatctgcccatactctccatccctaccaggggcatggaggactatcatgtagtcaaacccgagatccctcagcttagaggtcggcatgttggtatcaaagaccgcgtagctcccgtactgcggcttgaaataccacagcacatacgtcgtcatgataccactccacttagtttttaccttagatacttataaattttttggatttagcatttaaataatgtgataaaatccatgtttcaataataaactccaatgctatgtatcaagacacaacagaataagggggaaagcgttgattacagtctgaaaggaacctcagccccttctcctttctctatcttgtggagctcccgcctgtatgcttcaagcggcctatcttcaaccttaaggtagccggcgaaggtcttcggccttttttccagctcgtcgaagaactcaggatagcgcttgtcgcgaactatgtggtggtcgaggattacctccgcgttcgtctccaggattatctcgttgaggttcttaacgccggtttcccacgatcccgttgctctcgggccgagataagttgggggtccgccggttatgagcaggtcggggttcttttcgattatccacttgacagatctcctgttcagcagttgaatatcactggcgtggattacccttttggagccatcgtcgatgagaaccatcacgacgaagccgagcttacttccctcgcttccatgcggtactgccggtgaaaactcgattgtaacgccgccaaggtcgaagcttctcccgtccgcgtactcgatcttcttcgctatcgcctctgcgttcttgaggaatgcccatgccctctttctctggctgaagttgatgttttcggtagggtgtttgatgaagagaatctttcccgcatagatttccctcgcgtaatcctcgctggagctctcgtagaggccttcaaagaagggggtatgatggtcgtagtggtagtgggagatagtcacgatgtcggccttcctcgcgtagccttgcagtttcttcctcatctgctggagagttttaagctcgacttccgcaggagggaggccgtagcgcttcgggccgagtgctacacccggatcaatcagtatcctcagccccccagcttcaacgaaggtcgccaggctcctaaccccaaggctttcagatgcgagtgggatgaccctcattttatcacccattagccatgttgatgagctgattaataatcctgactactaactttcgggtgtacaaggcataaatttaaataacatccatgtatatcatgcggatgtcatgggtgtgtataaagcggctgtggttcctgtggtaatattattcttcataactggactactcggccacaatactggccgacttagcgatattcctgttattggacccccctgggaccagttaactaccaaaatgatagacagtatctacgatgccctcggaatttacctcggtgttgttggagctttagataagagcatttcggatcatgtccccgttattggctactatcggggggatgattatctatcccagaagcttaacggtacatgtgcgtatccatactggagttgcactggcttcccccgtgaagaactacccgagatacttcagtcagaagtcgttcaaaactttgtaacttccgtcattgcggatgctgagaaaagggtcgaggaagcaaatgtcccaagagaagattacctcctttaccttagaggcactgcatatgaggcaatggtagagcgagcaaagtactgcgcaggtggaccaacgaaagatccccgctatgttgtctctcactgtggagactgcgatgactggcatgtaatagcctacgcaataatctcccggataaatgaaaagcacgatataaacgcaaggtatttcctcacaatgactatggaccacgcgtttctgacggtttattatccggacgaaggcatgtgggagatatacgattggttccctccgataggtcagctttatagtgagaactcttcaagctacatagagcttaatggacattgcccgtatctatatcaacaagataaatgcgtagtaaaaattagaaggtttgggaaatattatgatctccaagatttttatgcccatgagggagaaggaaatataggctatatctacgagttccccaacttgaggtacgtctctctggatgatctcctggccatagaaggagaccccgtggtaaagcatttaagcggtaaccattaggtaattccgaccgatgaggagtgtcatccctcctgatgtcgagatgatgacattatccccacctgaggtgttcccatgctcgggctgttcaggaaaaagaaggaaaaaacggggccgttcgtttatctgagcgagcctaccctgctttacaacaccaaaacggagaaggccatagttgggataatccgtgagaagctcaacaccgataatatactcgttccctcaaagtacggaatgagagacaccagcaaatacatccccaaggcgagctacttcgtagcgatagctcccctcgggaagttcacttctctagtcggaagggaagtcaggatagcccttgagaacggcgtcaaagtttacaccctcctgattgcacgggaaggggacgagcttgtttacctgtgggttgaaggtgttccagaggacgtcgagtggctttcacctgaagagaccatggagttcaccaaaagcttcctgaacagcgagttcatggatattctcaaacatggcctcgtttttggctcaagaaaaagagaatggtaaagaaaaggctcaggcgtttgcttttctcttcgcctgtatgtattcgtggattgccttcgcagccttctttccatcgcccatagccaagatgacggtcgcctcgccccttatcgcatcgccacctgcgaagacacccggtatgctggtcatgaggttctcatccacaacgagcgttccgttggtgttcgtcttgaggccgggggtctcggtgatgatcctgttcggctcgaggccgattgctatgatgacagtgtccgcttcgagggttacatactcgccggtaccgactatctttctcttgcccctggcgtccctctcatcgaggggtctcatcttctcgaacttcacagccttgactcttccgttctcgtcgcctatgaactcaaccggctggaggaagaactcgaacttaacgccctcctcctcggcgtgcttgatctcctctatacgagccgtcatgtcctcccttccgcggcggtaggctatggtaacctcgcttcccagcctgagggccgaacgggccgcgtccattgcggtgtttccggcgcctataactatcgtcttctttccaattgctatcggcgtgtcgtattctgggaactcgtaggccttcatgaggttgaccctcgtgaggaactcgttggccgagtaaatcctgtcgagcagtatccctggaacgttgagaagcttaggcgttcccgctccagtcccgatgaagacggcgtcgtactcctgaaggagttcctcaatggtaacagtcctcccaacaacgtggtccgtccttatctcgacaccaagacgcttgagcttggccagctcttgatcaagtatctccttcggaaggcggaactcaggaatgccataggcgaggactcctccgggcttatggagtgcctcgaagattgtaaccttgtatcccatcttcgcgagctctccagcggcggtgaggccagcggggccagcaccaacgacggccacctttccaagttctcccgtgcatctctcctcgaactcgcagagaagctcttcttctattccatgcttcctcgcataatccgcgacaaacctctcgagcttgccgatgttaatcgggtctccgaccttgcccatcacacagacgccctcacactggtcttcctgggggcagacccttccggttacagcgggtagggtattgtcgttccagattatcctcagagcttccctaacggccttgtcagggttgtcgcgatactcaacgagcttgcttatgaatcctggaatgttgatgtgaaccggacagcccttgatgcacggagcgtactccaccggacactggaggcacctttccgcctctttaactgccgatgcgaagtcgtagccgaggttgacctccacgaagctctttatcctctcttcaaccggaacttcaggggttgggaccctctccttgatgagcttccttctaacggccattcagatcacccccttctcgcggagcttggcgaggtatctttccctcgcgagggcctgctgctcggcaaagcgggagtctctccttatcacgtcgtcccagtcaaccttgtgggcatcgaacattggcccgtccctacaggcgaactttacctcgccgtcgtagagaatcctgcacgaaccgcacatcccggttccatccaccattatctgcctcaccgtcgttatcgtggggatgccgtagggcctggtgagttcggcgagcttcttgaggcttcccaactttccacccgcgaaaacgatgtcaaccttgtcctgctcgatcagctcctttaagacgtcaagatagtggcccttccttccaacgctcccgtcctcggtcgttatgtagaattcatcggcaaccggcttcgagaggaacttttcaggatagacgtggtctttggtctcgaagctgtgaatcgctatggtgtagttgcccgcctccttcatcgccttgagtgtggcatagcactcagcttgggcacagacggcatcggctgcaaaaacaacgttgccgtagtgtttgacttcaattggcttcccaagcggcccggcaacgctcagaagctcgtctccaacctgcttctcgtaccagagcttgaaggtcgtgacgccgtggcgccttatgaacatgcccacccttccagtgtccttatccgcatagtaaaccgacatcggcaccctttcgcccttctcgtccacgatgaggactataaactgtcccggcttccaagagcgggccacgtgcggcgcttcaacctccatgaagaagtctatcactgaaaggttctccttggccgttatcttatatcccacagtgcaccacctcgaacacgtgatcagatatgttcacctttagttttgaactcaaggtttatacgctttttttgaaccaaaggtttagaaccccaattttcaccagaaaagccctgaagaaccttcttcaaagaaaggagaaagctctatttcgacaggcaatactttttagttagttcagcaaactgtgagcaggtgatagtatggtgaacatcccgaagagtcacccacgctactggagcctctactaccgcgaaaagataatcgaaggaatggagaagggaatgactgccaaagctggactaatagcccacggacgtggagaggccttcgactacctgatcggtgagaggacgatagaaccagctgagagggccatgagagctgccgttgcgaagttccttctggctgagcatccagtaatctcagtgaacggaaacgttgctgccctcgttccaaaggaaacgatagagctggcaaaggccctcaacgcgaagcttgagataaacctcttctaccgcacggaggagagggttaggaccatagcagaggagcttaggaagtacgacccggagatagagatactcggcatcaacccgacgaagagaatccccggccttgagcacgagcgcgggaaggtcgatgaaaacggcatctggaaagccgacgttgttcttgtcccgctcgaagacggcgacaggacggaagcgcttgtgaggatgggcaagttcgtcgttaccgttgacctgaaccctctctcgcggagcgccaggatggccgacataacgatagtagacaacattgtaagggcttatccaagaatggtagagctcgcgagggagatgaaggactacagcagggaagaactcctcaagattgtcggggaatacgacaacggcaaaaccctcagcgacgtgctgctccacataagggacaggctaacgaggctggctgaggaggggatatggaggagaaaggagcttgagtgaagcctttccttttgttacctttttgttgtcagccttaaaaacaaagagaacccctcaagaagggataagggaagattaaaaaagattcactggcattcacgtaggtatttctcaaacacctcaacgtacttaaacgcgtcatctggaagtatcaggatcgccgttccgggatacctgtccctgaccttctcaagggcactgactacggcaccagagctgaggcctattaagatgccttccctcctagccacctggatggagccctcaatcgcttccctctgtgttacctcgacgacctcatcaatgccagcgtcaaaaaaccacttaggccttgtttcgagccgttttatgcccggaatcttctcgttcttagctggaaccaccccaatgactttcgtgtcgtagcgctccttgaagtactttgcaatacccgctatgtgtccagatgttccgactccagcgactattacgtcagggcttactcctatgctcctgagctgttcgtctatctccctcgcggtgtacctgtagtgggcctcaaagttgtcgtcgttctcgaactggttcaggttcactgccccagctttctccgcctcatccctgacgaattcaatcatttccctgtcaattacctcgaagtccgtcttcacgacctctgccccgaggactttcagaagggttactgtcgcgtctggagtcggcttcggcagataggccctgaattcaacgttaaaaatgttcgatatcgctgccattgctattccaacgtttccagaagttgcctcgaaaagccgcctggtgccgttaatgtccccgcgcttcagagccttcataacgaggttaaaaacagccctgtcctttatgctcctgctgaaggggttaaagaattccagcttggcaaaagacatcccccctctcgtccgaaagggaaagcctgagcaggggggtcggtttgtacttctcgaagagttctattgggctgttaaagacgttcatctggaaccaccgaacctgtttaaaatacttgcattataaatgttttgttttcgaccatattacacaataatgagtaagccgtggacattcatatggatgtggataaaccgcccattgaaatatagaagcgggggtatgccctctcaacgttagggtggttgctaaatttaaaaaagctgtcaaaactccttttcagttttttcaacgagctttctgaggccgttgattagttcattctcgtttgaggccttggagacgacgaggggtatcctttcacgttcagcaagcttgaccgctagctcgtctaacctcttgacgccgtgcagcactatcacagctggcttaagcccctgaacgcggactgctatcatggggcttctgcccgtggtcacctttgtaaacaccagtgccctctcagtagtccatccgtagagcttaagaaattcctcgctgctcatctcaaggatcgcccgtatgctgtcaaccaccgtgtaaccgtaaatctttctgtcgagaaggtcatggtttgccgcaacctcgcccttgacggcctcaacaacggctcttatcggaacggggaccgcaaactcgcgaatatcgagaatagcatccgtcggaagttcgccctcgatggtcttgctgaaggctcttatgacgttcccgccccttttctcatcaatttcaatgagggcctcaacgaactttcttatcgttgaagcaccgggactttttctcctcccaccctcataatcgctgatgacggaggatgagactccaaggtaatccgcaagctcggtctggcttatcccaaatatctcgcgccactttctcatggtcttaccggggtcagaagaaagtgttatctctcccgcgatcctcttggcaagggcttccttttctttctccagcataatcgttgctaactctaaaatattataagtctttcggcaattgcagaaagaggttagtgcccagttgatacaacaagagggaaagataaaccattttgggcaataccaacacagaatttaatgtttagcctgcaactaatctcaaatctgggcttacctttaaacttcgcgagaaagtttttagaaaaagcttgaccaaagaaactttgctgggcaaagtttcatcaaagtttgtgatgcttgactaaagggctgttttgataggattttccttattgaatgctgtcttgggttgtgaattctattcttattcgctcgctctttgtgagtttgctttttaattgacgccctacgggcgtcaaagtgagagaaactcctttttagctagcatgtttgaagaattcacttattttttagtttgtttatcgcgaaaatcctgtagaagtgcaattctaagaagaaccacgagccttgatcaaactcaatgggactgtcgtcccatgcgttgaagcagagcttcaacgtcgcgcaggaagcttttagacaaaagcttgaccaaaagtgcgcccttcttctcgaacttgctcttcgatgagtatatgcttgctcagaaagcaagttcgcttgggtttactcccaaaatctctcgttaattgtaatttcgaactttctttttagcgctcaaagagcgctatactgtgaggaaatcctgtaaatctagcaactcggtaagtaaacccactcaaaagccagctcattaaaaacgcatactactcttccgccatccttcaaggacgcttgaacgacagtgaaagcggcgctgaagcttttagaaaaagcttcaccaaaaagtttgaatgtcctcgagaattggcttgattcggattctattctcttagtaggtggccaaataaatgcgggttttcttctttttaacgctcttcgagcgttatatcgtgagtaaaccccttgaaaaccgctgattgatgactgagaatcactggaaaacaggaagctcaaaaggacattctacttttgatgaaactttgcccagcaaagtttctgtggtgggcccgcggggcttcgaaccccggacctcccgcttatcaggcgggcgctctgaccaggctgagccacgggcccgcgagaaaggttttggtgccccggccgggatttgaacccgggtcgcgggatcgagagtcccgcatgattgaccgggctacaccaccggggcgcgtccgagattagagcagagggagggtttataaacttttcggctctctgtgccccaggttgccgccgtacttgatgcactcttatgttctttaacttggtgttccgatttgaatattttaatttaactttactttatgccattttgtatttgttcgcctcagattcccaatattggcaataactgttactaaatgtcatgtattttaaaacaaataagtcagttcccgccgttgaaaattattaacaacgctatctcacataacttatgttaaggagtatgcaaaattttggatgttctcttttgaattttgattaatacacaatgttgcgcaagacttataattgaagacccaatacatccctggatgcccatatgggggcatccgagaatatggaggtgtcacaatgaagaagtttggagcggtagtgctggccctgttccttgttggtcttatggctggcagtgtccttgcagccccccagaagccggcagttcgcaatgtttcccagcagaagaactatggtcttctcacccctggactcttcaagaaagtccagagaatgagctgggatcaggaagttagcacgataataatgttcgacaatcaggccgacaaggagaaggccgttgaaatactggacttccttggagccaagatcaaatacaactaccacattatccccgccctcgcagtcaagataaaggttaaggatcttcttataatcgccggccttatggacaccggctactttggaaacgcacagctctcaggtgtccagttcatccaggaggactacgtggtcaaggtcgccgttgagaccgagggtctcgacgagtccgctgcccaggttatggccaccaacatgtggaacctcggctacgacggttccggaataaccatcggtatcatcgacaccggtattgacgcctcccaccccgatctccagggcaaggttatcggatgggttgacttcgtcaacggaaagacaactccctacgacgacaacggccacggaacccacgtcgcttcgatagccgccggaaccggtgcggcaagcaacggcaagtacaagggtatggccccaggcgccaagctcgttggcattaaggttctcaacggtcagggaagcggaagcatctcagacatcatcaacggtgttgactgggctgtccagaacaaggacaagtacggaataaaggtcattaacctctcccttggctcaagccagagctccgacggtaccgactccctcagccaggccgtcaacaacgcctgggacgccggacttgtcgtcgttgtggctgctggaaacagtgggccgaacaagtacacagtgggctcaccggcagcggccagcaaggtcatcaccgtcggtgcggttgacaagtacgacgtcataaccgacttctcaagccgcggcccaacagccgacaacaggctcaagccagaggtcgttgctccgggcaactggatcatcgctgcccgcgccagcggaaccagcatgggacagccgataaacgattactacaccgccgctccaggaacctcgatggccactccacacgtcgctggtatagccgcccttctcctccaggcccacccgagctggactcccgacaaggtcaagacggccctcatcgagaccgccgacatagtaaagcccgacgagatagccgacatcgcctacggtgcaggtagggtcaacgcctataaggctgcctactacgacaactatgcaaagctcaccttcactggatacgtctcaaacaagggaagccagagccaccagttcacgataagcggtgctggattcgtcacggcaaccctctactgggacaacagcggaagcgacctcgacctctacctctacgacccgaacggcaaccaggttgactactcctacaccgcctactacggcttcgaaaaggtcggctactacaacccgacagcaggaacctggacgataaaggtcgtcagctacagcggttcggcaaactaccaggttgacgtcgtcagcgacgggagcctcggccagcccagcggtggcggaagcgagccgagcccgagcccctcaccagagccgaccgttgacgagaagaccttcactggaacagtccacgactactatgataagagcgacacattcaccatgaccgtcaacagcggcgccaccaagatcaccggcgacctctacttcgacaccagctaccatgacctcgacctctacctctacgacccgaaccagaacctcgttgaccgctccgagagctccaacagctacgagcacgtcgagtacaacaacccagctccaggaacctggtacttcctcgtctacgcctacgatacctatggctacgcagactaccaactcgacgccaaggtttactacgggtgaagtcttttaaccctctcttcttttcttccttgaggtggttggaatgagaagggttctcgctactatactcattgtgggctttatgctctctctcatctcctcacccgttcttgtctcggctgaaatcaggccgtacgtttacgagcctacagttccggacacggcctttgctgttctcgccctctacaagacaggcgattacgacagagttctggaaggctgtgagtggctcatggccattaggacgccctttgactcctggggctacgcttacagcgaggagcacgaggccaaatacacagctatggcaataatggcactcatcagaggagagagcatagccaacggcaggtataaggatgttatcaacagtgctgcatattggctcatatacaagcagaaggccgacggctcctgggacgactaccttgatgccgctatggctgccatagccctgaaggagctcctgggaagcaaatacgttgaagagaacatgacgggacttgaagaccagctcagggaaggtttgaacagagcacttggctggcttcagattaatgaaccagaaaacgacgtggagagaatattccgtgacattgcgctggaggataaagatgaccttgagaagcttaatgttgagggtgagctgaaggcctacaaagcctttgcactcgcttacctcggagaaaaggtctcactggaagggaacttctcatcgccgatggccgttgcgatggcgctttacgcgacaggagatgaaaagtacagggaagagctcctcgatatggaacacttcggcttctggggaaggctccactaccgcgtcctcgacctgctcgacgtctcccagatcagcggctttgaagagctcagagaaattgcctgcccatacctcgaaaaaatccccgccactgaagagtggcagaaagcggtttatgcccactactttgtcctctgctcaaaagagccggagctccctgagaactacagctctctccttccctggcaggtagcggaagttgcgaggataaaggccctcctcggaaagccctacgacgatgcagttgagtaccttctctccagcccgaataacggaacctggaaggacttttacaacaccgcctacgtcgtctgggtgctcaagagcctcaacgtttcctacgactacgaaaagtctcttcactacctttcggctaatctcacgtggatgctgagcgaaaagaattcaaagacaggagatcctgtttactactcgataccgacttactacttctcgcaggcagccatagttttcagccagtttggaatgaaagatgagctgaacaagactctcgaagtcctgaaggaaagacagtatcccaacggagcttttgcttacacccaccagtcggtgacgggtataacaacaacagccagagttgtctggaaccttgaggtggcgggattgactgacactgaaatttacagaaagggtgtggctttcctgagagatatgctctacgcggaaattccagaggtaaagccggagatggccaataccactttccttagggtagatgaggggaaatacgtcggcaacaccacgggaagagtgaatccaactggacttgacgggtacgttgcgatttaccccccaaagaaccccctgatgataaaggcagttgccgtggagggcttcagggcagagagcccgtggaagaaccgcggacttcagcatgctctagtaatcgtcgcggtcggggtgcttctcgttgctatgtacggcgtagtctggtttgagaacaggaagaagagatgaaattctttctcttttttaaatttaaaataaatcagaaaggctcaggtagtcgagctctcctcgtcgtcgtagagctcctgaccgacggttatctcgtcctcgaagcccttcgagccctcaagggtctggatcctgaacatgtagctcttgtaccagttgtagctcggctttacctttatcggaaggagcctccaagccctcgtctcctcgacgtagccccagttgacgtactcattgaagttcctgatgatgtcggtaatgacgacgccgaactcgttgaggagaaccctctgtatctccctccacttgtcgagggagctctctcttctagttattccaaagtagccggcgcaacctggccccttgagggtcgctatgcctcttcccacgaaagccctgatggcttcaaccgtctcgggcgggtccgtgataaaggtgtcgaacttgtggagcgcgtagtcggggagcggcttcctgaggtcgaaggtgaatatctcgatgttctcgtagcctatctcgtcggcggccttctcgatgaacttcgtgagcctctcgtctatgtcgaggacggctatcctcttcgggagaccgctgagcatcaaagcgacgctcgtgaggtcatcgtccccgaggacaaagacctccttgttctcaaggtcgcccctgctgtgcataagggcaactctggcgacggtggtctctggagtgacgtaggcctggtcgaactggtgggccggctcgggcctgtccctggttatctccttgaactgctcgagaagctcggagaaggcgtctatctcaaccgtccttccctggcagtgggagcaggtgtagtcagccctggggccgattccatacttctccaccagctccttgcccttcctcgtgaggatcacctggttgttctcaaaggccacgtagccgagctcgtagagggcagtaacgacagcaacgacgagcggaagcggctcctcgctgaggtcaacgatcctccagacgtcaccgctggcctgaatggcgctcagaacattctctatcgtcctctcgtaaacgggaatggtcgtcttctccttgaccctctcaattatctccctcatatctcacacctccagaaggattcttggttcgtaaaagaaccttgtggaggccccttttaagggttttcccgccggcagattttaaagctcattcctgaatttaaccccatgctgaagccggttggagaggacttcgtgaaaaggtaccgcctagagtacaaccttgaggcgcttaaaagggttagaagagacatcggagagattgcccatactcgtttgagagccctgatagagtaccgcttgagcgggaaggacttcgaccgctctccgacgggagcaaaagtggccgtagcgttctcaggaggatctgacagcactgccacgctgaaggtgcttcgctgggccggttttgatgcgatccccataacggttaaactcccccagatgggagaaaagaccctcgaaaaagcccggaactatggggctgttttcatcgaaattccggaatatttggatatcatacggccccagattgaaaaaggtgccccgatctgcggcagatgtcacgctcttgtaatgagtgcagttgagggatatgccagaaaatccggaataaaaatcgttgcctccggggacatgctcagttccggcttgatctctatctaccaaaaagaggaccttgtaattctcaaccttccagcgtttctggcgctggacaaggctgaaattatcgagataattggtggggactacgatctcaaattcggctgtccccttctctgggagctgtttagaaaagctccttcaaccaagaggctttccatccagagggttctgagggagacgagggcaagggctttgaggcccgggatggccagggaactgatactcgacatcctctcccgctgagtacacattcctgtcccaaaaggtttaaatgtgtattctctgaggctcttcaggtggtgttaatggtcacgaaagaagaagttgagaaggtcgttaagtccatagttgatgagaagttcatccgctcaatcgatgtcgatgagaaggggaacgttacagtcacactggcgaaggacactcccgacattgacaacgtcctgataaagctccactccgaaattggaaagctggaaggagtcggcttaatcacagtaaaccgcgagagagaaatcaaggaagccgacgagaacgttcagctcactgaggaaatggtccttgagaagcttaaggaagtaatcgaccccgaaattgggcttgatgtcgtcaaccttgggctaatctatgaccttaaggtcaaccctgacaacacggtttacgtcaaaatgacgatgacgactccaggctgtccacttacaatgtggctccttcgcgccgttgaggacaagatactggagattcctggggttaaggacgctgaaatcgagctcaccttcgatccgccatggacgcccgacaggataagccccgagtacaagaagaagctgggtctcttttgacccatctggtctttttttgttcactgagagacttttttagggccgtttattctgttttacacccatttgagagtctccgcggttctctccgcctacgaaaactttatatcccctccagttcatttaaccacggtgatgtcccatggcttggaaggtaagtgttgatgtcgacacctgcattggagatgccatctgtgctagcctctgcccggacgtctttgagatgggcgacgacggcaaggcccacccggtagttgagaccaccgaccttgactgcgcccaggaggccgccgaggcctgcccggtcggcgctataaccctcgaagaggcctgaactggtttcttctgttcttctttccttgttgttataagggtcattgattaagtgcttcgtagggatggacttcttagaaatcttgaatcaaaagaatctctgatataagttaagaatcaagaagaaaagagagctcacttcttccactcggtataaccacatcttccacaggaccagcggtccttgtggttggccataaagactcccggcccgcagcgcgggcagaacttgttcttcctaacgaccttaccacccttgacttcgtagagcttccacttctggctggtcttcttcttacccttggccatctacaccacctcactcctcctgcttctggacaaggccgtccctaacgaggatgtactcgggctcgatgtagagcatcctctccctcgtctcgtaggccttggcgtagcccttgctgacgttgcttccgaagtagctcctgatgtactgaataacggtagtgttcgggtcgaggtcgagcatcgcgacgagcttacccttcaccgcttccctgctcggggtaggctcgccctcatgaaggacgtcgaagtatatctccttccttcccaggagcttgttctcccttatctcggtaaccttaatctccatcacgaaccacctccatactcgcgagtatcttggcacacctgcgcttgcattcgggtgttacctttataagcactaccccttcatcgggctggccgtacaggacgagcgttccgagtggggcgtacaagacggccgggatcgccgccaagtcctcctccccgctgaccaggatgtggacgtttctccccctttcagccagcccgaaggccttcctgacggtgtctaataaagctttcgttatagttccaggggggtttgttacggtcagaaaaacggcggtgtcctcaatctcgggggagtattcttttctcttcgtcttgagatcgtaaagggcaattattggtttgacgccgatcttgaggacgttctccgtgacgacatccccaacagtgacaacggggtgtttctcgagctcacccctaaccttaaggtagggttcaggaatcggccccctaaccagttcacctaggggcctcttcagctcgtccctcagttctctagtaagcctgaagaacattttcaccttaccctgatggcgtacttgccgggaaccttggcggcctctggtatgctctccctgagcttcttcgctatccttgactcgacatctaggactatcactaggtcgaaccagtcatcgctgaggtccctgctgccgcagacgggacagcggtcttcagtcgttatgtagtggcagtgcctgcaggccctctccttggccatattcactcccccttggattcttccttagcttttttcttctccttctcaatccactcgaactttccaaggccaggctggcgcatcgtcatgtttatcttgttctccctgattaccctgctcttgacgctcacgccgattatcctggccctcacgtagtcaccgagcttgagaaccctgttggtttctttgccaatgaactgcctgttcttctcgtcgaagactacgtagtcgtccatgagctggctgatgtggacgaggccgtccatcgggccgattcttatgaaagcaccgtagggcatcatctcaacgacttcgccctcgacgacctcctggttcctcggctcccagacgagaacgttgaatattgcctcgtgatatgtagcaccgtcgcccggaacgatgaccccctcgctgatttcctcaacgtcgaggatcgccagtacaacaccctcgtctctgtcgtatatgccctcgtaggtctccctgaggactatcttcgcggcttcctttgggtccatcgtgaacatcctgggtggaatcctcacgacgtccttaactttcaggagcttgtacatgcctcaacctccttcagaagggaaaaggagaaggaatcactccttcttgccgaacttctccttgtagagttcgatggccctgaggatctctttcttggcctcctcggcgttgccccagccctcgacggtggtggtctttccttgcagctccttgtacctctggaagaagtgggctatctcgtcgaggaaggcctttggaacgtcatctatgtccttccagtccttgaagtacgggtcctcaacgggaacggccagaaccttccagtccttgtcgccgctgtcctccatcttcattatgcctatcggcctcgcctcgacgatggtgagcggatataccggctcgcgcatgatgaccatgatgtcgaaggggtcgccgtcgtcgtaccaggtctgcgggatgataccgtagtcaaccgggtagaagaacgggctgtagaggaccctgtcgagcttcagaagacctgtcttcttgtcaagctcgtacttgttcctgctccccttcgggatctctataagggcgtaaacgacctctggaacctccggtccgggctcaagctcgtggaacgggttcatacctaaccacctctaaccttttcttagaactcctagctttgctttccggttctgcttttaaagttgttggtattcgtagactgtgtcgccgtccgctatcgaatagacgtcgccctcattactgccgtcgtggactatcggcctgtccacaagctcaaagaccctcttaaggtcttcgggagttttgagttcgacttttcgtgttccttcaggggatttgccttcaactacatacttcctcagtgaagcaagttcgtctttgggcttcttctctctctttgagtagacaaaaccgagcggtggaaccgcgaagagcagggccatggcgggaaacacctttctcgcagtggagtccttaacgctcgtcccaacgaagccaacgctgttttcagttatacttacattcctctcaactttctggtagtccttggtcgctccgtcaaggctcagcattcctgaagtgtcttttttcagctggatcttctgtgtgaatggttcacgtccatttatactgacagtaacagttagataaacttcgttctcggccctgtgcaggtcagtgccttcccgtatctttttgagctcttctccaagcgatgtcatgttaaacttcactggaaccgagaatgaaccggcgaagttccccgatgctatctcagtcgtcctgttgagcaggtaaactggcttcctgttcaccgagacgtagtagtttgagtgcatctctattttataactgcctgaagccccaggtgacgttgagtacctgtattctcctcttattacgtcggttatccccgagggataatacttcagcgaggtgccgttctggtaaacggtctcgttcgagaagagggcgtagtgcctcagtgaaccaccttcagaataggcggtagtgtaactaacatccctggttgacaccggcgttgcgtaagctataaccgagtaaacaccaaaaagaaccgccagtgagagtgaaattccaaggcccgcaatcagggccttctttttatttaccttcatctaaaccaactccaaatcttcaatcgtcgtctgaacaggcgacgctaacctctattccgttgctccttcccgggtagccgtctatagttgccccgtcgttgagtgagtaagtgccgcatgaggtgaactcctgctggttgccgttgttaacccttgtgaatatcgtcacgttgatgtgctcgcttcctccagccggaactaatactttccacttcatcttggttgcaggatgagagttcccgttctgtgaatttccgtttccattgccgtttccctggttagcggcccagaagctgtacgttcccgagctcgccgagacttccgagaggctgacgttgaactcagctggtatggtgtccctgaccgttaggttcaggtcgttgtcagttgggttagagacttctatctggaacgtccactcctggtaagtcttcaaaggtatgtcgctcgtgtttcccgagagcagagtcttcgttattctcggatcgtcgagaacggtaatctttacagggcaactctcaatcaccgcgccccctccgtcccaggtggcgtagatcgtgaccggaacgtagtactctccaggtgtggccgagctggccgcaacgtgtccaccgaaggtatgtgagtccccaggtgctatgtcaactggtgttcccgtaccgctctcaacgtccagatacattccagctggaacatagcaataagccggttccagagtaatgctcacgtactcgtttgttatgagctggttctccagcgtcattacgtcgaagtcctttccttccccattcagaactataactgacgcaatctcgccgtccgaacagttaaagcccacgtattcgtcctcgtgggagacgaccattacgctcgccgctctggacgatgaatattccctgaaattcccgctggagcccacgatgaggaaagcccccatcaggaaaacaagaactataattgctttcataacctaccatctcccgttagtttggataaaatcttcccctttcttattgagatcatctctcccgaaatcccggagatccagtaaaatgcaagcatcagtaccgagagtgggatcaggtacagcaccagcgggaagtacgggctgattgagtacgcccagtttatcaggctgtaaggcaacagagccgggtatgaccacacagatacttcttccctgtaaatccgggtgtccaccggaacggtcacggtgaggctgaggttctgggcctctccgcccccgagacggaagccggttgttttcagctcgaccctaccactgtcatccttgaagaagtagtagaacggataaaccgcgtggttctcaacgctgaggttcttctcaaaggttgttccgggtaagtgccaaccatcagtctgtcctccggccagggtcgaggagtacgtaaacgccagcgtcccccatgatgcaatgatgaccgccagaaaacccgagattatgaggactgagactatcccgtagagtgtttttccctgaattctgatgaacctccggcgttttgaccttcttctgcttctctcctttgagcttccagagaaagtgagcaggccgccgaggatcactattatcactatggcatagacgttcgtcagccttttcctgaggttcactatgaaatccccaccgcccctgatcaccaggggatggtttgaaatctggactacttttccagcaatatcaacatgctcaacctcgggatacgccccatcctgctggtctgtagcaacgttgtggtcccctttggttatgtactttccatcaacaattgcataaaccctatggactgtccagccatctcttctgtggaagactataatatccccaacctcagcattccttgaaagggggtttatgaagaagaggtcgcccttgttgatcgtgggcgtcatgctctcagaataggcataagatactagaatcggcctgtcaaggatgaaccccaccactgaggctacgagtatcataaaaattacggctgtaataatgccttcgagcagttttttcatccttaacatctcttcaagattaacaaagtgaggcaaaggcctcaaaaggaaatcacgggcttccgcattcgcctgcaacggcctcaaagctgagctggaactgatccatgccgaggcttgcgttggtgttgtcaaagatcataccaactggcacggggtctccgtagttgaccgtgaactcgaggttgtttgacggccctgctatcggactgtcgtagtctcctgcaaagagcaggacgttgtcgtggttgctctttatggtaacacagatcggatagtttgtctggttgttctcccaaaggtcgttgcttacctcgaacatttcctcaaagacgtaggtggtgttcgggctcatgcccgttccgccccagtcggggtggttcgggttatattcgcttatgtccacgtagagctttccagcgtcgtaggtcacgtagggctggagtgcggtcaggtcaataagttcgttgtcgtcggagacgacatcgaagctcgcagtcctgtcggcggagtagtacctaaagttagcacccgcgccgacggccaggagcattccaaccattaacaatgccaatccaaatagtttattcatctttcattcctccttcacggctgaccgcagtttccagctatctcagcgggctctgtgccgagcctgtaggcttcaatgtgtaccgctgcgttgttggttgtacctggtgcgtcgttcgcgacggtaaagtccataccgaccttaaccgcgtctccgttgttcacaacaaagcagacgtcgttcctcgccatgtcgctggcgtaaactgtctggccggttgtgctgtcgtggacgtcaaactcatgtccgtagaactggatcatggtgttgtcgctggttatccttacgactatcggcattccctcttcccataggtcgttgctgacttcaaacacttcatcgaagttgtactctgagttcgggctcaggcccattccatatcctgggtagttcgggttgttcgggcttatgtccacaactaggacgccgccatcgttaatgtacgcgtagggctgaattggagtcagatcgatgagctcgttgtcatcggtcacgatgttccaatgaacgctcctgtccgcgttgtagtccctgaagttagctccagcccccaaaacgaggccaaaggccaccaacaggccaaaaattcccaaagcaagattctttttcattttttcgcctcctatacggaggcactgtggtacggaagcaggttccgaaataccagaggtgtttcgacaccacatcggtgggcaacacagtgcccttggcggacgaccattacggtcgctccacaatcacatgggtccttcagatatatatgaagttggggattaccacatagtaatcagtcattacctacacattatcctctgatttttcagggttttttcgctcccttggtctggctatgaggtacgtcctcctgtgctgtatggcagatactaccagataagtcactgcagcaaagaggaggaggacgttgccgagccatagggccatgagggcaaagataactgagaggccagcatagaacacgctccagcttatgtcgttcttctggacaacttccatgtagagggtgacgttgtcaggaaccttgaggagggttatcctccctctgctgaaagtcacaattccctccctctcaagctttggcaggtgcgtctgcataaggctgacatagacgctcttcctgtgttttctgtcggtgttgccctccctctcggctatgtactccacaacatccctgagctcagcgctcccgtttttcctctggaggaactctatgaggagcatccgcctcttgttgccgagtatcatcctggaaggagctttattgctagccatagcttatcatctcaccctgtagtgctttctcttgttgtagaaaccactgttgtaaaatgcctccaccacacccctcgagacaagatccctcaagaccctctcaactcgctgacgggtgcattcaactcccatctcgttcaagaacctagtgataaaagcaacgcttaaggggccctttttcttcaacagggcaatgatctcgccttcaaggtttacatttccattcattctctcaccttcttgtaattacatgatttaaaaatgagacatcattctcaacaagttactaaaatcccacttaacacctattaggcgcacctccttaaaagggttcttaaaaagttcgatttgcgcgctttttagtcctgaaacagttttttgatggcaaattatgggaaaagtccaacagttgggctgcaagaataaacccctgcccattgggttctgcagttaaatatcccctgagcttctcccactgggagctaagaggacattacttaaactagaaaacaacaaaaacttcaggggatttccaactgcagggacatagtatagttattttccagaagggggattacaaaggagagtaaaacacggggttcgaagttcatctggagcccagttgaatggtagccccgcggggattcgaaccccggtcgcgggatccagagtcccgcatgcttggccgctacaccacggggctgtacccgttgatagctccgatggtggatttataaattttactccttctaaaggcggttaggtttttaagtttcttttcattttcccagatgtgggccggtggcctagtctggacggggcgtcggccttcggagccgaaggtcccgggttcaaatcccggccggcccgccatagaaactttgctgggcaaagtttcatcaaaaatcgaatgtccttttgagtgcccagcttttcagtgattctcaccataaattggaaatcctcaaggggtttgctcgcagtataacgcccgaaaggcgttaaaaataagaaaacccctattcatctgcaaatttgtcatgagaatcccaattctcagccaatatcacgaagacattcaagcttttggtgaagcttttttccaaaagcttcagcgccgctttcactagcgttcaagcgtccttaacggatggcggaagagtagtatgcgtttttaatgagctggcttttgagcgggtttacttatctagttgctagatttacaggatttcctcacagtatagcgctcaaagagcgctaaaaagaaaggtgaaatcgcaattaccaagagattttgagaacaaacccgcgcaaagctggagaagtttgagcagagattaaacttctccactttctttcaacgttagggggagaaaatatcaaaaatcacccctcaagaagctccttaaccgttcttctgacggcctcgtagctgttcatctttggtctccaaccggtggacttggccttgcctatgtcgaggagcatgagcttaacgtcgcccttccagccccttccgccatctaccccgccagtaaagcggaacttcgggctcaaccccatctcctcgctaactatttctgctatctccttcactgttatccagtcgtcgttgccaaggttatagacgtcgtaggtctcgccgcttttcttgaagtgttcgaagatgtggagcattccctcaacggtgtcgctcacgtggaggtagctcttcctctgagttccatctccaaggatttccagctcgttcgggttcttccgcagtttgttgatgaagtcgtatataacgccgtggttcgagcgcttgccgatgatgttcgccaggcggaagctcaaggccttaaagccgaatatgtgggcgtagccacttattatagcctcagccgcgagctttgcaccaccgtagacacttatcggcttaagagggccgtagctctcaggagttggaatgacttcagcatcgccgtagaccgttgaggagctcgtgaagacgaggtattcaacgtcggaattcctcatagcctccaagaggttgtaggttatcgtgacgttgctttcgtagagcgtttcagggctctgggcgctgattctaacttcagggttagccgcgaggtggaagacaacatcaacgccttcaatggccttttttacggtctcgaggtcaaccatgtcaccttttatgaactcgaagcgctcgttatcgagccagtgctttacgttgtccaagctcccggcgctcaggttgtccagaactctgacctcatagccactctccatcagcccgtcaacgaggtgggaaccgataaagccagcaccgcccgtaactaggactttcatgtgcaccatcacccatgtagttatcgaggtcacgttattaaactttgggaaaagcttttttactctaacgtttaagttaaaccatgatgaaaatctatgacattcccccacagggaagggagaaaataaaagtgaaaattcaagaagccctcatgagaagagaggaagttatatttgcttatctccatggttctttcatcgaagataggccgttcagagacattgatgtagccgtttacgtgaaggagaagctagatatattctatgaaatgacgctggaggatgaacttactgaactaacggggtttcccgttgacgtccgggttctgaacgaggcccctattactttcaggtttaaggtcataggcggagaactactgttctcgaaggatgaaaaagcaaggtgcaggttcgaggaagagaccatggcagagtaccacgattactcctactacctcgaactctacgggagggaggcccttggaatatgatagggacagagtaacgaggctgatgggagaagccaagaatgcccttttcaacatccatgaacttgcagagcttgatgaagaagagtttctaaggaacaagcattacatatctagcgcaaagtacaatcttctggttgcaattgaggcatgcatagacattgcgtatcacctgatatcaaaaaacaaactgagactaccgaaagactactcggacgcgtttaaggttctccaggaaaacaatgttataagcaatgaactggcacgccgccttatcttaatggctcgttttagaaacagacttgtgcatatatactgggacattgatgacaggatgatatacagaatcataaccgaaaacataactgatatagagaagttcttagagcacatccgtaaaatcctcggaggggataacaaatgaaagccgtcataatggccggtggctacgccaccaggctctggccaatcacaaaagatgtccccaaggccctgctgccggtgggggacaggacgatacttgaccacatattggagaaggtcgcagaaaccggccttgaaacatatatctccaccaacaggttcttcgagagcagattcaggccctttgccgaaaaatggggtgtcaaactcatagttgaggacacactccacgaggaagagaagctcggaacgataggcgcgctgaagaagataatcgaagaaataggccttgacgattatttgatcatcgctggggacaacctcttctccttctcgctccaggacttcctcaagcgatacgatgaaaagcccctgatagcggtctatgacgttggtaacccagagctcgccaagaggtacggcgttgtgctcctagagggggacagggttgttgacttcgaggagaagccggctgtacctaagtccacgctgataagcaccggcgtctacgccctccccagggatgttatggctctcattgatgaataccttgcaaacggccacagagacgcaccgggctacttcctcagctggctcctgaagaagggaatcgagataagggcctaccgcttctcagagttttggtacgacattggttcagcagacagttatcttgaagccctcaagactctactcaaagagagccacatcgaggagatccagataagcccctactctaagataatcccacctgtggtcataaagagggggacgaagatactgggccgttccataatcgggccctacgcgtacattggggaggactgcgtcatagagaactcggacgtaagcgattcaatagtttttaggggcactatactcaagaacgcgacgatatggcgctcaataatagacgaaaagtgcgagataaggaacctcgagcttaagaagagcttggtcggaggacatgcgaagatacagaggggggattaggtttttaatttcctttccctactgaagggtcgccatgaccgaaagccttaagctgagactcattaaaaatgctggctggctcttcggggccgaggtcatttcgaaactcctggcctatggggtaatagtcatcctgagcagaaccctcggcccggagggacttggccagtactcgttcatcttctactatgttggacttctggggatattctctgatctcggagttggctactacttcatgcgtgaggttgcgagggatagaagtaaggctgaagagcttcttcccgatgtgcttgggcttaagattgcactagcgctgatcaattttgggataattgttgccctaaccctccagctcccaaagccggaatggatgaaggttttgattgtacttgctggagctgaggcagtgctaggatggatagcgtatgtatttgtgaacatgatgtatgcccatgaagttactaaatatgaagctattgcaagaactattgagagaatctgggcgttttttataggaggaaccgttctctatgtttgcagatctctctcaccatttataatcacacttctcattggatacgtcctaagggaacttttgaggataaaatggggtaaaagattcgttagagaaatccgcatccattttgagccccaaaaatggctctcccttctcaagaagtcctaccccttctggttcatcggattatttacgctgatctactaccgcactgacatggtgatgctaagcctaatgaggggagactacgagaccggaatataccgggcagcttatactctaatcgaagtttccctatttgttccgaatattgttgtcccgacgactatgccctcaatggcaaggctgtggcaagaggatcgaaaaacccttgagatcttactgaagaagagctctcggattttgagcggtttgggcgttctgggaacgatagggtactacgtttttgcaaggtggggaactatacttgtgttcggagaaggtttcctggcaagcgttcctatgctcagaatcttggcctttgcggttccatttatgttcctaaactcactatttgggagctttttgaatgcaacgggaagggaactaacgtttaccaagataacgggattcactgcgttgctgaacgttgtgctaaactacttcctgatactgaattatggagcaagaggagccgcgatggcgacggtggttagtcaggggatagcaagtgttttaagttttagagtaggaataaaaaacgggaaatataacggtgcctaaggtctcagttattattcagaccatcaaagaaagagaaaactgttgaagcatgttgtttagtgtttcgaattaaacttttgtcaggattctgagatcatatgatggccaataatagccccatagactacctctcgatgacaacagagtaagaatcttgaacttcttggctctaacgtattacaggctagaaactataagattaaaaatacgcatgaacaatacattgcgtttcttgatgaatagccatttacaaagctattgagaagtcagactgttctacttgtttaaaccgcccttatgttattgactgaatccgccatacggataatttaaaaacaacagggctctaagaggcttagtcaatccaactgaccttgcatgatttgtccaaagtttgtttatttttctctgacttgtaggtttccaaaattgtagtaagagcttttttgagtatctcgtcccagtcatactttttaaggattagtctggatattttcctgtatcttttttcgtaataggggtaattttccataacatagaggaaggtctcatagagatcccttttgtcacaacacctgaatggaattgtataccgcgaaatctctgtctggatgctatcactcacgatagacggcactccgagggcaagagcctccaataaaactaatggaaaaacttcatgacgagacggcaaaatcaataccttagactctttcatcatcctcagtacatctttacgtggggaaaatgctttgactactatatttcccacaacagtatattctttgtcagctccaaccattaaacccctataaggtttgtctttaaaagtatcaatcacaagctggggatttttttcttcactaaacctccctacgtagataaaatcccacctacgccgaaatttcctttggtataacttcttgacatcatcatcaataccatttgaaatatggcgtatatttgaatttctccgtccataatactgaaaactgtttttattgagtagcaggatcaatgtattgggcatagaaacatataaatcacgaatctttttgagtggatagttcagcaactttcctctccagttcagataaaatttaaagaacttatcccaatctctaccatctattatgacttttacaggcttctttaccggtaaaagggatgtgtgtgcaaaaattatatcaacatctctgtattttcttaatgtagctaacttctgtgcaagctcatttatactgccaagaccatttagcattggaagtgttatcatctcatcacatgacacgcaggggacatcccccacatatgaacagatgagatacagatcatatttttccttaagctcagtaagaacctctgcaacttttagcatgactctttcggcaccacccactgtgccgcatccgtggacgtatattttcattttttactcaccatttttctcaaaagtggcctaataggaacgaacaaatcaacaatccatatcaacgtcaaatatgacgaatgagacctaactggcctgtaagttttgatgtagtcaaagtatttccaaaacagcttacgtgcttccttcctaccgtaagtatccgacacgattgtgatgtaggtcataaagctaaaaggtctcaactgccttgcaacaacgtcgcagacctcacgatgtttgcctgacacttctttgactcttagacagagcttattgtaagcttcaagcgttcccctaattttctcttctggggttttgcttcttccttggacagccgagcttctccttacaaggtggtagaagtcaggtttcggaacagaatacaccttctcaatcaatgacagatacaaagtgaaaaagtatgcgtcctccgagtagcgaatgttttctggaaaccgcaagccgtaatcattgattatgtctgctctcaaaagagagctaccaacaccaaacctcgctttgagcataaggacatccttccaagacagttcgccgtgttttgaagctctaacgtggattttctttccagtttcctcgaaaacatcgtagtattcagttgagacgccaccaaaaccctttatatggctcaccgtatcttcaagaaaactctcgctccaccaatcgtcgctgtctatgaaagctatgtatctaccagaagcaacctcaatacccatatttctaccgacagaaacgccactccttcgctttggcgtccttagaacttcaaccctatcaggatgtttatctttaaagtcaagcaaaagctcgtaagtgccatcatctgagttgtcgtcaacgagtataagctcccagtcctcgtaggtctgcttctctatcgaactaagaagccttggaacgtagtctcgcgtgttgtagacgggaacgatgattgataccttagccatgcatttcccaaatatagctgggggacaatggttaaaagttttagggcatttatcctggcgagggtgagaatggacagagtaaccaaacagctgatagcctccagactcctttcactggcaaacgttattccaaaagacgaaaacaaactcctcttctactcaactcccgacgtatctgacaatgccctagcactctttaagtacgtttccagaaagaccaatgattacgagctggtctggctcctgaataatccaagctctccatccgttaaggtcctcaagggaaggtattctgaagcgaaaactgtgcctctctactcaattaagggcctaaaagagcttttgagagccaaattcatcatcactactgatgttctacccgtgacgccccatttaggtcaaagggtaatccagctctggcacggacttccgggcaagaagaccggctacgaacatcccctaggcatcagggatctctacctctacatggacaggtggacgactgacttcgtaacaacctcggaacttgtcgtcggttcgttcgtgaggcagttcatgataaacccccggaagttcagaatcctcggacagcccagaaacgacggcctctttgaccacatgaaggactcaaaagacacgctctcgtcaatactgggaattgatgtggaggcctatgatggcgttgttctctacgcaccaacttacaggtataccagctacctgaaagactttgaggccagcgtcagggctgttgagagcctctttcggagagacttcatcgagttcataagagaggagaacatcctgctcgtcataaagccccacaaactagtggctgaggcggtaaaatccaaagtaaaagtaagttcgaacgttgttctcctcacagacgaaccgcttcagtcacaccttctcaacataaacgacatcatgggggcgtttgatatcctgataaccgattactcaagcatctttgaggactacatactcctgaacaggccaattgtattctacttgccagatagggaagcattggagcaaaaaagcggctttctcttgccgtatgaattttttgctcctgggaagaagcccgaaactgtcgaagacctcaaaaggagcctgagagagtacatagacgatccccagatagatgcagagtggagggaaactatcaaaaacctcctttacgaagttgggcaggacaataaatcttcggagagggtttacaaacacataataaagggggaatttgaatgacaacccttatccttctcgcgggcggaatcggaaaacgggcaaacctcggcctccccaaacagtactacaggatcgaggagaaaatgataatagagtacacgttggaaaacgtgtcaaaagtcggaggcatagacaggctaatcctcgtctccaatcctcaattcatggacacggccctggaactggcggaaagctttccaaagatagaaacggtcacgataggggggaagactaggaacgaatcaatgtacaacggatttaaggaagttccaccgggagagaccaaggttatagtccacgatgccgtaagaccattcacacccaggtgggtttttgagaaaataatagacctcctggacgagatggatgtggtaacaaccgtgaacccaataaccgggaacctaatagagctggataatggaaaggtaaagagaatccacgaccgttcgagatacgccatgggagaggctcccacaggataccgctacgatgccctgaagaagactcttgagacggcactatcacggggaatcctgaacgagattccccacgacatccttctcgcgatggaggcgggattcaacgtccacgtgctacattgtaactgcttcaacctgaagattaccttcagggaagacgttgagatcgcgaggaccctgataaaagtgctggaggagcagcgttgaggcccagggtctcggttgtcatcccaacttacggcagggataggctcctgagaagggccatagagagcgtcctaaaccagaccttcgacgattttgagatcctgatcatagacggtgcccggagcgaatcaacgaaggagcttgtgcgttcctacggcgacggaaggctcaggtacatcccccagcgtgggaagggcatagcgaacgcccgcaacatcggtgtcttaaaggcccgtggagatttcattgccttcctcgacgatgacgacagatggagaaaggacaagctagaactgcagcttgaggccttcggggagcttccctcgaattacgggcttgtctataccgccttcacgtattactacttagaacgggacaaagttctggggataaagcatccgaaagcgagcggagacgtttatggacatctcctaaaggacaacataaccggaacatccacgataatggttaaacgggaatgcttcaagaaggcgggcctattcagggaggacttcgtgacctgcgaggactgggacatgtggctgaggatggccaaggtttgccgctttggggcgatagatgagcccctggttgactactccatccactccggccagttctcattttccaagtatctctcggggcggtacaggatgatcgatgcccacggagatataagacatgatcccaggattctgagctaccatcttctccaaattggggttttgaaactcttcagtggggataggagcggtgcgagggaagtactggaggcgttcaggttgaacccagtgatgcgtggcaacattcgggatatcttatcctcattcctggatgtgagaaccaggatatacatcctcaagtttttggggaggctttagcgaggaaattttaaatttgaaaaagaacaaaaatcagtctcttctaaacacacccctgtccaagattttctcgccctcggcataggcgtaccttatcaccgttccgttgacctccgccggcagctcaaactctttcagcccttcgacgttgtaccacttctcaaagaccttcgtgccgttgtcgaggaagccccagattccgagtctcgtcccggttgcgttctcgaactgaaggagtgtctcgccaccccttctctcaacgacaacgttcgggtgcttaagcctcaggatttttatgatccctccatcagagtaaaccagctcatagggcccatctggctttatgaagagcctcgccaggttagtgttgaaggcctccccgttcatgaggatcgcgtagttgtagttgaggttgatgtaaaggtaagccccagattcggacggcgttatgttcggttttataatcttatctccgtactcgacgtagacctcccgcggtccaaagacatggccgctgacgcttatcttcacgtcccatttttcgccaggtcttgcaacgaccgtgtagcccgagttcctgaacaccagcgcccccgctgaagaaaccatgggcaggacaacgaggccgtagttttcactcacgttgcacctcgagcacatcatcgcggtgtcgactatcgttccaaacttcagaaagtcgtaataggagacgataacgtagtcgacgccaaggcccatcgcccagttctcatcgcgcttgccgaggtaatacagggccacacctgtattgggggctagctcagcgactggtgcgcgtctggcataataggtaacccacgttccgtagtcccaccaggcaagaacgatatcgttttcgttcgagttctcgccgagccacgttaacgccctctcccagtgctcgttcataaacggctccactgccgcgaccttctcgaaaccgattgcagtgtcaacggcggggacgaagaggagaagcccaagtgcaacggcgagtccttttctcccctcaaagcgcggcagaatttcataaagctccaacaacccgattcctgccattaaggcaactcccatagaacctatgaatagaaacctcgtccaggtcttgatcatgtagaggctgggaaggacaagcccgaggagcatgaagtcctgaactctgactttcccgggcctgaaccggaggaaaaagaggggggcgaggaaaagaccaacggcaaacgcgctccagaggtcgtggaaggtcgacgggcgggtctcggatattggccattcattgaatattccaaagccagttgagaggtctttcagcccttcaaacctcgcgaagaggaggtaaacggcgagagcaccgaacaccaggactgtcagggtcctcagccttttgtccctgatgaacttcgagagcgcgaggagggccaggagtccagccagggcgagggggaccaggtacttaagatggaagagcaggtaggcgtcccttaccgtggtgagttccagggacagcttttcggcgaccgttttactcaaccacctgtcgtacccgagcatgccatagccaaccctggccccaaggtagttcgcaataagggcgccaatcgccgtggagactgttaggagtatcccgtcgaggatgtacctgtccctaccgaggagaaaatccccgactcccagaaagaccgcgctggccaggagaaacacgaaaatcgggtagtaagcctgccagaaagccgccgcaaggccgcttgcgagggctggcacagcgtagaaggcaaggcttttatgtccaagtctttccctcgttgaaaacgcgtaggcgattccgagaagcgaaatagaataccagaagagcatgtagttatcgccgcggtagtagccggccattgagcgaaagacgtggccgaagctaaccgctagaaagagcgaagcaaaaaaggcccgcttttcatcgtagagtttcagcagggcccaatagaacacggctatcgtcaagatcccaaagatgacgggcgttatcctaaaagcattgtagagggaaaggccaaagatcttcaggagtttgtaaacataagcgggcgttgcccacaggccgagggggtgaaatgtcctcatctgaaagccccaaggtccgtttgcgattgtgaaaaaattgagccacttgcccgcttttagggcctcctctatgtaagcgaggtggaaataagggtcgtagcctaagagatatctgaaccttatggggattaacctgagaatcaaggcaacggccgttatcatggggagtgcgatttttggcctgaagattttattgaaatccattgtttcttacctcccgttgtatcaactcgttatcatgtttaaacctttttccatcacattcccaccgagcgcatagacttaactactatggattcggacgctacaagataaggtaagcagtatgcatttaagctaataacatagtagtaatatttataaaaactctcgctccacagtggcacggtgagattaatagcatggccagcaggcccgttcaaatctttcacatctggaaacaagacttctatcgggacgcccttatcatgatggtcgcggtcacactctccaacttctttaattacctctaccagctcctaatgggaagaatgctctccccccaggaatacggtgaacttttcagcctgttgtccctgttctacatattctccgtgttttcaacaaccataaacacttccataaccaaatttacggcagtttactgggcaagagaggaatacggaaagataaaatcgatcataattaaggggacgaaagtcctgggactcttcggtgtcctgttgttcgggttgatagccctaatctcccccatgttttccagttttctccagattgaggacaacacacttttgctggttttgtttgcatcgcttcccctctcaatggttctccccatataccagggagccttaaggggtatgcagaggttctcggcgttggggctgagcacgtcttcctgggcgttccttaaggtgctcttcggtgtttccctggttgcactcggctacggagtttttggaggtctactagggatatttttggcacacgtgggggcgtttttcttaacactaatgtttctaaaggatctgttccagtatagggaaacaggggaccttgaaattcgagacatcctctcatacagcggtctcgcgtttctcgcagttcttgcgtacacaacaatgtggaatatcgacgttattttggtcaagcactacttgtcccccttggaggcggggcagtattccgccatctctgcgctgggaaagattgtcctttttgcacccggagcgattggaatggtcatattccccaaggccgccgaaaagcacgagaagggagaggaacacttccaagtgctgctgaggggaatgggcctgacactcctgatttcagggggaatagttttggcctacgccctgtttccggagttcattatcaaaatcatttatggggcaaaatatctcaatgtcgccccgtatctgtggagatacgggctggcgatgatgttcttttcgttggcgagcgtaatgattaattattccctgtcaatagacaagacagatatttttctttacctacttggactgctgacaactgagatagttatgctatccattggaagtaagaacatttctacgattatagacatgctaatcggcgtaagtgcctcaatacccattgtactgtttatatctatttggaggcaaaataatgcccaagatatcaatactgatgcccgcttacaatgagggggaaaaccttagaaaggcagttatagaaaccatgaaagagttaaaagggctagactacgagataatcataatcaacgatggatccagggacaatacccccgaagtcgcaagggaactctgcgagtcatttaggaacgtccaactagtgagctattcaaagaaccggggaaaagggtacgctctaaaaaagggcttcgaaaagagcaacggtgagataatcgtgttcttcgatgcagatttggatattcctccttcccaaataaagaggttcataaagtttcttcaaaatggatacgacgttgttataggttcaaaataccttccgggagctagggtgaggtactccgagaaaagaaggctattcagcatctggtacagaacgctcgttaaattactgcttaagcttgacgtcagcgatactcaggtcggactcaaggtgtttaagagagaagtcctggaaaaggcattttccaaagtcttagtcaagaagtacgcctttgatgttgaacttttaaccgtgataaatatgtatggatacaagatttatgaactgccgattaagattgaacataagagttttaactcctccataaactatagggcaatagcaagaatgtttttggacactgcagcaatagtttacagaaaaaacatcttgcattactacaatggtgataaaagatgaggatactatggctcaactggaaggatataagacaccccgaagcagggggagctgaggtttatactcatgagattgcaaaaagattagttgaaaaaggatatgaagttaccctcttcacttcgtattttaatggagctgaaaaggaggacgaaattgatggtgtcaaaatagtcagaagcggaaaaatagttggtctctttgatacggtgtattcccacgcaaagaggttctacagggataacaaaaacgattttgatgtagtaatagatgagataaacacccggccatttctaactccaaaatacgttgataagccaataatagcgctgatacaccaattggcagttgagttttgggattataagacaccgtttccgatcaatacccttgggaaacacatcctagaaccctactggttaaagcattacgtcaatgttaaaacaataactgtctccgaatccacgaggaacgacctagaaaagctcggatttaaagatattgagatagtttacaatggattggatagaaatattttagagaaggtccccgaaaaggaagacgagtttaccgctttattcgttggcaggttgaccccaactaaaaagcccgaagacgccgtgatagcctttaaaatgctcaataagggaaaaatgtggattgttggcagaggcgaacttatggaaaagcttaaaaaaaggcataataatggaaacatcgaatttagggggttcatccctgagaaagaaaaaattgaactcatgaaaaaagcccacgtattgttggttccaggaataagagagggctgggggagggtcgtgatcgaggccaatgccctgggaaccccagcaatcggttataacgttcctggactcagggactcaataaagcatagatacaacggcttactgtgtgatccaaaccccaaggcaatgagcgaggcccttagagtattgcacgaagatgaagaactcaaaaggagattaagtgaaaacgctttaaagtgggccaaaaggttcagctgggatgagagtgcggagaagtttgagagggtattaaactcctcagtcggtgagtgagatggagaataaagagatgccgctggtctctgtgattattcccacgtacaactcagaaaaaactattggaaagtgcttagaatcaatcaaaaaccagacctacaaaaacatagaggttatcgtcgttgacaatttttcccaagataaaacggttgagatatgtaaaaaatacaatgcaaaagttatccaaatcaagagcgagaggacaaaagcgaagaatatcgggttaaaaaaggcaaatgggaaatacgtcctttttattgattctgacatgggattaactccaaaggttatagaggagtgtgttatattaattgaatcagatcccaaaatcggggggataataatcccagagcgctctgtcggtaatagttattgggtgaaggttagagatttcgagagaagtttctatactggaactgaaatagaatccgcacgatttttcagaagggatttagctctacaagtagggggatttgatgaagacgttgtattttttgaggagtctacactccctcagaagattgagaaacttggattcaatgtcaaagccagaatagaatctcatattattcaccatgaagaaaacttttcactaataaaatggctcaaaaagaagtattattatggacagacagccagaagatataaatcgaaatatagggagtatggaaacaagcagataagcttgttttacaggtttgggttgttttttaaaaggaagagattttggagcaaacctcatttggctgccggagtaattgttttaaagggattggagtatttagccgcaagtgttggatatttaaagtcatcttaaacttacgaaggtggagaaaaatgaggatccctcagagagccttgttcatagcaaatggcattggggctgaaaatggaaaaccaggaataagtggtggagacataagatggatagaaattgctaaaaaatggcaagagatgggaattgaaatccatgtattgactcaagacgccggaatagaactttgcaaaagagtagggctaacagctgagttccacaggatgaaaatgccaagcgaatattcaataagggggtatcttttaagggcccttaattctttcaggatcccccaagaactcatgagatttgagggaataatctatgcttccacagagcattggtatgatgttattcctggagcattaattaaaaggaaaaatcctcagaacagattcgcaatagtagctcattgggttgcaccactaataaggaaaggaacttcggctataaatagcatccttttttatattaaccaacgcgtgggatattttgttggtaagagatactcagatgtttttttagcagtatccaaaccaactggaaatgatttaaaaagaatagggatacctgagtccaaaataagggtagttgaagcaggtgtagattatgagagaataagacaaatttcatccaaaataaaagagaaacaattcgatggagtatttatgaaaagatttgacggtactaaaggcgtcttcgatgtagtggaaatatgggaacatgtagtctcagagattccagatgcaaaactgattttgatcggtcacggaaccaaaacaaatgtgaataaattagaaagaatgattaaggataagaagctcgaagaaaacgtaaaaattctgggtccaatatatgatttcgaagagaaatttaagacactggcaaaaagcaaagtgtttctcttacctagctatgaagagaattgggcaatagtaatcggagaggcaatggccgcaggattacctgtagtatgttacgatctacccgaaatacgaccaatttggaaggacaacgttatctggattccaagaggaaataaaaaagaattcgctaagaaagttgttgaattgcttgagaatgagaatgttggaaaaagagtaggagaaaatggagccagatttgttaagagatatgattggagaaaaatagctggaaaagagctgatgataatccaaaggggggtctgattttgatccaaaaagaggccattcccaaactaattactatagagacaaataaagagataatcccagggttttcaatttcgccttttttagtagatgccaaggacaccacagaaaaaacaccattctggttcagatttcaagtggattctaagtttcatattaacaaacatgatgtcgttaaagtatttgatagatttatgcttctaagagatggttctatatactactccaatcacatacttccaaaaatcatgcttaatttggtatttagacccaatactaatgagattcaagttaatcccacatacttcttattagtaaaagagaagattggatcggcatatccacctggagtattgttattagattatgtctttgttgaacttcttgtgcgtaacttctttgtattacatgctagcggtatttcggataatgatggtgcatatttatttattgctcctccaaatacgggtaagaccactactgtgttacaatttctaaataatcataaaaatttattatacgtcggagaagacactgtgatcatagatgctaaacggaattttgtataccctacacctcatacttcaactttcttccatcatgaaactcgctttgggcatattgaaggactatttcgtgtaaaatataaaccaacaggaagatccctttttaggggtagaatactagatactcctcagaatatttcctcaatatttttacttcagaaaggaatagatgacaaaattattcccttagaggatgttgaccatagatatattatgaaaatactactttcaattcaacggtacgaattttcctggttcaaaaaccctttgctacgtgcatcatcctttttattagatgattggtacaaccttgatgaattactaaacaaagaagaagaacttctttggaaactattaaaacgaaaccaagtttttttagttcgcagttcaaatagttttcgattttataacataataagagatcatttagatataaaaccgtagtaaacagggggtaaatatggaaaggatgcgttatacatatctacgagttggttttatatacgcactagtgtctttcctctcaaatgcttactatattttttctccaggcgttatcggatttagacatgactggagaatcccgtacctccctggccaagtgtgggacaggttttttgaagcaatatttacttggaattctatctctggtaggggggtgtcgggagttccaaacactttattatatgaaagactctttgagctcgcactagcagttttggtcagatttaatggtgaggtattatcaaagattattgttccgattattatgttggtttctgctttgaccatgttctatttaggcaaggtactaagattctctagtaagtccgcattctttatgggtcttttctatatgttgactcctgtactttataatagaatcatagctggatatcatctctataattttgcatatgcaatctcaccattgttttttgcatttttacacaaatatgtttattacaaacaaagatgttcatatattctcacagccgcattagtatttggcatgtcggctgttcaagtgcagtttcccccaatgttagcgtttatggcggctctgtacttgttgatatttgctatatcaaaaagaaactactcctcacttataatatcattaaaagccatcgctattcttatagtgctatttatcatacttaactctttttggattttaacaatgtttatgaatccaggatctaaacttgtgataaataaagcagcaccaattgattatcatgaaattatgaacgctcctaagcttcttccagcatttttaatgactggatatagtcatgtttatgatccattttatctctatactcacaataaactgcccagtttagtcatatactctctgttatccttgtcaattctttcacttatagcaagcatctttgctattaacaaaaaagagcaagcatatctcgctgtgtactcactctcattgctttctattggattattctttgtgtctgctctaaacggaccattcccccaattgtggaaacttctctaccttaaaattccaattctttcagtatttcgtgaggtatatcattcaatgtttatagtaacatttgcatatactttacttgttggaatgctcatagaagagcttcacaagaaactctcctctcctagatcgaaaaatctattagtagtgatattattgtttataattctatcttctggatacccttcgttaaattcgtttatgcatcaattaaacgtattaaattatgggaacagcgacattgaggtgtataattttctgaaaaatgaatcagggatatatcgcgtagtttatgtaccatccttaagccctataagataccctactataaatcggggctctgtggacttgatgattaaatatagcccaaaaccaacgtttccacagcatgtgactagggtattcccttccgaagggattttacaatattatgtgttgacctcaattgaacaccctgaaagaatagagaatattcatgaattactcggaaagatcagtgtaaaatatataatttgtagacccaattgtacatcctattacccatattacgttccaatgttgagatacctccaaaaagtttatggtagtactatactataccaccgctggtttaatacaagccttcgatgtgacaatataaaacataggggacaaatattgaactttaacaacataaatttagttcagatagataattctccgtttatcaatgtaggcgggactcctttggttttctcttcatttgacgatttgttgtccggagttcgttatttagataataattttgcaataattttgaatgtccatttaagagaatttccacttattaataatatcagcaacacatttgtattcactaacgaacccttgtatgatttatacttgatggactcctatttgagcactactttatttgtaacgccaaacgcaccaaacaacagacctgagaagagctgggcaactgatttgcttagttggtatattaatccctccattgctatagcccctctctatggagaaaatacagtactcacgtgggcccctcccacggcagatttaccggaaaacatgcctatatccaatttaattgccagttgggactttacatcccaagatcaagttaaagcatgggaaaatgtcactccaaaaatccagtttagtgctattcaaacaatttcatgggacgaaagtgtgcaagctcttagagcagaactttacaattcaacttgggtctggaagacaattagatcccctctgattccggttaaatatgatcacgtctacagatttatgtttaaagttaaaggtcaaaatactaatgtagttcatgcttatgttaaagaatatgatgtcaataaaacgctgatcaaaggctctttcttatattacccttttataggtgatggaactttcaactggaaaacaatttctttcaactaccagccccaaagtgaagatacccgctatatccaactccagatatggcatggccacgaaacagataaaccgctacctaacataatctggatagatgacgtgaaagtctatgacataacaaactataccaaacccgtaactctggacattcccttcaaagtcgataaaactgacaattacaagcttttcatccgctactttaagaaccagaagggcggcgcaataagggtttatttagatggaactccaatttatatcaagaccaaagaccagcttaacaaattcgtttgggaagatctaggaacattcaagcttgaaaaaggaaaacacaagatagtccttgagaacgttaggggatttaacgcagttaatctatttgcgttgatacctgaaaaagagtacaataaagcaagaaaagaggccatagaactattgcagaacaaaaccataatatatctcttcgaagcagaatccgatttatacagggaaaacaccgagattataaaagacttcaacgcaagtaacggagaggccataaaattcgaccagaagggaaaagcatggcaaaacgtggagatagtgaaaaacagtacctacagacttgcattaaagggcaatggtacatttaatatatccataggagactataagtatgttttaactgtaaacaattcaacatttgaatataccccactgttctacttgagaaatggagaatacaaattagaaataacccctacatcaaaggacgccctcttggacgtggtctggctctactcaactgataaaaacgaaacactcgaagaactcttccaaacaaatgaaactcccgccacagtccaggactacacaaaggtcaacccaaccctctggaaggtcaaagtcaacgcaacaaagcccttcatgttaaccttcgccgaatcctatgatccgctgtgggaggcgagagtttacaaggatggcaaactcgtggaaaaagtctccccagttccggtatacggagtcatcaacggcttctggattaatcagacaggggaccttgaaatagtcctgagatacactcctcaggactggttcgagaggggactgatggtatccttaacaactttcctcctcagtgtattctacatcttctacgactggagaagagaaaagggggacaaatgggccaagaggctagagaagaagttcaaaaaactaaccagcaaagttaaacgaaaattaagcccttaactagagaaagtttcgggtcacgagttcagctttgtgaaacttttcacgttgatatttcaagaacaataaacagactgaagatttgtaaaaaatttaataaatcccataggagatactcagatcggggaaatcacatgacggataaaatattgtctgcagactcaaagtcacttgttattgtacgtaaaaagcagtttaaggcaaacattggtgtcgctttattgttcgaagaccccaaaaaattcaaagagaattacatcaactattttgagagccttaaaggtaatctcaacactaagaatccaagatacgtattcaaaagcaaagacataaagtcgctctttggtcatgataaatctaacgaaattatagaggactttgtttccctaatcaatgaatctaaagtcaccgttagttttgtgttctctatattcaacacgaagcgtttaagggaggttaaatattactccaaggacaatacagtaaagacggaaaagcccatgaagtttatagacaagctaacgagttatttctcatacataaccgcatggaaatcaataagagagcttggacttaacggcatcaaagtttatctggacaatttcgatgaacaggaatatacctacgcatgggatgatataacagtatctaaccggccagttatcttcccaaagggggatcaagttaatctttttatctccactgcagacatcatagtcgaatacgtttataggaaaattatggaacaaaacatccgcctgggagttagagagatgtatgagcttaatgaaaagcacttaggtcttgataattttaaagtatcttatagtggaaacagagatgttaaatacctagcaccatattcacacaggaagattccaattagagactacctcgcaagaccaatgctttatgttttaaccgaaggattaattgggaaaggaagaaagaacagttatagagaattccccgtccttccaatatcttcttagatttgcctccgatattgggggagggttgaaatttatatcgcttgaaaaagatgcctataatataagagagaatgatattattgtttgcttcggagatgaaagcaagaaaagagctgagtatcttaaaaaagtacttaaatatccaatagagatacattctatattggaaatcattgaacgctacgagacaaacgctaacggggtctgaccgatagatttttatacctgaagattaaacgtcataatgagggtgcactcccggtagggagtgtgcccgttatctgatctcatatccccgtactttctattgttttataaatggtctgttctcaaagactctcccagaagcaaatatccccggtaagtgaagcctgatccccttccgccccgaagggtgaggctttcaaaagaaaaaagtaaatgaacaaagaagctagtcatccgccggttttttacgctgatctagcgatagaacgttagtatcaccagagatctcgtgtttcttctatccctatctgtttcttttcttcccaaaatctcccacattaagaaaattttaaagctcatgaccaaaattgggacataaagacttatgcaagaatcaaagactttaataggtgaatcctatgaaaaagttagtctctctaatgttaatcactatgttgttcactttcgctctggcccagaaagaatggatgggccatggcgttaatataaccctgatggaaaatggaataataaaagcagcctccacacggagcgggcttaacaccctaatctccccactatttccaataaatacaaccctgaaatattccttctcaataaggagcgagagtaccaacggcgttttagcggagattgcttattttgacgaaaacagaactttcatgttcgccaagaacgttacagtcgtaggaaacggctcgtttggatggaaaaacgtcgaaatagtcgccctaccagctgaaggggcgacgttttcttccctggtgattgcgataaacggcactgggatggtttacattgataacttcaccgtcagcgaagctaagccaacagaaaaaccagagatggagagcacaaccccaactaaaaccggggcaccaaaaaagaccgaaaccacaacatctcaagaaattggaaaaggaaccataccctatgaaaactctcaaaagctttcaattgacgatgacgatatcaaagtcgaagtctttctaaacaaaacctaccaccccggggataccataagggcggacttctacataaccaacaaaaagggagtaatctatgagatagacataaggctcgatgtgtattaccttggaatcaaagtgttctcgtacgagcacccctcctggcgcgaatacagggagggaaaaactgtccacatattccaggaatccaaactcccagtgatcactccccccggcagatacaccctgaagttctacataactcccgcgggcagggagacgaaagagctggaaggggaaataacggtaaagccaaacctcgaatggattttgctagttgtgttctcagcgttttcactcctcgggattatcctcctgatcagaagatactggaggttgctggttaaaacatacagggagttttcaatcggacagagattcgtgttcttcgcagtggtgggactgataatagcggcggtcatactagcgcttggggccgagaactacgccaacgatgtggcaatcgtggtgtattatctcctcttagttggagttctaaacgagtgggtcgagtacctggagcccaagtgggacagggaaagtataagagaagtctccagcgtctacctgctcgcattgttgatgtacctatcaaaggacacgttcaccgtttatccggcgatagcaatttttgccctagggaccgttgtcggcttgctgaggttacaatcaaagaacggtgaaactccacctggggctaaagcaacagtccccaagggtaaagtgagcatcgaagagattgagatagttggggaaaccgaggaaggattcataatctacgaaataaagagtaaaagcaaaaaagaaaagagcgggtagagcatcaagccttaaaaacaaaaataatgagggaatcaacagatggaagagagaactaaactagtcctaatctgggttgtgatgatctttatccccttattcacattgaggcttttccaggatgagatgttatacttgaacatctcaatgaaagtactccacttcgaatttctgcccagatcttcgctcgttttcattctaacgtcgcccctgatggcatttgatagtgtcgacctcagggtgtttctacccagggccgcaacagccttcgcaacgctaacagacacaatcctgatctatgaaattgccaaaagatatcatggaaaaaaagctggattcctgagttctctaatgttccttttttcatttgtagctttaagatacggggcaagatacactctggagccatgggggacgctcttcatactctcggcaatctattatttcgaggaaaagccccttacagcatctctttcaatgggcttggccttttgtgcgagggaaacttggctcacaacgtatcctttctttttggtgtacgcgtggagaaaaaggagaaaagagttcttgaaaattctgatgatctcggcatttcccatagtattgaatttcctgtttatagcatcgatcagtgtataccaaagtcccataggctacaatgcgcgagacacattaaatggggagcccgctacattgtgctgagactagcgcggagctggcttgaattttcagttgcttatgtcctgatagttgttgggtttatatacgggacaaaacacgacaaaacacatagggacatcctgttaatgatactgccatcagtgataacgctgaacggagttaatggattcatccttaacggcccgttcgagcgctacacctttggaccattggcgttaatgagcatcttctctgggtatggcataatcgagctctacaacaactttaaatcgaaaattaagcccctgaatattctaactgtcgagaaatggatagcgctgtttctgattgtacagctcattctcctcaacgccgccgtcctaaagctcagcgacataggggcaaagggaattcaagactacggctactggtacgataggaaggtgttcaacatcctaaaagagagggcagccccggaagagtttttcgttggaaccccccatcccgcactcattggttttaaaaattggacctgggcagacaggaacataaagaaggccgtagagctcgatccagactggttgataacgttcaagagctgggttaattttagggagaatccccaagaaatccgtgagcttgaaatctattccgtgggcccatacctgctaattcatgctgaggagaaaggtgctataaagaaatacgtcgtttcaagtgatttaaagctctggaaattcaggaaataaagcgtttaatcgcttttctccccgttactgccatttttctcctcatcttctcatcctcaagcaaaaaaaggatcttttctgctatatcccgctcatccagtctagccaggagcccgctctttttatcatcaacgattaccggaaattccccaactctgctgactatggcgggagtccccaaagcgagggcctccacgacaaccatcccaaaggcctcgctcttggatgacggcaaaaccaggagtttagccgatttataactgctgataagcctctccctgctcacccgtccaagaaattcaacgttgccttccaggcccaaatcctcggctaatttcgtgtaatagcctattaggtctcctccgccgatcacaacaagcttaacatcggggatttcccgcttgaccaaaaccaaagcccttaacaataaatcgaggtttttccatctatggaacctgccaagttggccaacaaagagaacagtattcccatcacctctgaaatcgggtctttcaagaatgaacgcctcatcaatcttcgggtattccacttttgaatgaaaccccttcctccccaaaatcctctggacatatcgggaaactgatatgattttagtattccgcaaagtcatcttttcaaccgttctctcataaaaccctgccaggacatcagtccaggaacccttcttcagctcgccggtgtgataaacaattgttataggctttcccataagcttcgcagcaaaagaggcaacatccgcaaaaaacggtaccggtgtgtgggcaattataacgtcaaaattctgtctcttaatcatccgtataagctcgaacggcaggagaaccctaacaggtgtgttcgagataatgaggttgggtttttttcgtatcactttaatattgccaattttttcagttctttcatatagttttgttgcgcatacgacaaccacctcattttcctcgctcagctcctttgccatcttataggcgtatctctccagcccgccgccttctggataaaaatagggagcaacgagcagaaccctcattcaaactcctccttcaacattagggagctaacgaaaaacgagaagaatatcagctggatgctcatggctatcaaggtcagcactattatggctgacctaatttcaaacagttccccataacctaaagctctccacttcaagaatattctaattcccaatgttaaaccggcgatgaataatattcccccaaacataaggccttcttccaatatcgaatatctcatgaaaaatttcgtgattttatctggtttatcgagtccttccctaacggcgtagacctttccagagattccaaagtttatcacctggaacccaactatggtcaaaaggcttcccagaatcatagtatgtaccctgagcgggtccgtattggaagcgtaggccaggagaactatcccagtaatcatcaaaaacaaccccggaagaaggaacaagtgggatggcgaataaagtagcatcagcctcagatgcctccacccatccctaaacgaactcagtttggattccccaatccttgggcgataagttatgggcacctccctaatctttaaacctgcttttgccgcctctatgaccatctcgcttgcgaattccattccacggcatttcagaggaagcctctgcaatgcctctttttttatcgccctgaagccgcagtgggcatcggagactccagctttaaaaaacagattgaggaccttggtcagaagaggatttcctatgtaccgatgaagccacggcattgcaccgggttcgatcattcccttaagtctggtcccaatgacaaaatctgcctcatccttcagtagaggttccagcaacttcggaatctcgcggggatcatagctcccatccggatccagcatcacgatgtactttccccgagcaactttgaacccctcaatgtatgcgtctccatagcctcttcttttctgacggattaccctcgcacccaattcagccgcgattttgggtgttgcatccgtacttttatccaccacaattatctcataggaaacgcccaacctttccagagtctcctttatttgagggattattattttcactgcatcttcctcgttcattgtgggcaaaatcacggagacttcaactgtcatctgcgaccctctcgtagaagttttcgatcaacctcgttatgttatcccaatcgtagttcctggcatacctaacgcaatttcttttaagctttttaccgtgatccagcgccactagaatactctccgcgagagaaccaggatttggaaacgccagaaatccattgtattcatgaactatcaactcagcagcggcattcaagggatgaacaacagtaacaacaggaatgccggatgcattggcctccagcgccgttatcccgaaaccctcacggatagaaggtagcacaaagactcttgaggccttcatgtgggaaataaccgcttcatattcatctagaaatcccttaaaatcaacgttttcaaccaaattgagctcctctgaaagtcgctccaaacgcctcctctcgggaccatccccaattattagcacctttatgtctggtatctcagttttgagaatctggacagcacgtacaagcagctctacatttttttcacgtatcaaacgtccaacaaagagtacatcatagtcaactccctctaaacgggggacagaccttattttttcaaagtcgatcccatttggtataaccctactaggaacaccaaacctcaacagccgtttttgagtaaatcttgaaaccgcaatattatggggggttaatctagtggtcagtctctcaactctccttccaataccccccagttttcccaggtactcataccaatgcccatcccagacttcatgccacgtgagtaccaggggagttctctttagtatgctgtggagtttagtcgaaaaacacgagaaatacgggaactcctgacagtcaactatgtcgtactctcccccaaattttagaaggagcttttgggcaaagtacagagcctctccaatggatctccgatctccatgataaaaacgcttccagttgccaactctgtgtaccaatatgtcgtccagctccccatcccaattcagagaaaaccagtgaacttcatgttttcttgccagccttctacctatctcatatactcttttttcaactccaccctttacaaagggataaaccgcatcgtacacataagcgattttcatgacattgattggtcacgtgcaggcatttaaaaagctgacttttccctttaaaacaagcctcgtcctttagggcggggaggaggtcagtagcaacaactggtcataaacagtgaacttttaaactccctcttcctcttttccctcatgacgagaaaaatcggcattatcttcgacatggacggcgtcatctacagaggcagcgagccgataaatggtgcaaaagaggtcatcgagttcctgaaagaaaggaaaatacccttcctgttcctcacgaacaactccacgagagaccccgcaatgtacagggaaaagctcctctcgatgggcatagacgtgccggaagatgttatagtcacgtcgggcctggccacgaggctctacatggagaagcactttgagccaggagaagttttcgttatcggtggaaaggggcttctcagggagatggagcgcctcggctggggagttgttagccttgaagatgctaggaaaggcgcctggaagaggatcaagcacgtcgttgtgggccttgaccccgagttaacctacgagaagctcaagtacggaacgctcgctataaggaacggggcaagcttcatagggacgaacccggacacgacatatccagcggaggaagggctctaccccggtgctggggcaataatagccgccctcagggcatcaacggacagagagccagtgatcataggcaagccaaacgaaccggcctatgaagtcgttaaggacaaacttggagacgttgaagagctctggatggtcggcgacaggctcgataccgatatagcgttcgcaaagcgcttcggcatgaaggccataatggtgctcacgggtgtaagcacgctcaaggacgttgccgaaagcgggataaagccgaacctcgttctccccgatgtgggggagctgaaaaggtatctggaggctgccctttagatggacgcaggagagctcataaagaagatcatctggcaggaaaacgagctctacaacctatacaagctcggtgagacctttgccctctttgagaggcccgacctgagggacgacttcgcccagctcgccgaggaagaacttagacatagaaagacccttgaaggcctcctttcggagggtacaatcgaagggctcctcctcgattacatggacgagcttgaactggagccgatggtgcacgacgaaagggcacaccccgatagcctcgaggagctgatagtggaggcattgataagggagaaacatgcgtacgaactctacacaaagctctcgcacatcctggagggaagtctgtcgcagatattccgaatgatggcaggagaagagctgaaacacgcctacagactgaggcttatatacgaaaagatcgatggataattcgtccagcattgtgatgcccccttttttaacatggctgcaccgttatgcaaacatcacagacattttttgtcaacatgccaagctgaagcagggtaaggtatatgtaccttttcctccatagccctacccgctgtccataataccaatagacacgtatgtgtttatcaattatgacaggggtgtttatatgcctgttgaaaaagtgatgaaacgagacggtagaattgtgccctttgataaggagcgtataaggtgggctatacagagggcaatgcttgaagtcggcgtcagggatgagaagcttctcaacagggttgtcaggcgcgttgtgaggagggtaaacgagctctatgacggccagattccgaacatagagaacatacaggacatagtcgagcttgagctcatgcgcgctggtctttttgatgtggcaaaggcctacatcctctaccgcaagaagaaggccgaaatccgtgaagaaaagaagaagatactcaacaaggacaagctggatgagattgacaagcgcttttccctcaacgcactccgtgttctcgcttcccgctacctgataaagaacgagaagggagagataatcgagagcccgagggagcttttcgagagggttgcaatccttgcagtcatcccagacatcctctacgacgagagggtctttgacaaaaacggcggacacgaacaagacgttagtgccattgaaagataccgcgaaaacctcgatgagtacgacggaaagttctcgataggcaggttcaggctcaacaagtggcactttgagcggctcctcaacctctaccgcgagctggccgagaagggccagatgaagctccccatagacgaagtcctgaagatgctcgagaacggcgcttttgacaattacgaggacgagatagaggagtacttcaggctgatgaccgggcagtacttcatgccaaacacaccagccctcatcaactcaggaaggccccttggaatgctctcggcctgcttcgtcgtcccgattgaagacgatatggagagcatcatgaaagcggcccacgacgtggcgatgatacagaaggccggagggggatgtatagacggaaacgccaaaataatctttgaaaacgacggcgaagaacacatcatgacgatggccgagatgtacgagaggtacaaagacctcggcgagttctatgacccggagtacaaccgctgggggataaacgtcgaagaagttccagtatacgtgaaatcctttgacccatcaacaaaggagatcaccaaaggaaaggtgaaagtcatttggaagtacgagctcggcgaggatgttcctaagtacgagataaaaactaacaagggtacaagagttctaacgtcgccatggcatccgttctttgttatcacacaggacctcaagattgttgagaagagggccgatgaactcagagaaggggatatgctagttggcggaatgccaagtgatgatgactatgagttccttttggattactggctcgcgggattcatagcaggggacgggagcatagacaaataccgctctcacgtcaaaggccacgagtacgtttatgacaggctaaggatatacgactacacaacagaaacactcgggataatcaatgatcatcttgaaaaaacctttggaaagaggtacagccttcagagggacagaaacatccattacattgacataaaagcaaaggggataacatcccactatatagagcttctgagaggtattacaaatgggattccacaaccgatactcaaagaaggcagaaatgcagtattatcgttcataaccggcctctttgacgccgaaggacacgttaacagcaaacctggtgttgaacttggaatggtgaacaggaagctgatagaggacatcacatactacctcaattcccttgggataaaagccaggatgcggaagaagccgagaaaggacggcgttgattacgtcatgcatgttgaggagtactcctcactcctcaggttctacgaactcataggaaagaaccttcagaactctgagaagagaataaagcttgaggaacttctcagcaaacataatggtggatcatttggtcttacactcagctttgaagattttaaggcatggagctcaaagtacggcgttgagttcaagacaaacggcagtcagacattggctataataaagaacgaaaaggtatctcttggtcagtggcacaggagaggacgcgtttccaaggccgttctagtgaagatgctgaggaaactctacgacactacaaagagcgaggacgtcaaaaggatgctccacctcattgaaggcctcgaagtcgttaaggagatcaacgtcacgaacgagccaaagaccttctacgaccttacggttgagaggtaccagaattatctcgctggagaaaacgggatggtctttgtccacaataccggcctcaacttctcgaagctccgtcccgagggagaccttgtcgggaccaccactggagcggcgagcggtccagtctcgttcatgcacctcattgatgccgtcagcgacgtcataaagcaggggggagtgagaagaggggccaacatgggcatcctcgaggtctggcacccagacatagagaagttcatccacgcaaaggagaagaacacgggaaccaacgtcctcagcaacttcaacataagcgttggattatgggaggacttctgggaggccctcaaagagggcaagcgctacccgctcatcaacccgcgcaccggtgaaaaggtcaaggagatcgaccccaagagcctgtttgaagagctggcctatatggcctgggccaaggccgacccgggtgttgtcttcttcgacgtcatcaacaggaggaacgtcctggagcctgcaaagggtgaaaaaatccgcgccaccaacccgtgtgtcgtcggggacacgagggttctcacgcctgaaggatacatcaaggcagaggaactgttcagcctcgcgaaggagaggggtaagaaggaggccgttgcagtagagggaatagcggaggagggagagccctacgcctactcagtggaggttctcctgcccggtgaggaggaagtcaagtacgagaccgtccatggaaaggccctcgcaatagcagaccccgtggccgtcccggcctacgtctggaaggtcggaaagaagaaggtcgcaagggtcagaacaaagcagggctacgagataacggcgacactcgaccacaggcttatgacttccgagggctggaaagaagttggagagctgaagccgggagacgagatcctccttccacgctttgaaatagaggaggacttcggaagcgagagcataggagaagacctcgccttcgtcctcggatggttcataggggacggctacctcaacgttaacgacaagagggcttggttctacttcaacgcagagaaagaggaagatatcgcgtggaaaatcagggagatattagcgaagcacttcggcattaaagccgagccccaccgctacggcaaccagataaagctcggcgtgaggggagaagcctacaggtggcttgagagcatcatgggaagcaatgagaagagagtaccagagataatctacaggctcaagccgagggaaatagcggcgttcctcaggggactcttcagtgccgacggctacgttgacaacgacaatgcggtaaggcttacatcgaaggacagggggctcctcagggatgttcaggaccttctcctgctctttggaatactctccaagatatacgagagaccttattcaagcgagttcaagtacacgaccaaggatggagaggagagaacctacagggcggagggctactacgagctcgtcatagctaactacagcaggaagctcttcgccgagaagataggcttcgagggctacaagatggagaagctgagccttcagaaaaccaagatcgacgagcctgtggtcaccgtcgagagtgttgaagtccttggcgaggaaatcgtctacgacttcacagttccagagcatcacagctacataagcaacggcttcatgagccacaactgtggggaagagccgctctacgagtacgaatcctgtaatctggcctccataaatctcgcaaagttcgtaaagtacgacgacgaaggcaagccgtacttcgactgggacgagtacgcctacgtcattcagaaagtcgcaaagtatctcgacaacgccatcgatgtcaacaagttcccgctcccggagatagacaggaacaccaagctcacgaggaggatcggagttggcatgatgggccttgccgatgcgctcttcaagctcggcattccctacaacagcaaagagggcttcgacttcatgaggaaggccaccgagtacctgaccttctacgcctacaagaggagcgttgaagcggcaaaagaacgcggtccgttcccgctctacgagaagaccaggtataaggacggagaactgcccgtcgagggcttctaccacagggagatatggaacctgccctgggacgaactcgttgaggagattaaaaagtacggcgtgaggaacggaatggtgaccacctgcccgccgaccggaagcgtcagcatgatagccgacacctccagcggaatcgagcctatattcgccctcgtctacaagaagagcgtcaccgttggagagttctactacgttgaccccgtgtttgaagcagagctcaagaagcgcgggctctggagtgatgagatactcaagaagataagcgacaactacggttcagttcaaggccttgaggaaattccagaggacatgcagagggtctttgtaacggccatggacatccactggctcgaccacattctagctcaagccaacatccagctctggctgactgattccgccagcaagacgataaacatgccgaacgatgccaccgtcgaggacgtgaaagctgcctacctgctcgcctacaagctcggctgtaagggcgtaaccgtctaccgcgacggctcgctgtcggttcaggtctacagcgtcgagggtgaaaagaagaagagggttcccgcgaagccgagcgactacgccgtcgagaagctgaagacgatagtagaggccgagccgtggctatcgcgcttcatcaacgtcgaggccatccttaacgggacgaacggaaaggagaagagcgcccaggctggagggctgacattctcggtttcccacgtctccgccgtaaaacccgcccacgagcactcgcaccacgccaagaggccggatatcccagaggagaagataagggagctcctcggagttgcctactgcccggtctgctacgagaaggacggcgagctcgttgagctcaggatggagagcggctgcgcaacctgcccgcgctgcggctggagcaagtgcgtcataagctgaactctctccttttctccaatttcggcatttttacaaattcctgtcaaagtatcatttttaagggggaagttttaacttctgccactcattgggaaagtttaagtttgagaagacgaaccggacttattaaggggtgatgctcatggacaaggtttacctcacctggtggcaggttgacagggccatattcgccctggcggacgagctgaggaagaacttcatgccggatgtgatcgttggagtcgcgaggggcgggcttatcccggctgtgaggctcagccacatcctcggcgaccttgaagtgaaggtcatagacgtcaagttctacaaggacatagatgagagaatggagaagccggtcataaacatcccgctccacggctcgcttgaaagaaagaaggtcgttattgtggacgacgtaagcgacaccggaaagaccctcgaagttgtcatcgaggaggtaaagaaagctggagccgaggaggttaaggtcgcctgcctcagcatgaagccctggacgaaggtcgtcccggacttctacgtcttcaggacggacaagtggatcgtcttcccgtgggaggagttcccggtcgttgtgagggagtgaggtttttattcttccgctcccactcttctcggtgatatcatgagggcgttcatagcgatagacgtcagcgacgaagttagggacaaccttctcagggcccaggaaaggatagggaacaaggcagccaagataaagttcgtcgagagggagaactttcacgtcacgctcaagttcctgggcgagatagacgagacgaccgccgaggaagttaagagggcactggcggagatagcaaagaaacacaagaaacaccgcgtcagggtgaaggggataggcgtcttcccgaacccgaactacgtgagggtcatctgggcgggaatagagaacgacgaggggataaaggcgatagcggaggatgtggagaaggccatgaggaagctcggcttcaagaaggagaaggacttcgtcgcccacatcactattggcagggtgaagttcgtcagggacaagcttgagcttgccatggcgctgaaagacctcgccaacgaggactttggggagttcgaggtcgaggcgatagagctgaagaagagcacgctaacgccaaagggcccgatatacgagacggttgccaggtttgagctggccgattgaagctgtaaggggcctgtggacatttctggagaacttcggtatccttattgactgatacaaatctttttctttcgattgcatgcctatgccccccattattcagattttttcttttgagatatcataaaagtagaccacatccaagaacaatttttttcatttcaagttaacataaaaaatttagagaaaatgacaaaaatatttataaggacaaggatactataatgaattgaagataagttatggagaatgaacctaatgcagtggaaaattatagtgatagtcatattaggaatgattgtcttgggggcctccctcgaattgagcgcagtaaatcttgacttcaacaatcctccagctcaggtaatatccctacctcaagacaacgagaccaatacaagggtatgcgcaaattttgacccagatactgcattacgagaaataaatatgacaattcaaaagctcacattagatatcactcaaaaagaaaacagattgaaagagatctctaaagagataaagacaacacgggattccaagttactgaaggaaatagttgaactccacagggatattgaagtgtcaaaaagcaaaagagcattctatcaaagaaaagcaggaagcacacagatatatagacaatacctaaacggcgaaaacattggagtaacaagtgctgaattaaacaaatataagaagaccatgcctaacttcaaagacgtaaggaaccctgaggacgctataataaagctttcaattatgggtgaaatgacctttgataaaatagtattaattgacaacaaaataaacagcatacttgaaaacatctcttcaggaactgccatgggagatgacgtcatcagcaaagtcttttcattaatgaacaatcaatcaatattatggaatcagctaagagcgtatgctgcattaagagataacttacgagttagatcttttctctcaaaaaatagcaatagcttagccatcagtgctaatagcgatcacaattgtcagttaaaaagtaacggaaaaataaactgtagagaaattcaaaaaggctacgacgaagactttgactgttgtttgagcttttatagactcttacctgcgcttaaaagctatcagacttacaccttcatcaacctcagacccgtagctgtgtgggttgggatgtacagttcagaattccctaataaggattaccacgttggagattggtgcacttacacttttcccccagataataaagaatcaacaattattaacatctattgggagactgcccaagaaataagcagaaactgggagcttaaagtaagttctgttcagataaagtttttttactctgctttggtataccggcaggaaacacagcgatatgaagagacaaacttgatattccaatacgattgttatttcagcaagggaagagtcagatgtctaccttcctcgtcttacggaaaatatttatttacaaatcctaggactcctccatacaaatacaccactaaaatagttactaatccatattggttagtatgcaagtacggaggaaactgcaatggatacggctgtcaatattcaaaatgggcaaacgcacactgtggaggatgctttgcaccagataaatccgccagtcagtactttgcaaaatcctgagggggtactataaaaatggatcggcgtattctttttcccctcatttccatgtttttggcttttcttctgtgttctgacattatatctgcccaaaactggattttcaagggagttgcagtctcggacgaaggtatatatgctatgaccgaaaacaataccctcgttaagcttactgaaagcctggaacctctatgggtggttgagattcaaaagaatgcccatatcaaacgcctaattccagccgacaacggcgttctccttgtcggcgatgttttagccaagctcgacggtaacggaaccctgctctgggcaaagaacgtgagcgtccgcgacgcaagagttttgcccgatggaggtattgtcttcacagacgggaaggtcgttggagtgatcgacaaaaatggaaaaccactctggacaatcaagttcgcaacaagaatagctgaagtccctcccggtgtgagaataaacgcccttgcgccgctggacggctacatccttgtggcaggaacctacattttgcccgacgatccaaagtcccacctttttataggggcactctcccgggatggaacccttatctggaccaaagttctcaacacgggatactatgactatccagatgtcgccatctcccttggaaacaatgggctcgttgcaggggtttacggcggcgggagcgacgctccgtggatagctgactactttgccttaagggtgtctcccgacggaaaaattgagtggttcaactcctacgcctgcccaagagaagaggactgggacaggttttggagcatgaaagtcctcggagcggcctgtaacgatgacacctgcgctctcggaacaacgaccgggacgtttgttatcaacgccgagggaaaacttctaacggggcttaacttttccggaaaagccctgagagtggagaacaattcaattcttctcctctcgaacgggactctcctaacggtgccgctgaagggcgctgagtgccgcgcgtactcatccagtgtccagttcaaggagatcactccagacgtgaaggtcgtcccggcggagttgaaagtgggggaagctcatctgcaggtgacaaaaataaaggaagccacacggccagatcgcggaattcagaatactggagatggaggccaggctaaaggagcatactttggagttatcttagctgtggtcttaatcgtcgggatggctctggtagctaagctcagaaagtaactcctacttttctctctaactccaccaacaaaagcaataaaatacctcaatgcgaactccaatcaggtgtgagcatggagatggaagaagtaatcgctgaagtcctccagaaaatcgtaccaaccgaggaagagagggccttcgttaaggaactgataggggagcttgagggtatagcgagagaaaaggcgcaagagcttggcctcgaggttaagccatacttcgtcggctccctcgccaaggatacctatctcgctggagaccacgacgttgatctcttcttggcttttccgctcgacacacctcttgaagaagtgagggagaggggactggagcttgggaaggagatagggaaaacacttggagaatacgaaatagcctacgcggagcatccatacgtgagggctaaatacagggacgttaaagtcgatttagttccctgctacgacgtgagggactggaaggacgtaagaaccgccgttgaccgctcaattctccacacaaagtgggtgaacgagaacctcaacggaaagaacaacgaggttagactgctcaaacgcttcctcaaggggataaaagcctacgggagcgagatatacgtccgaggtttttcaggatacctctccgagatactcgtgataaagtacggctcttttgttgaagtcctcgaaaaggccgacttcatactgaggcaaaaggtggttgatccagcaggctggctgaaaagggaacccgaaatagcgatgaaaacagtaaggagggaagttgaagaggacaagcccctcgttgtcatagaccccgttgatccgagaaggaacgtggccgctaacctgagctgggagaagtacgggaggttttacttcaaggcagacgagttcctccaaaggccatcgcttgagttcttcttccctacgggaaaaactggaggggactatctggcggagctgaggagaaaggggactcacctaataacgcttctctttgacgttccggagatggtggacgacctgctcttcccacagctggagagaagcgcgagggggtttgagaaggccctttcgagggagggttttgaagtcttagggtggaacactggacggtacggtgctgaaaaggccttcgtaatgctcgaactcgacagggttgagaggccgagggtaaaaatccaccccggcccggagttcttcacggagagaggcagggacttctacagaaagaacgagagggtatggctcgttggcaagaggctctacgcggagaagagggtaaaggaaaatatcattgacgtcgtcagagaactgcttgagaagaaccaggtggcccttggaaagaatctgcgggaaactgtaaaaggagcagagatactcgtggactacgtgccgaggcctttagagaacgaggcctacctcttccttagcagagagaaggaaggccttaaacattagggccaagaggaggtcttttcttttcgtttcacgttttagcttctcaagacggttgagggcatcctccaattttgagcagaactcccagctgaatccccgctggaggcaatctatcagcattccctcgactttcttattcgacttctgtttttccatgtaacccaccgtcataaaattaggaggacaaaacttaaaaagctatcccctgtgctcgcaccactcccggttctcccagtgaccatgcgcctcgccgggtatgtgtccagtatctgcgaccgcccattcaagtttatagttctctatcagctccctgagcgaccccctgaggtcgcgctttccgacgaagagagccgctctcgtcacgacgttgtagccgctgtttggaacctctggggctagggcgtcggcccaggctttttcggtagtttcccagccctcaagcgacggaagagtgccgaggttccagaggtggtaaagctctccaaagttcagaagcttgaggtaagccccgatgaagaggccctgaagctcgctcccctcaaagtattccatgagctctatgagcgccttcgaaaggaccgagacgttgccaaaggccacgcgcgtgtcgaggttctcccagaagcgcggacaggagtggttggccaggagcatgaggtagtaaaccctaccaagcttaagggccttctcttctccgttcgccggctcaaggacgtagtccagggaggtgtccatgccaaagtagtcatagtagtccctgaagaagacccttgcgtagcggacgaggaactccgccgctctttcacggtcagcaccgatgtcttcaagggccctgaggactccgagcctcacaaccctgttcagctcttcgaagagcctcgtgaaggcaaccttccagagctggcttatcttccttccgttaaccgccctcgcaaagaccttaccgtcggccctgcggtagccgagccagcgtgaatcgcttgtcttgccgtcgaggctcagatcgaagtagtcgctccaggcagagtagtccttgacgcccatttcaaaggagcactccccatcaaggcgcctgaactctcccgagagcttccgtctgacgaactccatagctgaaaccctctcgacgccgttctcttcgaggcctttcatccaggaaatgaacctgtcgagctgtgcagggtttccgagaaggctctccaggtcacttgccgtgaagacaaggtaggggacaccaacgctctccttgtattcgtcccgtctctccagggtcttgccgatcaaacctagaacatcgagggtgttgaaggcaaaggcgtcgctcagctcccactccctcccgaagacaaaggagttcagatagcggttgcaggagtactttgcctgaggaaagtcgtagaggagctgcctctcgtcgaggaggaagacaagctttctgtcagttgaagattcaactattgaagcgctctcgcgggtgataactgcttcgggaagccagtagccaacgactgggcggttctctatcaggggcgagtagaagtcaaaggagaccttagcgagtatttcctgctcaaacctgtcgaggtggggcactataggatggaagggcgttgtcgggacagcgtcaagctcccgcaaaagctccactgtctcctcaaaggcgcgcctgcggtagtggaggagcatgaggaaagtgaacggctctatgtcaacgctcacgcccttcatcctgccgaggacgtcgtttatgtactcataggagtacaacatggccctcgtccagttctcgcccttgacgtactcgtcgcggattttaatcgagacggggctcttacgctcttcatactcaattggggatttcccatcgccgtccttgacgtagactatatcgccgggctggtaagcgtggaagtggtgggcgtacttcatctccattgtctcaccgtgagtgatacaattcggaagtttatgggcctttcggaagtccattattacccagagatgtccgacagattaataaaggtgtacactcaatttctcccggtggaagaatgagaagggagataagggagcttcttggtgaggagctggccaactacctcgaactgttgagggcaaagctcgccttcgccgaagagctgtacggagtcaagatgaactacgttcctctaatcactgagggagaagttgttgtcctcgataagaacgacggggaggtaaagtggctcagggataagaggcctctcacgacggaggagttcctgaggctgctcccgaagataaaggagaaccttgaaagcggcttcgtcgagatgctcctggctatgaacatgggctgcatcaacgggccgggggagtaaatttttaagctccccatcggacgacttccgatgaaaaaagccgaactcgcactcctcggtgtcactgtcttctggggcttcacctttcccgccatgaaggttagtctcaactattttccgccgatactctttctcgcctaccgcttcggtctggcttcactcctcatgcttcttatcttcgggaggagggccctaaagcgtgagacgtttaaggaaggcttcatcctcggcctgaccctcttttttggccacggcttccagatagtcggcctcaagtacacgacggcctcgaactcggcgttcataacatccctctacgttgtattaacaccgttcatagcctacttcatgctcggggaaaaagtgaccggaagggacttaacttcgctagtcttggctgtcatcggcctctacctgatatccggggcgggaacgtccataaactacggggacttcctcacactgctctgcgcggtgagctttgccttccagatagtcctcgtccacaagttcggcgagaaggattatctaagcctgaccttctggcagctgttctggaacttcatcttttcggcgctcttcgccctggcctttgaagagcctgcttttccgagggaagtgctcccgtgggtgggcgtcatctacacggcggtcttcgccacggtgatagccttcacggtccagctcaagtatcagaggtacacgacggcccagagggcggcccttatctattcttccgagccagtgttcggctcgctcgctgcttacatagctctgggcgagacgctctcccttaggggctacctgggtgcggcgctgatcatgagtggaattctgaacgaggtcaggaaaaattaacgaaaggttaataaattttgaatccaaccttctctggaggtgaggccgaatggtccacgagtacgttaaggagaggattaaggagttcacgaaggaggagaaggaaaagcgctacaagtaccttggcaaggaggtcatcgacgttggagacccaggcctcgacagcatccccgagttctacggcatagccaacgccatctggagggactggaagaacggggagataagcacgaagacggccctcggaaggctcgcgctcctcaagctcctgacctacaagaccaagaacaagaagatagcagacatacctgaggaagacctcgaggaagtcaggaagttcatagactacgtcatacaggtcatcaagaacgagagcaggaggaagggagaacccgaggaagagaggcagatcgaggagaacgcttaaattctcaaacgctgaactcccagtgccctcccctctcacacccccgggagcggtgaccggggggcggtcggggagggcacaccttcacagtccgtaccattcagggttcagcctcggaaccagggccattaggacagccagcttgttcaattcttttctcacgagcattccatgggtcagaacgcctatcgcaccgatttttctcttcagctcggggtcgttaaccagctcacccatcgcaattccgacctcaacaccttcctcaaacacccgcctgattactcctggagggtactcaaagcccggcccgtggccgagggttattctgccctcccggtcaacaacagcacagaactggacgtccatgtagccggtaatcgtttccggaacccggtaaaggccggcctcgatgcccactccaaagtctgcatcagttttctcaatggcctgtttggccctgttgatggctcccttaacagtctcctctagcccgacaggctggtcaggaactccgctgtccacctcgatggggactacctcaacgtctccataaatccccaggaaaacctctctaacggcctcaactttggctgggtttgttgagccgacggccactttcattctaccaccacccccaaagaaaaccaagagggcttaaagggattgcccgagaaccatccaaaaaccttataagcagacttcccaactttgcccgatacccatgaggggggagtgttttatcctccgcttcgcccgtttcgaggcttgagaccctcttctgggttagcattgactatcatttctggagggattttccatgatcagggagccagagtttagggagtacaacccaggtcagcttgaggagaagatagaggccttctggaaggagaacaacacctacgagaaggtgaaaaagctcagggagaacggcccgaagtactacttcctcgacgggccgccgtacgtcagcggtgcaatccacctcggtacggcctggaacaagataatcaaggacatgataatccgcttcaggagcatgcagggctacaacgtcaggagacagcccggtttcgacatgcacggccttcccatagaggtcaaggtcgagcaggccctcaagctgaagaacaagcgcgagatagagaccaagataggcgttgacaacttcataaagaagtgcaaggagttcgccctcaacaacctcaagatcatgacggagcagttcaaacagctcggcgtctggatggactgggacaacccgtacatgacgataaagaacgagtacatcgagtcgggatggttcacgctcaagagggcctgggagaagggccttctcgaaaaggacaagcgcgtcctccactggtgtccgaggtgtcagacggcccttgctgagcacgaggtccgcggcgagtacaagatgaggaaggacccgagcatctacgtcaagttcccgattgagtggaaggagaaagagtacctcctcatctggacgacaacgccctggacactgccggccaacctcgccgttgccgcccacccggagtacgagtacgcgaaggttaaggtcgagaccgagaacggcgaggagtactggataatggcaaaagccctcgtggagagggttctcagcgaggtaggcgtcaagggtgaaattgttgagacgttcaagggcgaggagcttgaggggatacgctacacccatgtcctccttgaagagtacccagctcagaaggagttccgcgagaagtacgagtgggcgcaccgcgtaatcctcggcgagcacgtcacgcttgaggacggtactggactggttcacaccgcccccggccacggtgaggaggacttcgaggtcggccagcgctacggtttgccagtctacagtccggttgacgacgccggaaggtacaccgagggcaagtggaagggcgtctatgtaaaggacgccgaccctgagataatcgagtacctcaaggagaagggctaccttgtgaaggctggagagatagagcacaagtacccgcactgctggcgctgtaagaccccgctcatattccgcgccaccgaccagtggttcctcaaggtcagtaaggtcaaggaccagataatcaaggagaacgacgagaaggtgacctggtaccctgagtgggtgaaagttaggtacgacaacggcgtcatgaactccggcgactgggtcataagcaggcagaggtactggggaatcccgctcccgatatgggagagcgaggacggagaatactacgtcgttggaagctttgaggagctcgttaagctcgctgtcgcgatagaggtcaacggcgagaggatagatctcccggagggctatgaggagaagctgaagataatagaggagaagctcggcccagaagaccttcacaggccctacgttgatgccttcatcataaaggtgaacggcaaggagatgaagcgcgttaaagacgtcgttgatgtctggttcgacagcggaatagcgagctgggcttccctggattatccaaggaacaaggagctattcgagaagctctggccggcggacttcatagttgagggcgaagatcaagttaccaagtggttctactcccagcaggcggcttcagtcatagccttcgacaccgtcccgtacagggccgttgcaatgcacggctacgtcctcgatgagaagggcgacaagatgagcaagagcctcggcaacatcataaggccggaagaggttgtccagaaggaaggaagggacccgttcaggttctatatgctctgggcaacgaacccgtgggagaacctccgcttcagctggaagggccttgagcaggtcaagaggatgctcaacatcctctggaacgtctacgtgctttcagccacctacatgagcctagataacttcaacccaaccaaggtcaatccagaggaacttcccttcagggaggaggacaggtggatactcagcagggtcaacagcctcatcggagaggtcaccgacggaatagagaccttcaggctgacaagagctacaaggggcatctacaacttcgttgtcgaagacctgagcaggtggtacataaggctcatcaggaagagaatgtgggttgagggcgacgacccggacaagctggcggcctactacaccgtctggaaggtctttgacgtccttctaaggctcatggcgccgttcacgccatacatagccgaggagatataccagaacctcataaggcccttcgtcggtgtggagagcgtccacatgctcgactggccggaggcggacgagaaggccattgacgaggagcttgaaaaagagatggagtacgccaggaagatagtcgaggcaggctcaagcgccagacagaaggccaggataaagctccgctaccctgtcagaaggataatcatcgagaccgaggacgagacagttaagaaggccgtcgagaggatcaacaggatactcagggatcagctcaacgccaaagaagtcgtcgttggaaaggtcgagcgcgagcttatcataaagccgaacttcgcgaaggttgggcccgagttcaagggcgacgccaagaaggtaatagcctggataagcgagcacggcagggagctatacgagaagggcgagatggacgtcgaaatagagggcaagaccttccacatcacgagggagcacgtaaccatcgaggagaagctcccggacttcttcgttgctgaggagttcgatggaggaagggtcttcgtggacaagaccctcaccagggagctcctggctgagggactggcgagggagttcgtgagaaggatacaggagatgcgcaagaggctcgacctcgacgtgaacgacagaatagttgtaacaatcgagacgaccgacgagaaccgcgagctcctccaggagaacctcgactacataatgcgcgaaacgagggctgtggaggttcgcttcgaggaggccaagggctacgtcgtcgagtggccagaggtgcaggcgaagatagggattgagaaggtttaacctctccctatccttttttagcagcaggattcgcgtagggcgctacaacgttcttcgctccagctactaccagtattctggccagtccaaggtcatctatttttccgcattcaacgtatatgtactcgccgtttttggtgtaaagcttcgaaaacaccacctttatggggccgttttgccatttccccaaatcttcaacgacggtaaagttaagcagtcttatattttcgttaattttctcaatgatgtcctcaatggaacacgaacaaccggcctcaattaagcggggttcagtctctccaccaaaaaggggttctggccagaaggcccatcgtcccttgacgaggggaatgaaatagtaggcaatcttaacctctccactggatgaactggtactgcccatctctaccttctcaagtttggagttctcacctgaacagcttccgcgttcatactggaaataatgcctcaaacgggcagtatctccgggcaggatcatcttcacttcccctccccatacggagcattgtggtgtgatacccagttttctggtccagctgcttttctcaccgttgagaaacggtgggattatctcactgtcctcggtttcatacacgtatccctcggagaaaaaaacgaatccccctccagaaatccgtactgccgtcgtgggccaattggaagagtaagggattgaggagaggcaatcggtggagaagttgcttaccgagagcttacaatcgggattcctttctggaagaatatgcacaaaaaagagcaaagagaaaagaaaaaccgcagcaccgaaaacaaaccccctcttcaatttaaatcaccctccagaagttactgccacgtaggggcatattccattccagcacatctttatgggttttacagttgttatcattgcgtccacccagttgccgacctttatccatcccgcaggtagatccttccatgttgtgtgtacgtatattgctgggacgcttgaatcgtacccaacaaaggtcattgagtgtccaacaatactgccatttctaagtctccagtgaacattcaaaagacccggatggttcttatcaacttctcctttaatcgctaagaacagttgatagtccgaagagtattcacgattcgtggcatcgtagctgtaggttggatgaacactaagatgtccgtcgttatagagtttcatgacctcccagtaaaagtcctcaattcccttcgttatgccgtttgcctctgttctaccactactgtctgttcccattgtaaagtgaagaatatcaattattgcttccctcatataggcgcttctaaattgggagtcataatatgcaaccaccattgatgccgctattggggaacagccatcccagtcaccccacggatctggcgcaggacccacgttgttagggtatccaatgttggcgtttccagtgtcagtggatgtccaagttggcaccccttcaatgatctttcttggggaacttttgagggcatccttttccaacttgacccagagcacctcgtttttcttggattctattgagaatctgaatgatgcactcggatcgatcctgtactccctaccggccaaatcaacgaccgtgccatcctcggtctgaattccaaacattgccgccccaagaacaacgtagcgatagtgcttaattcctattgtttccgcaattttgtccagttgctggctgacaagcttcctggcctcgaacacctgcatccatccgggaggcattgtttttaacgcaggtatgaacatgacgccaacaacttttccatccttgaggaggggaacctcatagtaggcgggtctcccatcggggaagtaaaacagaaccagcttcttcccgatttctgcccctttgaagtccataaagggaaagctgttaagctcgttttttgctagatacaacgccacgtttctggaaacctgcggtagaactttagtagaacttttggccacttcaagggcagggtcaccgaaaacgtagctttccgtgttaagtaatgtcatccccaaaatcaaaaacatcagcagtattcccaggctcctgttcttcaacttcatagagcatcatctaaccgagtggtcactaataatgatgtatgatgctatataaatttttctatttttgcagttattagttgaaccaactaacgttttttgttataaccaacttgtaataattaaaattcaagccgatcaaacgaaaaaagcaaagcaaaaaagcaacaaaagagcacggaagttcatttttccaaaattttcaccttcagtccgtactccttaaagcgctcgaagcccttatcgcaggtgaaaaggactgaattgtgggctattgcagttgcggcgatgagtaagtctttaaatggcggccgctgacctttcttcgtcagatctctgaagattgcacccgcgatctttgcggcctcttcgttgaattcgactttcggtatcatttcaagcattaactcttccctctccttcaagcttccacagtagagttcaaagaggactatagcggggagcgcgtaagtttcacctggggaaagaccctctatgacttttctgtttcccccgaagagctctataacgacgctggtgtccaggagtccatccattcttcgacctccttgagctcttttttaagctcctcaacctcttcaggtgttctcgttccaaaggcgatcatgagcacatccaggtttcccttcttttttttgccgatcagctcccttagaagttccgagaagctcttctttcccttcatctttaccagctcgtagtagacgtcgtccgctatggttatcgtctttcccaagggcaccacctataagtgcatgcatgcacgaaacatataaatcttgtggactcctagtggctttaatggagaggaaggaaaattttttaagacaatgtgtcataattagtatcgtgagagcatggtggaattcacactaaaactcgacattgagatattcaagctagccatcgttacgttagcccttttcatactgtacaaatatcaccggatttttgagacggctctgcccccaaacctcctgagaaggggcacatacgtcacggtgattttctggctcggctttcttgccgatgttatgaacgacatgtacccaacacccttcactaagatcctcgacgacataataatctccttcgccctcgttctcgggagttactacctgattgactacatgcgaaaggtaagggttaacgttaccccgtcaaaggctctaagcggagactcaaatctgccaaatggggcacacattatcacagacccaaacatcccagcagtccccgagcttataaggggcaagaaggccatcgcactctccagaaatccagaccccttcaagaaaatgggtgttccttacctctggctcagcaaggtgcccggtgaaaacaccatagaccccctccgccttcctgcgatactccacaagctcgttgaaagcgccgatagggacacggtcgtcatagtggatgggctcgaatacctgattctggaaaacggtttcaacagcgtgataaagtttctgaccaccctgaaggacaacctcctgctgaaaggtgcaaccctcatcgtggttgcagatccaaaggcactggaaccatcccaaatggcaatattgagaagggagttcagggagattccaaaagaaggccaaaaaagttagaagagcagaacagagatggttaaagaagctcaacctcaaagtactctccagggtgctctatcactatcctaagtacttctccatcgcttccgtcaactattttgcccccactgaccttgacggattcaacccccttcagggcaatttcactgtggcctgaaagatggttcctgaacgtcagcacatcaccttcccacatgaccaaagtggccgtggcgtaggcaacctccacgtccccttttctaacgccgaacggcaggtagagggtgcccctcctcttcaattcaatgccatcgaggaggactgggacttccagccccctgtagcttatcctgccctttatagggtgcccccgcgggtttgtaaccgcaaggtaggcgtagcccttaccctccatgggaaggactatcatgtccgggttcgtgacctcgaagtcctcccttaccccctggagctccttgagcttccagacgaactttctgtggaggtcgtggtggctcgtgtagtactggagcctgaagccgaggactacggcgctccccccgcccttcctgacgaacgccccgacgggcttctcccccaggaaagctatgggttctccgcccctcacaccgcgcaccgtgttcctgacgagcattctgtctattccctccgctgaaacgctgaggaactggatgaggcgcgggttcctcctggctttctccctctcaacttcaacgccgaggaagtctttaagagagctgtagggctccagattctcgtcgtagcgcgggagcatcgggagtataacgaggtttccacccctcgcgacgaactcgacgagcttgtcctgaacttccctggacatgaagtcgaggctgtagacccagagctgatcgtagctcaggagctcgtcgagagtgacatcttcgaggtcaacggcatcgaagggagtattgctcatggccaaaagcgtgaaaaggcccctctctccaaggaggtactcgttcaggtctgtgctctcctcaaggccctcatagccccagagattcaaagcttcgtagggctcgtagagaccgaccgcaacttttggcctaagctcggcatcggcgagtccctcggcggaggtcatggtctctgagagagcctttatgaccccgaagtgaggcctctcggatccatcaaggccaaccggtgagtaaacgtcccaggttatcccgttgtgtgattcatatccctctggattttccccgccaacgaagaggtagtagttgatgttcggtatgcccagagggggcagtattgagtacaggagctcggcctcagtcgggtctatggtgtgcgccagcgagctctgggtctcgatgcttagcggtggcgttccagctttcctgacgtggtagcggtagattcccgtcttatagtagatgtggccgagcttgtcctccttaaagtcggaggagcggtagaaggagtaccagaactctgtccagacatgaattttgaggttgtgctccctcatgtaggtgaagaagtgcctccaggcgacttggagaaggtaggggtcgagaatgctgatggggacgtcgaactccctcgccatcctctcgtatatccagcggacgtactcgttgatcatccagagcttgaagtggtgccagtcaataagctttggtaggggctcggagaaactcgtcggaacctttatctcggagtagtccttgaaatcacccttgtagcgcctcctgaggtcttcaagggtgtagttctgctcaagccacttctcccacagtccccctggctttgttattatctcgttgtagtctgtaaggaaaggctggaagattgtttcccaatatgatggctcatcatcgattgagacgcttattattggccccccgttagtgtataggtacttcctgatcactggaaagacggcgttgtaccactcccccacggcctccagataagtagggtggagatacgttatcggcgggtagtagatgtccctaggaagcggcccgttcggccccttggccagtatctccggatgttcgtctatcagccagtctggaatgccgccgttccgccactcgccgcagatataggggcccgggcggattataacgtaaaaaccaagctcgtctgccagttccaggaacccgactagatttctctgtgggtgagtttcacccttgaaatcaaagcttcccttctcaggttcgtgccagttccaggctacgtaggtatcaaccgtgttgaggcccgcttccctcatcttgaggagcctgtctttccacgcatcggcggggaccctgaagaactggagtgtgcccccagctatcgtaacgggttcaccgtcgatgacgtaccttttgccgctaaactcaacctttcccattcccatcaccactttacgaccttactgagaaagcggggctgatcagggttcaggcccctcttgatggctttatagtatgagagaagctgaataatcggaagatggaggattggagtgagcagttcatcgactttgggaagatcgatgaagtagtccgctccagtatctccgttgcctatcgtcagaaccctagctccctgcccctggaattccttcgtaagcttctcgtgccagtcgaagggttcgttaaccagaaggacaactagggttccctcgtcggcaaccgacttgaagccgtgcctgacctcgaaggtctggtaagcctcgctccagaagagtgccatctccttcatcttaagcatcgcttcgagggctattgggtaaaggatacccgatccgaggaatatgacgttcctgaagtcaaactccccagttatctcccgtatatagccctcgttctttagggcttccctcgtcagttctgaagtcatttcagcatcgtaggtttccaggccgaaggaggcgttgagaagctggaggaaggcgaagtagaaggccgtaaaagagtgggtcatgacgacgctctcctcgtgggtggggactatgagggcgtagtccgctttcctcgacagcgtgctctcgtaggctgtcagggcaaatttcggaacgtccaaggattcaagggcctttacggcctcggtcgtctctcctgagcgcgatattgaaaccaaaagctcgggcttcccaacagggtagtactccctcgaataaagaagttcggagcaggggagggccactcccctgcccccaaggcgggtggttgccatggccagcggctgcgacaggaagtgggaactgccacaaccagtgtagaccacttctctcggtaacaggaagtcgctattggttacgaactcctcaaaggccctctgggctgtttttatcccctcgggagttctcttaatttctctaagcgttgcgtgcattcactcacccccgtgaaggtggcaggcaacccagtggttcttctcaacttcaacgacctggggcctaactttccagcacttctcggttgcaaaagggcagcggggagcgtagttacatccccctatctcgtaaacgctcctttcctccgcctcaggccgaatttcacccttgaattcccattttacgttgaggtcgggaacgctttccagaagcattctggtgtacgggtgaagcggattcttgaagaccctctcagtgtccccaaactccactaaacgccccctatacattatcagggtcgtatcgctaatgtagtaaccgagggccaaatcatgagtaacgaaaagaaccgaagtcccaagtctgtccctgacatcccccaggaggttcagaacgtctattctcgtgctcgcgtcgagcattgaaacggcttcatccgcgaccagaagggaaggctcgactagaagggcgcgggctattaaaatgcgttggagctgaccgccgctgaactggtggggatatttgccgagaacctcatcggggttgagaccaacgtcctccagagcctttgcgatcagctcctccctctccccgtgacttaggtccggaaagaacgagtcaaaaatcatgtcaaaggctctgtcaactggatagaccgggttgaaacttgcaaagggatcttggaatacagcttgtacctgcttgtagtaggacttaagctgtttcttgttaaatttcatgatgtcctctcctttgaacagaatccttccagatgtcggaggaaggaggcgaagtattattcttccgatcgtggtttttccgctgccgctttcccccacgagggatattatttcaccctcccggatgttgaagctaacatcgtcaacggccttgatctgaaaaccactgatgaatcccgatgtaaacacccgagttaagtgttcaaccctgacgagaggctcactcatttttctcacctccatagagatggcaggccactatgtggtcatcaccaacactgaatacccccggttcgaccctttggcagacctccatggcgtaggggcaccttggatagaagcggcaaccctttggcgggttgaggaggctgattggcgtacctggaatgcccttcagctttgcccgcttgtagtgcacgcctatcttaggcaaggactcaatgagaagggaggtgtatggatgtgctggagagtctattatttcctctgtaggcccgatctctgcaaccttaccggcgtagaggaccatcaccctgtccgctatcttatccagcagtgccaggtcgtgggtgacgaagatgatggacttgacgatgccctccttcatgaagtagtggaggagttcgagaacgaccctctgagttgtaacgtcaagcgctgaagtaatctcgtcggcgatgagcaagtcgggattcatgagggttgagactaccatagttgccctttgcctcattccaccggacagctccactgggtacatgtccgcaaccttatcactgagtttgaccatcctaagcctctccctgaggagtttctcgacctcctccctgtcctctgccccgtgttccctcgccaaatcccagactatgtccttgatcttcttagttggattcagagcgttcatggcatactggggaattatcgagagctcagtgtactttattttacgttcttcttccttgctcagcttcatgaggtctcttcccttgaagatcgcctctcctcccatatggatcatggggggttttctgaggataagggagtgaacgagggtggatttgccgcacccactctctcctgctattccgaaaacctcacccttcctaacgtcaaaggaaaccccatcaacggccttgacgaagcccattggagtcctgtagtagactttaaggttcctaacgtcaagaattgccgtcattcgccacccctcctgagcctcggattgaacacttcctccataccgaggttgatgaagaacagcgccgttatgatcaaggttatgatgagccccggcggtatgaaccaccaccactgcccgaactggagggcgttgtaggctatcgccttctggagtatcgttccgagggataccgttgtcgtcggtccgaggccgatgaagtcgagggtcgcactggccagtatggcaccgctgaactgcagtatcccggccatgaagacgtaggataccatgttgggcattatctcgccgaagattatcctgagatcaccctgggcgctcagcttcgcgaggctgacgaactccctctccttgagcgagagggtctgcgccctaacggccctggcaacccacggccatcccgttattcctattatcaaggcctggacctctggacttctggcggagaggtaggcggcgattaggacgagcaggactatagagggtataacgagcattatgttggtgaacatcatgagcgtctcatcgacccagccacccttgtatcccgctatgaacccgatggttatcccaaggatcgttcctattatagccgccaggaaggccacccagaggctcgttctaaggcccgtgaccagctgggcgtaaacgtccttcccaagggcatccgtacctaggaggtgagtgacttctaccctgttgccgaggtaggtgatcagcgtctcgttgctcatgggcgggaggaccttggtggagtacgttgccactttgatgctcgtgttcggtaccctttcgtagtacagaccgtcgccgctgaagggcgtgaacagacccccgatcagcgagaaaacgatgaagaacatcaacacgctgaagccgaacacgaacttcttgttcctgaacgctattttaaccgtgtcaagcctgccccttctcgccattttcaaccctccgtgtagctggccctgacgcgcggatctatgaaggcgtagattatgtctatcagaaagttagccaggagaaccgctatgaccaccattagaaacgccccttggaggaggaagtagtcctggctcagggccgcgttcattatgagaacgcctatcccagggtagttgaagactatctctgtcgctatagctccagcaaccatgaggcccagctggagggccagtcctgtcacctgggggagtattgcgttcctgtatgcgtgcttagttaggagtctctcactgccgccgagggcctcaagatagcggacgtagtcggcctcaagctcgtagattatcatgttcctcattcctatggcccagcttccgatcatgaccgtgaagaggctgaggaacggcagtatccagtgcttcagaaagtcgccaacaaagctcagggaaatcgagggtacgaggcttggatcgtaggccccctggtagggaagccatccaagctcaacccccacaacgtacaccagcagcatggcaaaccagaagtagggcatgctcgcgaggaaatagaaaacgggcatggcgtacctgtcatacatcttatttttacccgcaagcgcaccaagccagtttccgaccagccagctcaaaacgatcgcgggcaggaggattacaatatcataggggagggcgtgctttattatatccgcgactggggcacggtagagtatgctatagcccagatccccgtggaagaggctcgaccagaagtttaggaactgcttccagagaggctgatcgagcccgtaaagcctctcatagaaccgcaccagagcatcgttaacactgccccctgtgcccgcctgggccatcatgccctctatcgggttgccgggcattaaccttgggagcaaccagttaagcgtgaccgcgaacaggaaggttatcaggtacacgaaggttttgcgcatgaggtactttctgaatccaccagaggccatgcaactcccctccatcggtcgagagacaataaaaatgaggaaagactcagcggcgtctcctcagcagcaacggaatcacggccagtcccaccacgaccgctgggccgcagatgccgccgccgttgcttgaggatgtggtggagcccgaaccggtgttggtcttttcggatgttggggttttgctggtggttgtctcactggtcgtggttgtagttgtcgaaacctcctgagcattggcgggcttgacgccgaggagcgcaagggcggtaccccatgtgccgtagttagtccagaagatcggaacgccgtaggggttcttctcgttcggccagttgatccagtactcggtgttggcctcgtagaagagcgttgccatgtaaacgggaaccgcaggaacgtcctggagccatatctggcagagctgctttatgtactgggcctccttgttctcatccacggtctttccgaactccgctagaatctgatcgacctgtgggttctcgtactttccgtagtttgcaccgccgtcctttgagaggagcatgttgaacacggcgtaggcgctcggctggaaggtgcctgaccagtggagcgcaaggtcgaagtcaccgttctggaggctcttaacgaagaagttagtccagtctcccttctctatctcgacttcaatccccacggccttgagctggttggctattatctcacccgcctggagccagtcgttacaacctgcacaggtgacaaatttgagcttgagcggcttgccgttgtactcccttattccatcgccgtcggtgtccttgacaccagcctcatcgaggagctttatcgccccggcaacatcaccgtacttccatccgtactgactgatgagaccgtcgataccaaccttatcgccccatttcttgaggagaccggggccgaagggaacctccttcggaaggtcgcttatcggaccctggttgacgatgagcggcttgccagttgtacgccctgtatgccatgcaccagtcggtggtcaattgacaaccaagcactcaatgcgaggggagcttgttatgcagncccacagggcaaacaatgcgacacggtgacattgcacatgcacagtgacttgtatctgatttggagatcactgtctngagtactcaaacacctgtatgcagcaccacaatgttgcattgtatggaggactctaggggctacaganaggggaactaccaacctatcgccccatgtcttgaggagaccgggaccgaagggtacctccttcggaagctcgcttatcggagcctggttgacgatctgatatggcatgatggccatcgctattgcccttctaaccttcgggttgtcgagcggagcgtgcttggtgttgaagtacaggagaacggggtcaacgggcgggaagtaggggtacttgtcgagccagctcacgagcttggggttcttctgcttggccgagactatgtcgatgtagtatgtaccgacgtcgaggtcacccttgatgaacatgttcgctgcctggttgttgtcggtgacgtagagctggacgatgtacttcggtccgggctttccaaataccttaacaccccaccagtcgtcgttcctctcgaggatggccttctcctggccgactacctccttgagcttgtaggcaccagaaccgacgaggtacttcatctcatcgccggtgaaggtcatcttgggtatgtcctcggggttaatgttctcgaaaacgtgcttcgggactatgagtgcaccctgtccccagccgaagaacatctgaagctgccagagctggtagttaggggttccgtcgaagatgaactgaaccgtcctgtcatcaacgacctttatctccttgaggccaaggtcgccccagttcctaaggccgatcttctcatagtattcataggagaacttgacgtcttcagcagttaggggttcgccgtcctgccacttcagacccgacctaagtttaacctcaaagacgttgtcgccaacccacttgccgctttcggcaagccacggcttgagctcgcccgtcatgaagttgaacatgaaaagtggctcgaagacgaggccgtctattccaagaaccgaacctccagtgaaggggttggcgttcgttgggggtgcactgttggcagtgtagagggtctcgttcctcggcaggctctctgcggccagaccgtacccagcctcgaagaggccgagaatgaaaatcgccacaagggcaaccgcggtagctttcttcatggacaccaccacttataaggttggtcaattttatatttttggacatctatataaacttatctatttttgggcatcttagcaattatgtggacaaagcgccaagaagtggagggacgcccactatgagcattgcaatactgatccgtccagaaataccaagagctgtcagatcctacatattgcggttacgaaaattataaaagatgccatgattataaccattcaggtggaagtatgagggagtttgcatggggcgttgtccagtcggcgtttcagtttgagatgggagatccattgaggaggtttatagacactcggacggactggtggcactgggtccgcgatccgctcaacataaagaacgacctcgtgagcgggcacctgcccgaggacggcataaacaactacggcctctatgagatagaccatcagcttgcaaaggatatgggactgaacgcctatcagataacggttgagtggagcagaatctttccgtgtccgacttatggagttgaagtggacttcgagagggactcatacggactcataaaaagagtgaagatcacaaaggaaaccctccacgagcttgaggaaatcgcgaacgcaaaggaagtcgagcactacagagaggttctcaaaaacctaaaggaactcggcttttcaactttcgtaaccctaaaccaccagacgcagccgatatggctccacgatccaatccatgtgagggaaaactttgaaaaagcaagggctaagggatgggtcgacgagagggccatccttgagttcgccaagttcgccgcttttgttgcctggaagcttggggatctagtcgacttctgggcaaccttcgacgagccaatggttacggttgagcttggctacctcgctccctacgtcggatggccgccggggatacttaacccgaaggcagctaaagcagttatcatcaaccagctcgttggacacgcaagggcctacgaggcagttaaaaccttctcagacaagcccgtcggaataatactcaacataatccccgcttacccccgcgaccccaacgaccctaaggacgttaaggcaacggagaactacgatctcttccacaacaggatattcctcgatggagtcaacgaagggaaggttgatcttgatttcgatgggaactatgtcaaaatcgatcacttgaagagaaacgactggatcggcaacaactactacaccagggaggtcattaggtacacggaacccaaatacgaggagctcccgataataaacttcgtggggaccgaagggtacggttactcctcggagcctaacagcgtctcgaaggacaacaaccccacgagcgactttggctgggagtgcttcccgcaaggaatgtacgattcgataatgataggaaacgaatacaggaagccgatatacataacggagaacggcatagccgattcgagagatctcctaaggccgagatatataaaggagcatgtggagaagatgttcgaagcaattcaggctggggccgatgtgaggggatacttccactgggccctgaccgacaactacgagtgggcaatgggttttaaaatcaagttcggcctctatgaggttgatccaataagcaagcagagaataccccgccccagaagcgtggaaacatacaaaaagatagtgcgggagggattaccttgaagaccatcgccgttgacgagaacacctggaagaagataaagctcctgaaggacaagctcgacgccaagtcctacgacgaggttctccaaaggctcatagagacctggcatctagttgagctcgacaaaaaggtcgagaagatcatagttgaagacgacgaggcagatgtactcctgagggtcatcaaggagagggataagaaatgaccctgcccgacagcatactcttcgatgcgacggcactgataaaaatgcatacagctagcaggaggcggcttttggaggtcacgctggcaaagttcaacgtcttcgttccgataatctcagtttacaagtacttagtctccaaagcctacataaaccgcaacgttgaggacgagttcagaatcctcaacgaaatatacacaatcctccccctcacggaggagatagtactccacggggcaaagatcgaggcaaagctcctcaaaaagggcctaaggctggacgttgacgacatcctcacagggacgtttgccataaagcacaggatgctgttagtgacggcggatccagagaggtacagggcgttgaccgagtttggactggacgttatggagctcgaccacttcctaagagaggtggagaggatagtggcctccagcctgtcttaggaccgaaggccgccagaaacatcagataacgtgcgcgaacggacatatgtgcaggaagatgccaggaacgaaccttattccttctgcatacctgtgtccactcatttttccatagtacaaagctatcgttctcaagtagggctcccaaagctcccacacatcctccgggaactggctctcgtgtgtcctaacggccctgagcttaacctccatgacatcacttatatcaacgaagtagttgggtttgtgggtgtagtagaagccaacggcctgtatgctgtgggggtcaagacccgcgattaagtcggagcggttgaagttcggaaggcccgcgaagctgacagcttcaattccgagaaaacctgcatgcctgtgatcagggtggccctcgtagggaagccacgggtctggcatcaaaacgatcccgggcctttcctttcttatcacggtaactatctcctttctgacctcccgcgtgtagggaagctccgtgtcgccaaagtcaagggcatgtatcttcttaactccaaggatctcggcgcttctcttctcttcctcaagtctcctaagggccagctcgtgcccggagacttctccatcggttgttcccattgagccgtctgtgaggaggagatagacgacatctattcccgaatcggtgagcttctttatcgtgccgccgagtccgatggcacagtcgtccggatgcggctctatgcagaggacttttttcacgtcattaaagggctcgttgatcttgaagtcgagtttgctcagcagagcagagaaagcttcgtcaaaattgttgaactcctcaaacaccataaccgacaccccacactccagagcctcgggttttatataatttcatgattttataacctttttggagtgttaaatatgccgctgtttggccccaattctgacgccataaaggctatctaagccgggatatcgataatatataaaatgccataaatgtaattttgaaaacatttataagcatggaagttcatgtaaaatatgcaacatctcccaaaacattcaaagctcaaggggtgttgtgtgtgaagaagatttggacttcaatagttttgaccgcagtgctcctgctgtccctggtccaggtgggcactttcccctgggcttcagcggcggagagcgtaagcctgagcgggagcgctatagcatgggacgttgtgaacctgacttggagcccgtacagcagcgccaaggcgtacgaggtgtacaggagcacggatccctccaacctgttctcaccgaacaacctgctggtggtcgttaactggagcagctatccgaaatatgagccagggaagacatacaaccagggcgatgtcgttgagtacaacgggaagatatggcgcgttaagtactggacccagagcgttccaggaagcgacgactcctgggagctcgtaggggatgttgtcccaaccacaagctacctcgaccagtatcacctgaaggcaaacacaacctactactacggggtcgtcccggttctcgccgatggaagcaggggaagtccctcgaacgtcctcgccataacgactcccctcgaaccttacagggtcatagtctactacatctcctggggaaggtacgcgaggaagttctacgtgagcgacatcccctgggagaaggttacccacgtcaactacgccttcctcgacctcaaggaggatggaaccgttgccttctacgatacctacgctgatcctctcaacctcgaggccatgaaggagtacaaaaggaagtatccagccgtcaaggttctcatctcagtcggcggatggactctcagcaagtacttctcggtggtcgccgcagacccggccaagagacagcgcttcgccgagactgccatagagatcctcagaaagtacaacctcgacggaattgatatcgactgggagtacccgggcggcggaggtatggcgggcaactacgagagtcccgacgacggtaagaacttcgttcttctcctcaaggatttgagggaggccctcgacaaggccgcaaaagaggaccacaaggactacctcctaacggccgcaacgccggccgatccggttaaggctggcaggatagattgggtggaggcgagcaagtacctcgattcaatcaacatcatgacctacgactaccacggcgcctgggagaccataaccggccaccttgccccgctctactgcgatccaaacgcgccatacaccgatgagaacgtcaagtaccacttctgcgtcaactacaccgtccagtggtacatccagcacgttcccgataagaccaagataaccgtcggcctgcccttctacagcaggagctttgccaacgtcccgcccgagaacaacggcctctaccagcccttcagcggcaccccagctggaacctggggaccggcctacgagacctacggagttatggactactgggacgttgccgagaagaaccagagcagcgagtacgagtaccactgggatccgatagcccaggtggcctggctctactccccgagcaagaggatattcataaccttcgacgatcccagggcgatcgggataaaggttgactacatgctgaagaacggcctcggcggagtgatgatatgggagatcacagctgacaggaagcccgggaccaacgaccacccgcttctcgatactgttctccagcacctcggcgagaagccgccggcgtggattccggacacctactacatcggctcgaacatcccgagcaacataaccgttccagagccgacgccactgccgccgagcaacgagacaacccctgaggacaatcagaccaatccaaacccatcacagggaaatgaaaccaatccaaacccgtcacctggaaacgagaccacaccctcggacaaccagacgactccatccaccggggattttgtcaagccgggttctttgagcgtcaaggtaaccgactggggcaacactgaatacgatgtcaccctcaacctcggtggaacctatgactgggtcgtcaaggtcaaactcaaggacggttcaagcgtatcgagcttctggagcgcgaacaaggccgaggaaggcggttacgtcgtcttcacgccggtgagctggaacagggggccgacggcaacgttcggattcatcgccactggaagcgagtccgttgaagcgatttacctctacgtagacggccagctctgggatgcctggccctcaaacacccaacaaccggaggaaaaccagacagtcccaagcccgtcacctggcaacgagacgactcccacaccctcccccggaaacgagaccgcaccctcagagaaccagacaactccgtccacgggagatctagtcaagccggatgcattcagcgttaaaatccaggactggggaagcacggagtacgatgtaaccctgaacctcggtggaacttacgactgggtcgttaaagtcaagctcaaggacggatcagccgtctcaagcgtctggagcgctaacaaggccgaggaaggtggttacgtagtcttcactcccgtaagctggaacaagggaccgacggcaaccttcggcttcatcgccactggcagcgagcccgttgaggccatgtacctctacgtaaacgatcagctctgggacgtctggccagaaaccgcatcagccccgggcaacgagagtactccatccgacaaccagaccaatccgaatccatcaccgggcaacgaaaccaatccaaatcccagcccaggaaacgagacgggcccgtacgttccagcaggcccaggtcttcccgagcacttcttcgccccatacatcgacatgagcctcggcatacacaagccgctcgttgagtactacaacctcacgggaacaccgtacttcacactcgccttcgtcctctacagttcagtctacaacgggccggcctgggctggaagcattcccttggatgccttcgttgatgaggtaaaagggctcagggaagctgggggagacgttattatagccttcgggggcgcagttggcccctacctctgccagcaggcaaaaactccagaacagctcgcccagtggtacattcaggtcatagacacctacaacgccacatacctcgattttgacatcgaatctggtgtagacgccgacaaacttgcggatgctctcctgatcgtccagagggagaggccgaacgtcaggttcagcttcacactcccgagcgacccgggaataggtctcgcgggcggatacggaataatagagaccatggcaaagaagggggtcattgtcgacagggtcaatccgatgacgatggactactactggacgccagcaaacgccgacaacgccataagcgtggccgaacacgtctttaaccagctcaagcagatctatcctgacaagagcgacgacgaaatatggggcatgatcggcctgactccgatgataggaaccaacgacgacaagagcgtcttctcgctccaggatgccgaaaagctcgtcgactgggcaattcagcacaagatacgctcccttgccttctggagcgttgacagagatcacccagggccgacaggagaggtctcaccaatccacaggggaaccagcgaccccgattgggccttcagccacgccttcctgaggttcatgaaggcattccagccggttgccagcacggctcaggtggcagttgcagttccagtttgacccctctcttctcctcttttgtccataatgaaattggagaaacagctaaggaagcggaatcctttccacctcaagtctgtcccacgtcgggtattcttccacgatgaagaacttcacatcgccttctaccgcatcggcaagctcaacggcgacctcttcaggcatctctatcctgcccttctcgcggttgatgtggagccactcacttggaacctccgcttcctcaacgaggaactcgtagagctcgtcaaggtcgtcgtattccgctatgccgaagcggagcgttccctcttccgttacctccatgtagggccttgccacgttcctcgccatcctcctcagcctgttcttcagctggactgcatccttcagcttcgccgtgcagaggtggtagctcagggaggtgttctcctcaccccactccaggaattcaaggccaagctcgagcgagccctttatggcggagctctcgtcgctgactggctggaagcccatgtcaaggagcgttttaagcgtcatctcgctgaactcgagctcgttcacgttcaggaacttagcgccgtgcttgtctaaaaactccgcgtaccacttcattctgtcaagctgtcctggaatcgagggaatctcccctccaacgtcccagtcaaagtcgaaggccttccgtatgttctctatctcgaccttgaagagctttgagtttgggttgaataaatctgggtggaaccttatttcgtccagtccggcatcgtagagcttcgagagggccttttcggttgcgagcgctccagtggtgtagaggtggatgtggaagtccttcccaaagttctccttcagcgttcttatgtactcgaccgtcctctcaagcctcgccagagggtctcctcccgtaattccagcacctttggcttcctgaattctcgcttcctcaatgacgtcatcaacattcttaacaggtctctcgttggcgtagacaacgtccccccttctccaggggctcagagggcagtagaagcagtccctcggacagacacctgtggtgaagaggacgagcttctcacccctaacgcagagctgacagcccttggggagctctctcacagcgtatgaaaagtaaggcgtctcccagaccaaccatctcacctcgcaagcccaggtaggaggagggcttaaaaaggttggtggacaaatccgtgaaggtgttgggatgagggagaagccgaagtacctgccgccgacgctcagggacaagaacagatacatagcgttccaggttattggggagaggcccttcaagaaggacgaaataaagaaagcggtctgggaggccagcctctccgccctggggtacctcggctcggcgagggcaaagccatggttcatcaagttcgacgagaaaagccagactggaatagttagggttgacaggaagcacgttgaagagctccgctttgcactgaccatgctcacagagataaacggctcaaaggtcatcttcagaactttaggcgtttcggggacgataaaaagattaaagaggaagttcttagccgagtacgggtggcgctagcggaggaagggaatagccttgtccacagcgttctgatataccctcaagtacctcctgcaggccttctcccacgtgaagtcctctcttgccctcctcttcccgttctccctgagcctcttcagggtttcctcatcgagttcagatgcacggattatcgtcctcgcgagggcaaatgcatccctcggcggaacgagaagccccgtcgccctctctgggtcggcgtcgaggtcaatgactgtgtctttgatgccccccactgcactgcctatcggaattgcacccaggcacatcgcctcgagctggacgagaccaaagggctcaaagtaggacgggattaccacgaagtcaaccgaaccgtagagctccctaacagtctccctcgacaggagctcggttatcactttcacgttctccgggaagcgccgctcggtttctctggcccagctttcaagccctggatcgcctttgcccactatcaagaagcgaaggcttttaaatgctgggtcggttgatagaagctcgattgcccgaaggagagtgtcaactcccttctgggccctgtcgaagcgccctatgaacatgaacgcctttccatcagagagtccgaagcgctggaggattctcttccttctctcctccctcggcaaatccttgccctcaaggaactcctcgttccagtaggagcagtcaataccgttgaagacgtgggttaccttgccgtcgaagtttttaaaaaagctccactcctcccacaggtagctcctgctgacggtagttaccgcatccgctatgtagccagctgtgtgttcggggtcgaggtcggggaacggcgccagctcgccgaggttggcctcgtggaagtagcttgcggggacttttgccctgttgagcctgtggactgtgaaaaccgccctaaccccgaagtacttcttcagaaggcccagggcaaagacggtgtgccagtcgtgggcatggactacatcgggcttgaactcgccgatgaggatgttcatgagccctgcgctggccttcccgaagaggacggccttcttgagcaaatcttcccagcccggataaacatccaaatccaggtaactcccaccgagggaataaacgattacgccgttctgttcccgctttctgactttcacttcaacttccctaccctcaaggagaaccctgaaagaagcaagctcttcgccgagcttccttccgtggtctggcgtgaagaccacgacctcgtttccaagcccagcgaggccctccccaatgctcgttagggcctcagcgagaccaccgacctttactggaagatactcgaaaccgagcattagaattctcatttttcttcaccagccataggttgaagtttagaaattaaaaatgatgggtcactcaaggaggatgaacttctccccctcgacgtcctcaaagtagctgcctatgccgccgaccttcagctgcttgccgttgtacttgaaggtaacgtttgccgtaaggggcgtgtactcgtagtcaacgatttccccatccagggtcacgggctccttggtgtctatgagcttcccgactatctcggcttttctcgggaggcctgcaaacttgagaacggttatcagggttctgatgtttaccagcgagaccggcttctggagcctctcgtaggcgaggggctttattacctcgctgttgtcgaagtatatcgtgtagaaccagtgcatatagttctggattatcctcgggctttttgcccagaaggagtagaacttctccctcctcctgtccttgggcagggcaccgaagaagagggcgtagtcgatgtcgccgattatccagctcgccatgagccagggtgctccgccgcttctggcgaggattatgttgtcgcccttgagccagttcggtatctcgtctccgaagttgcttatgattacgaagattacgtccttgcggttctttatctcgccctggaggagcttcagaaactcgaagggcgtgtttatcagaacctcgtgctttgcagtccttatgacgtgctcggccctctcaagcgtgttgtcaaagccctgtatcgtccaaatctccgggagttcctcaccgtgagcctcacggtagaggtcgaggaaagcctttttgagggcctcaatgtcctcgatgagttcctccttaatcctttcaagcacgacttcagggttcactggcttatagagcctcggagtgccctgcatgacatcaacgaagcccttcctgtggagggagcttagaacgtcataaactctcgtgtgcggaatcccgctctccttcgttatgtcggttgccttgcttggcccgagcttgaggagagttatgtaggcaaggctctcgtacttggtgaggccgagcctctggagcttttcaattatctcgtcttccctcatggcttaacccccaaagacatttaagttcactggcatcagtttaatcatcaccagtgatacaaggtggtatgagtgtataaggttttcgggtttgaagaaaacttcatccacggcagagtggcgagggtcgagttctcccttccagacgccggaaggtgggactacgcataccttctgggtaactttaacgccttcaacgagggctccttcaggatgaagcacgaggataagaggtggataatcgaaatcaagctcccggagggcctctggaggtacgccttctccgctggcggggagttccttcttgaccccgagaatccagagaaggagctctatcggaggccttcatacaagttcgagagggaagtgagcttggctaaaatagcgggcaatgatatggtttttcacaggcccgcccttctctatctctattcctttggggacaggactcacgtcctcttgaggagtaaaaagggcaaagtggatgcagcttatttggtgacagacgatacgcacgttaaaatgcggaagaaggcagatggggaagtttttgagtactacgaggcggttttacaggaaaccgaaaaactgagatactccttcgaggtcttcctcaaagagggaaaaagcctaaccctcggcccatttgaggcggcaccattcaggcttgacgctccctcgtggattctcgatagagtcttttaccagataatgcccgacaggtttgccaaaggcagggatcatgaacccccttttctcagctgggaatactacggtggcgatctctggggcatcgttgaaaagatcgaccaccttgaggaactcggcgtcaacgccctctatttaacgccaatcttcgaatccatgacgtaccacggctatgacataaccgactacctcagagtcgcggagaggcttggtggggaagaagcgtttcgggagctcgtgaaggcccttaaaagcagggacatcaagcttgtactcgacggcgttttccaccacaccagctttttccaccccttcttcagggacgttgtggagagaggagaagaaagcgaatacgccgacttctaccgcgttaaggggttccctgtcgtttcagaggagttcataagagttctcaaatcggaccttccgccgatggaaaagtatcagacgctcaagaagatgggctggaactacgagtccttcttttccgtctgggtaatgccgaggctcaaccacgacagcccgaaagtcagggagttcgttgcaagggttatgaactactggcttgagaagggggcggacggctggaggctcgacgttgcccacggcgttccaccagggttctggagggaagttcgagaagggcttccggacgatgcatacctgttcggtgaagttatggacgacccgaggctctacctcttcggtgtcttccacggtgtcatgaactatcccctatacgacctccttctaaggttctttgcctttggagaaatcggcgctaccgagttcatcaacgggattgagctactgagtgcgcacctcggcccggcggagtacttcacctacaacttcctcgacaaccacgacacggagaggttcatagacctggccggcaaggagaggtatctctgtgccctcacgtttttgatgacgtacaagggcattccggctatcttttacggcgacgaaatcggcctaaggggttcaggcgaaggtatgtcggcagggaggacaccgatgtcctgggatgaggaaaagtgggatttccagatactccggcagaccatgaagctgatagaactgaggcgctctctgaagtcgcttcaggtggggagcttcagggtcatcggggctggagagaaatggttcgtgtatgaaagaaaagctggatctgagcgggttttggtcggaataaactgttcctggaacgatgtagagaccccagtgccttctaacgggagcaacgaacagataaaaatccccgctttctcttcaatcatcagagtgaaagacagcatgaatgtacacatcggttcagacctgcaggaatgagccaggaagcgcaaggtatatatatcacccacgatgatactcaaatgcaacgagataactaggtgataaacaatgagaaaaggcatctttgccctcctccttgtgggggttctgttcctgggtgtcgtggccagcggctgcataggcggtggggaaacgacgactaccccaagcaccagccagagtcagacgacctcgtctccaacagagaccacttccccgaccgagaccactactacctcacccaccgagaccaccaccgctcctactgttgagtgcggaagcggcaaggttgttatctggcacaatatgcagccgaacgagcttgaggtcttccagagcatagcagaagagtacatggccgaatgcccgaacgttgaaataaccttcgagcagaagcctaacctcgaagacgccctcaaggcagccatcccgagcggacaaggcccagacctcttcatctgggcccatgactggattggaaagttcgccgacgcaggccttctcgagccaatcgacgattacattaccgacgacatcctgaaggacttcgccccgatggccgttgacgctatgcagtacaaggggcactactacgcaatgcccttcgcggctgagaccgtagcaataatctacaacaaggccatggtcagcgagccgccaaagaccttcgacgaaatgaaagccatcatggagaagtactacgacccagacaacgaaaaatacggaatcgcctggccaatcaacgcctacttcatctcaggcatcgcccaagccttcggaggatactacttcgacgatgccacagagcagcctggccttgacaagcccgagaccatagagggtttcaagttcttcttcacccagatatggccgtacatggccccgactgccgactacaacacccagcagagcatcttccttgagggcagggcgccgatgatggttaacggcccgtggagcattaacgacgttaaaaaggctggcattgacttcggtgttgttccactcccgccgatcaccaaggacggcaaggagtactggccgaggccctacggtggtgtgaaggacatctactttgcggcaggcctgaagaacaaggacgccgcctggaagttcgtcaagtggttcacaacaactccagaggtcatcaaggagctctcactccagctcggttacattccagtcctcaagccagtgcttgaggatccagacatcaaggctgacccggtcatttacggcttcggtcaggcggttcagcacgcttacctgatgcccaagagcccgaagatgggcgcggtctggggcggcgttgacggtgcaataaccgagatactccaggatccggcccacgccgactttgaggccatcctcaagaagtaccaggagaaaatactccaggacatgggctcaagctgagccgctttctctttttattaccttatggaggtgctgaaatgaagaagacgaccgctgctgcactgatgctcatactgcccggaatggccgcgttcctgttcttcaatctctggccgatagtctactcgatttatttagcgttcacgaacgcccagcttggaaacttccccatctacaacccccagagcgcagttgaacccatgcatttcgtaggcctagaaaacttcaagtgggcactctctgacgacaagttcatcaacgccttcaagtggacgtggatattcgtattcacgagcgtcacactgaaggccctcgcaggcctattcctcagcctgctctacaacagcaagtacgtcaagggcaaggccatctacaggtcgctcctcataatcccctgggcgctgccgctcctcttctcggtaaccgtgtggaagttcatgtttgatcccgtttttggcccgattaaccttgtgctcaaatcaatcggcattaccgggcccgactgggtgaacaacccaacctggggcttcgtggccctcaacataatcgaggtctggctggcctatccgtttatgatgaccgtaataaccgccgcactccagtcagttccggacacgttaatcgaggcggccatcatagacggagcaaactactggcagagaatttggaacgtcgtcgtcccaatagttggaaagccgatagccttcgcgaccatactcacgagcgccgcgagcttccagtacttcatggtgccgtacatctacaacgcgggcctcttcgaggacaggttccttctgctctacggcttcaggaaggcattcggcgccagtccgcactacggcagggccgcggcgataatggtgatagccacgctcatcctggcggtctacatgtacgtgaacgttaggataaccagactccaggagggtgccaggggatgatgggccgtaagagatccgagatgctcaagagcttcgtcctgacgttgctggctatcttcataatgttcataatcctcttcccagtgtactacatcttcacagtctcgataagcccaaaatcaacgctcgcaacgaccgagctggagctcataccaaagcaggtcaccctggattcgtacagagaagtcctctttggattctccggcgacaggttgatggaggactttgaaggaaggataaccggaaagggaacaattcagaacggcaagctctacgtaacagacggcaccttaatcggaactgtaaaatacgggcctttcacgggcttgaagtttgagattccagtttccagggcaactttcaccgtcaacggcggctccggcagtggggacttcagtggaaatgttaaaggcacgataatcctgacgaggatcaacgacgacggaactataggctttggaatagtcaggaacgtcacactcacagaggggacgattaacggagtaaaggtcagcggacagatggacgggtacattagagcgagggacaccggaaaagcagaattcactgccctgggcaagttcgtgaactccaacttcttcaagtacctgaagaacagcctcatcctggcgacccttacggtagtactggcactgatcttcgtcgtcccggcggcctacgccttttcaaggctccagttcttcggcagggagcacatactctacttctacctgatgttcacgcaggtctcgggcggtctcgggatagcgggacttatagccctctacggaatgctcgtcaagctcggcctctacggcaagcttccggtgctggccttcatctacgccgcaggaagcgtgcccttcaatacgtggctcctcaagggatacatagactcgataagccccgacttcgacgaagcagcactcgttgacggtgcaaactacttccagataatcaggcacgtgctccttccaatggcactcccgggaatagcgacggtggcagtctttgcgttcatcggcggatggacggagttcatcctggcaagcctcctcctgggtcaggaaagccagccgctggcggtgtggatatactcactcctgggtggaatcggcaggggaattgactggagctacttcgctgctgcggcgctgctgttcgccctgcccgtgttcgtgatgtttatcctcgcccagaactacataaggagcggcctcactgttggaggccttaaagagtgaggtgataagatgaagaagctggtttcccttttccttaccattttggtgcttggaagtataataggagcgaacgccaagttcgcgctggcggaagaaccaaagccgctgaacgtcataatagtctggcaccagcaccagccctactactacgacccgatccaagatgtctacacgaggccatgggtcaggctccacgctgccaacaactactggaagatggcccactacctaagcgaatatcccgatgtgcacgttgcaatcgacctttcgggttcactcatagcccagctcgctgattatatgaacgggaagaaagacacacaccagataatcaccgagaaaatagccaacggggagcccctgaccgtcgaagacaagtggttcatgctccaggctcctggagggttcttcgaccacactataccctggaacggtgaacccgtaactgaccagaacgggaacccgataagggacttctgggacaggtacacagagcttaagaacaagatgatgaacgctaaggccaagtacgccaaccttccgctggaggagcagaaggttgctgtaacaaacgagttcaccgagcaggactacatcgacctggccgtcctcttcaacctcgcctggatagactacgactacataatgaacacccccgagctcaaggccctctacgagaaggttgacgaaggtggctacacgagggacgacgttaagaccgtcctcaacgctcagctctggcttctcaaccacacattcgaggagcacgagaagatcaactacctcctcggcaacgggaacgttgaggtcaccgtcgtcccctacgcccacccgatagggccgatactcaacgacttcggatgggagagcgactttgacgctcacgtcaagaagtcccatgagctctacaagaagtacctcggagacggaagggttactccccagggaggctgggcggccgagtcagccctcaacgacaagacccttgaaatcctagcggagaacggctggcagtgggttatgaccgaccagctcgtcctcgacaggctcggcgtagagaagacgatcgagaactaccacaagccctgggtggccgagttcaacggaaagaagatctacctgttcccccgtgaccacgccctcagcgaccgcgttggctttacctacagtggaatgaaccagtaccaggcggttcaggacttcgtgaacgagctgctaaagctccagaagcagaactacgacggctctctcgtctacgttgtcactctcgacggtgagaacccctgggagcactatccgtacgacggcaagctattcctcgaggagctctacaagaagctcaccgagctccagaacgctggactgataaagacgctcaccccaagcgagtacatcaagctctacggcgacaaggcgaaggagctcactccgaagatgatggagcgcctcgacttcactactgaggacaaggtgaatgcacttctcaaggccaagagcctcggagagctctacgacatggttggagtccaggaagagatgcagtggcccgagtcaagctggattgacggaacgctctccacctggataggcgagccccaggagaactacggctggtactggctctatcaggcaagaaaggccctcatggaaaacaaagataagatgagccaggacgcctggaacaaggcctacgagtacctcctcagggcagaggcgagcgactggttctggtggtacggcaacgaccaggacagcggccaggactacaccttcgaccgctacctgaagacctacctctacgagatctacaagctggcgggagtcgagcccccgagctacctctacggaaactacttccctgacggccagccatacattacgagggcgctcgacggccttggagagggagataagaaggagtactcaagcgagtcagccctcgctaagggagttgaggtctacttcgagggcgacggcatccacttccttgttaaaggcgatctgaacgagttcgaggtcagcctctccagcccggacgagaggatcggcaacacgttcacaatcctccagaagaggccgaccgagctgaggtactcgctcttcccactctcaaaggacagcgttggcatgctgataacgacccacgtggtctataaggacgggaaggccgaagtttacaaggccaaggactacgagacaagcgagaaagttggagacgttacggccaaaaagaccgacgccggagttgaagtcgtcgttccattcgactacctctccaatccgagcgacttctacttcgcggtatcaaccgtaaacgagaacggtgagctggaggtaataagctcaccggtcgagctcaagctccccgtccaggtcaagggtgcagtcattgctgacatcgctgaccctgaaggagatgaccacgggcctggaacctacacctacccaactgactcggtcttcaagccaggtgtcttcgacctcctccgcttcaggatgctcgaacaggccgacagctacgtcatggagttctacttcaaggatctcggcggcaacccgtggaacggtccaaacggcttcagcctccagataatcgaggtttaccttgacttcaaggagggaggaaacagcagcgcaataaagatgttcccggatgggccaggaagcaacgtgaatctcgacccgttccacccctgggatgtagccctcaggatcgctggctgggactacggcaacttgatcgtcctcccgaacggcactgccatacagggcgagatgcagatttcagccgatccaaccaagaactcaatagttgtgaagctcccgaagaagtacttcccaggagtctctgactacggactctacgccagcgtcctcgtaggttcgcaggacggctatggtccggacaagtggagaccagttgccgttgaggcggagcagtggaagggcggtggcgccgacccacaggcagtcattgccggtgtcgcgccgagagtttacgacatgctcgtcccagagggcttcaagccaacccaagaagagcagctcaaaagctacgacacagaaaacggaaaactagcgaccgtagttatgatacctctcgtcgagggcaccggcggagagaagcccaccgagaccgagacccccacaaagacgaccacaacgacgacgagcagcaccgagaccaccactacaagcaccaccgagacagccacaaaccaccacgactactacaaccacatccccaggaggaggcggaagtggcagcggatccaccactaccagcacctccccaggcaccggcggtggtgaagagggtggcggaatctgcggcccggcgttcctcgtcggtctcgcagtagtaccgctcctcctcaggaggaggcgctgatccctttccaattttatttgggggtgataaaatggcggaagtaaagctcatcaacgtctggaagcagtttggcgacttcacggccgttaaggatatgaacctccacataaaggacggcgagttcatgatactcctcggtccgagcggctgtggaaaaaccactactctgagaatgatagctggcttggaagagccgacgaagggccagatatacataggagacaagctcgtcgccgaccccgagaaaggtatctttgtcccgcccaaggacagggacattgccatggtcttccagagctacgctctctatccgcacatgaccgtctacgacaacatagcattcccactcaagctgaggaaggttccaaaggacgagatcgacagacgcgtcagggaagtcgctgagatgctcggcctcacggagctcctcaacagaaagccaagggagctttcaggtggacagagacagcgtgtcgcccttggaagggccatcgtgagaaagccgcaggtcttcctcatggacgagccgctctcgaacctcgacgccaagctgagggtgaagatgcgtgccgaactcaagaggctccagaggcaactcggcgtcaccaccatctacgtcacacacgaccaggtcgaggcaatgacgatgggagacagggtcgccgtcatcaaccagggccagctccagcaggtaggaacgcctgaggaggtctacgacaggcctgcgaacacattcgttgcaggcttcattggaagcccgccgatgaacttcatggacgccaccgttacagaggacggctttgcagacttcggcgagttcaggctgaaattcctcccagatcagttcgaagtgctccgggagaagaacctcgtcggcagggaggtcatcttcggcataaggcccgaggacatctacgacgccctcttcgcccaggtcaagatcccaggggaaaacatggccagagcactcgtggagatcattgagaacctcggtggagagaagatagtacacctgagcattggtgacgttaccttcctcggcaagttccctgccgagtcaagggttcaggaaggccaggaagttgacgtcgtcttcgacatgaggaaggcccacgtcttcgagaagggaagcgggaaggccgtcttctgaaggtttttaaacctcttctcccatttttctccatgccaatcgaggacttcgcggattttatagcatccagggttccgaagggaaaagtcgtagagctcggaataggctttcagttcaaagtggctctaaggttaaaggagcttggctacgacgttcttgccgttgactggaatcccgcctcggttgagaaggccggggagctcgggatcaacgccgttcgggacgacctcttcagcccgaacctagaactctaccgcggggttaaagccctatactcagtccgacccactcctgagatagtgaggtccatcctggaacttggaaaaaagctgggtgttcccgtctatattctcccgctcgccggggacgtcatgccgaaaaccatgcggctcatcaactaccgaggcctggccatatacgtgaaagatatttaaggttcgtctcaactccctacggtggtggtatgaggctctttggaacagcggggatacgtggaaccctctgggagaaagttacgccagagctcgccatgaaggttggaatggcagtcgggacctacaagagcgggaaggccctcgtcgggagggacggaaggacttctagtgtaatgctgaaaaacgccatgatctctggtcttctgagcactgggatggaagtcctcgacgcggacttgattcccactcccgcactagcgtggggaacgaggaagctcgcggatgctggggttatgataacggccagccacaaccctcccacggacaacggggtaaaggtcttcaacggcgatgggacggagttctacgtcgagcaggagagggggcttgaggagataatcttctccgggaacttcagaaaggcaaggtgggacgagataaagcccgttaggaatgtggaggttatccctgactacataaacgcggttctggactttgttggccatgaaacgaaccttaaagtcctctacgacggtgccaatggcgccggaagcctcgtcgccccctacctcctgcgagagatgggggcgaaggtcctcagcgtcaacgcccacgtggatggccacttcccgggcaggaagccggagccgagatatgagaacatagcctacctcggaaagctggtgagggagctgggcgttgacctcgcgatagcccaggacggggacgctgatagaatagccgtcttcgacgagaaggggaactacgttgacgaggacaccgttatagcgctcttcgccaagctctacgttgaggagcacggcggcgggactgtagttgtgtcaatagacacgggctcaaggatagacgcggtagttgaaagggcaggcggaagggtcgtgaggattccgctcggacagccccacgacggcataaagcgatataaagccatcttcgccgctgagccctggaagctcgtccacccgaagttcggaccatggatagacccgttcgtaacgatgggtctcctcataaagctcatagacgagaacggcccgctgagcgagctcgtcaaggagattccaacctactacctgaaaaaggctaacgtcctctgtcccgacgaatacaaggccgaggtcgttagaagggccgccgaagaggtcgagagaaagctctccagcgagataaaggaagtgctaactatctcgggcttcaggattgccctgaacgacggctcgtggatactgataaggccgagcggaaccgagcccaagataagggtcgtggctgaggctccaaccgagaagagaagggacgagctgttcgagatggcttattcaacagtttctaggattgtaaaggaagccgaaaagaaataaagactcagacgaacctcgccggcctcagggtccttaccgctatttcctttttgttaacagttatcctgaagccttccttggcgacgtacgtctttacgccggttacgttctcgatgtactttgcctccttgtaggggttggcgaagtgcatcttcatcccgatgtggctcatcacgaggacttccggctttttctccatgctcttgagcatctcaacggcgtcgtcagtgctcaggtggtaaggaatgcccatgtccctaggtctcgttattgccgctatcagaaccctagccccatcatgccagcggacgaggtcgtcgaagtacgccgtgtctggaatgtaggagatatcaccgagggacgtcctcatcctgaagcctattgttgttgggtcggagtgcttgctcggggttatcagtaactcctcgtctccgattgaaatcttgcttcccggctctgggatgtgcacgctctcaaggacgtttatgtgatactggcttatcgccggcgtgtgttcctcgtcgccatagacaacgctcttcgatgctatcaaaacacccctcttcttcagcgctccgccggtcattgcctcgaccatgacctcaaggtcgttgcagtggtcgacgtgcctgtgggagacgaagattgcatccagcttcctggggtcgagcttgtagcgccagctcctgaccagtgctcctggccctgggtcaacgtagatgttcctgctggccgctatgtggaatcctcccgtggagcggaactgggttatggtgatgaacctcccccctccgctcccgaggaacgtaatctctatcaaagggacacctcccagttcttttgcagacgtaagagtatcgcctagggggtatataagacattgcctacagtcacgtccatcagcccgcaatgggggaacccgccactgcaacacaagttcgacgtcaaaccagaaaacatctgacaatacaaaacgtttttataaaccggagtacaaagtgatatgccatttactacagggggtgcaacccatggagttcaaaccatatattcccccagagaaatccctgcctgaatataccgtaaaggcgtttgttctgggcgtccttctatcgatagtgatgggtgctgccaacgcctacctcggaatgtacgcaggaatgaccgtcagtgcaagcattcccgcagcggttatctcaatggcgatactcttggctttcaaggacaggaacatccttgagaacaacatggttcagacggcggcctccgcaggcgaatcgctcgctgctggagtcatattcaccttccctgccctagtagttctcgagtactacaccacgttcccatactacatcgtgacaatcatagcagcgctcggtggctccctcggtgcactcttcacggtcgtactgagaagggcttttatagtcgaggagaagctcccctatccagaaggtaccgcctgtgccgaagttcttatagctggcgataagggtggaagccacgccaaaccgatattctacggtggaatcttcggcggcatctacaagctcctgggccagacgggcctgtggagcggaacagttgagaccgccaagatgataggttcccgcgtctactacttcggaagcgacctctccgcggccctcgttgccgtcggttacattgttggtctcaacatagcgttcctggtattcctcggtggtgcaatagcatggttcatagcgatacccctctatgcaggccagatgggctcaaccgacatgagtgccctcgaccttgcctggacgatatggagtaccaagatccgctacatgggtgtcggtgcgatggtcgtcggcggcctgtggagcctcatcaagctcagggggccgataaccaggggcatcaaggcgggtcttgaggctgcaaagagaaggcaggctggagaggcagttcttagaactgaagaagaccttccgctcaactacgtccttatccttatagcagcctttgcaataccgctgttcctgctctactaccacatcataggctcaatcggaattgccgcagttatggccgtgatactccttatcgtcggcttccttggaagcgcgatagctggctacctcgcgggtgtcgtcgggtcatcaaacaatccagtttcaggaatcaccataatgagccttctcttcacggcccttgtgctaaaagcccttggcctctccggaactgagggcatggtggccacgatcctcgtcgcggcggttatctgtaccgcagctgccatagcaggcgacacgatgcaggatctcgcaacaggttacctcgttggagcgacgccgaagagacagcaggtctttgaaatcattggaacgtttgccgcggccctcgttatggctcccgtgctcaacctcctcatagaggcctacggaatagccggaacaccaacagccaaagaaaacgccctcgcggcaccccaagccttcctcatggccaaggtcaccgagggtgtcttcaccggaaacctggagtggaagatggtctacataggtgcaggcattgcaatagccctcataatcgttgatgagatactcgcaatgaagaaggcaaagttcaggactcccgtcatgcccgttgcggtcggtatctacctgccgctcagccttggtgtcccaatattcataggcggtctgataaggcacttcgccagcaaagccaagggcaacggtggagaggacatgaccgacgctggagtcctcggtgcggcaggactaatagccggtgaggccctaatgggcattatcttcgcggccctcatcgttgccaacgtagcgccgagcgtcgggttcaccagcaacgtccttggagtcctcctcctagccggaattgttatctggctctacatgatgggcaagaagaagtgatttctcttttccacttctttgatttaattttgcacccggaggaataaccatggaggagtacctgaatttaattccagtaagaaacgagaagatcaagctgaggaagattgacggaaaatattacctcctcatccccatggactcgatgcttgactttctcgcgagaaaactccatggggattaccgaagaatagaactcgacgaagtgggtgcgtacatatgggagctctgcgacgggcggagaacggtcagggaaatcggaaaggccctcaagacccgctttggggacgaagtcgaacccctctacgagcgtctccttgttttcctgctcaacctccacaaaaggtatctgattacgtttattaagcccaatgaagaaatcgaaaatggtgattaccatgagcgaagttcttgaaaaagtctctctggagatcgacaggctccgggatgagatggtaaacacccttatagaactcatcaaaatcccggccataagccccgactacggtggcgagggagagtacgacaaggcccagaagctcctcgagataataaaggactggccctttgacagggtcgaggtttacgaggcccccgatgagagggcaaagaacggcgttaggccgagcattctagcttactactacggagaagagggcgaaaaaagcccgcgcctctggattctgactcacctcgacgttgtcccacccggagacctgagcaagtggacggtgaccgagccgttcaagcccgtcgtcaaggacggaaaggtctacggaagaggatcagaggacaacggacagagcctcgtcgcttccctctacgcggtcagagccatgatgaaccttggaatcaggccgaagaggactgtaatcctcgccttcgtcagcgatgaagagactggaagccactacggcgttgagtggctgataaagaaccatccagagcttttcagaaaggacgacctagtcttagtcccggacggtggaaacgaggacggaacattcattgaggtagctgagaagagtatcctctggttcaagctgaaggttaggggaaagcaggttcacgcaagtatgcctgacaaaggccttaacgcccaccgcgtcgcccttgacttagcttaccacctcgacaagctcctccacgagaagtacaacaaaaaagacgagctgtttgagcctccggagagcacctttgagccaacgatggtccagaatccagccgattctccaaacatagctccaggagaacacgaggtcgtcttcgactgcagggttctgccggattacagcctcgatgacattctcaacgacgttaaggccctcgccgacgaggttaaagaaaggcacaagagggagatagaaggcaaagttctgcccgagatagacgttgaaatcctccagaggctcgacgctccagctccaacggatccgaacagcgagatagttgttctcctgaaggaagccatcaaaaagctccgcggaaaggaggccaaggttggaggaatcggcggtggaacctttgcggccttcttcaggaagcttggggttcctgcggtggtctgggctacgctcgacgagaccgcccaccagcccaacgagtacgccaaaatagacaacatggtggaagacgcgaaagtcatggcagcgctggcgcttctctgatgttcttttccttcaactttaaccgcggttgaaacaatcgagatgtatttatactcccaacccatagtaatcttggtgatcgcatgaggcgtacagttctgcttgttacagttcttctcgttttcattgggggatgcctcggtcagatggagaatcccaggcccacaaataacccatcaacatcacatccatcggactcttactccaccttacccacaacaaagtacgacgtcctgaaagaggggcaggaaaagcctgtggttaacgcgatcaactccttcacatttgacctatacaaagagctggcagggaacaataacaacgtcttcttctcgcccttcagcatcgagacggcccttgccatggcatatgagggagcaagaggaaagaccgcagaagaaatgaagagggtcctacatcttcctgaagacgatgatgcgaggtggacaggttttaggtatcttctactttccctgaaaagtcccgaaggctcgcctttcatcctcaggagcgtcaatgcactctgggttcagaggggatattccctacgggaggagtatctgggaattgtgaaggagttctacctcggggaggcaaaggaagtagactttcagggcaatcccgcggaagcggcgagggaaataaatgagtgggttgaggaacagacgaacggcaggataaaggacatcgtatcgggcttaagtcccctgacaaggctcgtgataacgaacgcggtttactttaaggcaaactggtcgagcagattcagggcaagcgacacgagaaacgaaaccttccacgctcccaacgggacagttatcgtccctatgatgcaccagactggagaattcccttattttgaaaacgacgatcttcaggccctcgaacttccctacgagggtgaaaggctgggcatgctgataatcctgcccaaagaagggaagttcgaaaaggtggaaggcaacctgagcgctggctccatagagaacatcctgaaaaacatgcgcgaggaaaaggtgaaagttgccctcccgaagttcaggttcgaggcttcgtacaagctcagggacgttctcatggacatgggaatgaaaagagcatttctggtgccggatttctctggaatctccaacggggaaaacctagcgatagaggatgtcgtccacaagagcttcatcagcgtggccgaaaacggaaccgaggcggccgcggcgacggcagttacgctaacgatgaacgcccctatgcaggagaaagaaccaaaaatcttcaaggccgaccacccgttcatcttcttcatctacgacagagagactggaacaatactcttcatggggcgcatgatgaacccaaaggatggatagtccactactttcttttccaagcaagccacacgacgaggacaaagataacgaccagagaccaaaaccagcataaatcggactgatccatagtttttaaatccccacaggagaatgtattcccataaaatacaactggggctgcaaggtttgaatagtggaaacgcggggcaactagaacacgcgtcaggttaccatcattaacggtagcagttgaatactcaagctgaactttaccggtttcaaaagcatgaagagtaccgttgtagaaaaatacgtagatctgtctttcgaggaggctgaggagtccagcctgatcgaggacttcactttttaatggtcgagcgcttccaagttgtccccgagttcctggtgtaatatgtaacgttgtagagttgtttgaatcgaacggacaccgcgccctcccccggaatacagtccacgcacttaacgtcagctccagttatctctatggtcactgcgggaaagaacaccaaactcccgttgaggcggtagccggagagatagtcaatccagccctcatcccagagatacggcaatatctcagaaagggatactttgtagctctcatttccaaaatcgaagccgagaaagccgttttcatgaagcccactgactagtctgccctttgacttaaagcgtgccaggttgtctgaaacgttcaaacttaacctgggacacataacgtacattggattgtagcactccgccccaagaaagtgcagtccggaggagttcaaataatagtaccagtaaatttccgtgtccgggtgcaccaacacgtcgttgtgagcatcgatctcccccgttgagattaatattatattcgagtttgggagggttccaatggaaatgtgaattccctccgttggaagaactccttgagttatgacctcaatgtcggaggatgccgtaggggatgcaaaaacaaggagagaaatagacaaagctattaatctgaaaaggggaattttagacataccctttcaccttttcaccccaattttctggcaaatccaacatctatccaggatgcattcccttctcagtccatcccgcttgactattacgcttatcatcagtacgtaattgcttgcataatttaaaacttttctcaataaatacaagtgataaaccacaaaggttgaaaactcccaatactaacttcccccatgcccacttggaaggacggtaagctcggactgccagttaaagaggccctcaaagtctttcccgaacttgggaaatatatcgacgaaagtgggagactcgacttttcaaacagagaagccagaatactctacaacagggcaattgcgagggcaatcttcgggctggatgtagagtatcatcccaaaggcctcgtgacaactccaatctcgcgctacctcttcttgaagacttttcttaggggaggcgaaaaagtcctcgaaataggaacaggacacacggctatgatggccctcatggcggaaaggcttttcaactgcgacgttaccgcgactgagcttgacgaggaattctttgaatacgcaaagagaaacatagagaagaacggggcaaatgtgaagcccatcaagagcaacggcggaatcatcagaggtgtcgttcccaagggagagaggttcgacgtcatcttctctgcgccaccctactatgaggcccccacgagaggagtattaacggaaaaagagggtgtcggtggaggaagatacggcgaggcgttttccgtaaggctcatcgaggaggcacttgaatatctcaacccagggggcaaagttgccctgttccttccagacaaggagccgctgatagaggctatcgcggaaaagggaaaagagctcggctactccgttagggacgttaagttcaaggtcggaacgagatggaggcacagcctcctgctacataagtcctaagaaagcccatcatttggtcatttgaatgaccaatatagacgaattttggtcagctaaatgactataataaagggaagggactcagaccgtgggcgtctcagcactcacgccggtctcagaggaggtgctttctcctcatcgtccccaaagccatacatagagcccctcacttcatgtcctcaacgtagaggaagagagcctttaagtattcggtgtcctttgaagccatcaatattgggtggtctggggcctgcgtcctgtacggttcgagcatcttaaggaacttgcctgcctttgccgcagccgctatgaccatgtccttgaaggtctgcaggtcaacgtgctgggagcaggaggcggtaaccagtattccgccctccttgaccagctgaagtcctgcatagttaacgttgaagtaggccctgagtccgcgctttaggtctttctcgtgctggacgaaggcaggaggatcgaggataacgatgtcgaacttctcacccctctttatcatctcctccatgacagggaaggccgagcctacgatatacttcatcttatcctcgacgccgttcagcttcgcgttctccttcaccatgttgatagcccacggtgatttgtcaactgccacaacttcatcagctcccgcaaccgctgcgtggatggcaaagccgcccgtgtacgtgaaaacgtctaaaaccctcatgccaggcttgacgtacttctcaagggctatcctgttctccctctggtcgaggaagaaacccgttttctggccgcgcatgtcgactatgaacttcgccctgccctcctctattaccgtcctgtacttctcctttccgaggaggacgcgctctatttcggggaggccctcccttctcctgctcctgccggtgttcttctcaaagacggtctcgatttcgggctcggcctccattatggcctcggcaaggtcgagcttaaacctctccattccgacgcttgaaatctggatcgaggctatttcgttgaagcggtcaactataagaccaggaaggtaatcagcctcaccgtagaccatgcggtaggctttgtcgtagccgaggacattcttcctgtactcgttggccttccttatcctctcgcggaacagctccttgtttatctcggtgtccttatcctttgtgacgagcctgaccataatgtttgagttcgggttggcaaaacctttcccgaggaacttgccgcccctcgtgtaaacctcaacgatatctccagggtttatctcgccctcggttctcacgacacccttcttgaagactatcatcgcaccctttcctattgccctcgctgcttgagcatcaactataactctcgccattctcaccaccacctgcgttaaaaggcaagggctttaaaaactgttgcttttcattgctggatttctaagcccttcaaaaccttccaacacggccgagcgataggtatttaaccattgccaccctataatctcaagggtgattctatgcacttcgaggtagtcaaggagtttctggaggacatcggagccgactggattgagattgagggggagatacacctcgaccccgaggtcttctatgaggtctggaagtacgtcggccagcccgagcttaagacgtacgttattgaagacgaggtcgtcgagccaggttcttacgaccctcccgagatgaagtatacagacgttaagaaggtcaagattaagaaagtctatttcgagacccttgacggcaagaagatagttaccgactactccgaattccagaaactcgtgaaggagaagtcagcctgattatcctttcacttctctactcttttttctttgaatctaacccaagagcactggcaccatcagagcccccatgcagttggtccgcttaacaccgagcagaaccgccagaatgccaacgatggaggaggcagcgagggctaggattcccgaggctccgtcaaaatacgcggagagaattataagaaacacaagaacaccaaggttgagggctctgtacggaattttaaaaacaatcgatgccagaatttttgagataacttcaccgtagagcattaccaaaatcccaacgaagagtgaagcgaggataaaggtgtaaagggtcgaaagacccattggggacatcctcatcacgataccgtttctggccctcccggtttcgagaaagttaaccagagaaaagaggaagtttgccgtgtttgtggagtagacaaccgccagaaaagagcgctcgtcctttgagaaaaacgaccctataagcgccgcctgagatgatgtgaacgcgggaaccaaagaagcgatcataccgagaagcgttcccataaaagaaaataacacgagagatttagtgtccatctccagttcagcacttccgggcgatacctcggacgtctcgtaaaacaacgcaatgaggataactggaactccgaacagacccgtcaaaagatgataaagcggttcgttgagggaaattctgaggatcataagtccgaccagtccagaaaggattactatggacgccgcccagagcttttttgtgcccttttccgttagcaccagcagaatcatcaggagcaaaacgaccgccttgccaatagtgaaagtgtacatgggtgctatcgcgagatacagtggaaccagaggggtgaaaaacagcgtccccagaaagctcgaatacagcgctattcttatgacttccattcccttcccagcaaggacgagtctgtgtgcaggcagaatgctgagggccgttccctcatccggaattccaaggaaagttgagggaaacgcgtcgaggtatgtgtgggtgagtcccatcgcaaacagcgtgagtgaaggcaacagtgcaccattgagcagaactgctagagtgttgacgtggattcccggcgttaaaccagtaaaagttccaaagagcactcctagcaggagatccctgagcataaatcctcacccgactgaatttcaaatgctggcttttcccggtaagtcgtgaaaaagccgtaggcagttacgttctctccagaagccacagataccccaagggacttggggagcttgagcagaacccagcagtttccgtcggtaacgttggccagcccaaagccgttgcgatacctcttcacccaggtaacggttccagaaatcttggcgaagttccccggcgagtactcacagagctcatttggcagcttttctctgggatgaacaaccgagcagttcagacacaggagagaagactttctcctcaaagccctgatgtgaacaacatcccccactctagctttaaacccgtagagtctcaggtcagtgcagttgagctttagagtgcttcccgaatccaaaacgaggcacttcgcttcaacgatatcgccaatggacgaattccagagaggtttaagcttcgaataccctagaagtgctatatccttgggttctgaaggataaaggtagatgtaatctctaactttgacaataccagctactcgaatcctctggccaggagaaacttccacgccccttaacttcaaaactttgaactcctcactctcgttccagattgatatgtatcggccaatagacatgaccacaccctcaaccacaaatggaaacccgttcttgggagatgcagaaaatccgcgcctatggacttcaagaggatagaacttactgccataccctagacccctcactaaaaccagctcacccttggatgcgttgattggagttgccagatacaccctatcaggtgtcaaaaggtaaggacttccttctgtccagtacgctccctcaattgactccagtggaaagtcggggagtgaggtttcaaacgatgaaacgtccatccacaggccccggttggtcctccttaaacggccgtgaaccgtgtaaaccctcccaacttccagggatttaccaacggcaacggtttgacttccgttgtagaggatggagaagctgggcgaagaatatacacacaacccggtaaacgtatccccgccgggtggagagagccgaataagcgcaagagaaactattgttaatgatatcaacaaaacaataactaatttagacttcataactcttcaaaaaagtaatcactcgaaagtttaaaaagtttttgaaaaaagggagcactagctagaacaaaacacagactaaccggctaaaacgttacgcgaaagggaagccgttcactagagacggctcagtatatctcaccgctcgggtacacaacgagtccgtcgctcattatttcgaacgggtacttcttcattgagtgcttggtctcacgcatcttccttatcaggagatacctcttcagctcaacctcacgctctatgaagtcaaggagaacaacacccctagcaatgtactcctcaattccatacctgctgattttccccctggatggttcgggggcctcagtagtcaggatagaagtcacgcccatctcaagaagtatcgtgttcagctggagcagaacctccctgatttcttcctctttctttaacctgaacgcgatggatggaatcgaatctattacaagccttttggcatctatggccttaacaacgcggtatatgtacctgaggaagtcctcggtgttaaggttgccctcaagtacatactgctcctcggaggggaggccaacaacggcgctgacaccgtctatgattgctattttaccctctttttcgtatttctctatgtcccatccgaacgcgcgcatctcccttctgagatcgactgcacgctcctcaagtgtcacaatgacaccaggctcgtcgtagagctcaacacccttatagacaaactggactgcaaaggtggtcttaccgctacccgttggaccagtcacaagaacagttgtacccttagggaacccgccgtttacaagctcatcgaacccaggaatcccgctttttactctgggaacagtccattcaccggtcattccaatcaccgcgatattgctatgattacattctgataagtcctcgctaactgctaggtattagaaactatcacaatataaaacttttggatgttcagacaccatagggaattttattgtcttcacagtacattattgtgcacctcccaaaaaggaaaccgttttattgttgattatgtcacccatattaggtgggagtatgctcgacccctttggaaaaagagcggagagcctcataagggaagaatttggggacctgctggcccttctggagcgggtaccctccgccatttcagttgaggaaccgataagtctagtaagctggatgcttgaatcagaaaatccaccgcaagaacttgttgaggtagacaacctagaggaactccgtgatctgttcaagttttatgctctcctcggagcggcttccatatctccctacgggcttgaggccgaggtcgtcaagagggctaccctgcggctgtattccgagagaataaaggcctctaaaaatctcagtgaaaccatgttgcccgttgtccccgtgggagaaaatgaaattccccataatgacctgaacatccttgaaaggagaatggacaggaatttatcccccgaggaaaaggagaagctgaaaataaaatacaagatacccataaaggaccttctaaacctgtgggggagctctctgaaggaggtgtatataagaaacggatacgcctacctcagatgggaaaccgccctgaagatgtgggaaaaagcctttgagaaaaggttcgagagggccgttaacatcctctacgagtacagggatgaactcccagaattctaccacaggctcagggagaaactcgaagaaatagctgaggagtacttcaaagagaggggagagatgttcaaggggactgcatcaccgctaaggttcgacctcttccccccgtgcgttaaggaagcgctcaagggagtgcccgcgggcatgagaaactacgccataaccgtgcttctgacgagtttcctcagctacgcaagaatctgtcctaatccacccaaaaaagacgtcaggataaaagactgcattaacgacctcaagatcatcgaagaggagatactgccggtcataatagaggccggaaaccgctgtaaaccgccgctcttcgaagaccagcctcatgagataaagaacatctggtaccacctcggctttggtctgaccgacagcccaacaatggaggacagcggaaactcaacgtggtactttcccccaaactgcgacaagatccgggcaaacgcaccccagctgtgcaaaccggacaagtactgccgcggaataaagaacccgttgagctactacctcaagaggctctaccttgagggaaaaaagaaggaaggtgagaccagtgagtaagctgttgagggaagtaacgcccgaagaaaggaggctctactactcaggggaatgggacgccaagaagctgccagagttcatagtggagagcattgaacggagagaattcggctttgaccacacgggtgagggtccaagtgacagaaagaacgcattctcagacgtcagagacctcgaggattacataagggcgaccgctccatatgccgcgtattccagcgttgccttttacaggaatccacaggaaatggaaggctggctcggcgctgaactcgtctttgacatagatgccaaagaccttccgctcagacgctgccagaacgagcatccctccggccaggtgtgcccaatctgcctcgaagatgcaaaggagctcgccagagatacactgatcattctaaaggaggacttcgggtttgagaatatccacgtggtatactccggcaggggataccacatcagggtgatcgatgagtgggcgctcaagctcgactccaaagcccgcgagaggatactctcctacgtcagcgcggcagaggaggtaacttttgacgacatccagaagaggtacataatgctgtcaagcggctatttcagggttttcaggctgaggttcgggtactttatccagagaataaacgaaaaccacctcaaaaacattgggcttaagagatcaacggccgaaaagctccttgatgaaaagaccagacaggatatcgttgaaaagttcgtcaacaaaggcttgcttgccgcatttccagagggcgttggatacaggacgttgctgagactgttcgggctctcaacgacgttttcaaaggcttatttcgatggtagggtcacagttgacctgaagagaatactccgccttccctcaactctccactccaaagttgggctggtcgcgacttacatcggaagcgatgaaaagagacttgaaaagttcgacccctttaaggatgcagtgccagagttcagaaaagaggaagtgcaaaaagcttatcaagaatggaaggagctacatgagggatgaacggaagggcaaaagtagtagtttccatgctcatatggggcagtgttggaatattcggaagattatccggcctaagtggtcttggagtcgcttttgccagggttttcctgggtgctttggttctgtttatggttattgggttaaccagaatggagttgctaagggagctccccatgattttccgaagcaactggaaaccgctgcttggccttggtacagccctggctctcaactgggcgttcctgttcacggccttcaactacacaaccatagcaaatgccgtaatggtatattacatcgcacccattcttgccactctcatgtcctggcgttttcttggggaaactatagacaggaaaacgctgagccttatcattctagcatttttaggcctcatcctgataatgagcggtcaggagataagtttcgaaaacagggacttcgttggaatcctgctcgcgttcacggcggcgttcttctacgctatgatacccaatctcgggaggttcttgaaggaagttgacggaaaaatcttaacgctcagccagctgggaattgcttctttcgtcctcctcccctttgtcctcctccaagacgttggaaagccagtctggtggacggttcttgtactcgtgctcatccatacggttttcgcgctgtttctttacatggagggcctcaaggaagtggaagtgaaggacgcggctcttttgagctatcttgacccggcgagtgctgtagtttatgccttcctcgtctttggtgaagtgcctggaacgagaacggtaatcggtggagtgcttatacttcttgcctcggctttggatgctctgagaagatgaggcgagggggccgtagcccgccttctgtatcaagggggcattcgactgagcggcctaccacggggctcacaccgggaactcatcgcccctccctcggccttgcaccccgcgggacggccgtttcaccgcatccccccgggtcgtctgcgggttagctcgggcaccgtcgccgggcccttcaccgctttcatccccatatccggggggccgtgtcgtttctgcgccgttgcccggcctctcggccggtgccttgcggcaccgcggccccggtgcggtgggcggaacttcctcgggagtaccccgagagcccccgaccccctcgcctgaagaacgttaaaagggtggaaataaaaaggtttggtcaccttttcttcggaagcgatttaaagctcttgaattttggcggtttgggcctcttgaaccttcctaggggagaacggcgctttggatttggtctctttttccttttgctcttcgagctgaactcccgttgccacacgacccagataaatgaggcaacaagaataataaccaaaagaactgccgcccaaaacgcgctgccgcgggtagaggaggtttcttcaacagatgaactcgattctggagttggagtagtgctggtgatgggtttggatgacgttgtggtagtgggagtgtttgtttcttcaggcgcaggaaagacccaaaccccagaatatgaagaggtgtactcaagaaccttcagtgtgaaattgtatgcaacgtacccagcggtatctagcggaatggtaagaactaccaacccgcttcctggcggtatatcaacaatagtagaacctgagtaagaaactgttccatcaattgttacattgtagagaagaactcccgatttttttgaatctgaattatacgtccgaatgttgaacactattcccttctcatctctgacaacactgacgttcgcaatgcttggaggactcagaacagtgtaatgaacttcgccacccccaataccgacaccaaagaggtacacctggtatctaagtgtatagttccccggaatctcagtcagcaacggaactctaacgacctgggtaccttccgccgcagttactgggatagtcgtatttttcacaaaccgattctcattataataacttgcaacgagggttagatttgcatttctcacggacatcagagttatgtacagatgtccaatgtcatttaaatagagatgatctttttcaagggagacggaaactaccgaaacaccaagaagaaccttaaacttccttagccgtgagactgaagtagtggagcacctgacagcaagctcaaccgtgtactccccctcggaatactttgagtcaataggaatctcaaaaaccagcgatgaatagcctggagcaacgaccatgcttttggacacggaatagagctctttaacacccttaactgaaagactgacattgatgcttacatttttgtgacccagattggatattggggaatagactactaaagaatcccctatgaagactgtcccgtcttcaggctgaatactcaattgtccaacgcttattgggaccgaaagaacttccaggggaactgctacaacgaacgtcctcaaactgccggaagggagagtcgcaagaaaacgaagcttcaaactgtagtttccagcgggaacctgctcggagcaatttatatagtatgaaaattcaacgacctcatctctgttccagcccccaagaattaatggggtaaccgttacgttgataccctcaacctgactgccgttctgagactcaacccagagagcacgaaggtatgtccgcccataggccaccccggttggattcataatcggtattacacccttagaatagtcaccggaaacaacgattatacgcacgtcggaagaagactcggagagcacaggggaaacataagggataatgagtatagcaatgaccaccagtgaaattatagacgccttaatggtcatgacaatcacctgggattattagaggctttttaatataaaacattagcgcacgtttaacaaaattaaaacgcctccgccaacgaggaatagtgttatactgagaaaaatcttgtagaggggagattttgagaaatggtctttaactactgccgctaagatcatcaaaatagtaccatacacaagagagaatatcccagcggctacctctggtctcactttaagcaccagcaggactcccagcaatgccccagcgaggacagtggcgtgcggcacggtgaacataaggtacctgagaaaaaccttctcctcttcgtccatggccatcactccattatgaacgcgtaggtggtcgtcgttgggaggattctccttatcctaggaaggagatacctgggatacctgccctccgatttctcttctaacggatcgaactgcccaaggatggtttctattaccttcacttcaatctttcccctaaccctgaagtaacccctatccacagtgctaatctccaggattatcggtagtttgagcttctctcgttcatcatcctcaaggatgtcggataggtattcaagctcagacgacctaaaatagtgcatgcttccgtcccgtaggatgacgtacccgtccccatttctaagggcttcgttaaggcttaccctctgcctcggcagatgaaggttgactctcattatttctttgttcagcaggtcttcggccgtgggcatgtttgaggataagggcgacatcctcaaaaacgttggttaacatttaaatgttaaacacttggcattttttcaattgttattgacatcccaacgtaaaaagtggagccgcgggagttcattttgtcatcgtgacaagcaatcatcagaaaaagttaaatttgaaagaacaaccattaaactgtgttaatattggactaatgttcacaaaataggtgataaaaatgaacgaaattaagggaattgagagggcggtacaagtcgaagtcccaaggccgaggttccttctgctggcattcacggatatcaacgggtcgctaaagggcatggaaataccaatggagcgctatgaggaggcagttgaggatggggtatccttcgacggttcctcgatacctggattcgaaggaatagaagacagcgaccttatattcaaggcggatcccagcacctacgccgaaataccgtgggagggcattggaagagtctacggttacatctataaaggagatgaaccctaccaagccgatcccagggggattctgaagagagtccttgaaaggctggagaaggaaggactaaaagctcacatcggccccgagccagagttctacatcttcaagaagaacggcacatgggaacttcatatccccgacagcggcggatattttgacctggttggcttggacaaagccagggagataagaagggagattgcactctacatgccgtatctcggcctaaagcccgaggttctgcaccatgaggtcgggaaggcccagcacgaaatagatttccgctacgacgaagcccttagaaccgccgacaacatagtaagcttcaagcacgtcgttaaagcggtggcagagctccacggctactacgccacattcatgcccaaacccatctacggctttcccggtaacggaatgcacctccacataagcctgtggaaagacggtgagaacgttttcattggagaagacggcctgagcgacacggcgctacacttcatcgggggaatccttaagcatgctaaggcccttgcagcccttaccaacccaaccgtcaacagctacaagaggctcgtgccgggttatgaagcaccggtttacatcagctggggttatagaaacaggagcgccctcatcagagtaccagctttcaagggaagtggtgcgagaatagagtaccgctgtccagacccgagtgcaaacccctacctcgccctcgctggaattcttatggtaggactggacggaataaagaagaaggtcgagccagactcgtacgtcgagaccaacgtttacgagatggacgatgccgagagagaaagactaggaatagataccctcccaggaagccttggagaggcactggaggagctgaagaaagataagacagtcagagaagcactcggcggagcctacaagaacttcatcgattacaaggagagggagtgggaagaatacattgaatacctgagctcaagggatatcccaattgacaccaagaaggttacggagtgggagcttgagaggtacttctacgtttgatgggctccctcaggcccttctttttctcccatgtgcactacgatggaaccccctattatgagcgccgcaccgagtagctgaaccagacttaacttctccccgaagaggaggaaagccagaaaaatcgccacgacgggctccacagttgccactatactggccctgctaacttccacctctttgagggcgtggttgtagagaacgtagccaagaaacgtcggaaagagtgccagggcaaagaggtaggggattgctccagtgggtacactaaaatctgagaagggggcgaggaatatcataccaaacagcagtgtgtagaagagcgccttttcaggctcttctttcctaaccgcgaacttggccaggatgccgtagagggcataagtaaagcccgaaaggagaccaaagaccagggctttggtcgagaatgaagcaccagatccgttaacaaaaagcacaccaagggtgaccataaccagcgccgttaacttctctttcgttattttttcgttgaagatcagcctgccgaggattattgagtacataggcgcggtataaagcaagaggacggcgaaggaaacggaggatatcgtaacggtgtaaaagtagagggtgtagaacagaaagatgctgaagaagccgtagagggcgtagaacctgagcctcgagcgctcgattgaaaagccgatacccttcagcttgatatatgcaccgaggagaagaagggcaaaaacgacgcggtagaagaccatcgtaaatggcgtcagcccaaagccatccaagtacttggcgaagatgccgagtgtcccccacatcgaagctgccagaaaaacaaaaaggtagcccttcttcatgatttcacctcaaaactccggccccacaggaagcctccgcttgtgctcgctcctccttacaaggccctcaacgtattcgaccttctcgacgcttattccaagctcctctactatcttctccttcggcatcttgaggtcaacgaggcgccagagtatctcgtcaagaaggcggtagcttattcccagctcatcctcatcagtctgtccttcccataggcccgccgtgggcttcttctggattattcgtcctggtacgccgagcagctttgctatctcccagacttcggtcttgtagaggtttatcagcggcgcgtagtcgctcgccccgtcgccccacttcgtaaagtagccagttagaaactcgctcctgttgctggtcccaaggacgagtctgttgagctggtttgcatgagcgtacagaagaatcatccttgttctggacatgatgtttcccagagagcgtttgtctggctgaaagccgagctgagagacgaaagactcaacgatcggtttgatgtttatgacctcgtagtctatcccgaggctttcgcagacgagctttgcatcttcgacgtcgttgttctcgtagtagggcattatgaggcccagaacattttctgttccaaccgccttcgcagcaaggtaagcagctgtcgcactgtcaatcccgccgcttatcccaatcacaaacccaccactgccactctcttcgagcttttctgaaaggaagctggttatagtctcaatggcggcacgatagtcaagggctctcattttttgcatcccccttctgcttcttcatatcttccttcagggtctcaaggaagctgatatatcccctaaacgcaaacacaccgccaattatcatcaaaaagaacgcgggataagtaaggtacgaataggggtagtcgaaccagtagaccacatactcatactccagatccccatcgagaaccgttatttggggcgctgattgaacgtccacgctaacgtttccattatttaaaacgtactcaaggtcttctccaccaagggacagaagcactgacgcattatcagaccacatcactagggttcgattaacgacatcgtaggagtacaaattcccctcctcgattgtatggttacccgggccaagaacaccatgccattcgcttttttccagggttctataagatgccgcaaacgacatgatgagagcgaggaacagcaaaatcagaccggctagtattggggggtaagttataccttttttgaatgtagtcacgagcctcaccgagaaggaataatgaagaagatataaaaagatttcaatacttgccaacgaggtggcactcggcgaagtggttgtgctcgtactctatgagctgcggctgtttggcatcacagaggcccttctgagcgtagatacacctcgggtggaagcggcatcccggcggtatgttgacggcgctcggaacctcacccttgatcggcagttccttgatgacgtttctcctctccggctttggttcgggaaccgctgccaacaaggccctggtgtacggatgaagcgggttgtcaatgaccttctcggctgggcccatttcgacgattcttccgaggtacatcaccgccatccagtcggcgaagtaccttgcagttgacatatcgtgcgtgatgtagaggtaggtgacgccagtcttctccttgagttccttcatgagctcaagaacctctgcacggatcgaaacgtcgagcatcgagactggctcatctgcaacgataaaggtcggattcagtattagtgcacgggcgattgcaacacgctgcctctgaccaccggaaagcatgtgcgggaaccttccgacgtagtcctcaggcggggttatcttaaccatctcgagggctttgtatatcaactcctcgcgctctgccctagtttcgccgatgccatggattaggaggggctcttcaagaacatcgaagatcctgaaccttggattcattgaactaaatggatcctggaatatcatctgaacctttctcctgtacgccaggatttcttccttggtcttgatgtcagtaacgtccctgccctccaggtatatcttcccatcggtcggttctaagagctttacgatgagctttccagttgtggacttaccacagccgctctcacctacgagtgcaaagacttgctgtttgtatatctcaaagctcactccatcaacagcgtgaacgaatctctgtggggctcccttcaggctctcaatgaaacccctcttgatcgggaagtactttttcaggttctcaactttaagtaccggctccgccatctttcacacctcacagcagccagcatgcggcatagtgatccttatcaatctccttcattccgggctcttgctccctacaaacgtccattgcatacgggcacctcgggtggaagcggcatcccttcggcgggttgatgagattgggcggctgacctggtatgaactcgagcctgtcgacgtcctcgtggagtcttgggatggctgcaaggagcttctgggtatacggatgggccggctcatagtatattttctcgctgtcgccgatctccacaatcttaccggcgtacattatggcaacacggtcgctaatctctgcgaggatgctgaggtcgtgggtaatgaatatcatagagagaccgagctccttcttcagtttcttcatgaggtttatgatctgagcctgaactataacgtcgagtgcagtggttggctcgtcagcgatgacaactgacgggttcatgaggagagccgtcgcaattataacgcgctgcttcataccaccactgagctcgtggggatagcggtagactatctctggatcaagaccgacgagctcaagatacttctgtgctacatctagggcctcctctttctccatccccttatggtatatcagcggctctatcatctggtagcctacagtgtacactggattgagggcgttcattgcaccctggaatatcattgaaatcttctgccagcggatctcccttctcaacacatcctccgggagacccacgatttcccttccatcgatctttatgctcccatcgacgatcttgccgggaggagtgggcattcccataagggtaaaaccaagggaggacttgccgcaaccgctctcaccggcaagtcccagcacctcacccttcctgagctcaaagctgatatcgtcaactgccctgacaactccgcggttcgtgaagtagtacattttgaggttcttaacttcaaggacagtttttgccattgtctatcacctcacatcctcctcaacctcggattgaggactctatcgagtgccgtaccgatcataacgaacgtgaagcccacgagggctatcgccagtccgggcggaagaacccaccaccagtaaccgttcgttgcggctcctgcggcctgagcatcgtggagtatctgtccccaagtgacagcagttgggtcaccaagaccaaggaagctcagggaagcctctgaaagcactgcacccggaactccaagtgccatgcttgcgaaggcgtaggggagcagctgtggcaccatgtgcttgaagattatcctgcctgtgctcgcacctagaactctggccgcctcaacgtaagtctgctccttgatctggagggccatacttctcgcaaccctggcgactccaacccatccgaacacgaccagcagtagtactatctgccatagcgaaatgtggcctccaaagtacgtacccataaggatgaggatcggcaggctcgggattgaagccatgaactcctggaatctcatcatcatctcatccgtccatccaccaaagtaggcactggtaaccccgtagaatataccaatgagcacactgaacactgcaacggacacacctatggcaagggagactcttgaaccccagatgatacccgccaataggtctctgcccttgaagtcagttccaagccacccgtaggttcttccagtgaatataatcttcgcgttgtctaggtcgacacttgcatctttcggaacattaatttcaaatatgaacgtgtaagtcccctggagaggctcgggcttttcaaggatgttctcattgagctttccaaagataacccttgtggcatccatgagggtcttgtactggaactccttggtgggatcaatttgaataccctggctcttaacccacctaataagggcgtccctaacagcggggttagttccaagctggattaccgtattgcccgagaacttgtagttctggaggagcactacttccgtcccatcgggtctcttcactttaacggtaagggttggctttctaataccctcggacttaccgacaacatctttaaagactatgtcctgggggggaacgtcgtattcattattgtacggaatttcaataacgtatccagagtcagtctgcttcaagtacttctgaagttcactcccctcgaggacgaggtggggtgccagcttctgactggagaaaacattaacccaagtaggcgggacgttcttcgggttgtcaagccagaacgtcttccatttctctgggatatcaggggaagtaagtattggtgcagccaatgccgtgaatatcaagagggcaagcaggaagataccgagtaacccagtcttctgcctcttaaagtcagcccaaaattcagacaaagactccttgaagtctacccagcgcattgtttctcacctcacacattctgggatgcaccaaccttgactctcgggtcgaggaagccgtacgtaaggtcggcgagtataacccccgcgaggtaaagaataacgttaacgaacgtaagtcccatgataaggttcgtctcgttggtctcaagggctatccagtagaccctacccatgccaggccacgtaaatacgctctcagtgattattgcacctcccagtgaaccgagaaggctcatgataatcatggtcacgacagggggagcggcggctctaagggcatgcccgtagattacctttctctctggaacaccctttgccctggcagccatgatgaagtcttcctgcatggtaccgatcatgatgtttcttataacccatgcccaggctccaaaggacacaaagactattgtggcaaccggcaggaccatgcgcttcagcatgtcaactatgtgggcccatccagtcagattggggtctgggatcgacctcgccgggaaccagccgagctcaaacgcgaagataaggagcatgatcattccaaaccaccacattgggatactgctggtcactaaggcgagaactgaaagggccctatcaaaggcactcccaaccttctgagcagccttaacacccagaaggattccgaggaagattatgattatctgcgccgttgtaaacagctgtatggttctcggtatggccctctttaggattgccttaacgtccctctcagaaccgaagacggggttcctagtgtttccgaagtcaaacgttatagtgcgcttgaagtagtacataactctccatgcgtaagaccggtcaagcttatattcgtgcctataataagcgattctctcggccctccactgatcgggattttccggggctcttccctgcttctgaagggcctggaattcggcgttcacctgctcgattatacggttctgaaggtctttctcagcgactttcacgaatagggcagacatgactagagtaaccagcgtcaggacgatcagtgcattcaatattctgatcagcacgtacctaccaaatcccatggagttccctccttagcggttttggacgccaggactcatttttagtcatcgtctttttcagctttgtaaagcttctttataaatattttgtgaatgtccaatgaagttcagagaaaagcccatcacagagaaggtggaaatttaaagagaaactaaaaagggaaactaaagagagcccctttaccttctcctcctgaggaggagtggcacgactgcaaggccgacgaggaatgctggaccgcagattccaccgccttcctcgctggtctcagtcgttgtggtctgggtctcagtctcggaggtagtctgggtggaggtctcggtctcggaggtagtagtcgtggtctgggtctcagtcttagtctcgccaacggggcgagcactccttatagcccagtcagaggcaaggcccgcgaccgggtcaacgagcttaatctcgatatccttgctggcggcgtagaactcccagttctcgtagaggaaggtcctgtaaccctcgtatattccaatggcagttccgagcctgttgaagtcccagtacttatcctcactgtccatcttaacgccgttggcctcgccagagtatattacaagggcgaagtcatcagcggtccagttgaggagcggctgaatcttgtcaacggtgttgtagtagctgagtccaaggctgtcgagtccagcctgaatgtcaccgttgccgaggaacttgagaacctcctcaagtgtaaccctctgggtgttctccggagtccacttccagccaacgagacctggggcataccagtagctcgagtagtactggatgatcctggtcgttgagaacttcacgttgcttgaggagacccaaccctctgtgtagaagttccactggtaggagctcgggtcgctggtgtagaccgtaccgctagcagtccttctgtcaacgatcttagcctcagcgtcaaagccgagcttcttaaggacttcctcaactatgtaagtggcaacgtccttcctctcgtcctcaacacgtccgagaccaacgacttttaccggctctccgttgaagtaccacttgccgtcgtcgcccttcttgagctcatagcccatcttggcaagctcctgagcagcctcctgcatgccctcctcgaacagcttcatagcgaggtcttcgtcagactgctcggtgaggccgaaggcatcaacgaccggcctaacgtattcaaagccggtctcggttgatgtccacggagtgaacatcggcccggcacttccctggaagatgttctgggttatgtaagccctgttaacgaggtactggatggcgaacctgaccttcctgacggcgaacgggttgaagtacttcttgtcaccaacggtaataacgtacgggttgtcctggtcgtgaaccgggttccagacgatgtcaccaaacgctgaagtgctcctgtagagctttatgttggccctctgctcgtcgctcaggccagtgaacctgtaagccgcgaacgggtaccagagaatgtcgtagtggccgttggcaacttcgaggattgcagtgtcctcgttctggataccgtaaacctcaatggtcttgtagtatggatcaacctggtactccggctcggcgaaggccgggatggtccacttgtcgaacttcttgatcctaacgaagaggttctctggctggtactcgtcaacgtagtatggaccctggccgataacggcgtgattgtgctcgtcaatgaatttggctattgagtcgtaagcggcggtagcggcgttctcgtcctcaatgtacggcttgaggaactcaggaatcggcttgctctgtttgagctcgagaagcttctcctttatggcctgagcgtggctcgggttgatctggtcaagctgttcaacgtcctcgctggactcactccaggagtacttggggttgtgggcgacgagctcgctcatcgcataccagagctgccagggggttccggtgaacggaacaacgtaagcggcagtcattatctcgctggccgggaagtagtggttgtggtaaacgtcgaagaccatcctgtcatcggtctgctcgacgagcttgataccgagaatggtgttcatgtactcgccactccagtcggcctcactggcgtcgtagtatgggtcgtcgtcgccgtcctgggtggtccactcccagctccaagcaaggctgtacatcacatcggccgcgctgagcttgtggccgtcgtggaagtacggcctgtcacactcaatcctagcgtaggtcttagcagtttcgccggcgtgagcggcaacccatgtgtccgtggttgagttaaagatgaccgcatcctccggaacggtcacatcggacttgtagtcaacaacgtggcagtgatacgggtgcgggacaccatcaattccataggggatgccgctgtcgaagacaaggtcggcaatcctcctggagtaggtatcactgtaacctgaagaactcgggttccagacgcccatgaacagagcgccgcttgaagagtatatgactgtcttcagaacactgtcgctgtctgccgcagccactggcttcacacttggcaccacggccaagctaaacagcatcaggcccataacgaacaggcctaggactttcctactcatattccactgcctccttcaaatttatagcagcatttgccatatacggcgtgtaatggcatgatgctatacattcgagacctatttaagggttacgttagaaactttgagcggatagaaaaacgggctgaaaaaagccccacaatcgcatatttcgaacaaagacgctttataatataattgcgccgcatattttccattaaaagcattttcaaaactctgtaattcaatctacaggcaaaaaggaactaaacttcctgaagaaaaccagaaaaagggtacgaacggagaaatccgagcaaaaaacttaaaacttgggaaggttaagcccgcgtgggcactcatgcacgagctggttctgtccggaaggtttgtactgaacggtgagatagtcggggggagcatcggtatagacaacggccttataacagaaatctccaggagagacattaaaggtgaagaagtcatagccttcaagagcgagattatactaccaggattgatagacacccacgtccacctgagggatttcgaacagaaggaaaaggagaccgtggaaagcggtactaaggcggccctccatgggggcataacggcggtctttgacatgccgaacacaaagcctcccatcatggacgttaaaactttcgaaaagaggttgagtatccttgagaaacacgcctattcagactacgcggcaagctttctcctcgccggaaactgtggggaagcatcccgggcgagggcggatttctacaagatattcatgggagcctcgacgggggggattttctcggagaactttgaaagcgactactcatgcgcccctggaatcgtcagcgttcatgccgaagacccagagaccataagggaaaaccctgagcggcctcccgaggcggaaattcgggcaataaagaaagccctgactgccgctgaaaagttgaggaagcccctaaacgtatgccacgtgtcaaccgtgggtggaattgaggcaataatcaaaaagaacctcccctgggtaagcttcgaggtaactccccatcatctctttttaacttcaaaagactttgagaggaaccccttgctaaaggtctacccgccgctgagaagtgaagagcaccgaaaagccctctgggaaaacttctccagaataccaataatagcaagcgaccatgccccgcacacaattgaggacaaagaagcaggcgcagcgggaatccccggcctggagactgaggtggcgctccttctggacgccgcgaacaggggacttataactgtatttgacatcgttgagaagatgcatgacaaccccgtgaggttctttgggatcaaagggcgcgatttctcactggggaatgaagcaaccttcacgataattgacccgaagaaggagtggaaagtcaagcccgaggagttctacacaaaggcgaaatggagcccatgggaagggaaaaaactgaagggaaaggtcgtgatgaccgttatcaggggaatggtcgttatggaaggggacgaaatcattgaggagccgaagggggtaaggctggatgtacagggtggtaaccattgaggaagtatgggacgtggcaaaggacgtgaaggctttcaggttcaacgagaacattgagttcgcacccgggcagttcattatggcctggcttccgggtgttggagagaagccattcagcctagcatgggaagacatgatagtcgtgaagcgcgtgggacccttcacgaccaagctgtttgagctgaaagaaggggacagactttggatcagggggccctacggccatggattcattaagaggggcgaaaaagtagccctcgtcggcgggggaatagggattccgcccctgtatgctttcgcaaagaagaaccaggggaaattcaggcagatgacccttatatacggcgcccgctcaaaggacgaactttctctcctagacattgagaactacgtggacgatgccgtaataacgactgacgacggctccgctgggaggaagggctttccaaccgaagtgctcgccgagagaagggaagagttcgaccaggtctacgcctgcggcccggagccgatgctgaaggccgtgctgaaagtaatgaactacaagaatgtccagatatcggcggaaaggtatatgaagtgcggtataggtgtctgcggctcctgcaacctcgggaaatatctcgtctgcagggatgggcccgtctttgagggagaaaagctcgttggacttctgtgaccaattacctttttaaacccactttttctgctcttcccggtgagaagatgggtataaaaatgaggtgggaagactttgcgaggagcatgggtgtcgagccccagatactcgagaacaaagaggcgagactcctaaaacagttcgtgatggatttgaagtttccaactcactgccagggctgccagggtcttgatttaaataaccctaatccagttcaccatccgagctatgagctgactcccgcatgcaaccacgactgtatcttctgctattcaaacgtcgcagtgaagctcgggaaggcaccgaagccgggctactacgggtgggaaaacccttacgcgataaccgtctcccagtatggagaaccgctgataagcccgcgcatagtcgaagttaacaggatgctccgcgagaagtttccgaatgcgaggttagacctccagaccaacggctccctcctgaccgaggagctgtgggcaaagcttgactttgacctagtcatgataagcctcgacgccgcgagcagagagaagcacctcaagattacaaacgcggacactttcgaggctgttgtcaacgccctcaggatcgttggttcggacaagtccgtccgctcggttgtgaggaccatcttcatgccgggcataaacgacgaggacataccgaagatagcggagctcgccgcttccctcggaatagacgagatgatgctccagccgctaaccattcacgagcttaacgttgagagactgaagaaagccggtctggacttcgagagagcagagagcataagggagtttctcaaggcggctatggaagccaaaaagcatatagacgtgaggataagcggctgccagcttgcgatatacaggacgatggacccattgacgcttttcagcgcgaagagagtcgctagagaagtggcacctgtagttaagagggagaggctcctgtgagggagatgcgtttcaggattgaccctaaaactcagtcaccttagactgtgagcaacatctatgggcgaaaatttattttcagcactcctaaacatacaagcggtggacttaatggacatctggacgctggtggcggtttatatcttgatattcctttcccttgcgaacctcttcatcaagccaatcctttttgcaaagcggatggctggcaaagttttgaagaagctcctccgcgtccgggttccagagaatcaaaagaaaggtgtagagagattatataccccaatctgggtcatcattggcctctgggcctttttcaagctgaaggatgcaagcctgctcggcgcggtcttcggtcttttagccttccggagcggggcgaacataacgaggctcctggtctactccagccacgatggaaagattctcaaggagatggcagagggaagggttttgggcatccttgaaaaagccgtcaggatttctctaatactcgaagcggcgttcccatttgccatgttgctggcgtacaagactctaagtgctgtaacgatttcgcacgggagcgtaggaaagttcctcctggagctttgggtcgccggggcgattttcgggctggtatttggatacttgatagcgaaggacaacaggggtctgctccttgaagacagtgttgaggctctaacatttatgatagcactgaaagggaagcagaaggcggaaaaggcaaaggagagaataaagttcagagctccctgaagcggagtctgaacctgagttctccctcgacagggaatagaacggtgtagctaacgccctgctggatgaagtcccacccactctcactctggctgagggtctttattgggtacttccagacttttgcccttctgtcgagctctatctcgacctttccgatgccgtaggggtcgttcacctcgaacttctctgcctcgaactcggccggctcctccatgacgctgtggactgccaggttgagctcgacgccgaagagggctctggcatcgcttctgacggtgtagtccactatgaaaccgtcctcggtgagcctaaccgacttttccacacgtgctggcctcttagcaacgcttccatcgcgctcaagggttattccgttctcaataaggctgaagttgtaagcaccggtgaggaagtccccaagctcgatgtagcggctcagcctgtactcatcgagcgtcgtctctggctcaaggaagtggtcctgcagaattgcccttagatggctgtcgtaggcaagctcacgccttatctcgtcgggaatctgctttccaagctcgtggatgctggcgactccttcaccaccttcttccggtgtagcggcctctggaacctcgtggtagtgctcccagcgcctcgcgagaacgtcattgtagttgaccgcctttctcttggaggagagctcgaagagggctccgccgtatgctggtttgaagacggcgtagaagttctcgttctcgatgaagacctcgtccctgccgtcgaagtcgatgtccctcacgaaattccccgtcttaacgtggctctgagcctttattatgttctcccagacagccctgcggaggtgcgggaggtagacaccgccgaagacgccgtgccagtaggcgtcgttgcactgggccctgaggatgaattccctcgcctcggggttgtttctcacggccttactcaccatcagcatgcgcttgtgcatgtagttgctctccgggtacttgaagaagaagttcttccagattccgccgcggacgaagacgcgatagcggtcgaacttgttctctttctttagctcttcgacgaactccacgaagagcttggcctgcctcgccgggaggctccactcgctcatctcgaagtatgaagctatcgggaggtaaaccagaccgcgcggcctgaacctctggaggtattcagagtagagcatgaggtttatcctctcgtcgcttgaaaccctatcgaagaactccctgagccagcccttctcgtagacccactcgtaggttccgggccagaccccgaacttctcaccgtcatcgtggaagaccgcaaccttgctctcatcaccatcatcgagggagtgtaggtattcgagggtcttatcaacggggcggaaggggatcaaatacctgagcttctcgtctatcgggaaaaccgttatgacttcaccgccatcctcggtgtagtacggccagaacagctcatcctttgagaggcccgcgctcatgaagtggtagtcgtcaactatgacgtaatctattccagcagcgcggaggcttttcacgagctccggctgccagaccctctcagtgagccagacgcccctcgcttcgtagccgagattcctggcgaactccttgagcttctcgatctggactatcctatcttccttcggaatcgaggcaagaacgggctcgtagaagccagccaccactatctcaagctgtcccctcttgacgagcgagcggagcaaatcgaggtgttctggcttgttgtcgcgtatccactcaaggagcgggccggagtaatgaacggccaccttcatgttagggtactcctcaagggtctccatgaagggcctataggacctctcgtaggcgctctccataacccatccaaagtttccaaggggctgatggttgtggataccaaatatgaagttcaccatctccatcaccgacaagctttgttatcactggaggtgatatggtaaagaaaggcatataaaccttttcttcaggactcagtggaagatcaggagacaaggaaaaccaaatacacggcaactgctactgccagctggtttgagaagttgtcgtcgggcgggacgttgtagaactccacaatagtgccgatgactgcaccagctaaagcgggagcaaaactcacaagggggattaaaaccagcagagccgtaaggaagtatgccaagctcccctcaaggctcttaccgcttgagaatctgtgtctcccaaggctcttcccgattatagcggccagggcatcccccagggttgccacagttatggcacccaccgccaccttcatcgggaagaaatatactactatgaacgaagcggccgcaaagtatatgtgggccgcaactctctcacgctcgtgaggtctagttatggcctcgatatggttttctataagctcaatgctcctacccagctcgggggaagggtacatattcaggaggcggtactttatcctatccctccactcttcgattatcctgaatggttcaagcacgacgaagaggacaaaggccagacctatgaaggcgagcgttgtggtcttgccacagcagagataaatggcaggcacagtaagtcccgtgaggtggagtgctttacgcttcaactcgcttcttatactcacgctttatcacctccagggcctcaagaaggttattcacaacgtaatcggcaaacctgacttttcgggacttgaaatagcccctgcgaaccagtatggtggtggccccaatcgccctacctccacgcatgtcagtctcgtcgcggtcaccaacaacgtagacctcgctggaagggaacttttgaagggcaagcttgaagttgtaatcttcaagcttgctgtggcctgtttcaccgcttatgatgacgccatcaaagtaattggagacgccgagaacttcaagctttttcctttgccactccgtcgatgagtccgtcacgagaactatttttgccccaagcttcttcagaccggagagaaacggcagggcatcagggaaaaggcgtaagtgttcgaaaaaggcgcgctcaacaaaggacacaacttcccggatttcatcgtcagaggcatctgggtaaacgtccctaaagacggtttcaacaagctcgtccaaatccatcaggtggacttcctcagagctttcaaaacgacggtacttttttagcaagaagtacgctatggcccggaactttcttctcctgatcaggaacaagagagttctcaagagggtcttttttcccgcctcccacgtattgcagagggtatcgtcgaggtcggtgattaccagcatattggtattatttcttcggggcttttaaagggtaatgcaaagcttttaaagacggtaaacgagttctggattgatgagaggcgaagaactcgtactggcgggaatagccctgatattcctggggttcatcctggtgttcatcgggaccctgctatctgccttcagcggtgaggcggacgttgaaggcggcggggtcataatgataggcccaattccaatagtctttggaacaggaaggggtgtcaccctggccatgattctggcggtgctcctgatggttctgtggataattggtactcttctcgcaaggaggggatgacgtggagttcctcggctacctagcagtccttctagttgtggcaaagagcatagaatgggccttcgagaaggcggagatacacccgatcatcgcccacgttataactggcattctcctcgggccgtttgcactcggaattgtaaagccgggcaaagaaattgaagtgctggcacagtttggacttataatgatgatgctctacatgggcctgaccagcaacttctctgcaatagcccagaacacgaagaaagccacgtttgtggcagttctcggggttgctttctcgttcatactgggctttgccaccgtgtacctctttggaaaggggttctccgcggcggtgttcgttggcgtaaccctcggaaacacggcaatcgaagtcacgagcggcgtcctggtcaaggagagggtgaacagaagagtctcggccatactgatgggagcggcgttcgcggacgacatactggccgtttaccttataggcatcatcaccggcatggcgagcgggaacttcaacgcccagtccctcctcatcctgacggggaaaatctttgccttcatagtcgcgacgctcctgatttcggagtacatcttcaagcgctccagatggttctacagcgtggtcaggaacctcaacgtcttctttacattcaccctcatcctcacgtttgcactcgccataatatcggagtgggttggcctgaaccagataataggggcctacctggcgggtctgaccataagcagactccgcgagagaaaagaccccctcgtcgttaccaggataaagctcaacgagctcataggcgaccttcaggttgtcctcacggagttcttcatgccgctgttctttatctacgtcggcctgatgttcaatccccccattaaagacattaacatattcctcattttggccctctacgcctcggcagtgcttggtaagctgatcggctgcggtcttggttcaaagctggttggtctcccctgggaagattcgatagcagtcggaattggaatgggtggaaggggaagcctggagctggctatcctcacgttcggcctcagcacggggttgatagaccagagcatcttcgcgagtgttataatggtctcaatgctaacggccttaacaacgccgatattcttcaaggcgtacctgaagaggcaaaggcttaaagccggggagagctagtaccgcaaggcggtgagaaaatgtttccagagaggggagcgagcgaggaagaagtcctgagggagcttgaagagaagacaagagaagatttaaccttcgattcaggcaagatactcggttctatgtgcacttacccacaccccttcgcagtgaaggtcgttatgaagtacatagacaggaacctcggcgatcctggtttacatatcgggagccagaagatcgagaaagaagccgttgacatgctggccaacctacttgggctggagaagggctacggccacatagtctctggcgggacggaggccaacattctggcagtgagggcaatgagaaacctcgctggaatagaaaagcccgaactgatccttccagagagcgctcacttctcattcataaaggccgccgagatgctaggggtaaagctcgtctgggcggaactgaacgacgactacacagtcaacgtgaaagacgttgagaagaagataacagacaggacgataggaatagtggggatagctggaacgaccggccttggagtcgtcgacgacatcccggccctgagcgacttagcacttgactacggtcttcccctccacgttgatgcagccttcggcggcttcgtgataccctttgcaaaggctctcggttatgagattcccgacttcgacttcaggctcaagggagtgaaaagtataacaatagaccctcacaagatggggatggtaccgattccagccgggggaataatcttccgcgagaagaagtttctggacagtataagcgttttagccccgtatttggccggaggcaaaatctggcaggcgacgataaccggaaccagaccgggagccaatgctctggcagtgtgggcgatgataaaacacctcggcttcgatgggtacaaggaagttgtaaaagagaagatggagctcgcaaggtggttcgcctcggaactgaagaagattccagggatttacctcatcagggagccagtgttaaatatagtctcattcggttcagagaagctggaagagcttgaaaaagagcttaaggcgaggggctggggtgtaagcgctcacaggggctacataaggatcgtcgtcatgcctcacgtgaagagggagcacctcgaggagtttttgagggatttgagggagattgcaaaaaggctttaaagctgtccgacaaattgacccattggtgagacaatgaccactggtgtgaaggtttctgtgagacttcctccgaagcttgccgaggagatagactcgctcgtcaaagcgggcctcttcagcaacagaagcgacctgataaaggaggctatacggcactacctcagggagctcagaaaggagctcacggaagaggaaagatggaggctgaaggccgtcgaggacgtcctcaaggaggactgggagagtgaggaggacagcttctgggactcctactgaaggagggcctttcaaagagggagaggtaatcctcctgccgtttcccttcaacgacctccagaacgtgaaaacgaggccagccctcgtcctttcgagcgagagcttcaacaggaagagcaactcaatcatagtggctcagataactccaacctgaaaagcgggtttaaagaactcaacgtcctgatagcggacgaggaccttgacaggtatccaggaacaaggccgataatacccagcattgtcaagccctacgtgattttctcagtcaacaaaaggatggtcatcaagagaatcggcctcctgcgggaggaaaagctagccgaggtctacgaaagcctcatgaaggcgctcgacctcactcagtaacgccctttatgtccacgtggacaaaggccctctccacctctggcatctcctcgatcctcttcttgacttcctcgctgatatcgtgggcccccttgagtgtgatttccggtggaacttcaatgtgaagctcaacgtggagtttgttccccacgtagtgtgccctgaggtcgtggactcccaggacgtttgggacgctcatggcgcgcttcctaatctcctcgcacacctcaaagggcggggcgcttcctgtgaggtagccaacgttctcaaggattatctccgccgagaccttgacgaggaagcccgcaacaaccagcccggcgagggcatccccatacttgaagccgagcttctgaagaccgagacccacgagaaccgcaacgctgctgagggcgtcgctcctgtggtggtaagcgtcggcaactaagatttggcttttgagcttcctgccgacgtaaacggaatagcggaacatcaactctttggcaagaatggaaaggactgtaaccccgagcattagggagtttacctcaatggccgtgccatggagaagtctgaagagtgaatccctcccaatctcgtaggccaccaggaggagagcctcgcttatgagaaaggccaccaggggctcaaagcgggagtgtccgaagggatggcttttgtcagggggctttgaagaaaccctcatcccaaggtagccgatgacgctcgtaaccacatcgctgagggagtgagctccgtccgaaatcagggctatgctcgagtagagaaacccaacgaccagcttgagcactgagaggagaaggtttccaactatcgagacccatatggggcggtagagctcctccaagggccaccctccggggtttaaacgaattaaacaaccaacatgcacaatgcggtcagtccgtcactccctcgtcacagctcggacaaggctgaactcatcatcccagaaaaggtagaggatgggacttaaaagggttgctcagcgatcacctttccttcctcaccggtcggttcgcccatcactcatcatcgcagggaaaaattggagagggggtttaagtggcttccgctcactgtgaagcagttatgagcatagcaacctcagaggtatcggtctggcactcgtttcccgcatcgggagagagttctacgcgcatagtaattcctatggcttcgctctcagccagcttgccctcaaagaggcgtataagcgtaccgttgagctctttaagggattttccagcgtagagatcaagtttcatgactgtcccgttaaccaagacacggatgtccttgactatcaggtatttgctgagctctccaacgtctggcgtgctgtccacgagtgcctcagctttagagagctttccatcttcacggtcagtcacgtttagggtcattgtgatctttgaaacagggtaatctccgcggttcttgatgtagaatcggatcgtcttctcttctcccggcagaaggtctccaaactcaaagaccttgtaagcatcgtagtacctcccgtcatctctgcttatcccgatatcgaactcacccgtggagaactcgttgcccgtggacttcgccacgtcgctgaagtacgaggcaccaaacttgacgccagcgaggaaaaccagcagggccgccagtgtaacgcccagcgttcgtttcataaataccaccaatcatggtttctcagaagaagaacgcgtaagaatatataagtttttcggaagtcaagttgtaaaaactggtggcgtaatgcattctactacattatttggagagatacaacaaaaagcctatcaaccgacagattccaaaaccgtttaaaggcacgcccaagaaaaccgtaccgcggtgaaatccttggagggaagcgaagaaactctgggcaaggtcgcaaagggggctggcatagtcctagcaggaacagttgtgggaatgctcctcaactttctcacaaaggcagtcctggcaagatactacgagaggagccagtacgggtcgttcacactcaccgtaactgttctgagcattgcaatgaccatagcccttctcggacttcagaacggcctctcaagggagatagcccgccacctccagagggatagagaagttgcactaaaactggcgtcaacgggagttttgatagggtctagctcttccctggcccttatactactcttattcaccctggctcccaatcttggaaatgtcctaaacgacccgtacctaaaccagactctcagaatagcctctccagcgcttctcccgatggttttgactatgataatcgtggcaatatccaggggacacggaagggttagggagaacttctattacaggaacgtcctcccccagctcattttcctggttttcctgggtatgagttttctcttaaatctcagcttcaactgggtgttcatttcttacgtcgccgcatggacaatcccagcgcttctgggcttcttagatggcataaagctcgggctgttgccgaaaaaacctgagttcgactggaatctcgcaaaagaacttttggcgttctcattcccgctcatgctgacgggcatattggactatgttctcggctggacagactccctgatgctgggctactattttgggcctgataaggtgggtctttacaacggggcggcgccaatagccagggcactgcccgtggttctgaactccctcggattcgtgtttatgcctatggcaacggtgttttttacaggtggaaacattgaagggctgaaaaggctataccagagcactgcaaagtggggtttcatcctgacttttccggccttcctgctggtttttgcgtttccaaaagggacaataaacctgttcttcggggccaagtacaccgaagcggcgacagccctgagaatactggccctaggttttatgttccacgtggtaatggggctcaacgctatgagtctggtggccgtcggaaggacttcagacaacctaattggcaacctccttgccgcactcctaaacgtggccctcaacatggccctcattccggtgtacgggataaacggggcggctttggcaacggcctcctcgtatatagcggcgaacctgtacagggtgtcaatcctctacaggacgactggagtccaaccatttggaaaaacctatgtcaaggccctcttaatcggcgccctaatgctcctccttgggcttctcctgggagataccggttcgatcgttggagccatcttaaagactgccatcctctacggtggttatctcatcctaatccttctgagcgggtgcatagagaaagaagaagctgaaaatctggaaaaactggcagaaaaagctggtgtgaacctaagatggctcattagagctatggaaaggctttcaaaggatgagtgaagcaaagaggctttgcgagtaaaaatcccaacacctcggcaaatttataagcctgccaagttaatacgcacacgagaaataaaagaggagatgtggtatggtctcaaccctcgcagtgatcctcgcgggaatcgcggtcttctggatggttctgtacgccctcttcggaaagaaggagatagaccctgaaactggagaacccatagagaaggaagagggtctcagcgttgacatgttcatcgcaatgtggagaacaaagcgcctcttggggttcatagacagagtatcacgcatcaacccgcgcttctggaaggtctatgctgacgtcggcatagccctcggttacatgggtatggtctacgtcttctacgcccttgcaaaaaccgccgctcaaacgctccagaccaagggacagcaggctggggttcaactcgtgatccctggcgtgacgatcccgctttggtacgggcttatcggcctcgttgttgtgatggtcgtccacgagctcagccacggaatagttgcgagggccgataagcttcctctaaagtccgttgggcttgttctcctggccgtgattcctggggcctttgttgagcccgacgaagaagaacttgcaaaggcgcccctccgctcgcgcctcagggtgtacggggcgggatcaatggccaacataacaacggcaataataacggccctcataataacctacgcaataaacccgcttctcgtccccgcgggagttgaggtgaagggaataatacccggctcccccgccgagaaggttctccagaagggtgacgttataatcggcataaacgggcaggaaataaagaccatggaagacttcatggagttaatggacaaaaccaagcctggagaaaccctggaacttgaagtcctaagaaacggggagaagatcagcgttgagctgaccctcgcagagcacccagacaggccaggaaagggcttcatagggatacagccggctcagcatgttgaatcgaaagtcgggtctgcgaaggtagtcctcccgattttcttcgccctctactggatatacctgctcaacgttgggataggccttatgaacctcttcccgctcgtgcccctcgatggcggcagaatgctggacgacgtcctcaaggagtacctcccagagaaaatagcgaggccggtgaggtacacgaccataggcgttggactgcttctccttgccctgaacctgtggccggctttactgaacctcgccggctgaatgggttttctttttactttctcttctgaaagcctcgccgttcacggcggggaggaggtcagaatgttttccatggccaccaccacgtacccaatatcaaacatctgcattaacagttttaaatctatccaagaatccagaccaggtgaggagatgaagtgctccaaatgcggtaaaacagcggtctatcacgcacgctacacgggaaggtattactgtaagaaacacttcaacgagatggttgagaaaaagttcaaggagaccgtgaagaagtatcggctcatagagaagggtgagaggatagccgtcggtgtgagcggcggaaaggacagcgtcgtcctcatgcaccttttagccaagctccgcgagaagttcccctttgagcttgtcgcgataaccatagacgaggggatagccggctatcggcccccaagcgtcgagatagcgaagaggaacgcgaaaaaacttggaatagagcaccgcatctattcgttcaaggagtacataggcttcacgctggacgaaaccgttgagataatgggtagcttcgagaagggcgagcgcgttggggcatgctcctactgcggtgtgtggaggcgctggctgctcaactacgcggcgatggacgttggagcagacaaattggcggtaggccacaacctagatgacgaggtacagatgttcctgatgaacatcctgaggggagacatagctaggctcggaaggacagggccgtactacgaggaaattcaccccgagctcgttccgaggataaagcccctccgcgagatacccgagaaggaaatcgttctgtacgcagttctgaacaacatcgaggtggatttgagcgagtgcccctacgcggtagaggcgttcagggcggagataagggactggataaacgagatggaggagaagcatccaggaacgaagtatcagatactcaggagctacgacaagctcttcccgctcatagcgaagacctacactaagaagacgagcgagctgaaccgctgtaagatatgcggacagccaacgacgggggagatatgcaaggcctgccagttcaggctccaggtggagaagaaggccagggagaagggtctgactttcagggttgagtgaatttgataaacagggatttataaatggctgtaaagtatacttagcaatgtttataaacaaaggagcgaatataaaatcatgaaggagagccttgcgagagtcctaaccgaatggcaggagacctggacaccggagctcattgagagggattttgatttctcattaatccctgaaaagccaagaaaggtcgtcacctttgccggctgccggaggacgggaaagacgtatctaatgttccagctgatcaacgagctgtcaaagaaagtcccgaaggaaagaatcttctacatcaactttgaggacgagaggctcgaaaagaacatttcgacgcttaccgggctgataccaacaatcgaggagctttttggaacctcagcggagctttacctcttcctcgacgagatacagaacgtggaagggtgggattcctgggtcaggagggttcatgattctggaaaggcgaagctgttcctaagcggttcctcctcaaagctctctagcagggagattccaacttccctcagaggtagggcactaactttcgaggtgttcccattgagcttccgggagttcttgagattcaaggggtttgaagttccgtcgagggtggaattcagctcaaagaagcccagacttctgaacctccttagagagtacgtaacctacggtggtttcccagaggttgttctggcggatgatccgagggtgaagaggctcatagttaccgactatttcaacaccataatagccctcgacgtcgttgaacggtactcattgagaaacccggaggagctcagggcgtttctcaggctggccctcaattcggagtacctgagcctgagcaaaatggagagaaccctcaagagcctcggctacaggataagcaggctgaccctcgccaactacttgaggtatctgagcgagtcctacttcctcttcccggtcgaggtactttcacctaaagtccgcctcaggatcggccatcccaaaaaggtctacttcgtcgacaactcgttcctgacgttcctcagcgtcaagttcagcgagaactttggaaggctcatggaaaacacagtctttctggagcttaggaggaagggagaggaaatcaactacctcctcaacgaaaactgggaaattgacttcgccctacctgagaaggagaccctcatccaggtgagctacgacttaagcgatccagagaccctcgggagagaacttaaggcggtaaaagcggcgaggagggagacgggatggaagaaagcctacgttataaactgggacatcgagaaggaagtagatgggataaagttaatccccctatggaggtttctgcttgaggaggattattgagactccaataccgcccgaagagcttgaggaaatccgccgtcggagcgggacaagggtgagactggctcttcttgaagtgattgtaaaaaacagaatcccgctcaaaagggtggcaattgagggagaagacgaggagataaagaggttcatggagtttctgatgagggcgagggccggtggatagctactcaatgtggacttgcccctctcctatccagaagtcatatccaccttctttgggcttaaagtccggcaaaggcgactttcttattaccattttttccctgaatgtcttcgaggaagagcagaattctatgacgtactgactgtagagggcaatccaagcagtcaacctctctgaggctctgcccttgttcaagagaaagatgtttatcggccgcttcctcttttcagttattctcgccttttccttcagggcaatgagattctggaacaatttgatgaaattgtcttcaccaaacaagaacgccagaccgtctatcgtgaagtctataccaatggggcgtctgtccttaatcttctcctcaaggatgcgccgatagaggtagttgtatttgggcacaaaggttgaagtgtcaatgcttttattcgtataaacaaaatccaaggggtaatcaacaccataaattgacgagaataaatccacgattgcgagattattctttttgccaaattcctcaatgtcaaatcgaataagccccagctccatttttaaaggtgtgaaaggcagcactgagtctaaaattacaccgaaatcgccttccattatgcggtttctcagtatttcaaaggccagagtccagccgtttgagtatgaatcgtacactatgagaatgttactgtcttccagtaatcctcctccaagtgcgtcatcgaggataggaatgcctgtactcagaagttccataatcatcaccagagtatttggtgtgcatggaatatttaatggtatcgtgttcccggaggaaacactctgaaattcagagaaactccacgctataaataggagaacgtcctattctcaataggggtggtggatatggaagatgttaaggaactcaagagcgtgctcgagaaagttgagggcaagctgatagcggctggaaagatgtacgccgcgatgaacttcgcgggttttctggcggtgatgactctgttctacgttatactccggttcttcaacggcgggcccgctttcagcatcgcatactggacggcagccactatcgttgtgattactttcacctcaaaggtttggaggaggatagtgaccatctccggaatcaaaaggaactccggaaaaaagatcggtctagaaatagcgggtgcatgggtaatcggcgctgcgcttggctgggttttgatcccctcattgaatccagggataaacgaggaagcgggcctggccgtgggcttcctgagctttatcagcgtttcgctcctcggccagtgggcggttctgaagaagtgctgtggggccgagaacgagatggttcctgcgtttctgattccagcactggccatacctctagcgtggggaatgggaagtggagcgatgctctgggccggctacgtagtctcactcggctttgccacgactatacttctataccttcactccgccttcaaagccgtcaagcggtgataaaatggaagccctcagggagctgagctctaacaacgtcctgggaaaccccataaggctcgccatcatgctctacctcctgccgagggagagggccctcttcagagacctcctggaagtgcttgaggtaactcctggcaacctagactcacaccttaagacccttgagagggaaggctacgttgaggtcttcaagatcatagccgacaggccgaggactgcggtaaagataaccgataggggagcagaggagacgggaaaatatttgaaggccctaaagaaagccctagaagagatagaaggataaagctacgggtcttcctcgccggggagcttcttcgtcctcgctatctccccgtagaggtaggcgcttcccctcggccttctctcgaaggtctcgaagtccacctctatcagcccgaacctgggctcgaagccctccctccactcgtagttgtccatgagcgaccagtagaagtagcctctgacgtcgaggccatcctctatcgccctgagaacctggcggaggtgctggattataaactcctttctccactcgtcgtcgagcgtcgctattccgttctccgtgacgtagagcggccttccgtattcagaggccctcctgagagccaggtagacgccctcggggtagacgctccagcccatctgcgtcctcctctcgccgatctctgcatccttggcctcgaagaacatcttcagtgggttgaggcttctcctaacggtgctcgcggtgtagtagtttacccctatgaagtcagcatcgctctccgggacggagtaggtcttgaaggcccccctgtactttccgctccatatggcgtcgaggaagtaccagttgaagaggttgtcggccttctgggccgctttctcgtcgcctttcctctccgggagcatcacgcggatgtgcttgactatcccaacctggaactttccgtgaaggagctcgtaggctattgcgtgggccttgagcaggttcgcggcgaccctgaaggacttgaaggggctcttgatgaagggcggccagtaggccgtgaggtagcccatcgtcacgtaaaccagcggctcgttgaaggtagcgacgagtttcacgcctttgaggagctccgcggctttatcaacgtacccctcccagtacttcaggttctcctccttcaggaagccacccttcctcataaaccacaggggcgaggtaaagtggtgcagggtaacgtttggagttatgcccttctcaagcaggagctcaatgatctctctatagcggttgaaggcatcctcgttgaactttccctcctcggggaagagcctgctccactctattgaaaagcggtaggcgttgtagcccaactctgccatcagctctatatcctctctgtaaagctcccagtgattgcaggcctttcctgatttgtaggggagtttacccatctcctcgtagtaccaccagtcgttccacttattgtcaccctcaacctggtgagcggcagttgaagtgccaaacaagaacttctccgggaacatggacagcaccgtacaattaaacgcacgggtggtataaatcgttttcggatgatgaaaaaattttaaaggatcgaaaagaagcaccaccggtgatcaaatgagggaactgaggttcaatcccctaaccgggcagtggataatggtctcagcggagaggaaaaagcgcccctggcgacccaagaacttctgccccttctgtcctggcactgaggagaccggctacggctgggaagttctcctccttccaaatcgcttcccgatgctctccttcgaggcccctaagccggagaaagttgagttctacaaaaaggcgagggccattggccagtgcagcgtaatagtcgagacgccggagcacgggctgaaagacctcgacgagctttccagggaggggatggtaaaggtcgtggagctgtggaaggaagcaaccagaaccctcagagaaaacaggcacatagcctacgtcgccatattcagaaacaagggcgaggagattggagtgagcctccaccacccccacggccagctctacgcactccccttcattccgctcaaggtgaggcttaagatcgagaactcccggaggcactttaagaaacacggcgagtgcctcttctgcaggatccttgaggaggagcggaaaggaggaagggtgatctacgagaacgatagcttcgcggtcttcctcccattcttcgcgagctggccgttcgaactccacgtctatccgaagaggcacgtccagtacctgacccagctcgacgggaaggagagcgaggacctggcagatgcagtaagggcaaccaccgcaacgctcaatgcccttttcgacagggggatgccctacacgatgatgatattccaggcgccgttcaaggggaggtatccattctaccacctccacatcgagttctacccgatccttagggacgcaaacaaggtgaagttcgcggccggaatagagatgggcacctgggagttcacgtacgattcagttccagaggagaacgccgagaggctgaaggaagcctgcggaaagataaaggaagaaaaggggctaattggcaggtgcctttgaaaggagctcttctgccctcttctttaatattgccttcaccgcgtccctgtcctccgggtaggtcttctttatccagagccacgtgagggcgcagggtatccagaagagcgcgcctatgagcagtgtgtactggtaggcgaggggctttgagtaacccatgcccctcagccactctatcatcaggccgccgaggagcgggccggtggcctttccgacgttgtcgaggatgttgaagaggccgaatattgtacccctgtcctccggaaggttgacctgtgaaactatcgccctcacgttgggcccggcgtaggacacgaactggatgaagaggagcgagtagaccgctatgaaggcccagtccttggctgtgagctgggagggaagcgggtagaggattatgcctatcgaggccagcattccaatgaagatagccgccccggtcaggatggctcttcctcctctccaccgtgcctcgaagtagtcgccgaggaaccctcccattaggcttccgaggacgcttgagatgccgatgataaggagcacgaaggtggaggttgtcttgtccattcccctcgttacctggaggaaggagatgagccagtacattatgatgccccacggaaccgttccgatgattccctggaggaagatgagctggtttgtcttcgtctcaaaggacttcttgacagcttcccagcttattctgtacctgtactcgtagcccttctcaaggacttctcgaagctccttttcaccctcgcccctcttgggctcctccgctatgaagtagaagagcggtgcgaggatgaagttgggaacggcggctaggataaagggaagcctccagccggctatcattccggccattatcattccgaggagcgtaccaaagccgaaggccgtctccatgtaggcgtagccccttcccctcttggactcctcgaacatgtcagctatgagggagtagcctatggggattatggagcctattcctattcccgtgaggaagcgcatggccaagagctgccagtagttcgtgacgtaggcagtgaggaagcacgggatttcgcccaggagcacgcctatgacgaggagcttcttcctctgctttatgtccgacagaaatccccagattattgttatcaaagcgctcgttgccacgaatattgacgatacaagccccatcttggcttcgcttattccgaactcctccattatcagctggtagttagggggtaggagattctggtcggccatcaaaaagacggccatcaggacaagcagggctattgagacctttctccttaaatccctcacttcgaacccctccaatcgttgtatatcgcccggaaggcgtcgagcctcctctcagggagaggctcccacccgcgggcgtcgctgttttcagccagaaaagcaaggggttccccaacgaagggggtgagcatgttcaagcgagcgttcccctcatcctccgtccatattctaaggctcttgtcgggcgcccagctcgaagttctgaggtagagcttccttccgctgtgcttcagctccgagggtagggagagctcgacgttgagagctttaaccacctcaagaaggccgtctatgctcatcctcctcccggcgaggtcgcggtagccgatgaactctatgtcagtcccatagagcagtacatcgtccttccccctcagccagttcgctgctttctttgggttcatgagcgggaagcgccctatcccgagcatcaccgcggtgtttatcgccacccacacggggacggcatcgatgtttttgaccgcctcaagtgttacctttccggggaaggccttttccaccgcttttttcagctccctgaggccgaggatgtagttgaggaaaacgttgccctcccccctctgggcctttatgaggtgcgggtagagcggctttatcggcttcacagcggagtttaggtgatccgagagaagcatcgcctctccgtccgcaaagacgtacccgtagccgttgtccttcagtatggcagggattatcgggtcgtaggcgagctccggaagccagaagccctttggagaaacctcgaagagctcctccttgagctccctgtccttccgaacctgggcctctaccctgtcaagcgggaggagagggagtatggcatgggtgtagctcgttccgattatctctatcaggccgcccgctattccctccctaactagctctatgacctccctggggagaatctcaagcgtgtagccggttatgttgagcccaaagggaatctcctccttgaggagcctgccgatgacggggaggtaggccttctctatgaccttcgggatttcactcttcgggatttcagcgtactggaggttgccgtggaagacgagggacatcatagaaccatcaccccttcagagggccttaccacgaagacctctggcgtccatgggaagaccttcgtgtagagctctgccacttcccttccgagggattcgcccttcccgtgctccacgagggctatggccgagccaccaaagcccgcccccgtgagcctggcaccgagggcgccgagttcgagggccttttccacgaagaagtcgagctcctcacagctgacgcggtagttctcggctatgtccctgtgggcctcgaccatgagctgccccatggcctcgacgtccccctctttcagggcgtccctgaaggcaaggacgcgggagttctcgcggacaacgtagccgaggtaccgcctttccttctccgggagctttgaaagctcttcctcagtcacgtacttcgaggagctctttccgagaacccggagggcctcctcgattgccttcttcctttccgcgtaggcagaggaggcgagctccctcttgacccccgtgtagaagacgagaacctcaaggtcctccggaaacggcaggtactcgtagtcaagtgtctccgtgtcgaggaatatggccttcccctccctgccaaaggctatcgcgaactggtcgagtatcccgcaggggacgccaacgaactcgttctcggcttttttggcaaggagggccatatcgagccgggagagcttgagggaataggcctcgttcaggaaagcgagcactgccagctcgaagctcgcggaagagctaaggccggagccgagcgggaggtttcctccgacccttcccttcatgccccccacttcatacccttccctctggagaacccagtagactcccttcacgtagtccgcccagttgtttcccttttccagcttttccagctcaaaggacacgctcttcttgaagtgctccgagtaaagctccaccctctcgtgcggctccccctctatgacggtgtagcggtctatcgccatggggagaacgtagccgtaggagtagtcggtgtgttctccgattagattcacccttccaggggagtacaccctcatttgagccaccatcaatgttcaacttttcacaataataagcttttctgaacagtcatattcataaattcggagtccagaagagagcattaacaaaacgttcgcagttgagcatcgcggggttaaaaatactggctaatccctccccaaaccgaaggggtaccttctcttttctaccacccaccacccgaagagcgctcccagagtatccattaggagatcgcggagcttgttggtgaggctttcatggatgaagcttatctcgctctcgctcagcttttcagccacttcccagccgagggagaggacgtagaagacgatgaaggtgtagaggacaacctgtctcttggagagtttgattccaatcccctcaagttctgataaaatctgagcaacgatcagccagaccgttaggccgccgaggaagtggcttatcatgtcggcgtttctccagtctcgatggaagaggtcgtagtgggtgaagggcacgttcacgagggagacgtggacggctatgaaaatcccgagaaccgccatcgtcctctcgtcgtaaacgggggagaggaagggttttactttttcagggggattcaggagcttcttgggaagaaccagcggaatagagagaccgagaatagctacgatagtgcggtatatgtggtcgctccttccgttgatgacggccgtcagaaagcccaggaagacaacgaagatcgagccctttattatcgccctctccctggttatatacaccaccggcctatttagaacctcagagcttaaaacccttccctcttcctccgcttctccccctcaagctcctccctggccttcctctccagttctctggccctctcaattctgtactcctcgaccaaacggagcagtttttccgcttccctctcgcggtcttcctcttcccatctcttgagaagctcctcaatagctttctcaagcgtctccctctcaacaacggcaaactcatccaccctcttgacgtcaagctcctcgctcgtgaagaacggtaggtgggcctcacggagaacttctttcacaacttcgggcagaggcttttccgttattatggcccttatccccttctcaacgagctcctcagctatcgccttcccagctccagcagggtttatcacgaagagcacatcacccttccttaagccgacttctcgctctatcctatccagctcaccccagctaagaaccctgagaactttaagtggaaccgccgagccgcgaacctctaccacgttcatcctctttacctggactagatccctgctcagcctctcgatgacggccttcgcttccctcagctgtttttcaaggacttcaatgcgcctgaccttcgcctccagctcccgctcgcgcagaacctttcttctcacctcctcgtcgtagtcggctatcttccgctcaagccttcctatcgtcttcctctgctccttgattatctccctcagctcttcgttctccctctcaaggagctcaatccttctctcaagctcacgtatcctcttgagatagggctcggcatcgaagcttttctctgtctcgggctcttccttctcttcttccttttttctctccctcagggttaccctctgcatcgcctccccaaggttgtagccggctattacgagagccttgacctcgtcggacttcttagtcagaccggcttctctcaggcgggcatcaatgtgttccagcttgggctttatcctcaggtaggctttgtatgcagctgccagagcatcccgctggtggtcatcgtcaacggttattcccagatcccttaggagttcgttcttctcctccacgcggaggctctccctagggacgaagagctgggccttgaaggagcgggctatcttttccacgaagcccggagctggagaaacgtccgttgctattataaccgggtgtccaatctcgctgatgaagcggaacacctctccgacgggcatgttcctctcgctgtggagagcaactattctgccgtcgagatctatcgccgctatcccaacggttatcccggggtctatgccaactatgatgctcttcctttcccgtattgcctcctcctttttcagcggagcgaagccgagttcagccctctcgacgggctgaattctgacctcgacatctccacccctcatcggtcttataaggccggcgagctcctccctgctggcgtataccctgaactcgcccctggccagcccgtagtccttctcttcggtctcaaggtcgaatggtatatccgccctcctaagcctgtcctctatctccctcaccttgtccctcacgaggttgtgaacgcgtttcctgtacctatcctgactccagccgcccttcccgtggctcctgccgcgggttaccttcacaatcacctcgtcctcgaaggcgaggacttcatagccgactcctttgctcgctagaagagccgctactttggcctcctcgtaggggtcaaagcggtcgccagtccttatcccgtgctccttggcgaggctctggagggtcctctgctccccaggctttccagtgacctggacgagctttgttcctggtgggagggcgcgcagaaacttccttaaatcatcaccaagttcggtaacactgtcaatggcaacaatatccggccttttagcctgaatgaagcggattaacctgtagagtgtaaactcaccctttctctcaagctttccgttgaaccagctcaccaccgcaaacctttttggattctcgccgacgacgtcaagccctaggattagaatgagtcatcaccttcaccggaaacttcggacgtgaccttaaaagtttagggggtttgaaaatcaaaccgatagggtctttaaggttgaatgcgtagaactatagtggtgaatcccaatgaagctgaggatagtgttcgacaaagaatacgacataatgaatggaacctacaaggtaaaagttcgggagcttgagttcgatgaagaactccaggagatactaaagggtatcacgccgaccgtcagaataggcgaggaagatctcccgatatcagagctaaaaggaagggtctttgagcttccgagcaaggacgcggcagaaagattgatgggggaaataaggggagcactggtagaggccctcagcggaataatagcaaggtttagggaagcccagagcttcaacggctcggtctcctacgagatagacttcaacgagctttaataaccttctcgggtcaaatcctcaaaaaccattttaatcgcgatttctaggccttttctgatggtttcaagcgccatggaaggcctcggcttgtcgagggcctgctcatggctgaagggaacatggatgaaacctgcctttgtcgtcattcctgaaacttctatggtatgaagggcggtgaacatggctgcgttgcatacgtaggttccagcggtgtttgagaccgccgctggaatcttagcttctctgagagctttgacaatggcctttacaggaatcgtcgcaaaatatgccgccggagcgccttcaaagacgggttcgtcctctggcttgtagccctcgttgtctggcatagttgagtccatgacgttgatcgcgaccctctcaactgttatgtttggccttccgcccgcctgtccagttaggatgactgcgtcgggacgttccttgacgatcagtctcggaagaatctccctcacaccgctgaaagtcaccgggagctggaacttgataatatccgcgccctcaatctcattcggaagccccttcacggcctcccaggaggggtttatctcctcaccgccaaacggctcgaagccagtaactaaaaccttcatctgaaccaccagaaaggttaggtttttagggttttaaaaccaccccatccgaggggtgaagatgaagtacgatgtcctcataatcggcggcggtcccgttggaaactacctggcgtctcttctcgcgagggactttaacgttgccgtcgttgagagaaaaacctccttcggcggaaaagcctgcaccggaataataggggccgagaactacgaaagactcggactcccagaaaaggccgttctgaaccagctaaggggagcggtcttttattcgcgaatacagagctttgaaatccagagaaagtccccccaggcctatgtcgttgatagaaagacccttgaaaaagagctggccaaaagcgcggtaaagaagggagccgactacttcatgggaacgaccttccagggcttcaagaacgggaaggccgtactgagccacatgaacgagaggcttgaggtagaggcgtccttctatgtcggtgcagacggggtcgcgagcacggtggcgaagaacattggggcatcgacgaaggcagaattcctgaccggatatgagatcgaggtcgtgggggagtttgaaaggacagatttcactgaagtatgggtgaacaaggagataacgcccaagttcttcgcgtgggtaactcccgtcgaagacgacctggcgagggtgggaacctttggaaccctagacgagctaaacaggttcttaagggttagaatgcttaaacctacttcctccattgagttcaaagctggcagtgtcggtctcggctggagaaagccatggatcagggaaaacgttgcccttattggggacgccgcactccagataaagccgacgaccgccggcggaatcgcctacggaatgctctgcgctcatgccctcagaaaggcactcattgagggcgcacccgagaggtactggaactactgctcatgggtgagaaagcagataagcttcggcctgaagttcaggaagctgttcctcggactcgaccaggaggccattgaaaaaatatttgaagtcctgaagagcgaggaggcgagggaagtcatagagagccaggcggacttcgatgaccactggaggactgcaaaggccatactgagaaagccgagccttctggcgaggcttataaaggtcagcccgtccataatcagggcactgctgtgaggtgagaagatggccagatggaagatgggcctccaggaggagtacctgagggcgatagccgagggaaagaagaaaatcgagggcaggctgtacgacgagaagaggcagaaaatcaagcccggagacgagatagtcttcgagaacaagctcgtatgcgtcgtcaaggacgtcagggtctactcttcattcagggagatgctggagaaagagggccttgagaacgtcctgcctggggtcaagagcattgaggagggcgtgaaggtttaccggaagttctattcagaggagaaggagaagaagtacggcgttgcggcgatagaggtcgagccggttgcgtggataagcgaggagaataatccctaaaacaactttgggggcattgagagggtatgaagcaaaaattagctgctttgattctcctcctctttgtcacttcagctctgttctcaccggttcttggtggcagtgagacacagatgagaaggatatcccatttcttatgaggaataccggacgagaaccctctactcctacccatgggacatcacggaaggcctctcgggatggaatgtcttcagggacaacgagagcttttacttggcatgcctgaaggttatagccctcgcgcggagcggctatccgcggaactcttccgagtttctggagctcgttgagtggataaaatcccggcagaggggagatggttcgtttcccgcggtgataacggacgactaccctgaatctgactcggagtggttctactgggagctttcaaaggccgccggaacggggctcgctattttagcccttctcgaagcgggggagaacccgaactccaaagagatagaggaagccgctcagttcctcctgaagaacgaaagcaagaactactggacgagcacggtgtacctgtactgggagaaaacgggacttcacaaggtaaacgagtcgcccagcatagttgccactgcctacgccgtggcggcgctatcgaggctcggctacaacgtttcccgggaatggaaatggctgagggaaaggctaacacgggagaggctcataaccccgtatctcgacaacttcttcacgggtttcctctttccgatgccgtacagagacatgagggcaccctacgagagcatagttttacccctcctatttctcagagaagagaacatgacgctaccgaacgagacgcttgagttcatagcttcactgttcgaagagacgcagtacgccggaaacgcaactttgaggctgagctttaagagagtcaccaactacactgtgaaagagctggagtacagcataaacggctgtgaagttagagaggaatggaaaggcagtggagagaaagccagcattgacctcaacccaggcccatctaaaaatagcagggtatttctaatcatttctggggagccgcttcttttaaatgagtcgggcttttttaaggggaaccaaaggttgtacccccaccttcccgaggactacattgagttcgtgggagatttttacgctgagagaagcgttcttcagttcgaagacggaagaaactacgcgataatcgaagttccagccctcgatggctcgtggaaccacgacgtttactcaacggcaatggccctgatgtggctgtacctcgctggaaagaaagacaaccacaccgaagaagtgcttcggttcttggagcttgcaagttccaaaaacaccatggcttttgatggcagtgcttacgccctgatatcgctgagcctctacagtggagaatgggagaacgaacaggcgacagttgaaaaggaacagagctcccaacaccagctcccactgaaattgctggcggttttcatccttggacttctgataggagcgctcgtgggcgttaaaattggaatgacaaaaaagaaaagaagttaaaggcctcccagcgcttttcttaggatttccacggcttccttctcaatcaggaacgcctttcttatgtcccagagacgtggaatccgccttgtgggcgactcgaagttccacaggttcgccctgatgtcctccaagttatccgctccccatgcacccaacatcaaagccgtcgcgttgtcattgagttccaatgccaattgtatggtttcgttatcaacccccaagaccgttgcgttctcgtagagctcaaagaactcggtacggtgattgaagaaccaagtggtccacaggcacgacagcttaatccagatatcgtacgtggactgggtgttgacctttatcgttacactcctgacctctgtgctaaaccagttcccaagggaatccctgccccataccctaagggtgtagagtccgttctttaatcccgtcatgttgaagtaccaattagtgcccgaagcgttgttcatagtgaagttctttccatcccactccagtagggcagactctagaggctgactggacgtgacgttaatgaaaacgctgtcggagttcaatacgtcaccatcccctggagtcgggggaacgaaggacagggttatcgtcctgttgacggcaatcgttctaataccactggcgaaccagttccccaaggaatctctgccccaagccctaaacgtataacgaccgtttgtcagattggtcacgtttagataccagctcgtgttcgatagcatttccatggtgagattctggccgttccactccagcttggcaacctgtagaggctgaccagaggtaacgttcactagaacataatcagtgttaaccaccgcaccgtcttccggagtcggaggagcaaaggacagcacgaccgttgaattcacggtgacggttctaacctcagtgctaaaccagtttccaagagaatctctgccccaagctctgaactcatagtggccgtttgttagccccgttatattcaagtaccaattcgtgcttgacgtattgtgcatggtaagattgtgcccgttccattccagtagggcaatctcgagaggccggtctgaggtaacgtttacgaaaacgtagtcggagtttattgaactgttattcttgggagttggcgagacaaaggatagcgaaatcgtcctgtttacagcaatgctcctgactccactgctaaaccagttccccagctgatcctctccccatgctctaaacgtgtagtatccattcgttaagttggtcatctcaatgtaccagttcgtattggatgcactctgcatggtgaggttccgtccgttccattccagcagaacagtttttagaggccgacctgagcttacgtttatcagaactctatcggtgtccacaacagcgccattctcaggagtcggggggacaaaggaaagaacgactgttgaattcactgtgattgtccgtgcttcactgctaaaccagtttccaagagaatcattaccccagaccctaaaggtgtagtggccgtttgaaagacccgttagagccaaataccaactctcactagactctctgtgcattgtgaaattctctccatcccactccactacggcagactcaaggggctggcttgaagtgacgtttatgacgacgctatcaacattcaccactgcaccatcagccggagttggcgggacaaaagacaagaagatcgtcctgttcacggtaacagttctaacctcactggcaacccatttctccgataaatccttgccccagactttgaaagtgtactctccgtttgttaggtcagtgacattaaagtaccagttagtatctgaggctttatccatcgtgatgttctcaccgttccactccagctttgcactctccaaaaggttgttggaggtcacgttgacaaaaacgtagtccgatgttagcacgctaccgttctctggagttggagacgtgaaagataactcagtggggccagcgtagtagtactgggtctcgactacggcgttcgtgtcttgagggataacgttggtaaacttctctgaaacactcgtatcatagggagttggagtataactagatgagatggcgttcgtggcacctactattgcattgctatcacttacatgaaaacccaagttcctaataccctcagaagggaggtacccatcggggagaatgcgaagagcccaaacatcatagttacccgcgccgaagctttcagtaaaacctgctacgataatatctccatttggggccatggcaactacattagccctatctcgaaggttccctccgtaggttttttgccatacaatattcccattcccatcgagcctgagaacccaaacatcagacctgccagcgccaaagctgtaagtgtaacctgctacaataatatccccgctgttagttacggcgaccgcgttggcctcgtcttcgctgtttcccccataagtcttctgccatatgacattaccgttcccatcaagcctgaaaacccaaaaatcaccattagtaccaaaaccccaagtgtatcctgctacaacgatgtccccgttatcaatggcaactgaagtagcctcatctgcagccctactaataccccaggatttctgccactcaaaatcaccgttcccattaagtttgagaacccaaaaatcagaattagtgccagctactataatattcccattcgaatcaatagcaacggcgttgataacggcgtaaaatctgtaagctttttgccatacaatattgccgtttccatcaagctcgagaacccaggtatagcctccatatgtaccagctacgacaatgttcccattttgagttatagcgactgcatcagcctcatcgtcgttgtttcccccgtaggttttctgccatacaatattcccattcccatcaagtctgagaacccaaacatctttatcccctgcctcagtgctgttagtgtatccaacaacaataatatctccggtggtattatctacgacagccgagttagcccaataactatctcgctccccgtaggttttctgccatacaatattcccattcccatcgagcctgagaacccaaacatcagcgtcagagcctctccaatcggttcccccatagtggcccactaagattatatccccgtttggagcgagggcaaccgcgttagcttcatcataaccgcttcctccatagctccgagcccaaggtgttggttctttttgaagtatgcctaacgcttctgcgtagttctcatagaagactggaactgcacccaaacttaccaaaaacaaaagaactagtccaaagcttaccaacttcttcatcacaagacgtcaccttcccgccatattgattaaaagagcttaaatacatttctaggaaccacaaaccagcgcactaagaaccgtagaaaaacaaatcagaaagagaggaaaagaaatcacagatacctctccttcacccagcggacgaagtagtctgggttcagctcctcgccgagggccttctggaggagctccttcggcgggtagatgcttccccagcggtgtatcctctccctgagccaggcctttatcggctcgaactcggcccttgcaaccttctcctcgaagtccgggatgtcgcgcttcatgtggtagtatatctggctcgcgaggagcgtgcctatgctgtaggtcgggaagtagccgatagttccgtgggcccagtggatatcctggaggattccctcggcgtaggtcttcggcctgattccgaggagcctctccatctcctcgttccagagctcaggtaagtctttcgccttaacgccctcgttgagcatcatcctctcgagcttgaagcggaggagtatgtggaagttgtaggtaacgacatccgcttcagtccttatgaagtccggtctgactatgttgaagtagaggtaaacgtcttcgggcgtgtagttcgccatgaacgggaggttctccttaagcaccgggtagattaagccggcgaactcccttgaacggccgattatgttctcccagaagcggctctggctctcatggattccgagggagacaccgccggctatcgggctgaacataaacctctcgtcctgctggagctcgtagagtgcatgcccaaactcgtggacggtgctgagaatggttctcctgaagtcgtagccctcgtatctggtagttatcctcacatcccttattccgaactcggtggtgaaggggtgagcagaaacgtcgagccttgagcggactccaagcgggaagccgaacttctggagtatccagaggtttaccctctccatctgctccctctcatagcgctccttctcgagcgggtgctccctgggcactttgccctcttccatgattttctcaaggagcggcttcagctccttctcaagcttgtcgaacatcttctcgacttccttcgtggtgaggccctcctcgaagaggtcgagcagggcatcgtagggctcgtcctcgtagccgagatagtcagcggccctcttggcaaggtctatgattctgtcaagccacggctcgaacttggagaagtcgtcgctcctcttggcctcttcccaggccttagtggcctggctcgtgacctcgctcatctccctgaggaactcgggcgggaatgacttgcttatccttatcgagcggtcgaggacacgaacaacgccgcgctcgtactcgttaaggccctctatccccttggccttctcgacaagctcgacgaactcgggcttgagcaggaactcctgagagagaacggaaagctccccctgagcgacgctcctctcaagaatgccctcctttggcatgttgacctccatgtcccagccgaggacgctctgagcgtgcccaatggcccatatcctgcggtacttctcaagaatagccttaattgtctcgttctggaaaacggactccatgttaaatcaccgctactttttggattgccaaacttttaatcttttcgatgggcatctgaacgagtgaaggtaaaggaattactattggggctgtttcataaatagttaatagcgtaaagtttaaatgtttttgagtcatattttgttttggtggaggtcactatgaagctttatcggacgggaaaagcctcagaactcttgggaatcagcaagcctacacttctcagaaaaatcaaaacaggcgaaataaaagcctacaaaataggcaaagaataccgcattccagaaagcgaaataaagagacttcttgagggcaaagttcccgataaagttgtcatttacgccagagtctcaagcagagaccagaaagaagaccttgaacgacaagtcgaatacctcaaaaactactgctccgcaaaaggataccaagttgctagaatcctcactgacatttcatcaggcctaaacgaaaaccggaagggtttaaaacagctcttcaaactcgtggaaagcggagaggtaaccaaagtcgtgataacctacaaggacaggctcacccgctttggcttcaaatacctcgaacaatacttcaactctcacggtgtcgagattgaagtaatcttcaatgatgaagagaaaacgccagagaaagaattagttgaagacttgttagctatcgttacctctttcgctggaaagctttacggagctcgttctcacaagaaaaaacgcctcgtcgaggcggtaaagaatgccctcagagacgattaagctcacggcaaaattcaagctcaaaaacccaccagaggagttaaacgacctcttctccacttatcgggagattgtgaaccacctcatcagctatgctttcgagaacaatgttacgagcttttacaggctcaaaaaggaaacatacaaaagcctccgcaaggagtatccagaactaccaagccattaccactacacagcaactcaaatggccacaatgatttacaagagttatcggaagcggaaaaagaagggtaaggctaatggtaggccagtttttaagaaggatgccataatgctcgacgaccatctcttcaagctcgaccttgaggctggagtgataaaactctccactccgagcgggagggttgagctggagttttatccatccaagtatcacgagaagtttagggactggaaaatcggccaagcgtggttggtgaggactccaaaaggcgttttcatcaacgtggtcttttccagagaggttgaagtgagagaacctgaagcctttgtcggcgtggatttgaacgagaacaacgttacgctcagccttccaaacggtgagttcgtccagatactcactcacgagcgggagataaggactggctacttcctaaaacggaggaagattcagaaaaagcttaggactagaaagaaaaggaaagagcttctcgaaaagtatgggcaaagggagaggaacaggctggacgacctttaccacaaattagccaataaaatcgttgagctggcggagagatacagtggtattgctctggaggatttgaccgaaatcagggattcgattaggtattcggctgaggtgaacggtaggcttcatcgttggagttttaggaagcttcaaaacataatcgaatacaaggccaagctgaaggggataaaggttgtttttgttaatcctgcttacacttcgtccctgtgtccggtatgtgggagaaagttaagcccgaatgggcacagggtcttgaagtgtcctaagtgtggttttgaggccgatagggacgttattggctcttggaatatctcccttcgtgccctgaagatgtggggagtttccgttccccccgaaagccccacgatgaagacgggagtggggaaggtcggccgtagcgatgtttacgaactttacacaaattacggctgaccagaacggaaacggtattaaggagaacccctaagggcctccggtggtatcatgctggatctcgtggttatcggtcacgtttcgattgacactcttatattcccggatggaaggcgtgtgacaatgcccggaggggccgccgcgggggtggccacttcggcggcgctcgccggggcaaaagtcggactagtgacgaagatagggacagactttccgaaggagtggctccaagcgctttcctccgtgctggacattagtggagttcaaatactgcctggaaagacgattcacatccaaatgatttaccacgaggacggaagcgtggatgccccagttgagatgggagttgcccagaagatgggcgaaatcccaatcccagaggaataccttgatgccaaagtctttcacatttccccgattccaccggaagagcagctgaagctcctcaaccgactgaagggaaagagagtgaccgttgatttcaacccaacgtacaaggaggagtacatcaagagaagagacctcctgcgggagatagtctctcgggtcgaaatagtcttcccgaacgagagggaggctctcatgatcacgggggcggaggacgtcaaagatgccgccaggattctccacggttggggagccaagctggtcgtgataacccgtggcgagaagggtgttctcgtatacgacggctcgttcagggagttccctgcccttccgataaagcccgaagaaatcgtcgacccaactggcggcggggacgcctttgcaggcggtttcctcgcaggctattcgaggggtcgtccactcgaggagtgcgtaaggctgggtctagaaagggcaagggaagtcctgaaaaaatggggggactggagtatcaccgtctaacaacaagataaaagagcaggtaaagagaaacgacaaagagagccgctaccattgtgtttaccagacttggcagataagccgaaagatagtaagcaacagaatagagcggtagtgccatgattaccgctgcggtaagggttccgtaatgcctcatggaagcaccaacgcgtgtaaggtggagggactcaacaaagattattccaagtgagagaagggtcaacccgtagaaacctcccaacctatgataaaccagggcaatccccagcagggctaggtaagcatagcccatccaccagactaatatggagagactaagagctagagacagcacgagggtaactctgctatcaaatccaagataagttatgtatgttatgatggtaaaaagcgccgcaaggtagagccgtcgtatcatactttaatcacctccgctatcgcggccttcaggggtttcttgacgtcccagtctattatcagtccataggtggagagttcgcgcagtagggcctttctcctgagttcaacgagcctcattgcaacttcttcctcctcggtagatggagtgtaaagactgttcgggttcgggcttatgacaacaactttgtagcccatctctcctaggattctaagcgtctctcggctctcactggtcagtaggggagagaaatagactatctgggccctcagtggaaaggccactctggcaaggtgctcgacctggtacagtatgatatcatttgagcccggtttggcagtactcagaaagtcaacacatttgaagaaatgcctctttccataatccactctgacccagaggggcgtctcctccgcaaggagcagtccaaagcttgtgccatcgttgagagcgttgagcataagagaagcagcagccctaacttgatagtccaaaacaggggcatttgcgcgggaggcatcgactacaaacaccacgtccacttttctctcgctctcaaactcgttggccattatttcaccagttctggccgttgctttccagtttattatcttaagtggatcacctggcctgtactcccttaccgcgtgaaactcaaggccctccccaaggcgtggggatgggagcggtccaatagttatcttggtacccctcgtggagtacggcgttggaatatcgtaaatccgagggactccaacgacttccgtgaaaagctcgactaaaacatcccccgagaagaagccaagggggtccctgtaggagaccctaaccccctcaaagttgtgaactcccctcttcatcctaacgcggtatcttaaaatgccctcctcaccagcactgagacagaaaaccttctccggattacccgaaacaacttcaagttcctctggcaccaagtctcggacaacgagattctcgacatcgaactcaggaacgacgtggagctcgacctcaacttcctcctcttcaagaaacctgtcgtggggcacaacgcgccagattttaacttctccgcggggcttgaaaagaaggtattcaacggagatgagagtaacgtatggaagaacgagatagacaagttcccacctcaaaaggaagaaagcgacgattgggataacccacgccgagataaccaaaagggcaaatttagcagttggagcgacacctttgggtggctcaattttcctctctccagggggtagcgagcctggctgatatggtagctgaggtaacccgcctatactccactggagcatgttcttcccgccctcaatcgaattttggaaccgggaccctctcaaggatctttgccataaccttctcttggctaaccttcgtgtaccacaactccctcttgaggatgagcctgtggctcagggctggaatggccacggccttaacgtcgtcggggattacgtagtccctcccctctatggccgcgtatgccctcgcgagcttgaggagtgcaaggcttcccctcggagaggcccctacctcaacgtccttcttgtcccttctcgtggcctcgacgatatcgacgatgtactctaggactgggtcgctgacgtaaacgtcctcaacggcgcgctgcatctcaaggacttcctcagccgtgacaaccggagaaacgctgacctcgtcgctctttctacctatcctcctccgcaggatctcaagctcctcctccttcgttgggtagccaacgtggagcctcaccagaaacctgtcgagctgggcctctgggagcggataggtgccctcctgctctatcgggttctgagtggcaattacaacgaagggccttgggagtgggtatgtcttcccctcaacggtaacctgcctctcctgcatcgcctcaaggagggcagactgggtcttcggcggagacctgttaacctcgtcggcgaggagtatgttagtgaacaccgggccctttctgaactcgaactcgagggtcttctggttgaagacgctcacaccaatgatgtcgctgggcaacagatcaggagtgaactgaacgcgcttgaagtcgaggccaagggcaccggcaaagctcttcgccatcagggtcttcgccagaccgggcaagtcctctatgagaacgtggccatcggcaaggattgtggccagtatcattttcaggacgttctcctttccaacgatgacctttccgacctcggaaagcacgaggtcagccttctcatgtacttcctcaatcttcatttagttcagcctccaggatttttaacgcctctttaagcccttcataagggtttttagatgagtagaatgcctgaagggcctttggaggatctgtcctcagctcgtagaaggaacggccggtgattgagtggagtatctcaaggatgtactcctccgcaacctcccttccaccgcctttttttgtccgttttaccagctggagagccctctcaaagtcgggccttctgttaacccgaaaagcggaacctgatcccctatcgactaccacatcgtatcctacgatcacaatatcgtagcctatcaacatccaagccacgaaaaccgagagggcaacggcagaaagccacctaacataatacggacctggcaaaacggcacctgcaataaacaccaggcccacagcaatccttagtttgtactgtttagttaactcccgcaagctcataggccttccccctcaaccggaggtatatttcaaacgccctctcagcgtcttcccagccgatcttggcgggggcgtactttgccttctcaaagagtctgacgagctcagaatagaagtttctcatataattaacatgctcagcatgctcccaatgcgtccagctttcctgatatgggatcccaagtgcctcaagccacagcacggcgtttttgtagatctggattatcgcatcccgagggccatcaaactggtcgagcccaagatcatcaagttttctatcaaagctgatcgcggtctccagcttcttcttacgacggacttcctcagaccacgccaccacataatggtaggccaagtatcccaccccaacaaagattggaatcagaaaaagggaatagagcgaaatactcctctgtgaggacacaactctgtgcagtatcatgtcaggagatgccgttggagaagaaacggtactgtttaacaccaagcctttagaggagcgcgcagccaccgccttgccaaagaacaggatcagtagcggaagaaaaatactgtaaagaatcaccgagaatatatctacctcagagacgacgtccttccgcctctttgctgagaatctgtcataacgataataagcgatgagtatgagcagtaagagagcatccacaaagaggacagccaaaattaagcccataaaatcgcccgccctcgagtttcttttggcaggggcgttgatttcactagcattcatcagcaaagaggtcagaagtatcaaaacaattagcagggaaatgaaccttactttagcgttcatgaatgctcacggatgcaggtaccaataaacatataaaagttttacggcatagtaaacctcaggtgagaacatggagaagctgccgaagctttacgttgagaccactcaggaagaatgcgtaaaggacgggaagacgctggccgagtgcgtcgtcattatggggaacgttgaggtctggctgaaagaaaacgaggagcttccagatttcattgacccatcgagagcaaagttcttgaagagggaagtttacgaccgcttttacctctacgttgacaggacggagcaaaagatgactgccgatgtcatactcgtcctcccggacgggagaacaaggatttatctcaagaagggcgacgagctgatgatactgcccgttgaggggttcacgaagaccttaatagccaacgtgggaaacagggttaggactggagatgcattcgcggcagtgactaccaggaaaggcgaagtccactacctaaagcctccgaagacgggtacggtagtcttcattgacgagataacgaacagaccgcactacctctactacatcctgcccgaagagtgagtcctttgctttttctcacttcccaagtatgtttccgaatgcccaaagatttataaaggggagagcctactcccgctgaagacacttttggagttgaaggaaatgaaagttgaagctggtgattatgttctcttccactacgttggaaggttcgaggatggagaagtttttgacacaagctacgaggagatagccagagagaatggcattctcgtcgaggagagggagtacggcccaatgtgggtcaggataggcgtcggtgagatcatccctggcctcgatgaagccataattggcatggaagctggagagaagaagaccgtgaccgttccccccgaaaaggcttacggaatgccgaacccagagctcgtaatctccgttccaagggaagaattcacaaaggccggccttgaaccccaggaaggtctctacgtcatgaccgattctggcatagccaagatagtctccgttggagagagcgaggtatcccttgacttcaaccaccctctagcaggtaagaccctagtctttgaggtagaagtcatagaagtaaaaaaggccgaagaggactcagaagcttagcttgagtatcgtggccactttgaacacaacaagccccattacagttagcataagggaatacttcaagcctgcgctgtacttcccttctcttattatccccattcccagacctgaaaggactgcctggactacaacgaaggccatcaaaatcgttgtcatcgagtccatgggaaacatgattccaagctccggactgctcatcgatgacattacttgagtaactataccgaggataagggggccaacaaaaccgctagttatggtaaaaaacattatttgcatgcccgtcgatgcctttctctcctgctgtatcctcagtatctccctgacatcgttggcaacgtacatgagaacatcactcataggagcacccctctcaagggcctcaatgactatcatcattgagcggtatagcacctgtgatcttttgtttctgagggcaaatgccctcaacgcgtctgccgttgggcgacctttgtttatctcagcaaccgttctcttgaactcctcggtaagtgccccgaactttgcggttgtcagctcctccagagcttcggaaaacgaaatacccgccctcagggagctagcgaggtagaagaaggcatctgggagacttttttctatctcgtcaattcttttggtgaggcgccagtagggataaaggaaggccatcccgatgaaaccggctatgaacgcaatagctccatacagaaaactgaatattgaaaaggctagtccaaggataagtcccattaggagggatataaccaagtactcagcagccaggaagttaatgttagcggagtacaggaacagttcataacgcttaaggtacctgcctggaaggagtctctcgatgagctgaacgagaggccctgaaatattcagctttggcatccgcttcacctcggctcggcactctttatcatgtttattatcatgaaggacatcatcgggaacacgaccacgagcataattgcaatcatcgggacgctgaatatcagctttctcgccattaacgaacccgctagaataccgacaactaacattgtaggcatgactatcgtcatgaacatgtagacgaaggaaataccgttgactttctgaacgtactcgacgagcttcatacggtactcgaatgcaaagtcctctgcaagcttatagaggatctcagcaaggttaccaccgaacttaacggcacggagaatctgcttgaccaccctgctcacgttctctgaggccattttctcctcgaacttcagcattgcctcttcaaaggaagaacctgttctcatgtcccttatgactagttcaaactcctccgaaaggggtccgtagtctgcctttgccaccgagagcatggcctcggcaatgccaacacctgcactcaggagcgaagctatatgtctcaaagcatagggaagcgccttctcaacttctctaacacgcctcttccataccatcttgggatagtatctcatgtagaaaaacccgcctaggaatcccaggaagcccgccaggagtgaaatgtcaattgggaggtacataaggtaagcaaaaacaaaaccgaagaacgcagttatcatggcaactccaagcatgtatgccacgtaggcctcttttgacatcgtgatgtttgcccgatataaatcaacgtccagcccggagagcgaagtcgtcagtctctcaacaggtcctctaaagtatttgaggatggcactagcaagacgctgggcaaagggttgctgaacctcctctttgcgctgctcgatgaccgcctctataaacgtctcccgctcatctttctgctctttttcccgttcaagttccttttgaagctctttaagagcctttaatctttcttggacattttttccctcaggaaggcgcctcataggcttttctgcaacttcgagagttttgccaccgagtttttcaaggaactctatgaaccccatggacatcacctcacattaaagcctgaatctgcttactggtttccacgtcactctccgcagaaatcttgttgaggagccattcctcgtcaatgtagaactgccttatgtagtagccaactttgtctatgtccctgatgcccttctcgaccatccattccagtatcagcctgcgcttttcaatctcaagctctatctccctaacgctcattccggtatgctgggctagaatgttgaccgttctgctcggaacacctgttggaacgagctcatccttagcagggtcgtacttgtaaagggtgttgagctgtatgctctccccctccaggccagagacctccgctatttcagtaacacgccttatcgttcccttctttctgctgtggaaacggacctgcatgaggattatgtcgagagcgggaatcattatccttggaacgctcatcggtgggctttcaagcctaactatggtttcacgggcgctgttggcgtggattgtgcccatgcagttcgacagaagtattccgttggcaacgtagttgtgatcctcatccacggtcaggtcgtatagatactctatgccaatctcctcgggatccacttcctctacttcaacgaccctgtcccagtacacgtcaccatcagctatcaattcgagcctcttggccatcacccaggcatcctcgtccccaatgtcctgggcgattctctgaagggcgagggctattcccttaagcgctgagcgccttatctcggacgttctgcccttctcaacgtgccttatcaggctctctgtgatggtttctcctgcatatttcgaggccagctttgaaagctcggctaccgtcaggttcaaccgagtgcgcagaggctttatcatctccggagagataggaacccggtaagtgtatcttccgcgatacggccgcttttccttgaggatggcctttagcttttcccgtttccttgaatgggaaagtggtatcagcgcgtcgaacttcttcaggtcctcgacactgctgatgataaccctgaatatgtggccttccttaaagcctctgttccttaccctggagacggtgcttattattccaagcctctggagggcgtaccagatttttctggcggcgctttcgctctttgttgtcaaaatcaccgcgggtccggtctcatcaacggatccatctgcatcgaacagacccgctatgaagtacctcatgaggtcatcgttcgtgaggacgacatcagggacatcccatattgatgacttcttgcctctcgggatcccgaatatcctcgacagcatctcattgaatatcctggagccgtaggttaccaccgtactcgttccattgtcctttatccgcggtgccgactctggcaggaactccgacatcgccgaggtgaaagaattcatgtagtcgggatcatcgaaggttaccgaaaggttgtatccgtccgatgagagatatccgtcgcccagtattactcctgcaacgtaagcaaggctggttccaacttcacgaacgagtttaactggctttgaattcctggatagtagatactcggcgtcttctggcggcacacccctgttggggaccttcttcattccgtttccgtttggaacaaggtagtaatcacttattccagcatatacttcgacgggaactacagccgggctctggggagctttggggggtctcatcatcacggcaactctatcacctggcctgaccttctccgcttcctttctaaccacgtcgccgtcgctgaagacaaagaacggatgtgttttcgtcaggataacctcgttgcccgttctcgtccttatccttatcagcttctctccattccgtacttttctgcgccatactgccgtgacggtgtgttttcctgccttcagattcggccctacgctaaccacctcaaactggtcttcaggatcgagctctatgtactccagatccttgtacgtctttatcctgtcagagtacttgttgaatagttcctcaacaacatcacctatcagaacaaactttccattggagagctgtatgacagagaaatcgtagagggcaccattatgtcccgtgttcattgccgtgaacatcgttctggcctctggaccacggacctcacccacgatgattctgtcgggacgcatacggagggtgttcctaacgaggtcgtccatggtgacttctcccttgccctcaaggttgggcggcctcgtctccagcctgacccagtgctccacagggagttgaagctccgctgtatcctctatgctgatgacgcgctcgctggggggaatgaacattccaagggagttgagggttgttgtttttcccgaacctgtaccaccggctacgaggacgttggccggcttaaccccaagcccgtcaacgagaacccataggaaagccgcaacttcggagctcattgtgccgtatttgatcaagtctataatcgtcagcggatccctcttgaacttacggattgttatcgttggcccatccaggcttattggtggtatagtcgcgttcacacggcttccatccgggagacgggcatccaaaaggggactctgctggtctattctcctcccgacttccctcgctatgcgctcgattatgttgagtatatccctgtcactgtcaaagatgacgttggtcttacacatattgaagcgcctgtgccagacatagacagggcggttagttccgatgaccattatctcctcgaggttgtcgtccctgacgagggggtcaagctttccatagcctatcatctgctggactatcatatcggcgagaacctcgattctgccctccgaataatggggagcctcctcttttatcatcctcttaaccgcgttcataaagaccttcctgcgctcctcaggatcaggaatcgcagtggggtctatctggatctcagttatggccctgtccttaatgcgcctgaagagctgttcctcctcccttgaaagtttaggaagtctaatctcgtatatgggaaccggctctcccttaaccttcagtattctcacgttgccgtaggcgtcaaggacttgagccctgccagcgtaagaagactcttccctcaatgactctgagaaaatcgacctggcgttggacacaggcttgctcggtgaagtttgaactggctgtgatgtggccgatccagaggaaccaccaaggagctccgagaggaaatcagctccagtggccccagtggcggacggtattgtggatgctggttctggcttgctctggggtagcggctctcttttttctctctctgcagttttttctttcattgacttctgaggtttctcctctcccccaagtagctgactcagaaggtcggctccagtctcagaggtaggccgggattcccgtttttctgaagtggaccctgaaagtatatcctccaaactgcccactccagaagagggaactggaagctcttcggagaccttatttttgctgggctgttcttttttgtcatcttttttcagaataccagctagtggatcctcctcaccagaaagtatctcgtctatccatgagagggattctttcttctttttctcatcctggaacaagacttatccccctccctcactccattttacatcatagcttatttcaacactgccacccgtcgagtaaacaatccagattggaagttcatagttctcacgggtcttggcctcaaccgttggaacactaacttgaactccagttaagagcttgggagtaagctggaacaaattcgtggacgcgttcacaacttgagttgattcacccacctttctctggaagccgctgtactcgtagagcatgtccttgtactcatcgtacgtcatcgtcggattgggattcaggttgctaatctccccatcggagaacaagacgggaacagtcacggcgaagaacgtcggtgagttatcggcgggagtcataactaacttgattctgccctcataatccagtattttaatgtacccatcaaggacaggggaagattgctctcgcagagagagagtaaggagagttcacaaagggaggcaccactgaaccgcatgccaggttgctcccatctccctctccaccacaggatacctgcgggagagaatacgtctgagtatgaacgctcacaaggtttatgacaaccgtttcgtagggcattaaccatattccagggttgccgttcagctgaagctttgggtttgaaaccagctctggggtggtctcgttgttattcaagcggtagactgtaacaacgtaagaggggttcaaaactaagaacttcggaaacggggctgtgttaacaacggtcacgtttaagttgagggttaaaacgctactaacgctactcgcggctcccacaggagagtaatacgaagaagccattatcatgctgaaaattattaaaaaaaccaaagggcgtctcatttcagaccacctcaggtgattacctttgcaatggtaatagcgttctcgttctcgaggatatccggcacaaagatcgaggggaccttcacgataaccattatcttggtggtttcgggcatcgactggaggcctgtgttcttttcaaggttcaaaagctcccaaccgtagttctggagctgggccttcacctcatcactggcctgtatctttccggccgctattgcctttaggatttccgcgaggttgacgctgtaggagtaactagctgaggaactctgactgccagactggctgttggaataggaatcgctagcactgctgctgtcagagattgaggcccctcccggggattcggatgtggagtggctctcgctgtaggaagttgaggatgaagtcgacgtcgagctggactgactctgggactcactcacggatattgatccaccctcgccgactggaagcagtaaaagttcaaggtatccatcaacaacggtagtgttctcgccctttaagtagagcttaactctgtcaccaggatcgaacaatgccccattcatatctttcctctgaaggacgagcgaaatctcgacccattcaacgggggatactttgtatccaatcaaatcctggtagttgtctaccatagagattagggcctttgcctgatcctttgaaataagggacttctcaccgttccgctcaagaatgacatcctgcccgggtatcttatcaagttcgagaagataatacttcttccagagggagagcaggtaactgtcgggttttattgactcgacctgttcaatcgtcgtggcgctctgcacctgctcctcaaggctcttcatagtggctactgcctttgtcctgagggtatcggggaggccgagagagagcaagggctggaaagcaacctctatctcttggatcttctgctgctttgtctggttaagctgcttctcatactcacgctgttttatctcctggatacactgctcataggcagtaacggcctgatcaaaataagttctcacatctatactgttcagctcctcaagactgttagcggaggttattttagaaagtgcaaggcccttatactggaatgccttttgactgcagttcgagttcgagaaattgtacgaggcgaaatagcggtttagctcgctaattttttcagcacgggtgttttcaagtttcgactctctagagctttggatataggaataaacgccaacggatatcagcaggataattattatcagtattgaagcaccgattagaatcctcttcctgcgctccttctgacgaatgctgctcagggacctaggtctgcgagacggttttttggatggagacgttttaggaggagcagccggtgacggagcctcactctcggttgtcattcttcccagttccctcagacgacgaatttttgcttcaatatcctcggccatattcagcaccacccacaaggaattgatgcaatgatcataaccccccagaatagcttttagttctaagtccttatttacatttcggtggtggagatggaaaagctagaaattaaggtcgtggaaatccgaggaaaatgtcccgttttcaagctcggggacagaatagtcatagaagggccaaggataaaccttgaagagaccgacgcagtatgcactcacgcctttgcctccctgctaccttacatagtcgccctccgaaagggtattaagcccaatgagataggtctcggcaggggagagaaggcttacgtgcagtgcctcgacccgggtccgccgtacacagacggaggaaccgtgatctttgagataacggtggtgcgagatgaaggcgagaaaggcatggagagtcgtgagagaggtagttgatgaggccgacatagtcgttgaggtagttgacgcccgcgaccccattgggacgaggaacaggaagcttgagaggctgatccttgaagaggggaaacctctgctcatcgtcatgaacaaggccgatttggtcccgaaggagtgggccgaggagtacaagaggaagagcgaggttccagtcgtcttcataagcgcgagggagaggaagggaactggaatactcaggaaggagatcaaaaagctggcaaagccgctcctggacgagaaggagaaagttaaggtggcgctcataggctaccccaacgtcggcaagagcacgataatcaacaccctcaagggcaagagggcagttgggactgcgccgatcccaggctataccaagggaaaacagctgataaggctgagcaagaagatatggctcctagacagcccaggggtcatcccgatagacgacttcgacgagctcgtgataaggggaggctttcctgctgataagatagaggagccagttaaaccagccgtaaagctcatcggaagaatcctggaaacgagaaaagaggccataaccgagaagttcggaatcacggagtttgaaagcgaggaggacattctcaggaagatcggcgagaggaggggcctcataaaggcgggtggcgaggtcgacatcgaagagacggcgaggtggttcctccgcgagtggcagaccggaaggttcacactcttcgggagcgaggaagaggggaagagagacttcatctgggacttcgaggacgtgcttaatggggtcgagaaagacctcctgctcgacccgaggaggatactctggaagtacggagatgagctgagggagaagctcgacggccagaagagggctggagtaagggagatagaaggaataacggttggaatagcgaccggatttaagaagtgcgactctgccgttaagttcctcgaagagctgaccggaaagcatgccctagcaagcgaatgctttggaaagaaatggaaaggggttgtggctgttctcgattaggccctcaaggccttaacaacatccagcttccccattactctcctgacaaccaggaccgtgaacagggcgtaggcagcatatagaacaggcaggagcgggagaatctggagggcatcgccgagtgagacgttcactggtaggattatgttacctatgtagtagcccagcctcaccgccggtggaatggcgaggagcgagccaatcaccgcagaggtgacaacttttgtcaggaactctcgctccacgtgcgaatccggaattcccacagccttgagcgtggcataaaccttctcgttgccctcgatctcaaggtagatcagcgtgaagatggcaaagacgctgaggaggaatgtaacgagcatgagggcgtaaacgggtgttttgaaaagtatgaggttctgctcgatatttcttcttagatcatcgagcgtgtaaaccttgaacccctgggattcgagttcttccttgacctcttctgggttttctgccttcataaagctcatcctcggctcgacaaagccctccatcgggaggaagagggcgcggtagttgtagaagaaagcatcgctgatcccgaccacgcggtaggttctctcaacgccgaggaggttcaccctgacggtgtcgccgacgttgaggtggagcttcctcgcgaggccaacctcgatgaccgcctcgtcctgccctttgaaccatctcccctcgatgagggttttttcaaacatgctcgtccggttgaagaagtagatttccgtcgtgattccgttgacgctctgaccgctcagatagccgaccttctcgccggggagcttcgccatcttctctggagtgccgatgacccagacgttgaagggcgcgttgaggctggcgagcttctccacgcctgccagggcaaagtaggcagagctcgacgccagaaaggcgacgaagaagacagccaggaacttgaggagggatgatctcttggggacaaagcgcagggcttctatggttctaatccgcgagacgtagaggtagggcagggaaaccatcaggactatcgccatggttattagaacgtcgaacttgaagggataggcatagttcggcctcagcgggatggagacgccgaagaggcttgaacggcttcctaagaggattccgggaacaattccgatggcatagccaaggagagcgacgattaagtaatcgccggcgaagagcgtgaagatgaaggaatccggaaggccgagggccttgagggttccaacctccctcgtgctgccccttaggtgtgccaccgtcacgagaacctcgatgaggagtgcagtcccaaggaggaggtagaagaagctcatgacgaagttcttcacgttccccagctcgtccatgtagggtgtatggccattctcatagaccatgaagtagcgaaccctcgcgtggctcatcagaaattcggccagggccttcgtgtcgttgcatctcataaacgcgtagaggttctcgcccttctccatcgtcagaactatcggcttacccatcaggtagtagtaggagccgagaaccgtgtaggttttcccgttgacctcgattttatcgccccgcctggcttcagggaaggccaggacgtaagcaccatcgggcgtgcttttagcattgggaacgtcaaagcgcccgtagccgattaaggcggtgtaatacttcccgttcagcttcacctttccctcgtcgaagtagaggtagttcacgacctcaccgaagcgcgtgaggttctcgacgccaaccccctggacgacgaactcgacgttgccgatgtgcgagaattcatccaccgtccccatgaaggccccgattccaccgagggtgaagttgatgcccaagctgaggaagacgaagattatgaaaaccactaccgcctttttcttctcgcgcttaagctttgcgaccgccgtctttgatggcattgacctcaccgtccttgagggttatgatgacgtccgcgaactcaaagaactcccgctcgtgggtcgaggctatgacggttattccttcctcacggttcaccctcttcaaaagtttccacaccctcactttgttctcccagtcgaggttggccgtcggttcgtcggcgaagagatacttcggtctgtttgccagggccctcgctattgctatcctctgcatctcgccgccgctcatgtgctctggcagtttgtcggagaggtgctcagcgttcaccagctttaggagctttttcgccctctctttggggttctcaacctttttggagtatttcatcggcaggagaacgttttcaaggcccgttaagtagggaactaggtagaagaactggaagactatcccgaagttgtcgaggcggaacttcctgagctctttctctttgagagagtggatgttgacaccatcaacgatgacttctccagaggttggtctgtctatcccgctcaggatgttgaggagagtcgtctttccgctcccggaggcacccgctatgatgtaaaacctcccatcctcaaaggtcaggttgatccccttcagggccgtgacgttgccgaactcgtagtgtttggtgaggctgcgaacctcgatcatcctcatcacccaattacagcctccatcacatcgcaaacatgactaccttgaagaatatctccatttaaccttttatgctgcctgttttgtataggcgctagtacgttattctagttctattagatagtaaaatttaaccgtgatcaccactaaaatgtggggcagtaactaagtagctaaccgacatcaaagaaaacaagggcgagaccagcactcaaaaagcccattgcaaggcccggagccaccacccaccaccagtatccaccgtagagggccccctggctcatcgcttcaatcatgaaagagccccagttcgtacctggaatcaggccaaagaatccaaagactgaaatcaacgccacgactttggctagaagcattgttgagtacctcagggagaactctccaacagggggaagtatgtgtttccttaaaacccaaagcgcacccgcccccatgctcactgcggctttaacgtactcgttcgccttctcctttatcacgatgagtctgatagtcttagcaagctttccaaaggtcagaagggcgactaaaaacatgaaaagcaggggatctatctcaacctttcgaccgtaaccctgggtggagaaaagccagacaaggactacgaggattgggagcatgggtaatgccatcagaacctctaagatgaacgtcgcaagttcccccaatattccaccaacgtagcctgagaccatacccacaagaactcccagaaccactattattgccgtcgtaaagaacgcgagatagagagtgttgttcatgcccttgacgaatccaacccacatgtccctgccgtaagagtctgtaccaagaaggccgtagcaggttccaagaatttcgactgatggattggctttttcggacaggcgaacctcaaagatgtactcaccttttaaaggttccaagctgctatcacgggaaaacaggagcttggcagaggagacaagaacgtactcgctcacgctaaggttgaaagcctttgaaagagatgagacaacgccggcgcgcatgttgatgttgaggctcatgttactggagatggctggacccctgtaaaggagcacccgaacgccatctggcctcaaaacgcttatttctattttctcccctttaggaaggccgtaaaacctcacgtcgttaggcttgtccttgtaagtgtgcttgtaggaaaacctgtagatccaagaaccgttctcctcaaccggcgacggtttcagaaagaccgtaggagtccttccaccgaagatcgagaaccaggaggggtaggccttacgcgggttgtccctccagtaattagcgttctcccagttgtcgatatctctctgatcaacactcaaatttgaggctatcacgaagagagcgaacacgaccagtatcgccaccccagcttttcgcaccatttcagctcacccttggatccaacattcccttaacgagctccaggagaaacgaaaagacgaaggatataatgaatatcgcaagggtgacaacgaagaagaggcggtagtcaaacctaacaaccacgccgaatgccggaacaactgtcctgacaaaactcgccttaaagattatcccaaggcccccgaggttgaataggacgtccacgacgatgtaatccgtgaacatctcaacgaacttctgaacggtgaacgagctaaggactatggagacgttcttaagaacgtgcctccagtatatcacccactcagagatacctttggccctcgcagttaggacgtagggcttcccaagctcgtcccttacgttatgagcaacaacaaccacaaactcccaaatgtacacaaaaactagcgtggcaacgggaagggcaaggtgccagagaacgtcgagcacgccctcaaagccacccttcggggggatactcttaaggcctgagattggaaacgcgtcaagcttgacggcaaagactgctatcaacactgctccaatccaccatgatggaaggccagtgaagaaacgcgcaagaccctcggcaacaccaagaaaacgactgtttgccagcttgaatccaaggagaacactcagaaaaaccgtcaacagcactgagagtcccatgaccatgagggttacttttattgaatggttaaaatcgtacttggtatcaccccggcgataataatcaatgctctttctgaggaggtccatacccatcacaaaaatgttatcgtccctcacttccgccgctttagtgagtatatgataatagtactcctcaacggtgagcccctccctggtcgcgttttgctccagctcttggtacagggcgggattattcatccgaattcccatgagagcatcgtgagcgtaatcccatgtcagcttattggacgttgctcccgctatcaagattattatgagaagtacgcaaaggtaaattacagccagtcgcgcgagggttctgactggaagcttcattaaacatccccttttctcagtaacaggttcacatcctgaaagctgatgtcagggtgtcttttcaagaactcattaacaccttcttcaactccaagttttctaatgtactcaagcaatttataactctcggcatctagtcggatgagatgaagagtttttggcgagaacagaatgtactcatctaataccttgtcaagatacaatgaactcaggaattcatcctcgctcatatcatcttcaccacgttatgaatttatggcgttgttagtttataataattacgttgattaaaattaacaattcgacaaatgaacttattagcgacggataaaatgtcacgacatacattgaagaatatcattatgacatttaacaactaagttataccaaggcgcacaaaggactaggtcaaacaaaagcttaaaagaaagacagagaacgcgcgagtatgagactcttactcacaacctcccagggaatcgaggacatagctggaagagaagtcgcctcgctgatggagaggcttggagttccgtttcgagtggaagagaagcccttaggcgttgagggaagacttctcctcgaagcaggcgaggcttactacaccgatgagaagggcaggaagagggagctgagcatagcaacctacctcaacgagaactcaaggctcctccatagggttattctggagatagcgagcgaaaggttcgagggaattggtgaagacgaaccagaaactgccctcaagcgtatagaggagttcgtctcctcccttccggttgagcgcttcgtgaaggtaagtgagagctttgcggtcagacccttcaggaagggcgagcacaggataacgagcgttgaaatagcgaaaacggttggcgaggccatcttcgagaggctctcgcgctttggaagtccaaaggtgaacctcgaccacccgacggtgatattcagggcggagcttgttggtgaggtgttcttcctcgggattgacaccacaggcgacagctcgctccacaagagaccctggcgcgtctacgaccatcccgcgcacctcaaggctagcatagccaacgcgctcatagagctggctgaaccgaacggcgggtcgttcatagatcccttctgcgggagcggcacgatattgatcgagcttgccctcaggggttataaaggaagaataataggccttgagaagtacagaaaacacataaggggcgccgaaatgaacgctttatcggccggcgttcttgataagattgagttcatccagggcgacgccacaaagctctcccagtatgtcgagagcgttgatttcgccgtgagcaaccttccctacggcctgaagatagggcggaagagcatgataccaaggctttatatggccttcttcagcgagctctccaaagtcctcgaaaagcgtggggtcttcataacgacggagaagaaggcgatagaaagggcgatattagataacgggttcaagatcaaacatcatcgacttattggacacggcggactgatggtgcacacatatgttgtggaatagagaataagtgtctatatagatttaccaccaaagtatattttattgcggcaatctttatatttcttaaccctcttctaaccatcggtgaaaccaatgaagaaagccatctcggtgtttatcgtcctgctgctggggctttccctggtggcaagcggctgcatatctagtgaaaagagccctagcacaagcccgtccagcacggcacgggcttcaagccagggcacttcccagaccaaggtaataaccatccgcaccacaggtgcaaccttcccccagtaccagatacagaagtggattgagatatacatgaagagccaccccaacgtcaagatcgagtacgaaggtggaggaagcggacacgggcaggaggcgttcctcaagggcctcacccacataggcaggacagatccacccgttaaggagtcaacctggaagaagttcctcgcaactggcgaccagcccctccagttccccgaaatcgttggtgcggttgtcgttgccttcaacgttccaggcgttgacgagctgaagctcgacggggagaccctcgccaagatattcatgggtgagatagagtactgggacgacgatgccatcaaggccttcaaccccagcgcgaacctcccgcacgaaaagataatagtcgtccacaggagtgattcaagcggaactactgcaatcttcaccacctacctgagtctcgtcaacaaggagtgggcagataaggttggagcgggaaagaccgttgactggcccgttgacaaggttggaaggggcattggtggaaagggcaaccctggagtcgtccaggcccttaagaacaccaagtacagcatagcctacaccgagctctccttcgccatagaggagaacctcaaggttgtggcactcaaaaacaaagccggaaacttcgttaagcccactgacgatgcgataaaagccgccgtcgccggtgttaaagctttcataccaagcccaaccgagggctacaaggaggacctcaaccagctcctcaacgccccgggagagaactcctacccgatagttgccttcacccacctcctcgtatggcagaacaagggtggaaagcactacagcaaggaagaggtccaggccatcaaggagttccttaggtgggtcttaacagagggacagaagccagagaaccttgcccccggctacgtcggtcttccaccagaggtcgccaagataggcctccaggcagttgacatgatagagggctgatttcttttctcttccttttgggtgagaacgatgaagctcggtgtcaactcctacatcgtcaaggaaatcagcggaaagggcttttccttagacgaacttcaagtggactttgttgagcttggatttgacgattctggcatcatcaagaacgaagagataaactgggaagcgctcaaaaaccttaagggcattggggtggagtttacacttcacgcgcctaccgccgatggaaagaacctcccgatagacctcggagtctatgggaaagaaccggtaaagagaatggggaaggtaataaggattgccaaccatctcggcacagaggtcattgtcgttcacggaggcgacatcgggaagagttacacgaaggcctacgtgaacaccctgaggcacttaaggaagcttaaaccaatagctgaagaccacggagtaaagctcgttgttgaaaatctctttgagggacgaatcggggcacttcctcacgagctccttcccttcgttagcgagggctttgaactgtgctttgacatcgggcacgctttcctgacttccatgaattccggactcaagatggacgagtttaacgtgctcttcccttatgcgacccaccttcacatccacgacaacaacggctccagagacgagcacaggccgcttggcgagggtatgatcggtttttcttacgcaagtagagttgttgagcttacaaaagccgaaagggcagtcctggagataaggaggtacagtgggaagggttcaatcatctcaaacgtgagtttcttccgcaacatgccggacgaaaacttctccaagattgaaaaggcagaagggggtagtgaggcttgaggaaagttgagtcttttaagatcgccacgtatcctgccgttatcatcgtcttcctgctgttcgcggggatgctcttcgtttacttcaccaacgcgctcccagcgctccacaggtacggcctcgacctctacctgaagaacgtctggagagcggctgaagagccaagcgaagaggtctatgggatagcggccgctatatggggaagcgtctacacctctctcatagccatacttatagccctgccactatcggtggcctactcggtcttcgtcgttgactacgcaccgaagaggctgaagaacgcctttataatcctctcagatgtaatggcgggcctgccaacgataatctacggtatatggggagcgtttttcctcgttccgttcctgagggattggattatgaagcccctttacgatcacctctccttcattccactcttttcctatccgccggttggtggctacagctacctctcggctggagttctcctggcgataatggtcactcccttcgcctccgctataataagagaagcctacaacatggtgcccttcacgtacagggaggccatctactccctcggggcaacaagatacgaggcaaccaaactcctcctcggctacataaagccggcgatagtttcgggaacgatcctcgccttcggaagggccgtaggcgagacggtcgccgtttccctcgttatagggaacacgttcaacctgacaacggccctcttcgcaccgggatacacagtctcgtccctcatagccaaccagttcggcaacgccttcatatacgaatacatgacctcgacgcttttcgcggcagggctaatcctcttcgtaatcggtctggccgtgaatgtagtcggcctcaagatgctcaagaggtgggagagaaatgtcagcatttgaccgaaaaacaaaggagaaggcctttttcataggagtcggcgcactcacaatcctgatattcataccgctgttccacatcatagctactgtcctgatcaagggctttccagtgatagctgagaggggcacgaagttcctcacggggacgctcagcgagggaggaataggtccggccatcgctggaaccttcatcctcacgttcctctctgctctcctcggccttccagttgctttcctcgtcggagtttacgcctacgagtaccctaagagcaccctcggtcagtggaccaaaacactgctccagataatgatagagttcccgacgatactggtcggggtcttcgtgatgcaggtcgtggccgttccgatggggacttactccgccctggctggggccttagcgctggcgataattctcactccctatgtagccgtttacacccacgaggccctcagagagataccatcaacgtacagggaggcgggcttttccctcgggctcacaagggcgaaggtcgtcttcagaatcctcgcgccgatggcgaagcgcggcattttgaccggcgtcctcataggaatggccaaagttaccggagaaactgcgccgctcctcttcacggcaggaggactttacgagagctacccaacttcaataaccaaacccgtcggtgccgttccgctcctcatctaccagctagtccagagcccgaatccagccgaccatgcaacagcgtggggagcctcactggttcttctcctcatcttcctcgggatattcatcccgatacgccttagtctgaaggaggtgagactgtgaacttcgcgatagagactgttaacctcaacgtttactacggccagaaccacgtgataaaggatgttgacctcaaaatcccaaacaagggtgtctttgcactcatggggccgagcggctgtgggaagagcacgatgctgaggactttcaacaggctgatagagctgaacgaagatgccagagttgagggtgaggtaaggctcttcggagagaacatctattcggaggacgttgacccgatagaggtcaggaagaaggtggggatggtgttccagtacccgaaccccttcccccacctgaccatatatgacaacgttgccataggcctcaagctgaacggactcgtcaagtcaagggaagagctcgacgaaagggttgaatgggccctgaagaaggctgccctatgggacgaggttaaggacaggctgaacgattatcctgggaacctctctggaggacagaggcagaggctcgttatagcgagggctctcgcaatgaagccggaagtccttctgatggacgagcccacagccaacatagaccctgtcggaactgccaagatagaggagctcctcctggagcttaaggaggactacacgatagttctcgttacccattctccagcccaggcggcgagagttgctgattacgttgccttcctctacctcggtgagctgatagaggttgggccagcaaggaaggtcttcgagaacccggagcatgaattaaccgagaagtacgttacgggggcgcttggatgaaaaggaaagccctagagaaggcccgaaatcttttgagggcagagggggatggagtcataaatggcatgagaaccctgactaccgaggtccaaagaaacgagtacggaagaatggaagatctcctttgggaagtaaccaatacgagcgaagagttgaataacgttttgatagagatccttcttaggtatcagcccttggcaagcgaacttcgcttcgtaaggtcagccttcaatgcaaactacgacttatacagaatgatgagacacctctcgtgcattgaggttctgcttaatctccatggatcagaggagcagagggatctcgtaatggaggcaatggaaatctttctcccatgggtcaccagaggagttgaggctctagtttcaaaaagggaaattccagtggaagagctccctttcattgagttcgagtttaacgaactctgggactcttatgttaggacggagaccccctacgttatgggaaccttagtacacctggagggtttcttcaaccatacgaagaacctgcttcgctcggcggtttattatctcttaggctccaaagggcttgaaaagacgcccatactatatatcgtatgaggtgataccatgagaaagctccttgatattggtgaggaacagctcaaaaagctgataaacgagatgggaaacgatgccctcaactccctggagaacgccaggaaaagcctcaaaggagagttcaactcaacagaggagatatcgagcaagctccaccttctcaggaacgaggttctcgatatagcgaccgagctcctcgtgaggtactcgccggttgccagcgacctgcgcttcatccagagctcgatagatgtctcctacgacctctacaggatttcgcgctacgccatggagatagagagaactgcgaagatagtaggggcagaggagagcgaactcatcagggagggctttgagctaactgttgaggccgttaaaactgcaatagaagcctttgagaacctcgatgaagtctcggcaggaaagctccttgagatagataacagaatagacgacctctacatccagtcgctggagaacctgaaaagctcggcctcttctccggttgaggccctcataatgcgccacctggagaggataagcgaccacgcgaaggaaatcggggcgcgggtcgtttacgtgaaggaagggaagagggtgtaaagccagtttgcaaagggaagatcttccacgcaatttggtaattttccgtaaacttttttaagttgtatttcacatattttctggggggtggcttatggggaaggccagcactgtgattttaaccctgatcctcatccttgcagtaggcctcggcattaactacgcggtcaaccactatgggagcttcaactacgagtggaagaggggcttcacgaactacaacacctacaaccttgccgggaactcggttctcaacggctacatcaaggcagacggagatgtcagcgtttacatcctcaccaaggagaacttcaaaaagatgaagaacggcgagcccttcagctactacaaggcctgggagcacgttcggagcgtcgagttcgatggcattaagatacccgatggagactacatcctcgtcgtcaagaacgaaggggaaggaatgaggtggatttcagcgaagatcgtaaacaaaaaggaatagtcagcacagaatcgagtcctcagctaaaacgtcgaactctaccttccctatcccttctatccacgcctcgatgtgatcgccgtgcctgagcgggccgacaccggcaggcgttcctgtcgctattatatcgccgggctcgagcgtcatcaccgagcttatgtactctatcagctccggaactttaaagaccatctggctcgtccttccgagctgcctaagctcgccgttcaccttgaggccgatttcgaggtcttcaacctttaactcgcgcctgtcaacgaccctcggcccaacgggggcgaaggtgtcgaagcccttcgctatcgtccacggaagacccttcttcctcgcctctgcctggaggtcgcgggcggttatgtcgagcattatagtgtagcccatgacgtagtctattgctttttcagccggaacgcgctttgcgcgcttcccgattatcaccgccagctcgacctcgtggtcaaccctcttgctcattctgggaaggattatcgggtctcctgggccaataagggcgctcggtggcttgaggaagaatatcggcttctccgggacgtcgctctccatttcctttgcgtgctccgcgtagtttttggccaaggccactatcttgctcggcctgagttcgtagtaggtatctcgaaaggggaggcggatcattttgcaacaccagtgacaattcccaacaagctaataaaaatagcacgccagaaatgaaaaagaaggagaaggttaatccactttaatccagatgtcactaagacggaattctctgttcacgttcacaatgacttcttcggggtcaatgacgatcttaactggtttgtccggtagttcaaggcttactgtggcggtgccattcacccagactctttcgtcaacgtactcgccgttttccatgtagatcctgaccggaaccggcattttgaagtcgttggcatcgtttatcgtgaatgtgaggttgtaagtatcccctgcttgcgtaattttgagaacggtgacgttgtagtccggcacctctgttgtgttgaaccactcgttgaagaaccagcttaggtcgtctccatagactttctcagagattctaataaagtctctgtagtcacagtaggaaccgtgacattcttcaagaactgtgtggaagatttgcctaaacttttgatcacccaccaagaagcgcagggagcgcagtatgtaggggcctttgaagtagcggatgtaccatgcctctcgtgagtaaagacgtgggtcgctgaaattgtcgtattttccggttatggtttcgatgtaagtgaaattcttaattgacacaacttgcttctcaacttcatccatatagtagtcgtagaaataatcctgaggcactgagcgggaataagcttcaagcatgagaaactgggtcggggtttccacaaagaggccaaagccagcataatgtccaaaccactcatggcctaattcgtggaagaggttaagctgatagttattcaatgttgtgaggaggtcattgtcgtatgggagaacgagcgtgccaaagtagttaatgcccctagcggtgtagccataggtttcctgggaaaacctccagaataacgggtggaaaatgataaagaatctgtcagtcggtctctctatgcccgtcaggttgccgtacacggagagagccaggctcaagttcgacttaagagcctcaatgccttcacttgatatcgcccacgagggcagataaacagtgaagttcatgcccctgagtgtgaaatcaaccctgtcaaggtcgggtacttggactatgacggtggagatgctacgatgctgtatccgggaatcaggggagtagacaacagtgctaccattttcgacagttccatagcaagctatgacgtacagagtctcctcgggaagctttggagtcacaacgatacggtaactatcgggattcgacgccaagtcccagaacgagaagtcagtaccaatcgttatgttctccttaagagagtagaacagcttccagttcttcttgtacctaacctcgtatgttgcaacgccttgcagttttgtaaggttcgttgaaacgtttaccgcgtagaactcaatgcctgagccattgttaatctcatacctgtacctgtcgagcttagagaggttcagtggtaccccttcaattgttatgttattgatgtcaacgaacccatctggagcaaagtacctggcaatgtagagagtcttagacgtgaaattgaatatcgtgaactcgtacctgcccctgaaagttccatcccgatactcaacgcttatgtttccatgaacatagtaagggacctttaagaaatggttctcccagaaatcgtatgctacagtacgattcatctccctgatttgaggtgtttctgggtactcaaactcaagaggggccgatttatgatcctcattcgaggttgaagttaaactcgcttccgtattactcgtaactgattctggggaagacgctgatggttgtactgaactagctgtttgatcgctcctattcaaacacccactgacgacaactaaaaccgcaactaagagaacgacgactggcttcttccacaactcagatccctccgaaggaatccttgttctaacttttacaagtcagaaaataaaaatgttttgggaatatgaaaaacaccgaagaggaataatttgggtaacttcaatttttaagttctcagcggttcaggaatcgccttgtcccactgctcctgagcaagctcgccggtgtacttgaacttctcgaccttcttttctgcctccttcctcttcttctggtgctccttgaggaacttctggacgcgctcgatcagctcgcgcttgcactggccgcaggtcagctcgccagctttacaggcgcggtagcgctccatgagcttctcgtcgtcgggttcaaagaagatctcaaaccacttgaagacgacgcacttctccgggttcccgcccttctcgcgctgctccttgagcgttggttggccgccggtgagggcgaacttccatatcttctttccggcctcctcggggtcgtccgtgaggtaaacggcagtttcgggcttgctcgcgctcatcttgccctccaagctggtcaaacctggcacgaactttgagtgtattgcagcagtcttgtagtagccaaggctttcggcgaagtccctctggagcctccaataaggatcttgatctattgccgccggaatgagacagcgcttcttctcgaagaaggttggagcggcctgtattgctggatagaatatcattccaatcttgctctgctcgttgaagccaaaaacagccctcgccatcgagaagtttatcttcttcgctatcgggagggccatctcgtaaatcttggtaaactcactgttctggaagatgaatgtcttgtccgggtcaaagcctaccgctatgatatccagaatgttctcgtaagcccacctcttggtgtcctcaaagctcagcttctccttgaagaggaacttctcgtcgtcggttatctggatgtagaggttgacgtcgaagttctcctggagccacttggtagcgaagaacgggattatgtggccgatgtgcatcgggccgctcggacccctcccagtgtagaggaagaagccccttccactctcataatccgctaaaaccttgtcgtagtccctgtgggagaagaagaacctcctcctgaagaacagaggcagctcgctcttcgtgagctctgcggtcttctctatcagctcgtccgtcagcgggctggttccgaactgctctatcagcttgttgtagtccacgacaccctcaacgtcccatggggtaaccttaaagtcgtccattcaaacacctccgcttccagtggaaaccaaactccagactaaggcggtgcagaagagggattcctcaccaaagccaaaaacgaccaccgagcatggaagaagaaatggcggagagattttaaagtttttgggtgcgaaagtgtttttaggaaaagggaacacatccaattggtgggagtatggaggtagttgaggctatttatgaaaacggcgtcctcaagctcaagaaaaagctcaacttacccgacggtaccgaggtcagcgttaagctcattcccaagaaaatatccgagaagacctttggaatcgtgaagcttgagaaagaggaagctgacaagctgatccaggacttatgacttactgaaaaagcttttttacctgttgcttctatccgtcatcatgaaaaccgaaaccgaaggcactctcctcgctttcctcgtcctcctggctctgggccttgagccggccgtcataaaggccaatccctccaatccaatcagcttcatagccctgtccgtcttcttcgcggcccttatcctgtggacggttcttttgacaactggcaggttcaaggaaatcctggaaaaacccgccgagcttaagaggacgttcctgactggcctcttcgccaccgccatagcttactccctctactccctcggaaccagcatgagcaccgccgtgaactccgccataatcacacgacttgaggtgttctattccctcgcgatcggctggctcctcctcagggagagagtgagcgggagagcattagccgcttccctccttctctttggcggggtcttcctcgtcctcacgcagggaaaggggataacaccgaggaaaggtgacctcctgctcctcataacgccgctcttctggcagctggggcatgccgttgccaagttcacagactactcaccgctgacaatagcgacactcaggaacaccttcggctttctcctcctgcttccgttcgccctcatgagcggaatccagctcacgggccttgccgttgccgaaggagtcataatagccgcaacccaggccctctggtacgcttcaatctcgaggataaacctctcgaaggctaccgcaatactcactccggccccggcagtcacgatagccgtggccatagccttccttggggagaaggtgggggtttaccatctgctcggcttccttcttgtgacaatcggaacgctcctgatagcctttgaagaaagcgggacgaggtagtcaggttgatgtttcgaagtcccccaggtcccagaccagccaacaatcttctctaagcccctcttttccctcgacgcttttagcaatcagtccatagtgcttttcccaaccctcgagacttacaagttccaccttcctctccaagtccttcaaaatccccctcacttccctctcgctcaaatccttccacttgacctcaacgaacagagccttcttctcacgctcgttcaaggccactaggtcaatttcctcacccttacgccaccactttccaatcttggtgaacctaaatggaagcctccccgctttgttcatctccctgaggaagtccgcgctgaccttttcaaagacgaagccgagatagcggttgtattcctcttcaaagttctcgatgtagccaaagtcgaggagctgtgagcggttggggtagatgaagcggaaccagaagttgaagtagaggtcgctcaggtagtagcgcgcgttcctcttccgctctggctcgcctacaggatgcctctcctctactatgtggagagtctgcaggttgctgaggtactttgagacggttgagcctggaagcccggtgaagctcactatctccccgaacttcgtctttccgaaggctatggccttgagtatcgcgaagtacctggcgggttctctcagctcgctcctgaggaggaactccgcctcgtcgaagagcggcttgttgggctggaagacttcctcaaggctttccccagcattcagccggaactggacttccctgaggtaggccggaatcccgtcggttatcccgtatatcctcacgagctcctcccagcttttctctgggaagaaatccctcaggtggagaaagctcaggggcttaagcattatggacagcgtcctcctcccgtagagggggcttttgtagccgaggacgtggctctccatcacgctgatggcagagcccgtcaggacgagcttgagccccttggccgagtcccatatcttctggaactttgaaaccagccccctgttggccttcaaaaggttcgggaactcatctattatcacgacaactccagaaccgtcgaggagttcgaaaagctcctcccacgagagctcggccttctcaaccagagggttcccaagggcctttgcgactaagctcttgaacgtcctgaggttttcgctctcgagggtctcctccgcgaagaagtagatgtggggaatatcttccaccgacttcttaacgagtgcagtctttccaacccttctcctaccgtaaacgattatcagctctttccggttactctcataggctcccctgagggctttcagctcttcagccctattaacaaattgttcactcatgattatcataatttagtgtgaactatttaagcctttacatgattcgaaaaagacaagctaaatgctcaagcttaaatttccccgttagaattggggagaggtgatgccatgaaggtcatcatcctcggctccggctcatacagtggaactcccaagcccctctgcacctgcgagaactgttcaagggcgaggataaacccagcgttgaggagaacgcgcttttcactctatattgagggtggaatcctagttgaccccagcccggatctgcactaccaccttgagcggctgaacaggaaagttgagaaggtattcataacccacgcccacttcgaccacatagcgggctttccggagcttcaggtcttcaagaggatagacgtctactcccacaggcaggcgattgatatggccaagcacctatcggccatcttcctcgggggagccgctccagaaaacagggactggggctatcacgagctcgaattcgggaaatggtatgagattgacgggatgaaagtccatcacttcagaacgacccaccgctcgattgagaacgccggcggcttcctctttgaaatcaaaggaaaaagaatagccgtaaccggggacacagggccggagatactaaaggataagaaaacgcttaagctcctagaaggcgctgaccttcttatagcagagatgacccacagggagtcaatccccggaactcacctcggggtggaagatgccataaagctggcagagataacgggcgcttcctacgccgtcttcgcccacataagccacagcaactatacacacgaggttcttgagaagagagtgagggagagcggaataaaaggagaggtcgcgagggacttcacatggattgaactataaacaagaattacaaaaacttttatatattccatgctttatactatttttggtggtatagatgttggatactgacataatggttgcaaaaattgggtggtcattcaacaactggagaggatttgaccaggagatgttcaagaacaggcttctttacgactttgagtacattaggaatacagggttcggacatgagctgtggaacttctacgagggattcagcaaaaacaactactttggccacattgagggtaatccagccaactttacttcgggtattgtgctttttgtctcaaaattcattgatcctcgggacccaaggcccagggggagttcattgtacttagttggattgtatggaaacgcaatatacgaacccaatggcttcaaaaccggtacgaggatcgttgatcttctgcccgactatgcggttgaacacatcgaaaatcttgtccaaatgagatcgtggaagggaaaagacccagaccgccacttggaataccttgaaaggctattggacggtgaggaatacacggctaggcttgttgccagcaagaagtactccaccgcgttcatcccaagatacaatggatatgttgaaatagacaaaaccgatataggagttgaagaggttaaacagtggaagttcacgtacaggatccctctagaaaacgcactcaggctacttgatatagcaatattccgacatgaacgcatagcaagaaatgaagttgaggaatctgtaccaggagaactcagaaaacaagcaatagaaatagccacaaggattaaaagagtcaaaaagattttagagcgcttgggctaaaagctcaaagcctcccgttctccctcagccactctccgtattttacgagagcatagacggcgtcaacgccgtcctcaaccgtctcgtagactggaatgcccttcagctcgatgttccttgccatcttgtgcgggtagtctccacccggagcaacgaagactatcggcttgccatagaccttcatcctctccatggcatcaacgattccttcatcgagtgccgggctctggaagagggctatgacgacgaggacgtcaacgttcggatcttcgagggcgtagcgcatggcgatctcatagcggctcgatggagcatctcctatgacgtctatcgggttcttgtagctcatatgcgccggaagctttccttcctcgatgtccttcttaaagcgctcgttggtttcttcgctaagctcggcgagcttcatgcccctctcaagcaggccgtcgctcatcatgactccagcgccgccgccgttggtgacgatggccacgcggtcgccctttgccgggctctgcattgccaaggccttggcgtagttgaagagctgtctcatgctcttggcctctaaaactccagtctgctcgaaagccgcctggtatatcttgtaagagcctgccagagagccagtatgggaagcggcagcctttgctccagcttcagttcttccgctcttgaggacaacgacgggcttcttgagggtgacctctttggcggtgttgaagaacttcctgccgtccttgacgccctcgatgtagccggttatgacgccggtctttggatcgtcgccgaggtaggccatgaagtcgctctcgtccagatctgccatgttgccgaggctgatgaacttgctcataccaatcttgtggctcgcggcccagtcgaggatcgccgcgccgaaggcaccgctctggctcatgaaggcgacctttccgaagggcggcctggcctgcctttcgggcgggttgaagttgcagtcgaagccgttctcaaggttggtaactcccagacagttcgggccgactacccttataccccacttcctggcccttctaacgagctcctcctcaagatcggcccttccagcctctttgaagccagctgagatgacaactgctgccttaacgcccttctctccgcactcgtcaatgacatcgggcacgaactttgcggggactgctatgacggcgacatcaacctcatcgggaatctccttaacgctcctgtagaccttaaacttcttgccgtttacttcaatctccccgcccttaacgttgacggggtaaacctttccatcgaagcggagggttatcgagcgcattatggcgtttccaacctttccgggcacgtttgaggcacctatgactgcgacgctcttgggataaaacaggaagtccaggttcggggtctccactgaaatcacctccgaagctttttcgggcatgagtttttaagggttcctggatatggattttatatccattggtggtcaggctttacatatataaacctgacggtgatgaagtttcggaagagaacaaaagagttaaatgcccgaacgttaaaagagacgttagaacgtttaaattgggtggtcgaaatggcaaaggtaaaggtgatcactgacccagaggtcataaagctgatgctcgaagacacaaggaggaagatactccaactcttgagaaacagggagatgacgatctctcagctgagcgaaatcctcggaaagacgcctcagacaatctatcaccacattgagaagctcaaggaggctggactggtagaggtcaagcggacggagatgaagggaaacctcgtggagaagtactacggaagaacagctgacgcattctatataaacctctacctcggcgacgaggagctccgctattttgcccgctcaaggctcaagacgaagctcgagatattcaaagcccttggctacgagttcaacgatgaggagcttctcaacgtcatggacgaactcctcaagaaggagcatgactacaagacggagatttcaaaggagattgaagtaaacgaggaaaaactaaaggacttctcaaacgaggacataatccacgcaatagagtggcttgccatggccaagatgggtagagacgaagaggttttgaacctcctcagaaagctgggcgagatactcaaaaaggaggaataatggatggcgagggggataaggcttctcgtactggacgtgctcaagccgcaccagccgatggtcactgacctcgcgcttggtctgagcgagcttgagggggttgacggcgtcaacataacccttgtcgagatagacaaggagactgagaacgtaaagataaccataatgggcgacaaccttgactacgaggagatcgtcagaacaatcgaggagttcggcggcgtcgtccacagcatagatatggtggcggccggaaagaggataatcgaagaagaggaaactccgcaggacaaactggaggagtactgagggcctgctatgagggaagttttgataatcacaaaccccaaaaccgtaaaggtgctctccgacccaactagattccagatactcaaactgctcagagagaggccaatgagcgtcaatgagctgagcgacctcctgggaaaggacagaacaactgtttacagacacataaaggcgctagaagctgaaggtctcgtggaggagatagacacggagggaaacgagagaatatacgcaagaacggctaggatgttcctgataaaggcagaacccgatgagagcatcgaggagttcagacagtcctacctgcaggtcgaggctgaaagaatagttatgatactcgaaaagagtggcttccagataaaggacagggaagccctcaaggcccttataaaggaagtcctcaatacaatcgaactccgctctcagccagtcataaagagaatttcagatgccaacattgaactgacggagatagagctgttccacctcctcaacatgctcgtcttcttccagagctgcgagctctgcgatcacgcgaaaagagttaaagacctcatctcgttctgatgcatccattcttgttaatttctattttggactttcaagttgttggcaactccaacgtaacataaagacacaaaaccaatattgagcattgtgcatagtaatgttctccaatgttcttaaatggcaaaacttaaatatttcaccagcagtgatacatagagacaccgctgaacacagaggtggttccatgaagaagtttgtcgccctgctcataaccatgtttttcgtagtgagcatggctgccgttgcacagccagctagcgccgcaaagtattccgaactcgaagaaggcggcgttataatgcaggccttctactgggacgttccagcgggaggaatctggtgggatacaatcagaagcaagataccggagtggtacgaggctggaatctccgccatctggattccgccagccagcaagggcatgggaggagcttattcaatgggctacgacccatacgacttcttcgacctcggcgagtacaaccagaagggaacagttgaaactcgctttggctcaaagcaggagcttatcaacatgataaacaccgcccatgcctacggcataaaggtcatagctgatatcgtcataaaccaccgcgcgggcggagacctcgagtggaacccgttcgttggggactacacctggacggacttctcgaaggtggcctcgggcaaatataccgccaactacctcgacttccaccccaacgaggtcaagtgctgtgacgagggcacatttggaggtttcccagacatagcccacgagaaggagtgggaccagcactggctctgggcgagcgacgagagctacgccgcctacctcaggagcatcggcgttgatgcctggcgtttcgactacgtaaagggctacggagcgtgggtcgtcaaggactggctcaactggtggggcggctgggccgtcggtgagtactgggacacgaacgttgatgcactcctcaattgggcatactcgagcggcgccaaggtcttcgacttcccgctctactacaaaatggacgaggcctttgacaacaccaacatcccggccttggttgatgccctccagaacgggggaaccgtcgtctctcgcgacccgttcaaggccgtaacctttgtagcaaaccacgacaccgatataatctggaacaagtaccctgcttatgctttcatcctcacctacgagggccagcccgtcatattctaccgcgactacgaggagtggctcaacaaggacaagcttaacaacctaatctggatacacgaccacctcgcgggtggaagcacgagcatagtctactacgacagcgacgagctgatcttcgtgaggaacggcgactccaagaggccgggactgataacgtacatcaacctcggctctagcaaggtcggaaggtgggtgtacgtgccgaagttcgcgggcgcgtgcatccacgagtacaccggcaacctcggaggctgggtagacaagtacgtcgagtcgagcggctgggtctatctcgaagctccagcttacgaccccgccagcgggcagtacggctacaccgtctggagctactgcggggttggatgatagccccccttttcattccttttggatttcatagacctcatccgttagataatttcctgtaactctctcgaccggaatctcaaccgtcccatttcctgtttcaattcttaccagcacatcgtagagcctccccctcacttcgacggtctcgttcacgcaggtggtctcattcgctgtcctgaacttgaagattagtattgcattcctctctaggctgtaacctatgtaaatggcattgagacagccggtcaaggttatgcgtctcgttaaggcatcatcaagagttttgtagcagttctctctcctgaaaacaaaagtgtcattctggctctccgccctgcagaagagcgttgagccgtcctgtatctcggcgatgacgtagtcgggggcaacgtcaaagacttcctcaagttcccaaacgttctttcccgctggtgactctttaaagcgaaaaacggcaacgtgggtgacggcgtttggatagcccttgagcaacccggctccgttaaactctaccggtctttgaaactccgcgtggaacctggctggatacttctcggatgagtccaggagaaatgtaaaaaccacaaccgaggtgagaactaaaaagagaaagaggccaacgactcgcttcatgagaccacctcaaaactccagcacccactttactgcctgcggcaccttttcggcaacgtccaaagccgtgaagttctctcccatctcttccttcaccatatcgccagcgaggccgtttaggaaggccccagcagaggcggctctcagcggagagtttccaagcgcaaggagtgctcctactagaccagccaaaacgtctccagtcccgccggtcgtcatgcccctgttgccggtcttgttgtacttccagccttttccgtcgcttatgatgtcataggctcccttgagcaggaccgttcccccaacgccctttgctttctccaccacgagcttcgccttctcttcaaggcttccttcaggcttctcaccaaacagtatcctgaactcaccggcgtggggtgtcagaacgaagttcttgcccttgagaacgtccaaatcctcggcgacggccttcagggcgtcggcgtctataactacaggcttctcgcaccagcggagaaactcaacgacgaactcctttgtctcggccctctgtccaattcccggcccgataacgactgcatcaaccccatcagctattgccagaacgtcctcaacgtcttccttcctgaagtttctcctctcaaagggacgcaggattacgttggggtcgtttattctcctcgccgaatactcgggcatcgcaaggtagaccagatcaacgaggtatgaagccgctttcgccgcgagataaggcgctccgaagtagtcctcgcttcctcctatgacaagtagcttcccgttctgccccttgtgctcgcccttcttcctcagcgcgaacttggcatcgcccgggcccactaggtggtaaagctccttcgggtagcctattttcactataacgcgctcaaaacccccgtattcttccttgtcccactggaaagtgacggcaaaatcacacttaacgcggatatcgctcggataaccgctcggaaggtcaacgctcactatcttggcttttccggagtactcgtttatcttctcgatggcgctccgtatcggctcccttggttctcctttcgttcctgctcccaaaagtgcatccactatgacatcgaactcagagagatcgagagacttgatgtaagacgagtcctttagaattctaatcttaacgaagtcgagctttttgagaatctcccagttgtgctttgcctcctcgcttctaatcttcgcctcgtcgccaacgaggaagagggtaacatcgttctcgaagctgaggtgtctcgtcgcgacgaagccgtcgcccccgttgtttccagttccagaaaagaccgctaccttaagccccttcccgaagcgctcctcaattgttctcgcgacaccagcgccggcgttctccatgagctgaaccggtgaaatcccaagccacttagcgtttatgtcccagatataaacgtcttcgattctcatgcgcaccaccagtacaatttcggagggaaataataaaagggcatcgcaagagttttatactcacaggcgtaataacctcgggagcacccatgatcgttgaggccatcttcggcttcctgttcatgctcggctgggcgctttcctatgcctacgttgcaagggtcaaaagcacgcccagggccatccttggagtttccctgctctatggggtgatgttgctcttctccaagctccgctttgagagctacaaacacggaggcagcctactcgggtggctgatgggcatcgcttcgggcttctttgtcggcctgtggctcgttcaaaaacacgggccagacaagatgacagaggagagcgcggtggcgatgctcctcgtcggccccgtgattcttgtgggccttttaatcgccgtgatgttgctgttttagcatcgccgcgcttttcttccctgatgctaagggcacgagcgccaggagaagcagggcgccgatgccacataccttttcttgatccggctggccgagggtttctctacactccggaagttcttgaatacccgtactcaaatcgaggcgcctcagattcttcccatcgtaaaagaacacgagcggaagctccgaaaggaaaccgcttttctcaactctaatctcgtcaggataataaattagaatccctttatcaaagggcagtgcatatagagcagataaagccctggagagctctttgtcttcaaaaaagtctgagaaatacctttcaaactcggaaacggggattctgcagttcaagttctcaaaagttacgaagccgtcattaatttttcccctgatgccctccagacttccagtattcccagcgaagaagtagtccagtactggactttccgtacagtccgactccaccgtgccgttctgaagctccactctcgtgcagttccagaccatctcggcgcatccatcaaatcggtaaaccctcgtctcaatcctcctggcggcaatcgtgaagttacgggcttcaccgttgacgatcagcgtaacgttcccgtggggaacagttttctcccttcgctgcaggatatagaaagtcccgttgattttcgtcactatcgatggctcaccgagtaaagggttgcttttccccaaaaagagcaggtcgcttccgttgaagaggtagtagaggtcgtactccccatcgggcatgttgcggcgaagggatttctccccggcgatttccccgcatatccactcggaatgatggataacgataaacgcatagccacctccaggcagcacggatgttattgagtaggcctcgtaggggatgcatctcccgcctgagactaatgaggagaacagcaacagaggcaaaatcaaaaacatgatttgcttaagaatcctgcacatagttctccccccgtacaatcaaccaaaacctcttaaaaatcattcggttttgccttcatagtatcgttacccaaaccagacgaaaagacacatatcaagaacaccggcaaataccacaggagcgcccatccaaaaaatggtgcatacccataaatccggccacttaccgggagctccaccaccgcagatgggaactcaaagacgatcgcaagtgccagataaacctttgttagagcccctatccatggcttctccgagaaaataaggacagtaagctcaaccatatccattacgacgatgtaaaccactagcgcccatgaagggattctcgtgaaaatccagaagttgtacataaccgtgagaaaaagaggatagccgaaggcaaataccctcaggaagagcctgagaaggaagagaagcctgacgtattctttcacagcgttcacctcaaacaccacaggactaccagaggcatttcacccacgtacgtttccggacccgccctcaaacagctctcagagccctctcgtaatccttttccgagtacagcacaagatagactctctcaacgctccctgcttctctctcgaactcatcaatgacctccttgaatgtcttcacgacttcctcaagcggacagccgtagatgccagcgcttaccgccgggaaggctatcgttttgactccaagctcctcggccttcctcagcgccccgaggatggccttcctcagcttctccttcttgtcctcgtcccagattccgccgcagtaagggccaactgtgtggatgacgtagcggatgccgtgtttctccagcctcatcgccggcgttacaacaacttccccatgctcgatgtggtcctttccaagctgctcgcgcatggcttccttgcttatcctgatgtattccctcggatcgccagccgctgctttcgcaatggcgtaggcaacaccgccgccgtgctcgaggtacctattggccgcgttgactatcgcctcggccggaaagcgggttatgtctcctttaacgatctcaaactctaccacgaccaccaccagagaaaataggaaagaagaggatttaacgctaactcaggcgagcttttctgagactttctcggcctcgctgataaccttctcctcgtcgagggtcagaacttccccgtcaagcatcaggatttttccgtcaactatcgttgtctccacgtcgtttccgttggccgaataaacgagatggcttatcacgtcgttgatgggcctgaggtgcggcctgttgaagttgattatggcgatatcagccagatagccctctttgattattccagcgttgagtctcagtgcctttgccccgttttgcgtggccatcctgaagaccgtcctggcgtccgctatggtgggatcgaggttgtgaaccttgtggagcagggccgcgagcttcatctcctcaagcatgtcgaggttgttgttgctcgcacttccatctgtgccaaggccgatgttgacgccagcgtttaggagcttttcgaggggcatgacaccgctcgcgagcttcatgttgcttccggggttgtgggcaactgtaacgccgtgcctcgccaatatttgaatgtccctgctgtccagccagacgccgtgggctattatgacgtcgtttccaaggaagccgatgtcgtcgaggaggacgacggggctttttccgtagcgctcggttatctggcctatttccgccatcgtctcgctcacgtggatggttatgagcttgttgtgctcgctggcgagttttctgacctccttcaggagggctatcgaacaggtgtaaggcgcgtgaggcccgaagacgaagtggactctctcggagtttagtttctctatcgcctccatctcgcggagggcctccttcagctccttctcagtcctgtctggatcgccgaggtctatcatgccgtaggaaaggtatccccttaagccagcatcgaggacggcctctgccaccttgtccatgtggaagtacatgtccaggaaggtcgtagttccgctccggatcatctccagagcgcccagataggcaccgactttgacgtattcgggagtgagcttagcttctctcggccagatgtggttctggagccactccatcagcggtaggtcgtcggcgagccccctgaggaggcccatcggcgagtgggtgtgcaggtttatgaagccaggagaaactaccctccctgtggcatctatgacggtatctgcggcctcgtttatgtttctctcgacgcttacaatcctgttgctctcgatgaggacgtccgccctcacaacgtcgaggttctcgccgtatatgacgtggccgttcttgatgagaatgctcatggggaccaccttttaaccctttgaaaagttctgtttctgatggaagttaaaaagatgttggattcaaagaaacaggaaaacgaaaacaatgatttcccgcatccatcataaaggtcattcaaccttcgttgtacaatactttgaacctccaaaagatttatatgaaacaaaccaaattcacaattaactcccggtgagagttatggtggacgatctgccatctaaagatctacactaccttataactagggtcataaatccgattctaaactcaataatcgccacattgcacagtggccccattgtacactacaaggatggaacactagacgtcacggagtacccaatccccaagttaatggccaagtttttggcggactggagagatgagctgtggtacaggtactctagaaaaaatcttggcgacgtttcagaggacatcctccacgagtacatagagacgataaactacgtataccgccgcctccacagtgtagacgagaaaaccgctaaacaagtcggaagggatctgatactcctgggacagaagatcgaggagtacctcaccggaaaagttgaggtgttctcagatttcgtgtttgaggtcgaaaaaatcagaaaagggcagcccacaaaagccgtgagagaacccgccgatagaaatcatcaaggaagggtggaaacagcagatgttcgtgagaagaaggagattaatcgctcttctgggaaaaaagccaaagatttcggcgtctgtccaagatgtgcagcttacgacggcgataggagcgaaaagaagctttatcagtgccctcactgtggcgagtggttctgtgaaaagcacgttaaaccggccctcgtgttgacgttcgacagatatcaagaactctggagaaagcatcctgagttgagagcgtttctagaagaggaatggcaccgtgaagatggccacccgtgctacccatacacaaagaaattctgggaagggtacgagaacaaaagggagagcctgtacggtgccaggagaacgtctactagaaccgaaaagaggttcattccccagagggagcctgttagagttccatcgagttctggaacatggaaacccaaagagcgcacccgctacgaggacgtgataataaacgtcaaaaacagatttaaagatcggggcagcatttatgtgactccccgagagatccgcatagaaacttccagaatcaaaaaagtacttcctcgttcaccttcaatcagatttgagatcagggacggaaagaggtgggtcatcatcccagagagcgtctactcaatggcatacacgccggagaggaaacatgaggggagaaaacacggcaaatacgctctcatcggaatcgctctcctgatactactcctggccggctatctgtattccaggggaagtttcgataaccttggggtacccttcctcgggaattcgagcggttcctcccaaggagccagcacccacacaccagaatactcaggtactcaaacaattgacaaaaccaatactgcaccgatctactctacgagcactccaacgcatacatcagaacaagcaccactaataacccctgaatcaccttgttcgaatagctactggcgatatattttccaagacgcccttaaatgtgctctgactgaagaagaactctcaaaaatttccaatctcgccagccagttgaaaggagagagtctccaggaaagcgcctggaatactctggagtggctccctagaacatagtctagactgaagaagaactctcaaaaatttccaatctcgccagccagttgaaaggagagagtctccaggaaagcgcctggaatactctggagtggctccacgagaacatagagtacaactattccaaagcctccctcccagcgccggttatctggacttccaacggaagaataagcagagtcgatgcagcgccgggcgttgaaatccaaaccccatacgagaccatccggaggggagcgggcgtctgcagggattatgccatcttaacagctgcgctcctgctcgaaatgaactactctcctgtttacgtattcagcattgagttcgagaactcgccgataggacacgcggccgtggcgataaagatcaacggggagtactttattcttgatcagcatccacccgttatggatctggggacgtactacaccgacttggcagtctacaggcaagaaacccttggcgagaggctattcatttcaaacgctactgtctatgagataagcagggataaaaacggcgcgatagttagagaaatcggaatcctatcagctgaagactttaagcaaaaggatcacgtgttcagccctacagacttgatcagaatatccacagatctaaggaagatccttgaggacagatatccccatttaatttccgacaaaaacattgccaacctcgaagaaaaaagttatttacccccaggatactcagacggaaggatttggagattaaacttcccccactacgcggactactacaaccccgtctttcatgagcaattcgtggaatacatgcttatggctcttacgaacgatgagaacgtcaagagcgacttgaagaaattcaacaggttttggatcaaagttgaacatgaaggggactcgctaaaagtaacgctaaacttagccaaaaaataatgcaaaatcagaatgaacaagcccccatcaattgagtcaaccaaaaacaagaaaaacctgctaaagaatcaccccaattactatcgagttaacgttagttctcgtaggaccagtcactaccagggccttagcctttttcaaagcctcgtaggcgttgtggcttctcaggtactcctcaaggtctattccctcgtttctgaggacttccgcagtatggctgtccacaagtcctccggcggcatccgttgggccgtccgttccgtcggtgtccatcgccagaacagcaactcccctaaggcccgaaatctttctcgctatgctcaaagcgaactcctggttcggcccgccgaggcccgcttttccttctatagtcaccgtggtttccccaccggctatcagaacacagggcctcttaaagggcctgttcctgtggtagatttcctcaatgactgaaccaaaagccaatgcaacttctctggcttccccttcaagcgtggttgtgaggatgtgggcttcgagaccgagctccttagcttttctctgggccgcttcacagaccaggacgttgctcgctatgaggaagttgtggacgtttgggaggtcttcctttagagtctcctccgcttttccctccaggccgagctctatgtaatgcctaacgctctcggggagcttttcccataggccgtagagcttgagtatccggtaagaggctatttcctctacggagtgtgcgctgttgatgcatccggagaggactactgggataactaccaacgacaaaattattgcccacttcaacttcattacttctcacttctcagtttaaccaactttcaaaagcagagagaccatgtagagtgctccaacgaacgctataaagtctaaaacaaagtctctaattttgatctctctttgttttaatataaacaccctctcaacttcagtagcgatagaagcaaagagcgccgcaagcacaattgctagccatccaagagtttgatagtatgcgagagcaaatgcccatggaaggttaatcaaaaagaaaaatatataacggagagtgcgacttccagtacgagtggccacatctcttcaccccttgcaagctccaatagcagtacatattgcggcagcaccagccccacatgcaactcgtatatttgtcagagtgttaaataatgaaaattcaaaccataaaaatcacacaaacatcgtcttcagcacatcggcacagccgcagtgcctctcctctgggatcttcgggatgcccttcttgaggagctcctgaaccttgtagttgttctcggccatgaccttgaggacctcctgggcatctactggcttgtcagcccagacgtcgtagtcggtgacggtcgctatgttgacgtagcacattccaagctcgcgggcgaggtttacctccgggacaagggtcattccgatgatgtgggcgaactggcggaacatgaagctctcggcccttgtggagaagcgcgggccttcgatgcagacgtaggtgcccttctcgtggacagggaagccaagctccttggccgtctcgtagaatatcttcctcatctcaggacagaatggatcggccatggagacgtgggcaacgcgcggcccgttgtagaaggtgtagtccctcttcttggtgaagtcgatgaactggtcagttatgacgatgtccccgggcttgtactcctcgcgcagcgaaccaacggccgtgattccaataaccctctcgacgccaagctccttgagggcccagatgttggccctgtacgggacttcgtgcggtgggaactcgtggtgcttgccgtggcgcggaatgaaggcaacctcaacgccctcgatctctcctatttccactggagctgaaggccttccatacggggtgtgcaccttaacggtctccttaggctcgaagacgccgtaaactccagaaccgccgataatacctatcctcggcatggtcatcaccgtgttgattgggcgcttggataatataagggttgcctttccagtggaaaccaaactccgaaagtttaataacctttggaaactaaagttttccggaggtgagagaatggagaacgggaagccggtcaagctcgtcctgcctgaggtcaagaacccgattctcatagagggctaccccgggataggcctcgtgggtcatatagcggcgaactttctggcgaaggagctgaagatggacatgataggctacgtagaaagcccgttcttgccgccgatggccctgatccttgaggggaagccgaacccgccgctgaggttctacggaaaggacaacatcatagttgcggtagcggacatctacgtcccacccacgctcgtcaacgagatagccaaggagcttgtgaactacctgagcgagatgaaggccgagaaggtaatttcgatgggcggcatagggataggcttcttcaaggagcagcttgaggtctggggcgtcggttccagagatgagctcaacaaggagcttgaggagaagggggttaagatactccagtacggctcgataatgggcatgagcgggaagctcctctgggaagctagcaggaagggcctgaacgcctacgcgctaatgggtgagaccttcggcgacaggcccgatccgagggcagcagcaaacgtcctggaggtagtcaagaagctcaccagcctcgacttcagcactgagcctctcctccaggaggccaggatgatagaggagcagctgaggaagatgcacgagcagatggagcaggccagacagagggccgagaagcagtacgagagcctgtacctgtgaggtgatggccatggaggcagtgctgatagctggaatcgcaaggaggctcctcgacgagcttttgaggaacccctaccggacaatcgagctcagaagtgccagaaacgtcctcgcagttgagagggctatggaagacttaaggaggctatttctgacgtacgaaccgtttgaagacgttagaacaggaacagaagggctaataaccgagttaatagaggccagagagctcaacatgagagttccgtgggaggagagcgatgagagggaggtgaccgtctgcagggcgagggtgaagctcctcggcctcgggagggtcgtggagatggagagaagagactccataacagtagtcaaggttagggagatgctcccgcaggagatgcagatcggctaaaacagtgtcttctgtctgcccttctttttggagtctcttttaggcggttcgagcttcctgaactcgaggccctccttttccaggagtctttttgccccagaagtgagcgagggagcaacgagaattccacggactttatcgccgtactcctctctcagaatctcgacgtagctcttgagctgtctaacggcatggagttccgccctcctgcgcttaagctcaaggacaactatattcccatcactgtcccttccaaggacatcaacgattccagttcctatcgccttctccctgaacagcggcttgaagccaggctctatgacctctggattttcaaagataagctccgccatctcggcctcgctccccgtaagggcgagctcctcgtagtcctcagctcggaagacggagaccatgtagacctcttcgagctcgacctcaagggtctccctcggctttctccttatcgagacgagaactgggttctccctcagctccagcctcactctgctacccggtggctgccagttcacgggctcgcgcttcttgctctggtggatgagaaaagagccgtcgggcttgactatgatgaccctatcgccggagccgagctcgctctttgcccttccatcgtagtggaccttacagcgggcaaaaatcgtcagcatggcctcttctaagagagctgaattgactagcgaaacgagttcttcggttgatggcgacgtgatgaccgttaccttatccttggacatggggatgggtaaaagaagagggtatttaaagccttcagtcctcgactcccttctcggttatcctgaagaccgcctccccctcgggaaggtgcgggctgtctatcaggcgagcgaccctctttccggccttgcccttacggagatagaccctgagagtggcgctgtgggctaggatgtggccgccgacaggcctcgtaggatcaccgaagaaggcatccggtttcgcctgaacctggttggttacaaagaccgctatgtcgtagaggtctgccaatctgtggaggtcggcgaggtgcttggcgagcttctgctgcctctcagccaacgtgcctcttcccacgtactcggcacggaagtgcgccatgagtgaatccacgacgagaagttttacaggcctgtcgctctcagccttctccttgattatctcctcggccttctcgacgaggagcatctggtggttgctgttgaacgccctcgcaacgtagatgttcttgagggtctcctcaggatcgaggccgcggttttcggcgatctgctttatcctctcaggcctgaaggtgttctcagtgtcaatccagatgacggaaccgccgagaccaccttcctcgggcggcttctgaaccatgacagcaagtgtgtgggcgagctgggtgttgtggagcacgagaccgttcggtgcgatgaagttgtgggtctctggaatgaccagatcgtagacccagtcgttgtagtcaacgacctcaacggacgagacttcgtggaactccagccttctcgcgagctctatcgtttctagggcaagctttgcaactccctccaacctctcaatctccttgaggagcgctgaaacaactttctccttcagctcgggcctctttggaagtcctctcgtccggtagttcgccacctgcctgtctgtaaagccgtacttcgtgatggccgtccacgggaacgggagctcgggtttatcgcccatttccagtgcctttctggcctcggaaagcttctcaagggcttccctaaagtattcttctatcctggagagagtcttctcggtgaaccacacattcctgcttctcgtgagtatgtggtaagccgtctcattgtccctcttaggcagtctgaactccgagtagagctttccaaggaacttgcccagggcgggtggatacctgccaacgccgccctcgttcatctcgcccggctttatgcggctcttctcaaggactttctcgaaggtcttcctgtcttcacccgttatgtagatgcggtagtaaacgcttccctcgattgttttctgagagatcctcggagttattccaagcctcttaagtaggaagacaagtccatcggcgagctcacggctctttgtgaccagctcaactattgactcggttaaatagccatccccatccaagtatccagccagaaacgccgcgatggcagattctccagcgttcagcactctctcgggaacgactttcgttgatgcgtttgacgtggcaagctcaccgagccactcggcggtcttctttctaaagagtatcctgtagagaccgcgtcttacctcaaccgtcggagtgtagccgtcgtgatcttcgataaaagaaactatgaagtccttaagctcctcggatcctgttgttatggagagcgggttcgaagtaccctcggcaacgaacaggccgaggaagtaagcctcggactcctcaatggtagctgcgttagcaggaacgcttcttatgccaacgatcaggtcacccggcttgatcatgccagctggaacccactggagcccgttcctgaagacgagaaccggatgcagtagcgtgatcctgaggagatatccattggaaagccttatctcggcaagcttctcgaccttttcacggtatatgtaagaggccttcgtcctctttacctcacctgttttagggtcaaatgtgtaaaccgagaccgtttccagtggaaccgcgtagccgttgtcgaatggaacctctcttccgagggatgcgtatttgtgatacatatcctcgatggactcaaagtgaactagcgtatcgttctcgtagtagaccttggtgtcctttgcgaagcactttccactgccgaactcaccgaatacctccgtgatggcctgcgtctcaatgccgccgcccaggagcttgtcgagggctttgcttccagtggaaatcttgcctattgtggttctcctcttcatgtactcgtcggcgcgcatgaaggttccaatgttagctgcctctcttgcggcctggatgatcttgagtgcggcaccttcgcttatccccgctatctccttaagctccagcggcgaggcaaccgctattgcctctatcgtgtcgtaaccagcctcgcgaagcttttcagcggtggcaggaccaacgccagggagatcctcaagagcggagatttttttctctggctttgactgcttatccgacgatgaaagtgactcttcaacatcgagctcttcaaactcctcaagctctttgacttcatcttcaaccttctttttgcgggccatcatcatcacccaatacctttgatgtgggtaaaacatggggaggttatatactttatgtccctcagggacttggcaatgaaacttttaagaatttcgtccgattctagaatcaaactgtaaaagacccatattttacaatagcagccaggaaagaatattaaacagaaaataagggattaaatgccgttatccccaacctcccgaaggactatgagctttgaaccctctggaaccggggagtcaagccttggaacgagcactgggcggttggtgtagtaacccatcacgtacaaattatacttcctctgaaccagctcaagcgcttccgagtacttcacaccccagacttctgggagttcaaccacggtgatgtcgtaccctccaagggagcttgttatgtcgtcaatgacgtccacaacttcaggctcgatgacggcgctggcgagcagcctacccgctagacctctgctgaggataaccctgtcggccccagcctgtttcaacaggtctatgctgtccgcgctcagggcttccacgaacacctttgcaccggaaatgctcttgacacggagggtcacgaagaccgacttcgagtcatcgtcgagagccagaacaacatgggaagcactctcgacccgggccctttcgagtgtctccttattgatggggtcacctataagaacctcgacttcctctggaagctcaaccttcctgcgctcttcttcgttagggaataccacaacaactggcctgtggggaacctctcctcggcccatcgcagagagtatctcgtccacaaagctggccacgctactacctgcccgattacaacgtaatgtcccgagtacccaacacggtgcatgcccatcatcctcctaagtgaggaagaaattaggaattcagccagaagggaaacgagggccgtaaaagtagagatgcccgcgaccgccgcaaccatagcaactattcttcccgcctccgtctgaggggttatatcaccgtaacctatcgtcgccatggttattacggcccagtagaaggcagtgaagaagtccagcccttcaaagtacgcaaacagtccggcaaagactaaggagagaactatcacagcagcacctatctgtaggagcttgctccgcctcacccgatatctaatcttaacaagcctgcggattacagttatcggtatcatcgttgtggtgtgcatgcaaggggttaaaaacgttgggacgtggttaagtgaactttaatgaacataagaataccactaggcacaagttttccagtggaaacggaactctttttcgatactcatcgaaaagaccccccagagttttatttccactggaaccaactttcggagaatggatggatttgatggctttaaacaacagaaagggtatttttaaagcgtctgtgtcaatgtaaatatgattttgttcatttaaactttgttctttcagtattttttcaatcttacatcttaatacccgctaattattgaacattgtttatggaaaattataaatacatgatgggaaagaaaaagcgggagtgtttgcaccaaaattcgatattgaaaatgggtgtagcaacgaaagctgcctccactggaaacagaactctgggggactacaaaattgtttattttttgagattgcgaaaacaaagatgttttctaaaaatgatcccttttgtccatcattgttcgtgttttcatgtatatccctgttcattcctctttcagtggaaataggcacacctaccgatgttttgtttgtctaatgcaaacttgtatgtgcatccctgatcattgcttgcttcgcgtttcctctggagaggtctttttgcacaggttagaactggaacttcgagtggaattctttgacagctccatgttcaacaatccatataaaccagcggcctacacataggtatgccttccagtgtatccgctggttcctgtggagtccctcgtgaatgttcaatatttccccatatttcctatcaaaatgttgaaataaggatatgtactggtcatttcgatggaaagcgcactatcatattgacggaacgacttccatcgagtatgatttcaagtggagagtgggacgatggacgatgactacctcagttcaatattcgagaagtacctccatgccaggaagatattcaagaacaaagaagtgcttaggcacagctataccccaaaggagcttccacacaggcacaagcagatagacgaccttgcccacattcttgttccagttctccgcggtgaaactccgtctaatgtttttgtgtatgggaaaactggaactggaaagaccgtaaccgtcaagttcgttactgaggaactgaagaagatctcccagaagtacaatattcctgttgaggttatctatatcaactgtgaaataattgatactcactaccgcgttctcgcaaggattgtaaaccacttcaaagaggagagcgggatcgaggttcccctcgtcggctggcccaccgatgaggtctatgcaaagctcaaggaagtcattgatgccaaggagcgcttcgttataatagtcctcgacgagatagacaagctcatcaagaagagtggagacgacatcctgtattctctgacgaggatcaacagcgagcttagcaaggcaaaggtaagcatcattgggatttccaacgacctcaagttcaaagagtacctggatgcgcgcgttctctccagcctgagcgaagaggaggtcgttttcccgccatacgacgcgaaccagctcagggacatcctcatgcagcgtgccaaggaggctttttatgagggtgtgctggacgatgcggttgtgccgctgtgtgccgccctcgcagccagggagcacggagacgcgaggagagccctcgaccttctgagggttgcgggtgaaatagcggagcgcgagggggcgagcaaagttacagagaggcacgtctggaaagcccaggagaagattgaacaggacacaatggaagaggttataaaaacccttcctctccactcaaaggttctcctctacgcgatagtcatgctcgatgaaaacggcgagctccctgccaacaccggtgaggtttactcaatttacaagatgctctgcgacagcctcgacgttgagcccctcacccagaggcgcgtgagtgatctgatcaacgaacttgacatgctcggcattatcaacgccaaggtcgtcagtaagggccgttatgggagaacaaaggagataaggctcaacgtgactccgtatatggtgaagaacatataccgccacgatgagcaggttcgcccgctcctcaccctgagcctctctcgccagaggaggttgttctgatgctggtggaggacctccttaagaacaactaccttatcacgccgtccgcgtattatctgctctcggaccactacaagaaggcctttaccctggccgagctgataaagttcgccaaaaaccgggggacgttcgttgtagactccaaccttgccagagagttcctggcggaaaagggcataatttccagtggaaatggtgcccttgacggttcagtactctctgggatcagcgtttctgaatctcctgtgaaacctaacggggaggcagttctggaatctgaatctgatgaatctggggccattgaatcttctctccaggaaggagttgaggatggggtcgaatctatagctgagccaagtgcggcgtctgttgaagatgttgtcgtcgctggggaaagttctctagcatctgaaggctcttcactggaggatgaaatcaacactgaaccagagttatcatcctctatggatgatggtgctgaagttgttcagtcttctgagggggatgagacctctatttccactggaaatgccttgggatctgtggactatggtggctctgattctgaatcagaagctttagaagaggcctcctctgggggggagagtttcatttccactggaactcctgaagatgaggccctcctagaagagtcccctgaaggagaatttcccgatgaaaacggcttctctgatgagtcccttccagtggaaaacgggagtgagaatgggtatggggactctgaagagtactacgagaacggcgacaacggtgtcaagccgaagatagtctacggtgactacggtgtcccaatagcctacgttgcagatgaaactccggaggaagagaaagcctattcgacgtattccgacctagtgatagccccaaaggagggcttccactacagggcaaaggagattcccgacgagtgggagctggcctttgacgtcaagaacgtgaagttcgaggttcccaaggtcaagaacgcccagagcaaggagggtgaggtcataatccaggcatattccagctacttcaagtccaggcttaagaagatgcggaggatcttccgcgagaaccctgaaatcggcacgatagtggatatcgccaagctgagctacgtccgagaagatgatgtcacgataatcgggctcgtcaatgaaaagcgcgagacaagaaagggctacctctttgagatcgaggacgccacgggaaggatcaaggtcttcataggctcggacaaggagggtgcaaatgaagcctacagcacgataatgcccgattctgttgttgctttcaggggcacccccgggaagggaatattcttcgcaaacagggtgttcctcccggacgttccgaagttcaagaggtcaaaaccaccgcttgaggagaaggtctacgccatcctgctcagcgacatccacgtcggtagcaacaagttctgcgaggaagcttttatcaagttccttgagtggctcaacggcgaggttaacagcagaaccgaggaagagctggtgagcagaatcaagtacatcattattggcggcgacgtcgttgacggcgtcggcatctatccgggccagtataacgagctggcgattccagatatcttcgaccagtatgaggcccttgcaaacctgctgaaacaggttccggaccacataacgatgttcatcgggcctggaaaccacgacgcggccagaacggcccttccgcagccgggcttctacgaagagtatgcaaagccgctctacaagctcaagaacgctgtgataatcagcaatcctgccgtaatacggcttcacggcagggacttcctcgtagcccacggcaggggaatagaggacgtcgttgattttgtccccaacaggagccaccacaggcccgctgaggcaatggtagagcttcttaagctcagacacatagctccgaccttcgggaacaaggttccgatagctcccgaccccgaggatacgctcgtcatcgagagcgttccagacctattccaggcaggccacgtccacgtcatgcagtacaagacgtacaacggcgtcttcgtcataaacaccggtacgtggcaggcgcagactgaattccagaagatggtgaacataatcccgactccggcgagggttccgataatcgacgttgaaaccgcccgcctgagggctgtggttaggtttgaccagttttgcgagggggtttgaatgagcgaggagatttactcgcctgaaatgaaggcttacttcgagtcactccagcgcgagatagacagggcctatgcgatagcgaggaaggcccgcgcacagggtaaggatccgagctttgacgttgaggttccgcaggctactgatatggctggccgtgttgagagcctcgtcggaccgcccggcgtggccgagaggattagagagctagtcaaagagtatggcaaggagatagctgcccttaaagttgttgatgagataatcgagggcaagttcggtgaccttgggagcaaggagaagtacgctgagcaggcggtgaggactgccctggcaattctaacggaaggtatagtttccgctccactggaaggtatcgctgacgttaaaataaagcgcaacgagtgggccgacgggagcgagtacttagctctctactatgccggcccgatcaggagttccggtggaacggctcaggctttgagcgttctcgttggtgattacgtgaggagaaagctcggtctcgaccgcttcaagccgagcgatgaacacattgagaggatggtcgaagaggttgacctctaccacagggctgttacgaggttgcagtaccacccggaggcagacgaagtaaggctcgccatgaggaacatcccgatcgagataaccggtgaggagaccgataaagttgaagtctctcacagaaacgtccccggtgttgagacgaaccacctccgcggcggtgccattctcgttctcgctgaaggtgtcctgcagaaggcaaagaagctcgtgaagtacatagacaagatggggatcgagggctgggactggataaaggagttcgtggaagccaaggagaagggcaagagtagtgaagagaataaagacgaatcgaaggccgaggacactggaactgagagcgtcgctgaaaagaaggagaatgtcgagaagggtttctattacgagctctacgagaagttcagggccaatattgcccccaacaagaagtacaccaaggagataatcggtggaagacccctcttcgccgagccttcgaccaacggcggcttcaggctcaggtacggccgctcaagggtctccggctttgcgacctggagcgtcaatccagcaacaatgctcattctggacgagttcatagcaattgggacccagatgaagacggagaggccaggtaagggttgtatcgtgactccagcgactacggtggagggtccgatcgtcaggctcaagaacgggagcgtggtaagggtagatgactatgaaacggctctaaaggtcaggaacgaggttgacgagatcctatacgttggcgatgcgctcgtaaacttcggcgacttcgtcgagaacaaccagacgcttctcccggcaaactacgtcgaggagtggtgggttcaggagctagtacaggccatcaaagacctctacgaggttgagcttcagccctttgctgagaacgacagggaagccgtagaggaagcggctgagtaccttgaggtagaccccgatttcctgtggaacctcttgaaggatccgctcagggttaaaccagatgtggagacggccattcacctttcaacggttctcgacataccgttccacccgtactacaccctctactggaacacccttcagccggaagaggtcgaggaactccagaaggcccttctgggtgctcagatagagtgggctgagttcagaaagaaccgcttcgcgaagaaggtcgtccttgagaacgataaaaatatcaaacgctaccttgagctcctcggcctgccccacaggcttgaaagggttgagaagaagaggaaggtcatcgtcgttgaatatccctggagtgcggcccttctgacgccgctcggcaaccttgagtgggagttcaaggcaaagcccttctacacggtcatagacatcatcaacgagaacaacaggataaagctccgcgataggggaataagctggatcggcgcgaggatgggaaggccagagaaggccaaggaaagaaagatgaagccgccggtccaggttctcttcccgataggccttgccggcggccagagcagggacatcaagaaagccgccgaggaaggaaaaacggccagggttgagatagccttcttcaagtgtcccaagtgcggccacgtcgggccggagcacctctgccccgtctgtggaaccaggaaggagctcctctggcactgcccgaagtgtggagcggattatcctgagagcgatgcaaaggactttaactaccgctgtccgaagtgcgacgttgagctcaagccctacgcggagcgggagataaagcccgccgacctgttaaggcaggccatggacaacgtcaaggtctacggcatagacaggctcaagggcgttaagggtatgacctccggctacaagatggccgagccgctggagaagggtcttctccgtgttaaaaacgacgtctacgtctttaaggatggtacaatccgcttcgacgcgaccgacgctccaataacccacttcaaacctaaggagatagggacgagcgtcgagaagctgagggagctcggctacactcacgacttcgaggggaagcccctcgagagggacgaccagatactcgagctgaaggtccaggacgttattctgccctacgaggcagggaggtacctcctcaaggtggcgcgcttcatcgatgacctccttgagaagttctacggattacccaggttctacaatgccgagaagatggaagaccttgtgggtcacctcgttataggtctcgctccacacacctcggctggaatcattgggaggataatcggcttttcagacgttctcgttggctacgcacacccgtattaccatgcggcgaagaggaggaactgcttcccaggtgacacgaggatactcgtccagatcaacggccttcctcagaggataaccctcagggaactctacgacctctttgaagacgagcggtacgaaaacatggcctacgtgagaaagaagccgaaggcggacgtcaaagtttattcatttgacccagagagcggaaaggtcgtccttactgacatagaggacgtcataaaggctccatcgacggatcatttgataaggttcgagcttgagctcggcaggagctttgagacgactgttgaccatccggtgcttgtctacgaaaacggcaagttcgttgagaagagggcctttgaggttagggaaggagatagaatcctcgtgcctaatttgaagcttcctgaaaagaacattgactaccttgatctgctaaaagagttctccagagaggagtttgctcatcttcacgataggataatggttcgtggaatagcagagtggctccgctcagttgaggctgatgtaaaagaagactacctgcgcagagactccatacctttgagcgtccttctaagggttctcacggagaaagagatatccattgaggaagtaccttcctgctggcttggatttaagcgcgataaagtaagaatcaagcggttcgtacctctcaaacctctcctccgcgtcgttgggtactaccttgccgagggctatgcaagagaaagcaagagtgtctatcagctgagcttctcgatggcagagaaggaggttagggaagacctcaagagggcactcagagaagctttcggggacggttttggtatctacgagaggggagggaaagttacagttggctcgcgtattctctacctgctgtttacggaagttctgaaggctggaaagaacgcatacagcaagcgcgttccgtctcttgttttcacactgccacgtgaagccgttgcagagatgcttaaggcatacttcgagggagatggaagtgcccttaagtccgtgcctcgtgtggtagcgtatagtgttaataaggccctccttgaggacattgagacactgttgcttgccaagttcggcattcgtggctattacacctttgacaataatgccaatagaggcaacgctcgcgggagactgtatcacgttgaacgcggaactgaggctccagtttcaaaagtctacgcccttaacattgcaggtgagcactaccacaggttcttcaatagcattggctttgtgagtgaacgcaagaactcaatctatgagcttcatgctgagaaatctccagctcaggatagatattcctcacagaatggctggctggtgaaagtcaggcgcattgaatacatcacaccaaaagatgatttcgtgttctctttaaacgctaaaaagtatcataatgtgataattaacgaaagtattgtaacacaccaatgcgacggcgacgaagacgctgtaatgctcctcctcgatgccctcctcaacttcagcaaatactatctgcccgaaaagcgcggcggcaagatggacgctcctctggtcgttaccacccgtcttgacccgagggaggtagacagcgaggttcacaacatggatgtggtcaggtactatcctctcgagttctacaaggccacctacgagctcaagtctccaaaggaagtgaaggtcatagagcgcgttgaggaccgcctgggcaagcccgagatgtacgaggggataaagttcacccacgatacggacgacattggtctcggcccgaagatgagcctgtacaaacagctcggcgacatggaggagaaggtcgccagacagctcgctctggcagagaggataagggccgtggatgagcaccacgttgctgaaacgataatcaactctcacctcgttccggaccttagaggcaaccttaggagcttcacgaggcaggagttccgctgcgtcaagtgcaacacgaagtacagaaggccacctttgaccggcaagtgcccgaagtgcggcggaaagatagtcctcaccgtcagcaagggtgcaatagaaaagtacctgcccacggccaagatgctcgttactaagtacagagtaaaggactacacgaggcagaggatatgcataaccgagaaggacataaagacgctcttcgagaacgtctttcctgagaaacagaggaccctcatgggcttctcggcggacatctgcgagaagatggtcaaggagaggacgggtcattccaacggaaagaacggctacctcgacgagttcaacgggaagaacggaaaggccagcaaaaagtctgggagtttagcctcaaagctctctggaaaaggcaaagaaccctcgaaaaagaaggagagtgcaaaacccaaacgctccgagaaggtcaagaacctcaccagctttgaagcggccgctaagaatgagcaggcaagaggaacggcagggaacgctaagaaggctgagagtgagaagccaaagagaaagaagcggaaaggcataagcctcgacgagttcttcggctcgtaacattctcctcttggtttccttttcgtgtgttcgatctccgttaagcatatatatgataaaatcgtctatccattgatgctcaatcagttcaagctccttcccagcgtcgcctacctgcgcgttcagaagcaggccttcataggctattccatgcccctggctggatggataggggagtatctgataaactaccagaagcttccgaggccgaacttcttgggcagggcaatggccaagctgggctttcacctagctggggaggatagggacgaccgctttatcacccagttcttcactaaggggagcgtttcaataagcgctagctgggacgtcgagagggaggctcttttcctccagctcatccctctccgttcgaagctctccaggggactgaccatcaggacggagcacatagagttctacgaccagtacgttgtctcgattgaaccggccggaaagctcccacccggggtaaagggaatagggataaacgccctcatccttgaggacttctaccctgtcgagacgccatactggggcatgctccacgaggactgggagagcgagctcaacctggttgtgatgcgcgatgaggtctatgagaggctccaccgcgaggagtaccgctgtcccgtctgcttctcgccgctccacgaggagaagggcatcttgaagtgctccaaatgcggctttacctacgccccggagaacgacttcgagagggtcatggaagagttctcggtggaggagtttgcgttttgaggtccctaataaaaagtcagattgggaaaagggttaaatagcttattttggggttgttatgtgggtggttaacgtgccggattattttttggtgtctttatcaaatcgagaaaacttagagctctgtgttaagtacaatttagcggggtttacgaacagtataaatggtctctggactttctttgacataagtgttggggattatatatcatttctctacggggccagggttcgaaatctgtaccgtgtcgtcaggaaggtagcttataaaaacgcaagggatcttcctccctggcctccaataactttcagatcacaaaagacttattacttcccattccggctgtttttgaaaccagaacgagaatttaacgagcctatggttcggcaagagttctcttatgttgccgaaaacttgctattaagaggaggttatcgtaaaactcattttcaagccgatactgtaacattttacaaggtttctgagatgggcaatccttttgctggagagccggagtacttggagcttaatgcagaaacatttgagccaaaaattgtgtttgacaggaaaaaccagagaattcctgagaagttctactttagggagcttatactccagtcgctggtgagaaagaaacttggagtcacggttctccgtgatgttctggagatatttgaagtagataattctccagaggaatttgaagtacttggtgaaaaagctcttccagaaggatacgtggacattttcataaaactgaagcatccttctgcccttaataggtacattcttgcggaagttaagactggaaaagcccagaaaaaggatgtggagcaactaagaaagtatctaagtgaatacgggaacgaggcggtgggtggactgttgatagccaaggacttctcaagatcggcctttgaagatgatcggataattcctgttagatattacttcaaggaattagatccctttggggagtatagttatgatgagcttttgagtatgttgaagctggagatagtagtataaagaagcggttgtttatgtttgtgtcctctggtattacatactctttagctgatgaaatgtacccggatactgacaacttctaggtcttgggttttgatcaaggaatccctgaggaggaagagtttggtggccttcctttaagaggggaaaacaattagggtttttccttgctcttttaacgccctttggtcgttatactacaagtaaatctattgaaaaccgccaattggggggggggggagaatcatgaaaacttggcaatttagaaaggatattcactctttgatgaaactttgccctgcaaagtttctttggtcaggctttttccaaaagcttgctggcgaaaagttccaccaaaggcactttccataaaatgctgggtgttaatcgtgcactcttctcctcccgatctctaagatgggtttaactgccgaggtagttttatgaagtttgcttttttctggcgtcctttggatgctttgttggcgacaaacactttataagagcaaatgaggagtaaattcctcccaggtttgtattttcagaaaagcataccctttctgccatccctcgaggaatttgaacggggttgaaagctatgattgcacaagcaagggctgatatggtgcagggcctgagtttgaaccttgtaaatgaaattctagtataagtatagttggtgtgagaataatttgaagaaaaccatagataaagtggcggatataaggagaaatgcacctggcattatttcttttcggagtatgggttaaataccagagtcctgccttcgtaaggggaaaaactcacatataactttccgttttgaagttttacttgcggatcaaatggatagcaaccgcctccagttctacagcctttaatttcatgataataccaatccacctttccactccctaaatcaaatgcccagacatagcggttttgcagatggtaaactatgtcaatatccttgtaaagtccttcaatcccaactattcccctctcaccaaccaccgccacataaagggtttcattgtgaattaaacactgaccttcaccactgaagtctctgcttagattaacttgaatgctcttaatgacgtcctcatttttcatcaacagtataaggccattctttacttcaacaggacaatccgagtttccatttagtgaactgtcaagtacttcgttaggcaatttgccctcttggatcggcgtggtgtatttataatcgtaatatgtaagcctcagatagctaactttcagaggtacaactggcaaaagaaaaaataatagcaacagagccttcacttttcttctcatttccaaatccctccaatatattccacgacctcattatcactctttagcttttgtagttctgcgtaattagcgtctcttacgatgattttaaatcttatatgagcaacttttgtattctcaaacttttctaacatttggtcttttgtagttttgcaggttgtgattagacattcatctcaaagcaaactctttaaaaatcagtcaaaaactttccgccagcgctttcgtcagaaagggctgttatggggccggggccgggatttgaacccgggctaggggatccacagtcccctgtgctaaccaggctacaccaccccggccatctccagcttaagcttttgggttagctttataaagttttcgtcagaatcggcggaagaaggtatctggtgtccttttaggtggataactcctgtatgggctgatattatgtgaaatcaaaaggtcagaggtggattaaagatgaaagccaagcgagaagcccttcaaagcctgttcacggccatgagagatggaaaggttgacggggacataatagacctcctcctgctcatcaactccattaagggcatctacactacctcctcctgctcgggaaggataggcatcattgaagagcccgctctgggggcaaagcccctctcccgctggctgataaaagtccacaggccgattgagttcgaagaggctaaggaggccctgaagaacgcgaaggagggcataattttcctcaagagccagcccccgatcttccacgtcgttgctgaagaccttgagaaggccaggaagctccacgagctcggcctggcctcgggcttcaagtacactaccttcaaggttatctcaaagcgctatcttgttgagataaacgccactgagtacctgacggcaccgctcggcagggacggcagagttctcgtcgatgacggctacctccgctttgcggttgagataggcaacgagatgctgaggcgctcaaagggcagacttccccgccttgaagagaacttcagaaggctaagggaagagcttggaacggacgagcttttctatgagcttgtggaagagtataaaatcagagaaaactgggaactcccctaacgcatctcgttccacttaggatttctatacttctcttctatcagcttttccgctagctcaagctcgtagtctgtcagctcgccctcctcaagctcaaaggcgttggagaagctctccttcagcagttcgtaggcttcccagcggctcagctttactccctcgcgttcaagggttgtaacccgctcccagatgctcgaaatacctttgtccttcagcttctcctttgagacgcggagaacccttcccagaatctcgaccctcgttgcatacataaaggtgccgtgctggaggattactccccgtctcctcgtctgggccgagccgcttatcttcttcccgttggcaactatgtcgttcagtcctgagaagcccgctttaaggccgaggtctttcagggcatccacgagcgggcccgctaggtagcggtagctctcttcgacgttcttaagggcaggatggtagtcttccccgatgacaattgaataagttatctcgccgtactcgtcgtggaagacgcttccgccgccagttatcctcctcacgaccggaatacggagcttttttgcctcatcgagattaacatcgtggactacgctctggaacctgccgattgtaactgagctgggggagaaggcgtagagcctcacagtgtccgggactttcccctcgattctcgctctcattatggcctcgtctatggccatctgaacttcgggcctggccactatgagcggaatgaagcgcatcgtcattttaaccaccaccgttaaaaactccggagggcttttaagtccagcgatgatgacgcccaagccctcctgacgggtgatgagagcggtcaccactgagcggatggaaactttgcccctcaagttttttcaaaacctggtcaagatttacccttctttttgaacttgcctgttaagaggtgtatgcctgctcagaaggcaactttgtgcggatttgctctcaaatctctcgttaattgtgatttcacctttctttttagcgctcgaagagcgctatactgtggggaaatcccatgcgattggcaaattgataagtaaacctctcataaaatttagcctgtttcaaaagcatactatccttccgccatccgttaaggacgcttgaacgctagtgaaagcggcgctgaaacttttagaaaaagcttcaccaaagttcgtggttcctatttaacgggtcgttttgggcggattttccttttgaacgctgtcttgagtcgtgaattctatttttaattcgcttgtttttcttgagtttgctttttaattgacgcccgtagggcgtcaaggcgagaaaactccttttcatcaggctgaaacttaggggaattcactgatgtctggcttgtgtatcttgaaaatcctcagtaaacagcaattttagaaaagaaccacgaaccttgatcaaacttcgcaaggaagcttttggaaaaagcttcaccaaaagctcgaatgtcttcttgatgttggcttgatgcgattagattctcttggtagaggggcagagtaatgcgggttttcttatttttaacgcctttcgggcgttatactgtgagtaaacccccttgaaaccgctagttgagcattgagaatcactggaaaacaggaagctcaaaaggacattccatctttgatgaaactttgcccttcaagcttttggaaaaagcttgagcaaaagttgctcttcttctcgaactttgcttattgaggagtgtatgctccactataaagcgagtttgagtgggtttaactccaaaatcccccagctgattgtgattttggctttctttttagtgcccttcgggcactatacggtgataaaatccttttgaatctagcaactcggtaagtaaacccactcaaaggctagctctttaaaaacgcatactaactttccgccagcgctttcgtaagaaagggctgttgtggtggggccgccgagatttgaactcgggtctccggctcccgaagccggaaggatagaccaagctaccccacggccccacttcccgatgataccgcaccaaaaggacttataaagtttacggactatcaagacaaagcggggtgctgaaaagtgaaaatcagcgttgtaatcccaacgtacaatgaaagggagaatctgcccgaacttgttgagaggctctcgcgggcgcttcagggttatgagtacgagattgtgatagttgacgatgattcacctgataagacgtgggggctcgcggaggagctggcaaggaagtaccccattaaggtcatcaggaggacgaaagaaaaggggctttcctcggctgtaatccgtgggtttaaggaggcctctggtgatgtattcgttgtgatggacgcggaccttcagcatccccccgagaaggttcccgagctcatcgaggcgataaaacgcggtgcagacatcgctatagccagcaggtacgtcccaggcggcgccgttaagaactggtactggtacaggaagctgatatccaaaggggccatcatgataggccgcgttgcccttcccagaatcaggaacgtaaaggatcctgtaagtggcttcttcgccctcagaagggaggtcgttgaaggcgttgagcttaatcctgtgggctttaagattctcatggagatactggttaagggacactacaataacgtcagggaagttcctttcacattcgggctgagaaaagccggagaaagcaagctcggaagcaggactattgtaaactatctcagacacatctacaggcttatgaggtgggagggggaaatagacaggctagtgaagttctccctggttggtctctctggtgtcctcgtaaacgaaggtttcctctgggcgtttgtggagttttttggatgggacaaggtgttctccaacatcctggcaactgagctcgccatactcaacaacttcacgtggaatgacatctggacttttagggatctgaagaacaaacctctcctgaagaggctggtaagctttcacgttgcggctttgagcggtgcccttgtccagtgggcgatctacgttatccttatggcagttggagtgcactaccttctcgcgaatctgattggaatagttgtgtctttcatcgtgcgctttgcggttaacaggcacgtaacctggggctgagcaacggtgggtttaaatagagaacaatggaaaatatctaggggcgagcgaatgtacgttggagaacttttgaagaatctcgacaggatacccagtggagttccggggctcgatgagctgataggcggcggttttcttccgggcagggtttacgtcgtgacagggccgcctggaagcggaaagaccacgctggggatgcagtttcttgcggagggcgccaagaacgacgagaaaggtctcttcatagcactttttgaaacgccggatattatcgttagggatatgctcaggtacaaccttgggattctcgagtacgtcaactcaaagaagatagtcttttacgacctcggtgaaattcttcttagtgcaaaccgtgagctgagctgggacgagctcttcaagctcctcctggaaattatcaagagagaaaacgccaaaagggttgtcatagactcattcagcctcttcgagtcattcgtcaccaaccctgagggaaagaagaaagagctgggccgcttcgttagaaagctccgcaccatggacataacgacgctcctcctctccgaaatgctgagctccgaaaagtacaccgacgagtactacctcgctgatggcgtcatcgtgctccaccacttcatgcgcaactaccagatggtcagggcgatccagatactcaagatgaggggcgtgccccacgacagcaacctcaagaggatgcgcttcacgaacgagggtataaccgtctacaaggaggccccaatatgactgacaagaagaagcttgttaaggaagcttacagctttggttacttccttggcttgaaggggcatagcgaatgggtggaatgggtgagaaaaaagcgcgaggagctctacaagcaggcagaggagctcggaatatatgacttagttaaggaggcctataaaaagggcaaggagcagggccttcgtgacaggtcggagatgatagcgaagaaccttatagttgctggaaaaattgagcctgaggggacatctaaaaaggttgaggtggccttttccccggaagaaagcagggaggaagtcctagagtctggaaaatccctggagcgggagtactttgaattcctccagaccaccaatctgatgctcccgccggagctccttgattcggtgaaagctcttgagccgccaaagatgctccggcttaggggcagtgagggataacttttttgtgtcccctttcaattaatcccctggtgaaaccctatggagcgcttcctgcgggatagtgccgaatttagctcagacaacgttctgaactggatagccgggatttcgcacttccacaggatacaggggtcaaaaggccttgtcgaggccgccgaatacgttctcgaagagctgtcccgcatgggtcttgaggcaaagcttctcaaggataaatacgacggcaaacgctggcatctaacgcttccgtctccaatagcatgggaagttattgatgggcgtcttgaagttcctggaagaacactcacaacagcggaaagtccgctcctcgtgatggcccactccccttctggggaggtcgatggggaggtacttccgattctgaggcaagaagactgggagagggcagaggggaaggttgtcctcgtcggaaaagactggagagatgcctataggagggctaacgaggttggagcttcgggcttcatagcttacagggaaggaactggtgagttctacccgtacataggcctgttcctgactaaggaagacctaaactgggcgcaaattcccgcctttgccgtcccggaggctgttgctaaaggcctgattaggagggcgctttcgggaggcgttgaagttaggggtacggccgagacggagataaaaagttcggagactctcccgatggtctacgccgaagttggcgaacctccgtatctgctcttcacggcgcacatatgccatccaaagccgggggcaaacgacaacgccagcggtaacgcgatgctccttgagctggctagggttctatcaaagagggaaaacggcaggtttggctacgccttcctctgggttcctgaataccacgggagccaggcgttcattgaaagggcgggtgttgaagagtattacgcaggcataaacctcgacatggtcgcgggtagtcccgaccgctcagaatcaactctgatgttcgtgaggacaccgttctcacgcttctcggtggtttctggagcgctggaggtcgccattgagctgagcaactcgagaggcaagagcttctcgggaagcagacttcccgtgatgcccttcagggcatacccgtacgagatggggagcgaccatgacatcttcaacttcttcggtgtcccatccgtcatgccgataacctggcctgacaggttctaccactcaagcggtgatacgatagacaaggtgagcagggagactgtggccatagtcgagagggccgttctttcggcggctctgttcctgtcagaggaggaaaagcgcaggattgagcaatttgcgaggggctacgctagaaaagttcttggggaaatcggaatgcgccttgaacctaaggagagcgagaagctcgtaaaggccggcctcgctagagatgcggagttccttgggctggagcttaacttggaggtagagaccaaggcaaaaccctggctggagtggaaagagaggggattgatatccgagcgcttaatcaggagcagagcacccggtctggctgaggactttaagaagctgaccgaggaaagggcaacggtgacgcacctccacgagcttataatgctcggtgaactcctttcagaggggaatgcctatcgggccatcgaagaagagtacggaagcatcgagagggagaaactgaagaggctggtcgaaatacttgaagaagtgggcgttgttgccctcagttcttagcctccctaagctccatctcaatttcgtttattttttcgaggatgttctgctttatcctcgcgagaagctcatggggagagacggcggtgtaggtgtacccgagccatccctgctgtataagctctctccggagcattcccttcctgtagaggctcaaaacgtgctctctaactgaacgctcgcttattccaagttcgttgactatctcggttactctcatcgggcgctttttctccaggaggagcctgtatatcctgagctcggttttcttcactcccagcgacttaagcagtgcttcgagcctctcgtagacgtcgcccatcacacttcacccaacctgatctctcacacctatgaagaggtatcttcataccccttaataaacctttacctttctaacgtaaacgccttcgggaaggaatatctctacctcagaaacatcttttaggaacggaactaacttcagaccttcccgtatgtcaaaaccctctatgtacgggttgatggtcggcaggacgaggaatttttcggctctgacaaagactttgacctttttcgcaactcctccgctcttgaatgtgtatgcgggatgagcgtgaccgaggaagacttcccggaactctcctttcggcaattttgtatggccgtggaggaagagtttttggtcgagaataaatttctcaacaacggaaacgttttcgaactttctggctatctcttcgattctgccgtcgtggttgcccttggtgattacgacttcggtgtcctttagtggggagaagaaccttaggagcatctctttaagtctgaagcttaggcccaggggttctttgaggtctcccaggattatgaggaggttagggttactctccagtacgaactgggccagaacttcctcaaaatcagtcctgatgcggagtcccctcgaaagctcgaagccgatgtgggggtcggcaaaaacgagggccttcccgcgggaggtctcaagctcaagggaaagaagttgaagttcggaaaaaagagacatagaaccaccggagcgtcagataagtccgcgctccttcctgcgctgcctcttgagcctcctaatcctcttcttgatccacttccacctcatccttcccttcttcttccacttcctcgggcgcctcttcatgatcgtcacctccttttcctgagccgacctctggtggagagtttttaaggttttcctttttggcctgcgggagtttgcatacctagaagagctgttaggtggtctcttttgagacataggtgcgttttagtggccgttttcgtcgggtatgctgacagcgtttttacaagtgttattgatgtttatggagtttaaattccctgaaaagcttgatgcgttgtgaaaactaacgcattatctttgaaaatatctaaaggctgagaaaaaacaattttaatgcctaaaaagtctgtaatattttaaaagcccgaacccatcaggtttatcaactttgggacgttatagtgagttaggtgatactatgaaggtcgcctacgttcagatggagccggtttttcttgatcccgaggccaactactccagggctgagaagctgatacgggaagccgctgatcagggcgccaagctcgtggttctgccagagctgtttgacacaggctacaacttcaggagcagggaagaagtcgaagaggtagcgggccagatacccgacggcccgacgactgagtttctggttgaactcgcgaaagagcttgaggtgttcatagttgctggaacggccgagaaggacgagaagggcaacctatacaactccgccgtgcttgtcggcccggttggctggggctacatagggaagtaccggaagatacatctcttcaacagggagaagctcttcttcaggcccggaaacctcggcttccacgtcttcaacatcgggatagcgaaggtcggcgtgatgatatgcttcgactggttcttccccgagagcgcgagaacgctcgccctcaaaggtgctgacgtcatagcacacccgagcaacctcgtgatgccctacgccccgagggccatgccgataagggcccttgagaacagggtctacacgataacggccaacaggattggggaggagtttgggctgaggttcataggaaagagcacaatagcctcgccgagggcggaagtccttgcaatgggaagtgaggataaagaggaagtcggggtagtagagatagacctatcgctggcgagggacaagagaataaacgaaatgaacgacatcttcaaggacaggagaccgcagtactacacattgtaatcctcaagaattttccccgctatttcctttctcggctttctgaagagcaggatgtccccaacttttttctcgtgttcctcctgagtgatcaattcagcttccttgaagaaaacactgccaatggcaagctgagtggccaagtcccagtaatgaaagtcaacgtcgcttatctttttgaatccaggaaggatgtagtagcccctcttaaaagtccccctcacgaagtcgtagccctcgtgcatcgaggctatggtgtagttctccctccgcccttcgatgaggaactttttgtatccagcgcggtagagaatccagtagaccctgtccatgtcctctatgatgaaaacgccctcaccactcaggatggacgcaacgtttgcgaagagcctcacggcatcaaagggatcgaagtgcggcatcgtgtagccccagaggaccgcaacgtcgtgctcgcccacgagcttcgctacctctctcgcatcaccctggacgagattgagttcggggtttatatcagcgattttgagccactccttagcgagctcaaggtcgtctttcctggcgtcgaggaccgttaggagctttgcacctgttgcttttgcaagggcaacgcctgccactccagttccagcgcagatgtccaggactctgcctccctttgggagtttatcagagactgactcaaaaaactcccttattctctcaaacctctcccgtgccctctcgtctgccggattcatccgccagtttaggtaccgatagagctcctcgagggacatgacatcaccacataagagagtgggtgaaataatttaagcctgtcgaaaggtttaaatatgttgtcaacttactaaggttgacaaggtggtggtatgcagggtgactgctacccttacccaacgggaggtgtaccgcttctcttgagcatggcaggtttatgtgttatgattgggagtattttagttggatcgagctatttgatgctgattgggctggttcttttccttctatcgcggggcaaggggatagaacccgagagaaagcggctccgctacgtcttcggaagtgttgagctcagtgatgtggttgaggttgcaaggttatccgagatggagcgcggccggattttgaccatggcaaaggcctttggaacgacgcctgtagcgctaacggcttttctgatagctttcgtggcaaaaggagcaccttataccgagcttcttgctgtttatgcttactggctcatcatttacattgaaatcttcatctttccactcaaagagcttaaaaagaagaagttatcgttaacaatcttgccgattctcctctcacttcctctgctcgccttcggctccttgaaaacgctcccaataacactgctcacgtggctctttggaagctttctcctggacgaacttcttggcagggatctggtagttgtgaggactgagaagggaagctacctcgtctcctgtgccaatggggagctgatagtagggttgatcgggtatggtggaattatgtgaagctaaggggtgatccgtgatgaaagtgggggatgcaaagcccgctaacttctccggaggtcccctccttttagtagggttctcatttctcctgataataggctttccaagacttgctccggattggtggtacttctctattgtgggctggctcgtccttgcggcttcatgggggacatcggttgatgtggaaggatggacattgaggcttaggtacgcctttggcagattagcaattaacgttcccctctctgaaatagaagacgttaaagtagtgagcaggcttgagagggcagtcctgataagggaatttccgggattgtatatcttaatcaccgccagtgtgctgttcgtcttccttgaccttttgctccttcccagcgggcttttggaggggtattatcttggcgacatagggctgatattcttcggcctcatttaccttgcggttatgtccctgccgttcagtaggactaacatcgccctcctcttcggggttctcgatctgctctttgcggcacttcttatggagctgaagatgggttatgttgaccccgtatccgttttggtcttgggtatattcggactcctttttgttgccgagtattaccgtaaggactacgttgtgataacgacccaaaggaaaaagtactccctaatgagtgaggagcctgaggcggtattacgagtcctgctcaggggggtcgccaatgttcaagctccctgagggaatggagagggtctggctaatgagggccaggggcatgcgtgaggtggatatagcagaaactctaggaatctcaaggcaggctgtaaataaggccctcaaggatgccagggtgaagctcttcgaggcattcttttccatagccgagacgttctcgtgggatgtcgtgagagttaacgcggagaagggcttctccgtcttcatgggaaaagtcctcgggaagagagtgagagtttacgccttctacctgcctggaaaggggattaaggcctttttcggagaggacgttcctgactacatcctccagcacgctgttgaggttggaataatcgaaaagcctgaaaaagaggggctgataaaggcgcttgagagctaataatagccctccctgtaggcagaggtcagcatgacgtaggccgcgtagaagatcaccagcagggaaatcggaagtagcagtattcccagaacgtcgtcctcaaagcccatccatgcaagaaaggcttcaaacgtcaagagcgcggagaccagcgtgatggcctttgcgaagcctcgtgccattatccctgagaacttcggggcgagctggaagacgagcggcctggaggcgaggagcgttagagctatgaagagggccatcactgagccgaggacaattgccatgtccctcgggagctttggagacatgagaacgaggagcaaagcgaagaccagctgtgcagctaagtgctttccgagcttgggcggctctatgcttttcgtgggcttctccggcgcttccctggagatgtcctcaagctcgtactcgcgcctggccacgatgtagccgatcgccaagacaacggcgactcccccgatgaggaggacaaacatgccgtatagcggcaggaagaacgaggagagcataaataacagccaagggcaattagaccgattccggttatcctgttcgccctttccctcgcccgctcgctgaggtaggtgtagccgattctgaaccctatcccaggttcgcccttggaggttgcggtaagtatgccccctatcacgaaggccagtccgaggaaaacaccgtagagaatcctaaagatgaagtaggggttcacgttccctcacccctcgcccaaaagagtcggaaaatcatgccgatggtaactatcagaaaagtccagacggaataacctatccagctcgatggaacttggccggcgttgtagaggagcaccaggctgtcaatggccaccagcccaagggccataacggtcgtaaactccgcgaaggctttccagccccttctgctgaacctgaggagcggtgcgaaggcgggctctctgaggaagtaggtcatgacgaggaagagcgggtaaaccacaagcgggaacagtagggtgcccagggtctttgaggcaaagttatccggttctccagaggcgttgaagtggatagcgactctctcggggagtttatcccagaggatagccgcgaggatgatataagcaaccagcccgaggagctgaatcaccagatatggtctaacgttgacctctatcttttcagacggcttttctggggcttctattgacagctcttcctcttcgtaggcctttttggctactctgaaacccgccaccgtgaggaagacgacccccgcgagcattgtgagtatgaaggtgagaattcccaggcccgccagcgcaagcccaaggagtagaactgagaagaccatcatgaagagccccgcaaaggtgttggtttccctccaggccctatcggacatgtaggtgtagccgatcctgaagccgatgaagtagttcctcctgttcctgaaggcgaaggtcagcaggcccgcagccagaagggtgagtgagatgaagacttcgaagaccagctcgctcattagagaccctccagcttctcaagaaccgattcgattacccttatctcctcacgcaattgggcgagaacactcctccccatctcggtgattgagtagtacttcctaggtcttccaccggcctcggcccagctgtcctggaggaggccgagcttcttgaggctcttcagaaggtcgtatagggccccctcgctggggacgagctttccgccgctcagctcctcaagcctcttccgtatcgcgtagccgtgtagctctccttccctttcgaggatagagaggactaaaaaggagtagaggccagagcggagctcctttctgagcttcttgagcgccttttcctcgctctttccaagcaaagcctctcaccagattaccttttcctcctcgggctcttcgatcctagctagtggcagtgtgtaggctattaaagctattgcgataacggcgaagataacttccagcccaatcgtgaacttcatcgccagtactttgttctctaggaaaaggaactgggcataggcggcaatcgtatcaacgaagccgtgcagaattgccatcatgagaaagcccttcttcccgaagccgttcctggccgcgtaagctagataaaccgttgtccctacgtggaagaggactgcgaagtagcgctccaccattgagaggagggcctgaagagcaggaacgtcgagctttcctccggcagccgctaccgcgataattggtgtaatcactatgaggaggacttccattatgccaaagccgaggccgacgaacagcgcagtgtttgggctcttgtccttgacgaggaagtacttgacgccctcctgaacgaaacctgcgacgagccccagccagagggcaactccgagtgtaaagacagttcctctggcgataacgtcggcgttgctccttatccctatcccgatgagagggagctgctgaatcgggttctggacgaccatcgccagtatgaaggccaccgcaccgaggatcagctcggcccacttctgcttcttgaagccgaggaagtaaaccgtagcccatgccagaagcccgccgaggagcgggaacggcgggaggtacatgttcactcctccttctcaacaactactgcagtcccgtaggcgtagacctctgccacgctcgaaccaacgtttgatgttgcgaagcggacgttaactacggcgttggcgccaagctccttggcgtggagcgccatcctccttaaagcttcttccctcgcctctgccatcatttgagtgtactctctgacttcgccacccttgatgttccttaggacggccattatgtccctgcctatgtgtgtggccttgactatgccgcccctcgctatgcccttgacctcgacgatgcggtagccgggaatcgtttcggtcgttacgaccataattccttcaacggtctccatacccatcaccccgatgcatcgaacttcgaggtattattgggtggaggagtataaaagctttatgcgggaacgaagaagaaaaagaagagaatcaggcctcgtcgtaatagagggtgtaagtcatcgggtcgtcgtaaacttcttgcggagcgaccgagtagaagtacttccagctccatccgccgtcgttctcgtcgaggtttatctggtagttgctggcgacgaggtaggccgcccagacgagctgggagcagtagtacttgtcgtcgtagacctccggcttgccgatgtagttgtagttgtagggcttgccgagctgctggtaggcgaactcaactgccttctgcctgacgtcgtcggttgtcttgacgcgctggagggcgacgatgtcgtacctgctgaggaactcccttagcgggctgatgatgatgcccttgcctattttggcctctataaccatccagtcgtcaatggtgtcgttgtaccaggcgactatcgcaacatgcacccagaagcctggaattatggcgttgaagaggtctgggctgtggccgtagacgaggtcgcccggtctgatgtcggtcgggtaggggtgctggtaggttctggtgtcccagatgtagtttatgaggtcgccggcgctggcgcttggaagggtcgctcccagaaggaggagcaccagggctgctattccaacctttctcattttatcacctccttattgggcagaacaatgagggcagggggagttaataagttttacttcgcagtgttagtttcgggatcgtaccttgggtttttgtactgtcccatagcaaattatggcacgtagcttttagttttggaacattatggtgcaataatagggaaactatgaatacctcatgtccgggtactgtggaactgaatagtggagatttaaaaaaggctctttcgaaactctaacgggtgagttcaatgcatgagattccattcggcgaggtactcgaaaagctccgcgggcttaacgctcacagggttctcatccagactccagagggcctcaagagggaggctcaggagttagctgacttccttgaggagaacggaattgaggcgataataagcggagacatcaactacggtgcctgtgatccggccgacagtgaggcaaagaggctcgggtgcgacgcgctgattcatctcggacactcctacatgcagctccaccttgaggttcctactatcttcgtgcctgctttcgcgaaagttgacgtagtcccagcccttgagaagaacctcgaagaaatcaggaagctcgggaaaaggatagtcctcgtcacgacggcccagcacatccacgggcttgaaagggcgaaggagttcctagaaaagaacggttttgaggtcttaatcgggaggggagattctcgcgtcagctggccggggcaggttcttgggtgcaacttcagcgctgccaaggttgacgccgatggagttctctttataggcgcgggctacttccacccgattggcgttgcgatggccgttaagaagccaacgctcgcgatcaacccctactcgggcgatgccatctggatggacacggaagcggagaggctcgtaaggaagcgctgggcgcagatagccaaggcgatggatgcgcagaggttcggcgtgataacgagcacgaaaaagggtcagctccgcctagcagaggcaaagagggttgttaaactcctccgtgagtacggaaagtacgcgaggcttttgacgatgaaccacataagctatcaggctttagagggcttcgacttcgatgcctacgtcgtcgttgcctgcccgagggttccaatagacgactacgagaactggaggaagcccgtgcttactccgagggaggttgaaattctcctcgggctgagagaagactacgagttcgacgagattctcggggcggagagaagggaagacgagcctattggtataagcttgcgccactgattcaacaccctgcttgaatttttaaaatttttcatgttttatgttcgaatgacgaaatcctaataaggtttggcgtagaaaataatcgggcggtgcacggtgtctgctaattcaaagcttcttgaaggttacctaaagtctagaaaaatcaaaaaagcttcggagcttgttctcagcaacgaagaagccctcacactgcttctgtcttttcttcacagcaaagactcaaagatgaagctggcggcggttatgacccttgaagaggccttgaagcgaatgcccgacataatgcgcctcagaatcctaaagagaacccttgacgacttgatagcgctggctctggagaacgacgatagagtttcaatctacgctctcagggcaataaaagccctcattactggactcccccttgaccctgagagctttgtgaagctcggtcatgcgatcaaagacctcgtaaaggcgcgcaggaacgaggttgtcctcctcgaaatcccgccgatcctggagagtgtccggataacttcctcggacccgagggttcacgacatcatctcccgtctcctccactccaagaacccccgtctcaaggccatggggctcaggctccttttaaacacgagcgcttacacgggagaccctgcccttttaaagaccgttttttccgaggttcgggacatgcttactgtcgaagatatccccctgatagacttcgctttgaccctgcttcttgatgtggctcactatcccctgcgtgaggagattatcgatgacgttgctggtgttctgaccctcgtgaagaaccttgcactgaaaggcaaacctggtgtaagcgacaaggcgcggctcgtggcggagaagcttgaggatgcaatatacagatactacaaaaaccggcccgaggaggcaaaacagaaaatccaggagcttctgataaacgaacgcttttacgaggccattgaccttgctctggcggtgggtgatacttacgtactcaactggctggcggaggagcttgaaaagatggagaaggagcggttgaggataaacgagagagtattgcccgggccaaaatacctttctccgccacccgaggccaaggcccagaagtccctgaaagtcccgcacatatcccagttcggcaggaagaaaacgggaagagaaaaactgacaaagcacgtagaaaaatcgggacaaacccccaagatgtcagacgaagagactaaaaaggagctggaaaaggccataacatctggaaaaacttccgaacttattgagctggccatgaaaaaacctgaggttatcttcgagctggagagaaagcttgaggaaggagacaagttcgagaagatggacgccctctgggcactttcaaagctggccgagaagctcgacgaaacgaaggcattcatcctaaaacctgcggtcgagccattgatgaaggtagcctcctctaaaaacaggtggatgcgcctcagggccgttaggacgctggccgctattgccccgaaggctccctacggcgacgaaatagtgggccagttccttgagtggtacctatcgggggacgaagaaagggttgtgccctcactagagttcttcagctactacttctcgaaaatctgggacgagaagactgcaagggtggtcctgtcccgccttttggaataccttgaaaatgacgggatgcgcttcgatgccctcctcacgcttgacgcgctggttgggtccgcacctgtggagaaggtctccctgtttgggccgttcgtggagaagctgaaggaaatcaaaaagaccgcctcgcccgacgagcagaagctcgcgataagaattctggagaacatagcttcgaagtccaaggcactggttatccactaagtctctttatgacctcgatagcgctctccttgtctttgacttttattccgagacccttctcgtcggccagcttctggagcatcgccttagtcgggaactctccgaggaaggtggtgagggcataatagacttcctcggggtttttgccctcttctatgttcgatatggccctctctatgctctcaagcatcacggagaggaaggagtgcttctccttaagtatgcggatgagctcactccccatcctcaacaccagcgaacttcttcaggagggcaatcacggtctccttgtcccttttatccggcttgaggtggagctccatcagcaggttgtagaagaacattgacgctccgaactcgccgaacagctcctccacggctctgtagaactttgcggggtcttcaccggctatctcaagggttgcgttgtatttggccctgaggtaggcctcaagggtcggtaggaagtgggggccgaactggctcaggagctccttagcagtcgcgactatgagggcgcggttgagctcggccttcatttcactcaatccttatccccccctcgccgatggtgaagtccttcagcgttgggtcgttccttgagcgcctcgccttgagcacgaggatgtgcctctttagggactccccgactctctcaggcacgtcgtaggtcaggaatatgaggttgtccacgagggtgctgaagcccgtggttgcgagcttgtaggtactccccgtgatgtatgtcagtacgaaggttacccccttctccttcgttaggagctggaggtagcggacggcctttatgaactccttctcgtccatgtggctctccatggctgatagggagtctatcacgaggacgtcaaagccctccttttcaatgaggtcctttatcagggcatagtactcgacgggagtccttccctccggaaccatcgagactatcctgaagttctcctcaaggccgagcttttccagagtgtcccttagagccgcgaggctctcctcgtaggctatgtaaagaaccttttttccggattttgataggttagacgcgaggttaagggccagtatcgtctttcctgaccccgttggacccgctatcagggttatgctgccctcataaaggccgccgccaaggagttcgtccagaccgagaattccggtcttgagcctggactttggagcttcgctctcagtgaactcaagctcgggaatggcgaggacttcgaggcctctatcggttatcacgtactcgtaggcggcgcgcttgagcggcctgccgcgcatcttgggtatcgtgaggtacctccttatcacctcgcccatcctctccagctcgagaacgatgacgccgtccacgacgaactcctcaagaccaaatccaaccctcttctcaccgtagggtatttcgtctatgaggatggccagcgcgtcgaaggcgttgaccagacgccctatgatggagtggaggaaagagcgcaggtactcttcaccaaacatctggccaaacacggtaacggagtcaaaaactattatatctggcttgaactcgacgatatcgtcgatgaggaatgcaatcataccctcaagctcgtctttggggactgtcagcatgtcgtagaacctgaagaggttgaccccctccatcttcgacaggtcgatcccgctctggagcgcgttcctgtagaactgcttcttagtctccgcaaaggagacgtaaaccccctttaaccccctcctcatgttgttgtagagaacgtggattgcgagatgtgtcttgccgcttccagggttccccgcaagaagaatcgttgaacccctcgagaacccgccgttcagggccttatcaagactgggtattccggttggtatcagttccattgatgctctccccctactgcacttttgcgctaatgatataaataccttttctcaaacagtggctgggatgaaagtgaaaatgaaaaaaaagcaccttgcaatgctcctttccaggcttaggggctttgagagtcccaaaccagaactggagcagtacaggactcccggtgatgtggccgcggagcttttgtggttagcccactccctcggcgaagttgaggggaaggtcatcgcggatctgggtgctggtaccggtgttttgggcatcggtgcagtcctgctgggcgctgaaaatgtctatgccgtcgagagggacaaagaagcgcttgaaatcgcccgtgagaacgcacgctcactcggcgtcgaagacaaaatcgagttcgtaaacgcggacgtttcggagttctcggtaaatgttgatacagtcataatgaaccctccctttggaagccaggtaaagcacgccgacaggcctttcctcatcaaggcctttgaggtgagcgacgttgtttactcgattcaccttgcaaagcccgaggtgagggcatttatagaggccttcgtcagggacaacgggttcgtcataacccaccgattgacactgcccttcgaaatcccggcccagttccacttccacaggaagaggcttgagaggatactggttgatgtttacaggtttgagcggaaaatcgaaaaagctatattgtaatcttccacaacttggtgtagtgtacagggggaacgtgtatggtccacgatgagatcatcaagacccttgaatcatgggatgctaaaagcctgatctccatggctcaggcggacgaggatatactgaccactttaattcacctgctcgatgaggagcgcttccagctcagagttctggctatcttggaagaactgctgtcccttcgaacgaacagggagatatacaaggagctctttccgcgtcttctcatcctgcttacgaaagacaggaagacagcggtaaaagccgccagggttatgaaggtgctcctcctccaagagccccccacaaagggcgatctgcggatccttctgaaggtcatgctcgatactcccgttgaacaaaacgacccccgctggctggagcttgctgatgcggccgataagttgcctcccgcggattatcgggacgttgaaaaccttgtgttagagcttatgaaaagtgataaccccggcttgaagctcgttgggcttaaatttgcaaaatccatacccggaatccgtgccgaggatgtcgtaagagaggtatcgtatctcctgaattctaataatcccgtgatatttgataaggcgcttgacctggtgctcgaaatcctcacgtctccaatccccctccgcatggaggatgtgataagatacctgtactctcccctaaaggccctcacggagtccgcccccgacgccataataacgtcaaaggccagggaggttttcagcgcgctcgtaaaaagcgcccagaggtactatgccctcaggccgaccgaggccagggagtcagcaaggcggctgagaaaggagggacttgagtacgaggcggtgttcatcgaggagttatctggacagcctcattcgcccgttccgtatggagagaagacgctcaaaatgctgacagaagaccgctccgacctccccgacttcctgaagggttgagcttttaaaccgaactcggaactttttacaggtggttctgtgccaaagctcaagctcagcgacagacagctctatgccctcatagaggccctcaagctcggcgaggaagttaagcccagccagcaggcgaagaggagggccttctcaaagtacagaatcgaaggctgggaaaactcgaagctgactggaatattctactcaatccagaggcgtctcggtttgatagacgaggttatagaagagcttgtaggagtttctccgctcatcctcgacccctggctgagggccgctttaagggtggccgttgaagtgggggtcttccgcgagccgagcgagaggaccctccagcacctcaagggggtcgcccagttcctctcaaagagaacgcacccctacgtcggctattactactacgacctcctgccgagggtcgtcaactacgtgccaaagctcgacaccgaggagaagcggctcaagtgggagtacctcttcccggagtggttcatagcgaggatgcgcgcccttctcggtgaagaggccgaagaacttctcagggcactaaacgagactcttccgacgagcataagggtgaatcgtctcaggacgagcgttgaagaggtagaaaactacctaagaaagaagggcgtccgcttcgagagaagtgagagggtaaacactgtaatcaggatcctcgaccccttcaaccctgagtggctctttaacaagggctatgccatagcacaggaggaagcctctgcggtggcctctctggttctggcaccaaagccgggggagaccgttgttgatttagctgcagcccccggaggaaaaacggcccacatggcggaactgatggaaaacaggggtaaaatctatgctttcgatgtagatagcgccagaataaagcgcatgaaagaggttctcaagagaaccggcgttgaaatagcagaggtcataaaagccgatgggagaaacgccccagagctgctcggcgaagaaatcgccgatagggttctcctcgatgccccgtgcaccagcgacggcactatagcgaagaaccccgagctgagatggcgcctcagggagaagaacatccccaaggtggttgcccttcagaaggagctcatggagagcgcttggaagctattgaaacccggaggaaggctgctctattcaacgtgctcgatgcttcccgaggagaacgaggaagttgtaaagtggttccttgagcggcatcctggggccgagcttgtgcccttaaacggaccatacgacccgggattcctcaagggaaccatgagggcctggccccacaggcacagaaccataggcttcttctacgcactgatagaaaaaaggagatccgaatctcgtatagtacgggcttgttaaataccgagcctctgaaggaactctatcccttcatccctttcccctgcaaaggccacttccccgccaacgagcaccacggtcctgtcaatgatgttatagatcggcctccacagatgggaaagtattatcatgttcgtgtcattcgcggctctctgtttgatgatccttgcaacctcggatattccactaacgtcaaggcccgaaaatggctcgtcaaggattagaagctcgttctcccccaataaagctaaaagaatgctcaggcgttttttcattccgctggagtattctgcaacgggtctgtttagggccgctgtataggggaacagtctttggataagatttctgtctgctttaatcccttttaattcctcaagaaacttgatcaaatcctttcctttccggtattttggaagagagggagggtctatgctgattccaactatccgcttaatttctgggttgttccagggattccttccaagcagggtcaccctcccactgctcggcctccaaaagcctaccagcagttttatgaggctcgactttccgcttccgtttgggccagctatgagggttaccccactgtctatctccagatttatgttcttcagaatttcgacgtttccaattctcttggaaacatcctcaaagcgcccaatcatccttctccctccagaagccgagcgacattagaattactgctagagagagcgtcaggaagtgcgcccgccagttctgggtggggaagcctacgtcgacggcccgtattgttgcgctgcctgaatacgacccgttaatgaccacaccataataacctgggtgaggcaggacaaccctgataatctcccctgtaattttgccctcctttggggttttattctcatcaaggtcgattattgtgtagctcccatcaccctggcccataaaggacatctcaactaacgcagaagtgggggagtagaaacatgatacttcagttgccccgaggggtagaacagggtaccggacatcatcggtatcagttgtaagttggaacgctatggacactgcggtgaccagaaaaattaccgctgggacgagtttccaggcgttcatctcacgtccctcctagcggaaatttctattgctgcagggatgagagctgctgaaacgactaggtatggcaagagcgttttcagctcgttttctattgcaatattttggagtgtcaaaactgggttgaaaattttcacgtatgtgaggacaaagacagtgaaaaacgataacatgcttgcgattggggcatttggaaccagcaccgagaagagtgcggacagacttactatatagaggagaaccgaagcgtaaaaggcgagtaaaacgtgaaaatgtgctgcgacaaccttgaggctattggtggatgagaaatggagtgaaaagagcaagatgtgtgtggtcaatatgagtgcgaggaaatgcacgtagacccctacgattttggagaggattattgtccggattgacacggggagtgagtacagaaagtaggaactgccgtcgtcccgttctccccttattgtcagggccgtcaaaagtgagacaccaaggctcaccgggacgtacgtgctcactgagaacataatgaaaagagaattatgaagccacgactgtggagtgtttgataaaatgagtggcacggcttttattaggttcatcttcatgaaaaaggccgagattccagcgaggattacgagaatgtaaccctttattgggtcattgctttcccatacgacgagttttagccctttcataaccaatcaccaagaaaactgttatggccagcacaaacacggcaatggcatcgaggggtatttggacgttttcaagcattccagtttcagaataaaaggcgttagtatcttcgagaaccattccgaacccgtatatatccttgcttttgattatggggtcgtctgtcctgttgaagtgctccctatccgagaaaaggactctcttgaaaccgaacagttcccagatcggtgataccggggtgtatccctcaattaagactcccgagccaggatcgtagagcgcgaagttggatgaattcccgtaaaagttcgtagttaccaagacaatcgggggtttgaaggctccaaatctcgtgtggactgtcgcattcagttccctgacttcgtttatgaaccacccgttcataatggttcttcctgctacatccaaatctgtcagaaacagcgtgttcattccgagccttttgccgttgtgtaaaacagaattgtccgtaagggacacgttgaaagttatagacctcgacaaatttgggatcgtcgcatttgagaacaggccctcagtggctccgttatcccctgcgtatagccagtaagtttggtttgtctcttcaattgctatgagaacaccatcggccctttcacataccttgactctcccagcctgaacctctgcaactctgcagggaccactttgcgtgaagttcagactcgagtacatctcgattaattccctggcctttatgaggccctcctcagcatttagtgctctctgataatgcatcgtgaggttgtaaaccctgagctgggcctttagctcgatttggtctctggcaacatccagtatctcccacctgagcacaccataggttccaaaatagagggttccgttgtgacattcgataattaccgcacgatctcccctggctgtgtactcaaaataagtccccggagtcgcccagtatggtcttgaggacaccactatactcagagttgagatggcgaggaaaaccacgaaaagagataaaacccttctcctgatatgtaatcctgcgtgttttcgcatattgcccaccgcatgctgtttctgcatgcttacactaaatttaatttagcccatataaaattttttgatattggtgttgatactgctgggttcaagaatggtaataataagttattcatgtcatccaacctgcccaacgtttggctttaaagggcaagagatctcaggactattgagtatagaaaaatgggggagttgggtcagtccttctccaccttcaccctcagctcctccgcgaaccagttgaccctctgcgggaagggtatctcgatgccttctctatccagagcctcttttattttctgaactatctgccacctcacgtcgaaccacttctcgctcggtgcccatgcctttacggctatgttgacgctgctgtccccgaggttatcaacgaagaccatcggctccggctccgccagaacatagggcatctcatcgagggtcttctttatcacctctatcgccctccccgcatcttccttgtaagctatgccgacggttatgtccactcgcctcgctggatatttctggaggttctttatgtcgctgttgaagagcttctcgtttggaatcctgacgaggagaccgtcccatgtccttatcctcgttgagagaatccttatgtcgtggacaacgcccgaataaccggcaacttcaacggggtcgcctatcttaagcggcttgtcgaagtacatgaatatgcccgagatgaagttggcaactaccgtctgggatgcaaaaccgaggacgatacccgttatccccgccgccgccactatcgtcgagagcctcccgctcagcccggctatgttaagggctatgaagaacgccagcgtgacgaaggtatagtagtagagcttcgccttgagctgaacttccggaagtttctgctttgaagaacgcattatgatgtagtcttttgactttttggcaaggacgtaggagaagtagaacacaaggaaggcagcgaggatattgctcaggctggtgccagccacggtaattgagaggaccccaagagcgtcgagagagtaaacaagagcaacgaccaccaccatgttgtgaagcgttgatgcagtatcctcgttgattatccagacgtattttgtggttctggcaagactgagcaaatacttcctgagaactttcgctattacaaggcccaccacgaggattaaaaccgcctttacaacggcgcctgtggttaaggtgaagagaagctttttccccagaacgccctgattccagagggaggtagtgttcgcagcccccatgctaccacctcatcaggaagttaggtagcgaaaggccttttccaactgcgttcaggccctcttttggcggccttcccgtgttgtttacctccgggctgtggttcttgagcgtgacaagaagtaagggatagtaggcttttgtgttctcgtagtacattgaagtcccctttattgggacgacaaccctctcaagtggcttccactcggaagaggggttggagactatgagcttcgccacccctatggattctggttcctcggtgtagaagggactaacctgatagcggcagattacaccggcctctatggcaccgtagagggcgtacttctccttcccgagaatgaagtgatcgattgttagatcgccgattttaacgtcaacctctatgggagcctcaacgaacccagctacagcgtcttttgggggtattacaagggggtccctgaactttatcatgagaagctttaccccgtagcccaaggccggggcagggagaactttcagtttttctccgttgttctttataatgacctcaaaatcgtcacgcctatatctgactatcccccccttatcctcgagaaggtggatttttttatcggctattttgatgaactgagtcctgagttcgtgctctccaaacatggaagaaaatgggaaggaaaggatataagctttagctcgccggggcgagctccacatccttcactgtgatgtggaagtacattgccccctctggcatcgccaatgaagcttcgatctccacaggaattggaagctctggaacaaccgcggtctttccgttggcggttacataaccctgcatgaggccgctccactgaattacatactcgtcgaatgtcatcccagcaaaactcacgctcccgtctttctggactgtgtagccttccccgttcgaggagaggtctgcaacgtatacgacatcgccgtagattccgcccgcgaagccgttgtaaacgtcccatatctggtcaaagaggctgttagttatctccataccgcagttcatgtcccctgatatcccgctctcaccgtaggtgtagccgcagtttggcccctgtacggtgtatttttcaaagctggatccactctcaatcagctcgaagacggagggaatccagagaacccagcccgtgtactcatctatgtttgaggtatagacctcgaagcggtatgttgagccgtcgtccatatggactatagcgtaggcaacgtagccatcatcggtctcgttgtagccgcgctccatcgtgtagtgcacttcccagttctgtgtcttgtaggtgatgtcgtaggccacacttttcagtaggtactggttgccatggatttctattggttccgaggcgtcccaggctctctgccagttttgagaactttctgagggagctgaagtttccgtctgggtctcactagctgtttcagtactcgtgccttccgaggtgggcttctcgatgctcacgcttattccaccgaactcctttgagagcttcagaccttcaatttttatctttgagtatgcctttgcccccgagctcaggtcaacgaacgtcccctcggtctcaacggggattggaagagcgggcgatatctctgcccttccttggagagtaacccctccgaaagagtagctccattcaacgttgctgaccccgaagtcattaccatcaaaggtaaccgtcccgtccgggtctatcctgtaatggtacgcaaagggtgggaagctgtaatcgtactcctctgccttcatcaggtcgcgatcctccagaccgctccagacccctgagcttaacatcgaaagccagaaggtgtagaggtagctccccatgtccccaaggacttcgttcaggtcaccttcggtgtatggaagttcgctatactgtcctatagctcctgggttgctccagtagaagtaagaatttccggattttgcctcagccacaacggcgcttcccgttgtgaggactccgaagtttggtactggctccaagaagtatttgtcgctgtcctcgcttctctccctgaccattactatgtactcaaagggcgttccgtttccagttacggggattatcttcccgtagtaggcgaacaggttaaactcacccaggtctttcttttcgccgttctcctcggcgtaaacgtgggccttcacgtagccacgctttttgataatgttgaatgtcttttcgccgtcagaagtcttgagagtgaaggtgtactcaacttctgtaatatagtacgagcccccattcaggctaatggggtggtaggcgtcccacggggtctgccaggttgccgagtaggactcggaagtacccgtagtttcttccgaggttgatccggaagaacccccggagatttcttcgtgcgaggtgtaggaagggcctccctcattatttcctccaccagtgcagccgctcgccaacactaaaccaaccagcaataaaacaaccagcgtagttgtcagggttttcatatattttccctccaagacccgcagaaaaggaaagcgggcaatacatcatgatgccttgaggtaattttgtccctcattctatttaagggtttttcaaaactccaaatctagtttgtagttattccgggtatactccgagaatattatttaatttagcgcttttcgacttgaaatatatcaaaaatattcctgatctctactccaagtctccctgatacgtggagggggacgtcaaaaacgtgctccaccctggagattatccccacgtcggccgttgcaactatgctaaaggccttgagctcgaagtccgggctttttacgagcctcacgtccccactcaggccgtatttttctatggcttcctcggtaattttcctgacgattccgctctttgggacgttcttgccgtagaagaagatcgctttggaaactttcagcctggaaagtgattcaacgacaatttcaaccacttcccgcgttctttcgttcagtctgtacttcccctggtacttcaaatccctcaccaggccgtcctcgcagagtatcgcctcgccgtcgaggacggattcgagggttatgaggacgttgaagccgtcaacggctaaaacctttccctcaagctctccgggctttagaagtttccttcttacctcggcgatccatgcatcagaaaagacgcacctcgccagaaggtatctatctctcagtgaaagcctgtagtggtctgccacgaacttcagggcgctcttcttcggatagcccctgtttaggaggtacctgaggtcccgataagcgtcggtgagggacatggaggagaatagggcagggagattaaaagcctttagacgactttctcgaatatctccccgtctgccccagtgtgtatcctgagcctgacctttccgctgaggagcgagctcttgacttttttggtcagtatctcgtccacctggaagattcccgcagggtgcttcatccagatctcgattagtattggctcttcctcatttccttccttgatctcaaccctcttgatggcgagagccgaaacggcgtggatgtccaccttgtccttcttgtggacgagcctgctcctgccctcttccatatcacagccgtcggctatcgttaccagagaaccttctatagtggtgcacggcacgtgctcgtcgtgggtatagatggcgttgagggttaaggccttgaggagcagaggatctctctcttcaaactctcttacgagcttatctattatcggctccgcgaggaaaacgctgaactggtagtggggcgttctgtgtatcatgttgccgatgtcgtggaaaagtgcgccgaaggcaacgatgaacttgctccagcggaagggctttccaagcttttcagccgtcgtctggatgctgaacttcctgattatcctgaggagctcgagggccctcctcgtcgtcagtaggacgtgaatgggcccgtggtcgttgaagttgtagacgttgaggacgatgtagttcgtcgtgtcgaagtagtagtggtactccctgaaggctctctcatacatctcaaagagttcatcatcgtccataagctcgcggatttcattcagaagtccctcttccgtgtacattttctcacctcccattcccgaaactggagaaagtttagttttaagggttttgaacggtgaagtggataaaacgagctgttaagtgggccagaataggcactggaattcaaaaactcagctcattcaagcatcccctcaagctccagaatcttcttcgagcggaggtaaacgactggaacgcccttctcgcggagtctcttcttaagccccttgtcgtttgtgcagacgattacgcgctcgttcctcaccgcgaagtcgaatatctggtcgtctataggtctctccccaaagcggccgatctcaacagtttcaaacctctccgccagcttcttcgccatcctgacggccattaagtctctcccacgagacttcctttctatgacgttcagctcatccaagacgacgtttggaaccactaccctgaacttaacatcgagaatcctgtggagctcgctgattatgtccacaccaaactggccgggaacgaggagaaagttcgtgtctggaacgaccagccactcccgccttcggctttcgctcataagaaccaccaggacttcaaaattgaaattgggaaagaaaagtcactcccttatgaagccgtagccgatgagcctccacctgctcccgacctgcctgctgatggcaaccctgtcgccgacctcggcgcagacaggtatctggagcttgagctcaacggtgtcctttccgaggccagttacgaggcccatcgttctcgccgtgccgacgttgagcaggaggacttccctcctctttatcggctcgaccctgagttcctcctcggttccgacgacgcgctcaagcaggtggacttcgagtgtaagctcgtcccagacgggcggtagctgacctggctttccgacgacgtttccggccatcaggtcgcccttggtgaggaacgggtcgagcttggttccaacgccgacgagaccgccaggataggcctcttccacgaacctaccgccggcctggagcgatgtaatctccgtcgttatcggctcgtactttatccttccgtgctcctcataggggacaccgggccttatctctatctcgtcgccgaccctcagcttgccctggactatagaaccgcctatgacaccgccaacgagcttctccggcggtgttccgggcttgttcacgtcgaagctcctaagaacgagcatcttgggcggcttgttcgggtcgcgcttgggagtcggtatgaactcctctatcgccgcaaggagcacatcaacgttagcaccgtgtagagctgaaatcgggattatcggggcgttttcagcgacggtgcccttgacgaactccttgatctcctggtagcgttccatgaccttctccctgtcaaccagttcaatcttgttgagggctatgactatgttcctgttgccgactatctgaagggccatcaggtgctccctcgtctggggcatcactccttcgttggccgctatgacgagaaccgcgccgtccatgagggacgctcctgctaacatggtcgtcatcagcgcctcgtggcctggagcgtcgatgaacgagactctcctctcgaactcagtctcgtggccgcagtagggacagaccggggaggttgagtacttgccgcagtgcgggcacttccttatctctgcatcggcaaagcctatcttgattgtaataccccttctcagctcctcgctgtgcgtatccgtccagattccagttagggcctttgtgagtgtcgtcttaccgtgatcaacgtgaccgaccataccgatgttaacctcggcctgcctaaactccttcttcttcgccatctctctcacctctaatgagtagaaaaggcgggcgcttattaaggtttcttcatggacattcctcgtgattttgacagatggcttggattttattttcggctatgttctggaggcatccttatttcctgcagggtcgtgaatgttcactcttcctcttggacaattcgcaggaatttcctggcgccgagttttatccccactttgaacactaggagcgtccagagcagtgagattatcagggttgaatacgggtaaaacccgaaaatccacacgaggacgttggatgcagggatgattgcgaagaatatagctcccattttggcttctaatgagcagtttttggaccttttgtactccatacacgccagccaagtaatggcggaaaagctgagccagaatacccctcccgtcatcaggagcgcctctggataaaaaccattacttccaaagtatccgccaaggagtgctaaaaccagctcgctaacccaaaagcgtaaaaaggtgataaaggaaacctcagtcccgtagagcttcattttcgatacctccagaggtcggacagcctggagagtgccttcacgctgtaaaattctcctggatctatgttgttctcattgagattgcttgcattgtattcacgttttttcaagagtaacggcaaaagattaaaggtcagctgggagagttcccgtccctcttccagagggagagctcaaagagactccccagaaggcccagcagaatggccgggagtaggaggaatagtagcactatcatagacccctcgccctctgttggacctgacgcaggtgcctcgaagaaagaggccacaatccttatcagtcctagaacggccgcaagaacggcggggacgatgattaaggcggtccttgctaggtcccctggtccaacttcaagcctggaggcaacgaacgccaccgcaatggagctcaacagcagacccacgagatagagtgcaagcgggagtatcccccctaagttgaccccgaggagaaatcccgtcaagaaagaaagaacgactataagggcagagacccccacttttcttgttatcgttctcatgatgaccaccagttgaaattaagtttacaaaatatgcttataaatctttccttttagtcgatataaaaactccttctttttctaagcatgactttatttagagtagcgtttttccgcgtagaatcgaccgaaagaagcccggggtgtgcatggggcaaaaatggctaagccccaaatgccgcaggagctcctgcgtcgaatcgaggcgttaaccgctttaacctttattctccaatttttccagcaggattctgcatttgttctgaagctcccagtttcttctgagggtctcctctgaggcccgagcactgagggggtatcgttttagcagctgatctgaaaaattccatatttcggtgagtccctccttaactaccttgatatcatcgtcgtctccgcgggggattatttccgcagacagctcaaggaaattgacacaggaatcggtttgtgtcattttaagcatgctcgtattaaatccgtccttatgcagagtaatcatatataatggctctctaaaggacatcattaccccctctgtgtgcttaatactaacaacggccccggtgtagttcgaggagttgatgaaattcaaggcatcttcggagaaagctctaatgaaggcggcttcttgggagatccacattgcgatatacgacctttcactcccggagtactccgttttcaaagtattcgccttgtgccaccaaaaggcggagagcactaaaaccacaatgcacacagccgagatttttttacttatattcatcttgcctcccccctttagttatatcaaatgtaaaaataaatatcagacaaaatcaaaaacaatttttcaacaactaactggtgttgttatggttgacatagtgataaactactccttcaatcaccccaacctgttggagcccctgcgatgcacttagctgataataaacaggcactttaaatttcactttaaaaggtttaacaccggaatattgctgatattcatagttcacgactatttgctttgttccaatgtactctcctgggtgcaaagcatacatgtcattgtattttatgtgaattgcattaactgggtgtgtaggcttaatgtcctcattgagccctccagagaaaactagcgaaattgctgttattgggtcaagagataaaggtccaagagcaaatccaaaggataatccaacatctcctagagtcagtgcatagtgtgatgctgaatgatgagttattggcatgattctatcgcactcctctggaacaaccattcccatttccacagcttctgggccaacttgagcgctgtctccgattaagagaggagtatcttcacttcctgattctgttccttcattgtatatctccacttccacttgatatgtcccttgaggagaaagacttgtaagggatggagggccatatactctaaattctagcgttatgaaatatttggtcttgaatatccaccatccaacttcaaaccactttgtaacgagcgttgaagatagccagctagatgataccatagctgacatagaattaacagatttgctggaatcataaagggttacgggcttccccacagtctttgttatagtttttgtcttaatgactgtagggccaagcttccagagccattcgttctcactaacgttcttgctaggaatacttaattttgagagttttgagggaatacttggattgtacatactgataaataaaagacctccatgcttgtccttaaagaataagaatatcgtcccgttcgtgtaaacgttaccctgaagtcctgtcaatttgtcgctagggttgttgttgaaaatcattacatacccattgaaaacgttagattggactaatgaaaaacgcttttttatttgaataacttcatgccttatgaacaacttcccctcgagactaccagtaccaccacggatgtcaatatgaagataagctgagactggtactgcgtccttcaggtcatcgttaaatgttggatgtggatcgtagacccctatagaatgtggcttaaaagaaaaagattttgcaatagcaggcttcaatcctgaactaactattagcaacccaattatgatggctactacggtcttccacttcactgcgttcacctctttgagattgtttgcagtacactctaatcacttcatccttataagcttttctcttcaaataagtgaaaattcatcatttctttttggagtgtaaatttaattaagagctgtgttttgctcttaaaatgaggtagaagaagcctgagtaaaagagttacatggggatgggaccaaagaattgaaagcggttgaagttcaatcgagcaaaattagggagaagctcagaagacaatcttcatgttcacctgaacgatgttcgggctgatggtgttgccgtggacggtcttctttctcctctcgcccctctccctgggcctgaagccggggccgcgtgagaggagaatcttaaccctcctcgggccgtggacgtcgggcctcatggggaagccgtccttgtcggttcctccggtgatcttgagcttggcgtcggccggaatctcctcaccgaatatctcggagaggttgaggccgagctcgctcgccggaatttcctcgcctattctccttccaataagcttgtcagcctctgggccgcttatctcaacctgcttcgcaactccgtttttcgggttcgatataaccagcttgaaggtcgccattcctcccacctccattcatcagcgggattcattggggtagcccctttcccaaccgctcttaagcggtgcatttaaaaaccttatcgtgaaatttaaataaaccaactgaagaactggagaaggtgagaaaatatggcaaaggaaaaggcgacgctccccccaactggtgcgggtctgatgaggttctttgacgaggacaccagggcagtcaaggtcagcccgaagggcgttatagccctgacgctcctgctgatcgcctttgagttcatactccacatgttcggctcaagcatattcggctaaaggaagctcgttttctttaatcccctcgcgttgagctcctcgtctattattcccctaactacttcttcaagctgtttctcgatgagtgcctccacggtgctctttatcttgtcgatgtctcccctcatgccctctaggagccttatgtagtccctcgccatctcaagctggccctcctgtcttatcagttgctccttgaggttctcgaagtcctccttcatgacttgatactttctgagctcgcgctggagctcctcaagctccctcttgaggcggtagttctcctccttaagttcctcaatcagcttttctttggcctcaagctctgaaacgaggttgttatactcctctgctatctggtgaagcctctctatctcgcggagcggcggaactttgccgtttccgagtattatgacgtgggggccgacgtttactatatcatcggggcttatcttaagcttcctctcgctggtaaaaacgctctgcccgcttccgaggttttcaacttctttcatcttcaggatgaagtagaacttgtttccttcaacttcaacgttgatgtcggtaacgtaaccgagtatctttccttcggtaagggagattacaaacttgttgatgagctggtttgccttggcatccccttccaccgtaacaccaccgcagtttttacgtccaacttctacttaacctttccgccaaggtttataaacgaccctgagttgaagaacgcgggtggtggaacgatgataatattcgcggggcgctcaaacgttggaaagagcaccctgatattccagcttactggaaaaaaggtcaagagaggaaagcgccccggcgttacccgaagaccgattgagattgagtggcgcgggaaaagggtggttgaccttccaggcttcggctttatgagcggcctgccgaaggaagtccaggagaggataaaggacgagatagtgcacttcatcgaggacaacgcagatagaatagaactggccgttcttgtcgttgacggaaaggccgctcccgaaatcatcgaacgctgggagaagcgcggcgagatacctattgatgtggagttctaccagttcctccgtgagctcgagataccgacgatcgttgctgtgaacaagatagacaaggtaaagaacgttggagcggtcataaacttcctggcagaaaagtttggcgttccctacggcgaggtcaatgagactttcgtcccgatatccgcaaaatttggaaagaacctcgacgccctcaaagccctgatggaaaagaaaaggagaaagtcatagcgtctcaaggacgagatgcgtgttcgtctcttttacgccgtccagcgacgctatctcctccaaaatttcgtccagcctgcccttatcggcttcgatgatcaggtctatgtcccctgtaacgcggtatatcttcttcaggttcagcttccttatggcctcgtagacctgctttctctttgtcggttcgattttaacgaagacaaaaacgtctcctttcttctctccaaggagttcaagggccttgtcagttagatctatgaagcccctgcccgtcctgatgtatccaagctccttaagcaccttgaggtggttgctaagggcctgcctcgttattccaagctcctttgacagctcgtcctgtgtcttttcaacggtgtgaacctctattgttctcccgtcctggtagagctttttcaaaagcttcagctggcgtggtgtcagtgtgccgccttcgttcattagtttcacctccaaattttccaaatttaacctcgataaatgtaaaacttaacctttcggtaatcactggaacagaagtcaaacttataagttttcctgttttatgccgatggccaacatttttaacctgcagggggaattcgaaaccatgaacaaggccaggtacacgcaggacgtccctgaggataggattaaactcctggagagtatagcgagctacaacaagccgtttacgctcatggtggttgggggtgtggacagcgggaagagcacgctaataacgtttcttggaaacgaactcctgtctctgggttttaaggttgccgtggtggactctgacgtcggccaaaagggtgttcttcctcccgggacgataagcctcgccattcccgaggggccttttgagagcatgagcgagcttgagggagtggcacactacttcgttggaacgactgctccctcacagtttataggtgaaatggcagttggagtaaaacgcatggtggaaatcgctagaaacgttgctgacgtagttttgatagacacgactggctttgttacgggtgttggggcggagatgaagcgtcttaaggcagagctggtaaaacctgacattattgcggttattcactcgggagaactctcaggcctggttaaggctctggaaccgtatgggggggtaatcgaactggctgtcagcgaaaccgtgaagagataccctcttgaagagaggagaaatctgcgtgccgagaaatggcggaactatttcagagactcccagcttgttgagttcagcgcatctgaggtcgccataactggcacttccctcttccacgggatacccctgaacgctgatgaaaatgaactccttgagaaggcctttgggtggctggtagtggctggctggaagaacaagggctataccgtcgttaaggcggacgttgagaagttcccgcgtgctcactcacgggagctgaaggctatcgattttgaaaagctgagcaacctgctcgtgggcctcatagacggcgagggtctgtgtatgggagttggagtcctcaagtggatcaacttcagcgagggaagacttcagattctaactcccgttagagacctctcgggagtcagagaaatccgctttgggcgcatacgggtcacggaagagggggaggagctgggcctgttgcggcgcgatgagctttagcaaacctttaaaaacttccgacagaatttagttaggtgcccctaatggaattcaaggcattcatcgagatcacaagaccccacaactgtttgcttgctgggatagtgggtgtcttaggctcgatagtggccgctgggggtcttccagagctaaaaaccgccatcctcgtgttcttggtggttttccttgggtgtgcgggcgggaacacaataaacgactactttgactacgagatagataagataaacaggcctgagagaccgcttccgaggggggccatgagtagaaaagcggctctttggtactcagtggctctctttgcaactggtattgtcctcgcttggttcataaacatctgggacttcctgctggctatcgttgcctacgtgacaatgttcatctacgcatggaagctgaaaccgatgccttttatcggaaacgtcgttgtggcctccctaactggcgctacccccctctacggtgcaatagccgttggtgagattggcctcgctgggacgctcgccctgtgtgccttcctcgttaacgtcgcgagggaggtcataaaggacatagaggacatcgagggtgacatggcaaaaggtgctaagactcttcccatacttatcgggagaaagagggctgcctacgtcggcgctctgttcgcgattctgactgtcgtagcgtctttcctgcccattaaggctggcataggccttggctatctcgccatgctccccgtggatgctgtaatactgtactctgcgttcctcatactgaggtctcaggacagggagacggctcaccgcgcccagatactcctcaaggtgagcgtgttcctggctgtggtcgctttcctgatagcttcgctcgtgaggtgatggatatggattttgagaaagaactgattagagagcttgagaaggacgaactctggactgtcataacgttcaagacgccgcacggccctggaacgacgatggaaaagctagccgaagccgttgagaaggccgggtggagaataaccttcaaagccaactggtggacggccgacataccctacggtctcgtcaggatagacatgagaaagggagatagggagaagattctcctcggaaagtggatactcggagacgagtgcaggctgataaagcttgagagcctcgaccttgaaagaggaaaggacgagtttttcaggatggtggacagcatcacttcgacgctcatacacgacccggtcatcaggacaatgagagaacagtattaaaagaaaaagatcagagcggctcgtagaagcctatctccggctcgtagatctcgccgtcggcgaggagctgagttattgcctcttctattatttcttcatcaaactctgaggacagcttcttcacgatgaacttgtgggacagggccttgcccttctccctcaggaggttcatgatggcctctttggccttttcaacctcggggttctcctcagttttctcctcctcttcttcggtctcctcctcgaacagctcttcctcaagggtcctctgctcaagcatcagggtgtacagctcgtctatcgtctggaggagctcctcgtcaacacccttgttcttggctatgactttagccttggcagttataccatacctgtcgtatatctcgaaggctatcttggccttctcggcgtgctcgaccttctccttgagggtctcaaagcggtggagtatccagaagttggggctgaccctggcaactccttcaacgagtatctgcttgtcgtcgcgccattctgcaacctttcctatgatctgaaccaaatcacccttcttcacgagccttatgaagcgcgtatcatcgcggaagccgagaacccatatcgttcccgtcccgtcgtctatctggaactttccgtaggtctcgtcgtcgcttatgacgggttcccttacgacggtggcgacaaccttgacacggtagacctttctcgcgtccttggttatgaggtagttcggctcaaagtcgccgtcgctcctgacgtagtagccctcgaggatgtccctgatgtagaccctgctcgctggtaggcgcttcttcattcctcaccacctccgaagaactcgattatcccctcaaccttcggaaggatcttctntctcaagctccctcacttcctcaagggcctcgaggtctgcatcgctgaagtcctgaacgacctcgccgaagatgtggatgccttcctcctccctgatgacccttccgattacccggactatctggccgttctccgggaggacgttctcctcgctctcgacgaggatcacacccgtgccgtcgtcgagccagaaggtgtagtccatcttgtctaccttaaaggccttcccgatgagcgagacgcgggtgtcgtcttcttttatctcggctatcttcctctcaactgcgggctttctccttctaaacctcgtttcctccatttcaaccacctcactcaaggccgtactccttcagctcgcggtagagctccctcctcacgcgctctatctcggccttttcgttaacctcgtcccagctccttgccttgaagagggtcccaaggaacttgtcctccacgacgcttcccctaaccacgatttcctttccaatgagcgggtagtactcgtcttcggcgagcctctttccggcttcctttggagtcagtccctcatctatgagcttcttgagcttctcgtcaatgacttctggctcttctccgatcagctccgccgcggagtcgccgaagagagttgtcctgatgtagcccgttgaatcgtccaggccgaagtcgaggaccgttatcttcacggggttcaccggcccgtgctcggggcatatccaagtgtccgttgacgggtcgtagtccaccctcctcctgcactcggggcaggcgtcgtaaactaacaccctgtagagcttggctatcgttccgcggacttctacgaagcgctcaccgccctgaagctcctttatctgaaccctgcgatagttatagctcctgacctcttcaagcggaggaatctcctcgacgcgcgggtcctccgggttcttgattatcctcgtcctgaagtttgcgtggagttccacgcccctcattccttccttgacagtggggtctatgaccttgattacatcgccaacgttcaggtcgtcgtagtactttgccaccattgcatcccagagaacgagcctcgcctggcccgtgctgtcgtaaatgataaggtcggccactctgcccgttgaaccgtcccttcttgtgtattccctcggcggaaactttctcttgatcctcgcgactatgttcactcccgtcatccctggaacgaggtctttgatgtacagcatctcctcttcctttccgaggcttaccccaagctcctctgcgagcattacggcggcagcgttttccgaaacaccgtgcatcttggccagttcacgtattttctcctcgatttcagacctcgaaagtcctctctcccggataatccggttgattatctcgtcctttgtcagaacttccatagcactcaccctgatagtaattggcaatatgagtatttaaagctttctccaaggacttcgttgaggctaaaggagaaaaactttgcccaaaagcagaaatgggaaaactatagggcctagaaaaacttcaatcggacggagcttcctcttctttttcttcacctttgccctcaagtttggccatcaggtcgctgtattcggcattgacgacctttttgaaggcctcctttattagaaccggatcgttctcagggaatccgtagagttcggcgaacttcttcgtcgttccaaggagctttgtcctctcgtatggttcggcgtaaaccaggcccatttcaacgagccgttttatgtgttcgtaggcctgactgccgcggagcttgattatcttgctctgctcgaccggctggaggtatgcaatcagcgccagggtcttcagctctccagttctcaggtctggcttcggcatgaggtggatgaccctctggctgtactcctgcttgacctgcatcacgtacttgtcctcgagcactctaacgacctctatcgcgctcttcctctcggcatactcggccgctataagctctatcagcttttccaggtactccagtgattttattccaagtgcctttgaaagttccttcaggctcagcggtcttccagccacaaaaagtgccgcctccacgagggccttgtcctcaagcagtcccatgctaccacctgaggagaacttcaccgtaagatttataaacccatccttggagtggttatcggcacggcggccatagcggcggggccacacccggtctcgtttcgaccccggaagttaagcccgccagcgttcccgggtgtactgccctccgagagggggcgggaaaccgggaacgccgccggccactatcatgcgcccgggtggtgtagcccggcccatcatacgggactgtcactcccgtgacccgggttcaaatcccggcccgggcgccatacagccctttgctttgcaaagcgctggcggaatgtttctaactgcttcttaaagactgtgtttgagtttgaaacttctccgggctcttctcgaactttccgtattgaggagcgtatgctcgcccggaaagcaagttcgcttgggtttgctctcaaaatatcttgctaattgtgatttcgaactttctttttagcgctcttcgagcgctatactgtggggaaatcctttgaattggccaattgaaagtaaaccctcataaaataagcctgcttaaaagcgcatactcctcttccgccagcgctttcgtaagaaagggctgatgtggtggaccgggcgggatttgaacccgcggcctccgccttgcgagggcggcgctcataccaggctgagctaccggcccacacccggtattagtgaaccctcccctgctttaaaaagttttggtcatgaaatctagggcgtccagtgagcacggggaggtacgttgttacacaaaaatgagtttattttccagtggaaggggtgagtttttaacatctggggggtcactacctcaggtggtggcatgaatcccctcgaattccatagggacaactttcctggaaatgggaagatagaggtcataccgaaggtaccagttaacagggagaccctgagcctcgcctacactcccggcgttgccgagccctcgaaggcgatagccaacggagccgatccagacgagtacaccgtcataccgaacaccgtggcggttgttaccgatggttcagcaattctgggcctcggggacatagggccggtcgccggaatgcccgtcatggagggaaaagctgttctcttcaaggcgctcgcgggcgtggacgctttcccaatcctcattaacacgaaggacgttgacgaaatcgtcaggacggttgagctgataagccccggcttcggcgggataaacctggaagacatctcagcacccagatgctttgagatagaggagaggctgagggagaggctcgacataccagtttttcacgacgaccagcacgggacggccgttgtaaccctcgccgggctgataaacgccctgaagctcgttggcaaaaagttcagcgagataaaggtcgcgatcagcggcgcgggggcggctgggatagctatagcgaagatcctccacagcgttggtgtcaaggagatagtcaccgttgacaggaaggggataatacacgagggcagggaggacctcaacccgtacaagcgcgaagtcgcggaatacaacgtccacgggatagagggcggcctgaaggaggcgatggaaggggccgatgtttttatcggagtcagcgctggcgggatagtaaccccggatatggttagggctatggccgacgatgcaatagtcttcgcgatggccaatccgattcctgaaataatgccggaagaagcgaagagggcgggagcaaggatcgttgccacgggaaggagcgacttcccgaaccagataaacaacgtgctcggctttcccggaatcttcaggggcgccctcgacgttaaagcagaagacataacgccaagcatgaagctggcggccgctgaggctatagcctcggtcgtgagcgatgacgagctgggcgaagattacataatcccctctccgctccatcctgacgttttcccgaaggaagcgagggcagtcgcggaagtggccatgaaagagggcgttgcggggagaaaggtaagcggtgagtgggtcgaggagcacacgaggaggctcagggagttctactcggctttcatcgaaccattgaacgaaaaaagaaagaccttcagcggtagagggagttccccctagagtctatcgcgacgagaagtgggaagtcctccacctcaagcacccaaactgcctccggaattccgagctcgtcgagccagtaaacgtcaactaccctcttcacgctctccgccgcaagagagccagcccctccagtgaaggcgaagtagacggccctcccaacgaaaggcccgacctccatgccgccctttcctattattcccctgacgccgagggacagaatttcgtcgaggtatcggttcatcctcgcgctcgtcgttgggcccgctgagacgactttccatccgtcctcctttcttctgaccaccgggccgcagtggtagattactgcgccttcaagctcgaagggaagcttccccttcttcgagagctccagaatcttcctgtgggccgcgtctcgtgcagtataaatccttcccgaaaggtaaacgacgtcgcccgctctaagctccaggacttcctcgcccaggggcgtcttcagcttcactgccaaacctcgaccctcccgtcggcctttatcctgaggaaggccctcctgttcgcccagcactggacaaccaaaccaactggaaagctcgcagggtgcctgtgcgcaatctcaatcttaacatcgagggttgtggtcttccctcccatgcccatagggccaaccccgagggagttaacctcggtgagcagctcttcttcaagctccgctatcctctcgtccgggtttctctcgccgacctttctcagaagggccttcttggctagggttagggagtagtcggccccaccaccgacgccgatcccgagaattatgggcggacagggctttccgccgcactccgttacccgctcaaggacgaagcgcttaacgccctcccagccttgagctggagtcagcatcgccagggcggagcagttctcgctcccgccgcccttggggagaacggctatctcaacgtcgcttccctcaaccagctcccagcggatcaccggtacgcccttccccgtgttgtcgcccgagtttctgccagtgagcacgtcaacggcgttgggcctcagcggaatctcaagggtcgccctcctcgttgcctctatgatcgccctctcaatctcgcccaggtaaggacttccaatgccagccttcacgaagaatgtcagtgtccccgtgtcctggcagacaggaactatcctggattttccaatctcaatcgccctcagaatgttgccgaggttgaatctcgctatttcactctcctcgctctcgtaggcctgcttgagtgctttaacagtgtcccctggaattgtcgtgaccgcgagtttgatggcatcaacaatagggtcaacgaggtctttcaatagacacccaccgatcaaaaatgagaaaggatacttaaaaagtttgacaaaatagagtcagcccttgagggcttccactatcttctcggcgacctcgacgcctgccctcatctgggcctcaacagtcgaggcgccgatgtgcggcgttagaacaacgttgtcaagctttgtgagcgggtggtctgctggaaggggctcctcctcgaagacatcaaggcctgctcccgcgatccagccctcctgaagggccttgacgagggcatcggtgtcaactaccgcaccccttgcggcgttgatgagtatggcggtcggcttcatgagcttgagcctctcctcgtttatgaggtggtaggttgcatcaaccagcgggacgtggagcgtaacgacgtcgctctccttcaggagcgtctcaaggtcagcaaactttcctccgacctcctttgccctttcctcgtttggatacgggtcgtagaagagaaccttcatgccgagggcgttcgctatctttgcaacctggtagcctattcttccgaagccgacgactccaatggtcttgccctcaagctctattcccatgcactgcttcttggcccagacgccttccctcatcttcctgtcggcgaaggctatcttcctcgcgacggcgaagataaggccgatggccagttcggcgacgctcctggagctagccccaggactgtttacgaccttaattcccctctcctcggcggccttgaggtcaatgttgtcgaggccaacgccagcccttcctatgaccttgagcttgggagcggcctcgatgaccttcctggttaccttcggcttgctcctaacgattatcgcatcgacgtctttaacgagttcaacgagcctgtcctcatcgggatactcctcgtaaacgacctcaaagccggcgttcttcaaaacctctatcgccttctcgtgaagcggagcggcaacgagaaccttcatccttcatcccctcctctttattgccatcagcatgacctgatccgaggcatcctcggcgcggtcggctatgtcgccgattttcgtcagaacttgattccatattaactttgcgtaggtagttatggtctcgctctcaaagaccttttctttcacgtcgtactctattttatcggcgctttcctcggcgtcctctgtctttttagccagctcaagggctttgtccacatcctcgttgagggctttgacggcctcctttaggattttaaacgtctctatggcggaatctacgaggccgagtatgtcccctttaacttccgtcgggactttgggcttggccaggatgagtgtgtgtgacgcgctctcggcggcatcggccacctgatctatcagctcgctaagcctcacgtagtcccccctgctgaccgggagaaaggccccctcgtagagcatcagctcgatgctcctcctaagtccgtccgcttcggtctcaaatcttgagacctcttcctccagctccttcgcccggttaaagtccccatcaaggtaagccccaaccagctccctgaacgcccttagagcgttctccacgacatcaaggtgcttgtcaattgcctcaaagacgtcagtctcttttccaccgaacagtgacattctcaacacccctcgctaatatttctggtcttacccctatttatcctttcctttgccttgacgagcacccagagaagttcgttcctcggcgcctccatacccacggagcgggcgtactcgactattttgccgtgtatgtagtcaacctcggtctcccgtccccgccagatgtcctggagcgtcgagttgtagttttcccgggttctctctatggtgtcccagaggagttcaagcggatgaatctcgaactcaatccccaactgctgggcgaccatacagccctccctggctatgtcaacggaaatcccctcgagatgaggatcgtccttaaggtggccgttcttgacctcaagaacggtgccgagaccgtttatcacggagtttactatcgccttcgcccatttccacccgatcgcgttttccgttacgctcgtatctattccagcctcgttgaagactgaagcaacttcatcaacaaagtcgtctcttccggtgggataccttccgatcacagttattcctttccctgcccagagaacttttccccattcaaccagcatcgccccgttggtagtcactccccccatcacgttaggagtgtacttaagcgcaagctcttcgttcccgaggccgttctgtatgcttagaacccacgtgttcctccctatgcactgccttgcacattcaagggctgtcttcgtggagtatgacttgacggccaggatgagcaggtcgggcggctcctctggagcatagattgtggcctttggcttcacggtaaactcctcggcaccaaaaacgtgaagcccgttcttgtttatggcatcaacctgctccctccgtccgattagtgtaacgtcgttcccggccctcgccagaagagcgccgaagagggacccgatactgcccgcaccgagaacgtatatcctcattctatcacctcgcgagcttcctaagatggtggagtgaatagaccagcgtaatcacccagagtgccagctttaggttctcaggaacggcgtagcttcctatgaggtagagggctgacgctggtaaaagccccgcagaggcgagaaccctgtttttcagtatgagcagcaaaacgggtattccaagcagtgcaaagtcctcgcccgtctggtaagcacccaccgctattgccagagcggtgccgccgatgaccgcgttcacgaacctctcccagaacttcacgggctgtctctcaaagggccagccgaggaggaacagaactaacccgagcagtgagaggatatacctcaggtcgtcctggagcggataagtccacgcaaaggcaactacgcttcctccaacgaagggacgggcccgctttttcacgaccgcgagcgagagcgggaggtaaacaagcccaaattcaggcctcatccaaccaccacaaccgtttaaagcatctcccttaaagacctaccgatgatatcggtcgttctggtcgagcccgaggggccggcgaacatcggcatgatagcgaggacgatgaagaacttcggcttctcaaggttagtgctcatcaacccgaacctgaccgaagagagctacgcctacgccgtccacgcgcgggacgtccttgaaaacgccctgattctggactcatttgaaaaggcccttgaactcttcgacttcacagttgggacgactggaaagcccggaaagcgctttatcccgcatagagccccgctgatgccctgggagctggttgggcttatcaaggactaccctggagaggtaggaatattctttgggcgtgagagcatcggcctgaagaacgaggagcttgatgcaatggacgtcaccctcacgatacccacgagcgaggagtaccccgttatgaacctcgcacaggccgcagcggtagtcttgtacgagctgtcgaagaagaggccagagccatacgttgaggcattaaagccagctaccagggaggagaaggaagcgcttgtaagaacctgggaaaaacttctcaatactctcgactatccaaaagatgctgagagaagggacgtctttgttaaggtctttcagagggccgttggcagggcgttcctctacgggagggaagtccacacgctcatcgggcctctaagaaaggcccttaaaaggctggaggaatgccgatgctgagcgtggagaagtttagagtcggggagagagtggtttggatcggtgtaatcttctctgggagggtgcaggggatagccttcgccttcgacaggggcacgctgatgaaaagaatccacgaccttgccgagcacctggggaagagaggagtcagcatatcactcgacgtccagccgagcgattaccctgagaaggtcttcaaagtcctgattggggagctcgacaatgccagctttctccgggaactttcctttgagggcgttacaccctttgagaagaaggtttacgagtggctcacaaaaaacgttaaaagagggagcgttataacctacggtgaccttgcaaaggcgctcaacacgtccccgcgggcagttggtggggcaatgaagagaaacccgtatccaatcgttgttccctgtcacagggtcgttgcacacgatggtattggttactacagctccgggattgaggaaaagaagttcctgctggaaattgagggggtgaaagaatggacaagctgaaagcttacctgatagggtttcttattgcagtcatagctatagcggccgggatagtctggtacggcggctggaagcttctgctccaggtgatactcgttcttggtttcctcggcctcacgctcggcctcggcttcttcactgcgctgaccctctacgccgagagctggaagtatggaaccatactggctgttttcacggccatcagcgcctacggcctctacctcagctggacttggaagaacctcgaagtggtcgcaggtataatagtcttcttcatagcggtggttgccttcggaatctggtacatcagcgagcctgaccttggacttgttgaccgcttcaagagcgcggaaagcctcgaaagagctggaaagtacaagcaggcagccagaaagtacgagaaggcaggcaactacctgaaggcagcggagatgtacataaagctcggctggcttgagagcgcggcctgggcctacgagaaggcaggagagtacgcaaaggcagctgaaatatacgagcagctctatggaaaggagaaggacacctactacctcaaggaggcccacgagtactggaagaaggccggagacatggagagggcagcgaaggccctggagcgctacgccgaggaggagccctggttctgggaggatgttgctaaactctacgaggagcttggaaacgaggagaaggccagggaagcctgggaaaaggcccttgagtattacaagggcgaagcccaggaagaaggagtattctgggaggacgtcgggaacatcgcaaggaagctcggcatggaagaccttgccagggaagcctacgggaagttcctcgagtactgcctgaaggaagctgaggaggacccgatgtggtggaagcacgtggcagaggcctacgagtacctcggcgagacagagaaggccgaagaggccagggagaagtacgaggagtacaggcagaagatcatgaaggcgaacgaagaaacttcaaagttccctgaagacgagaagagggagtgaattttctcttgtttctacctttacaatccttcaattattctgtcaatttcttcagcgtttagcttctcccccttcacgatgccccagtacttttcgatctttttcctgactgggatgattccagtttcttcggtctttttggcttcttcttcctcaagctctctccttcctttccacgtatccctttatccaccgtgagagtgcccagtagagaaccgccatcactagcagtcctagagtggccaagacaatccctctctcagtgggcacggattgtggaacggcgggcatcgtctcactgagcttgtttattccagaaagatgctttaagggttctcattttctcaacctttttaaaatcccccgacaactctacccggtggaagctatgatgggaatgaacccgagacagatgaagaagctcatgaagcagctgggcattaagatggaggagcttgagggcgtggaagaagtagttctgaggatgaagggcaaggagataatcttaaaggagccggccgttaccgtgatggtcgtccagggagagaagacctaccagataatccctggaagtgaggaagtgagagaagtccttgaaatttcagaggatgacataaagctcgtcatggagcaggcgggagttgactacgataccgcaaaaaaggcgctggaagaagcgaaaggagacctcgcggaggctatcctgaagctcactgaggggtgatcctcactccccatgctctttttggaagctctctatggccttaacgagcgggatgaggtgcatcaacgccgggccgccggccatcagaaccgccacgaggccagcttcaataagctcctccggctttgcaccggcttcgagggccttctgggtgtggaggtagatgcaccactcgcagcctgcagctattccaagggctagggctatgagctccttctccctcgttgtaagggctttgttgtcaagggtctcgcggaggaaccttgagaacgccgctatctctttagggtgctctttaccgagcttttcgaggagctcctcaatctctttcaacttaaccataacgtcgccgttctccataaatatcaccggtataagttagaacggcagatttaaagggatttccagaacaaaaggttgaaaactaaacgttcgccacgattccctgccttctcatcttgagtatgtcgtcgataacgtctatcaggcccgctattatctcgtcgtatttacccccctccgagccgtaaagctccttgagcttgtcttttatggtgaacagcacttccgtatcaagttcaaggagtttctgggcttcccttgctaggaacttgagggctactcccctagctttctcgtcgtccagaaggcggagtatcagctttgttattttttcgcgcatgtcttcgctaggaatcttctctgacagcctggccatgaactcaagtgccccctcaatgtctcttggatttcccgatttcaggagagcgtccaggagggaggcgaagaatttggaagttcctgggtacagggcgtggatatccgccagggtttttgcggcggtttccctcgcccaggcgttctttgacttgaggaactctccgagaatcggcaggatcctgtaggcgtccgtgggggtaagatgggatgttaactttgagacgatccagagggcgtccatccttctcgtgtagtcctcactctccagcattgagaggactttttccatgactgctggatccagcttggccatctctgccactatatctgcttttccagcgtcgagtagcttttcaacgtcgtcaatcgagtactgggaaacctcaagggccttggtaacgccctcgctctcgatggtttcttcggcaatgttggtggccttttcaagcttctccatgacctgggatgcaagaaggccgagcttaacgtcgccgcgaagctctttgatcttgctgactgccttcagcttgtttctcgtggaaagctccttctcccttgttaggagtctgtcgattgagtagagcgccctctccacaacgtacgggtcggggtgggagagaagatcagtgattccgtcgaacactctgttcaatatgttcgagtctgttgtcttgcttgctatctctgttagggccgtgattgccgcactctgtacgtcgcgttttttgctcgagccaatgagagagaacagccagtttatcagcttgtacgctatggcaacaacgtttgcccccagctttccgaggccctccgcggcgtattctccaagtatcggcactcccgacttgaggacatcctgaagggtctccatgaccctctcgtaatcttcctcacttaggtctcccgactcgagaagggtgtttattacctcgatggctttcagtgcgacccgctcatccttatccctggccagctcaaggattctcggaagaaccctctgaaggcgcggccttgacatcttgccttcggatatcatatcttttattatctggagcacgtttgcccttacgtgagggttgtcgtcatacaagaactcgacgagaacagcgaacactttgtcatatttttctgccagagctttaacgtcctttagcctccaggcgagaatatcttcctttaggccctctttatcgactatgaggtcactaccttttataacagccaaaagcgcgaggctcagcatagtctcccccttaattattacgttatgaactattttaaggttagcccaaaggttattaacccgcccaaacaactccagtgtgatgagggcaataggtgtcatcagaaactccagaagggagcgcctgagcagggcggagttcgaagaactgctgaggagcgctggctacgaggttctggccatagtagagcagaacagggaggagcacccacgctacaacatagggcctggcaagctcgaggagctcaaggagcttgttaaagagctcaagcccgacaaggtcatctttgcgaatagactgactccgagtcaggcctacaatctctggaaggagctcaggattgagataatggaccgctggcagctcgtccttgagatattcgagaagagggcacactcaaaggaagctaagttgcaagtagaactcgcctcgctccagtacgaaattcctctggtcaaggaggccatcaggaggataaggctcggcgacagggccggttttaagggcatgggtgagtaccagacccagcagtacctcaagcacatccgctataggatgggcaaaatacgggacgagcttgagagggttaaggcagacagagaggttaagagaaagaagagggagaacgccggcttcgtcctcgttgccctcgctgggtacaccaacgcgggaaaatcaacccttctcaacgctttagcggatgagaacgttgaagcgaagaatcaaatgttcacgacactcgacactacaacgaggcgcttcagactcggcacgaagaggattctcgcaaccgacactgttgggttcatcgacggtctgccccccttcatagttgaggccttccactccacgcttgaagagatagtgaaggccgacatagttctcctcgttctggactcaagcgagccttggggggagatacggaggaagttcctggcctctcttcaggtgctcagggagctgaaggcccttgaaaagccgatcatagttgccctcaacaagatagacctgatagaggaagctgacgccgaggagaaggtcaggctgatatgggaactcgcccgcgaaaggggaataagccttgaggacgtggtgaaaatctcggcgagggagggccgcctcgaggaactcatggatgcattaaacagggtcgtccttaaactgcccaagtacggtgctttcaggataatcgtgaaagagcctgagaaagtccctgcagtgatggcactcataaactccgttggagaagttctgtcagtcgagtacggtgaaaagacgaggatagacgcttacgtccagactggaatggtcggcgagatcaagaaaatgggggccgagatagagaggttaaaccattccggcgagggcgaagagcttgagcaggacgaaggatattccgatggcggttagcggcgtcgccacccatccgaagactatatcgacgattacctttctgtccactcccctaccagctaagaggccgacgccgacaacgccgccgactatcgactgactggagctgactggaaggccgaaaacgtttgctatgctgaccgccattgcggagccgaactgggcagcgaaggccgaaacagggccgagggccgttatcttcttcccaaccgtgtgcataactgcgtagctgaacgtcagtgccccaacggccaggcttaacgccacgaggactccggcagtttttggcgccataaagccagcaccgacgattggcccggaggcgttggccacttcgttcgttccaaagttgaaggccatataagaaccgccgagaatggcaagcgccttgtagagggcctcaattgtcgagacgctcttaatctttgagattacgtaggagtagaacttgtagaggattatcgcaaggattcccgagaggacgggagatgcgacccatgcagcggctatcttcgtcagcgtccaccagtttacgggcgcgctcgtagccagaccgacaccaatgacaccgcccactattgcctgagtagttgatactgggagtcctttgattgtcgctatcgtcacccacactccagcggaaagaagtgctatgagggccatttccattgtgaggtatccctcgggcactatccccttaccgaccgtcttcatgaccttgtagcctttgaggtaggcgccgagaagggtgaatatcgctattgtcagtgttgcctgcctgaagcttagtattcccgcaccaacggccgttcccattgcgttggccgagtcgttcgagcctatgttccaggcgatgtagaacgcaactgccacgatggctatagccagtgcgtccatgttccctcccccgatttgagttgatatatagactatatagtttccgttaaaaagttttcgagaaacaatgaccgtaaaacaccatcggcgagcttaagggttcacacttacccaaagacgcctgtcgagaaggtcttagggagataccgaaacctaaataaatgtttcggactaacccaaagtgaaaacctttaaggaggcaggaaggatgatcgagattcgttttcacggtagaggtggacagggcgcagttacggcagccaacattctagcttcagcggcctttaaggagggcaagtacgtccaggccttcccgttcttcggtgttgaaaggcgtggagcaccggttaccgccttcaccaggatcgacgacaagccgatcaggataaagacccagatctacgagcctgacgtcgttgtcgtcctcgacccgagccttctcgacaccgttgacgtcaccgctggcctcaaggacggcggaatagtcatcgtcaacaccgagaagagcaaggaggaagtccttgagaagctcaagaagaagccgggcaagcttgccctagttgacgctaccggcatagcccttgaaatacttggactcccgattaccaacacggccatcctcggtgcagttgcaaaggccacaggcctcgtcaagcttgagagcgtccaggaggccattaaggagaccttctctggggccctcggcgagaagaacgccaaggccgccgaagaggccttcaacaagaccgttgtctacgagctctgattttcctttgctttccttaaccttaggaggaggggaggagtttgaacacgctgtttggggagaaaaaggcggaggcaaagaagatagtccttacctccgtcgaccagtaccccgaggcgccaataagccttgggactacccttagcaatttcacaggtgactggaggactttcatccctgtggtcaatgaggacaagtgcgtcaagtgctatatctgctggaagttctgcccggagccagcaatatacatcaagcccgacggctacgtggcaatcgactacgactactgcaagggctgtggaatctgtgccaacgagtgcccgaccaaggccataaccatggagaaggaggagaagtgaggtggtggagatggagtacaagccgatcagaaaggtcgtgagcggaaactacgcggctgcctatgccgctttacacgcgagagtccaggtcgttgccgcttacccgatcaccccgcagacgagcatcatcgagaagatagccgagttcatagccaacggagaggcagacatccagtacgttcccgttgagagcgagcactccgctatggccgcatgtatcggcgcctcggctgctggagcaagggccttcaccgctacctctgcccagggtctagctttaatgcacgagatgctccactgggcgagcggtgcaaggctgccgatagttatggtggacgttaacagggctatggctccgccgtggagcgtttgggacgatcagaccgattcactcgcgcagagagataccggctggatgcagttctacgccgagaacaaccaggaggtttacgatggcgtccttatggccttcaaggtggccgagacggtaaacctccccgctatggtcgtcgagagcgccttcatcctgagccacacctacgacgtcgttgagatgattccgcaggagctcgttgacgagttccttccaccgaggaagccactctacgacctggccgacttcgagagggagccgttctcggtaggttctctcgcgactccagcagattactacgagttccgctacaagatacagaaggccatggaggaggccaagaaggtcatcaaggaagtgggtagggagttcggcgagcgctttggaagggactacagccagatgatagagacctacaggactgacgatgccgacttcgtcttcatgggtatgggttcgctcatgggcaccgtcaaggaggcagttgacatcctcaggcaggagggctacaaggtcggagcggcaaaggtgcgctggttcaggccgttcccgaaggaggagctctacgagcttgcaaagaacgttgacggcatagcagtcctcgacaggaactactccttcggcatggagggcatactcttcacggaggcaaagggtgcgctctacaacaccgacgcgaagccgctcatgaagaactacatcgtcggcctcggcggcagggacttcacggtgaacgacgttaggaagatagccgagaacatgaaggcagtcatagagaagggcgagcttgacgtagaggtggactggtaccaccttaagaggtgagaaagatggagattcccgagcagattaagaaaaagctcacgctcccggcggaggagcacttctatgccggtcacacggcctgccagggctgtggggctgcactcgggctgaggtacgtcctcaaggcctacggcaggaagacgatattcgcaatcccggcctgctgttcaacaattatagccggtgcttggccctacaacaccctgggtgccaacctgttccagacggcctttgagacgactggtgccgtcctgggcggcatcgaggccgctttgaaggccaggggcataaaggtcaagggcgaagacggcgtcatgatcgtcggctgggccggcgacggtggaaccgctgacattggccttcaggcactctcgggcttccttgagaggggccacgatgctctctacatcatgtacgacaacgaggcctacatgaacactggaatccagaggtcaagttcaaccccctacggagcatggacgaccaacacccccggaggaaagaggcacttcctcgagaagaggcacaagaagaaggtcatagacatcgtcatagcccacgagattccctacgcggcaactgcaagcgttgcctaccctgaggacttcataaggaagctcaaaacagctcagaagactccaggcccgagcttcatccagctcttcgccccgtgcccgaccggctggcgctcacccaccgacaagagcattgagatagccagacttgccgttcagacggcctacttcccgctcttcgagtacaaggagggcaagtacaggattaacatgccaaacccgaagaaggagccaaagccgatcgaggagttcctcaagctccagggtcgctttaagtatatgaccaaggaggacatccaagttctccaggagtgggtgctccgcgagtgggagaagctcaagaagctcgccgaggtcttcggctgagctttcgttttccctttggaaaaagtttaaagtccacatgataactcactcgaggtgatacatatggctgagagtccgtttaaggccgatattgagagggttcagaaggagtacagcgaaaagatgacgcccggagcgatagcttacatcccgggaagcagcgttatcaacaagacaggttcctggagagtttttatgcctgaattcaaccgcgacaagtgcactcgctgctacctctgctatatctactgcccggagccggctatctacctcgatgaggaaggctacccggtctttgactacgactactgtaagggctgtggcatctgcgccaacgaatgccctgttgatgccatagttatggttagggagaccaagtgaggtggtgaaagatgccgataagaaccgttatgaaggcaaacgaggctgccgcctgggcggccaagctggccaagcccaaggttatcgcggccttccccattaccccgtcaacgctcgttccagagaagattagtgaattcgtcgccaacggggagctcgacgccgagttcatcaaggtcgagagcgagcactcagctatctccgcctgtgttggtgccagcgccgctggggttagaacattcacagcaaccgcttcccagggtctcgccctgatgcacgaaatactcttcatcgccgctggaatgcgccttccgatagtcatcgccgttggaaaccgtgccctttcagccccgatcaacatctggaacgactggcaggacacgataagcgagcgcgatactggatggctccagttctacgccgagaacaaccaggaagctctggacctcatactcatagccttcaaggtagccgaggacgaaagggttctccttccggcaatggttggcttcgacgcgttcatcctgacccacacagttgagccagttgagattcccgaccaggaggtcgtcgacgagttcctcggtgagtacgagccgaagcacgcctacctcgatccggagagaccgataacccagggcaccctcgccttcccggcccactacatggaggccagatacaccgtctgggaggccaacgagaatgcaaagaaggtcatcgacgaggtcttcgccgagttcgagaagaagttcggtagaaaataccagaaggtcgaggagtacaggactgaggacgcagagataatcttcgtcaccatgggttcactcgccggaaccctcaaggagtacgttgaccacctcagggagaagggcctcaaggtcggcgctgcgaagctcaccgtttacaggccgttcccgaccgaagaagtcagggagctcgccaagaaggccaaggttctcgcgctccttgagaagaacgtcaccttcagcgttggtggagcactcttccaggacttcagcagggccctcgtcaaccttgacgagaggccgaagatcgtcgacttcatcctcggcctcggtggcagggacgtcacattcaaggacctcgacgaggcactggccatagcccagaaggccctcaacggtgaggagtttgatgaggtcaactggatcggcctgaggaaggagatactgtgaggtgaggaaaatggccgttaggaaacccccgattaccactcgcgagtactgggcgcctggtcacgccgcctgtgccggctgtggctgtgccaccgctctcaagctcgccaccaaggccttcagcgaggccatggaggagaaatacggtgatcccaatgcattcgccatagcccaggccacaggctgtatggaggtcgtttcggcagtcttcccgtacaccgcttggaaggtcccctgggtgcacgtcgctttcgagaacgccgcggccgctgccagcggtgttgaagcggcctggaagaagatcggcagaaagggtaagatacttgccatcggtggagacggtggaacagccgacatcggtctccaggccctctcgggaatgctcgagaggaggcacaacgtcgtctacctcatgtacgacaacgaggcctacatgaacactggaatccagaggtcaagttcaaccccctacggtgcttggaccaccacctcaccgcccggaaagtactcaatcggtgaggacaagcccaagaagtgggtcgccctcatcgctgctgcccaccaggttccgtacgttgccaccgcgagcatcggcaaccccttcgacttcgtcaggaagatgaagaaggccgctaaggtcgatggtccggctttcgtccaggttcactgcacctgcccgaccggatggaagagcccgctcgagaagggtgtcgagatagctcgccttgccatcgagaccggcgtctggccgctcttcgagatcgagaacggcgacttcttcaacatcaagatccagccgcccggaggaggcgccaaggtcacccgcgagggcggcaggatagtcgccatagagttcaagaagcccatcgaggagtacctcaagctccagggcaggttcaagcacctcttcaagaggcctgaggcaatcgatgagctgcgcgagcagatcaaggccatgtggaagaccctcggcgttgatgtcaccctcccgaagctggaggagtgattttcagtttctttttcttttaaaattcttgataccgtgtggcttcttgggtttcgtggaagaaaattctttccatgctcttcgggtttttgattttgggattggcgttcagcggtgcgagtgcaacggcgaacctcgtcaacagcacagtgaacggcaccgtaacggttccgtcagagttaactcctgagaagaaacccggagacgaggtacggccgcagtttggaggggctacagttgttgtggagcccttcatagaggcttttgtccccggtgtaggatgggtagtggcggttggaagcctcgtggcgttaattgccaaatacttgtactcaaagcctgtcagcgagttcactgaggggtttgtaagtgaaattccagataggattacttacaatgggcaggagctcgcaaagggcgttaagactaacttctggggaacggaagtagagattggctatgggtacgttaagaaaaaatggggcggtctaaagaaggaaaccgtcatagtgaagtcggtcataacaataaccagggatgaagtcaaggctgtagaagacttattcagcccaaaggagtacggcaaactcttggcacaagcgtacttaaacggctgggatgccaacgatgctaaaaagcttgcagaggattttgacagggagtacaggggtttcagggcacacttcaatggggcaaacctcgattgtggagtattcgaaggaggagatgttatcattgatgcaaaaggggcaaaacatattattttcaaccacatcatgaaaaagcctggaaaggatcagttcactcacatttccgccgtggatcttttaaacgaaatgggcaaggttatagaaaacccagacaaaattaaatgcggagacattatcagtggaaaacagagaatagtacttgttaaatattccccaaagctgggaaagaaagtggtggtagtgattgagagaatcaagtgggggatgtaccggatagttacggcattcccaccatcttcaaggagatattgacagggaggtgatttcaatctttgctttttcattcttcctacaggagggagataggggatttccagtgctggtgctcgaagaggggccagttttcatcagtgaagacccagtgacgctggatgaattcataagctccctaaaggcactccactcgatggatgctctcccgaaaaagctctgggacctcaagataatggctgagggtggatgggttcacctgacccttcgggatggtggggaagtacagctcacccgtgacaacttcatcgaggcaatccgaacttccatccagaacctgaaagcggttctcaataataaacccgtgaggatggggtggctcaggttcaaactaaagccgccttcgcatgaagttcttgagatgttcggtgaacctgaggatatcatggacgagtacgaagttcaagtttacgggagcacgtacgtactggaggcgtttgttaatctcgaagggtacgttgaggagcttaaacttctcaaggcgtttgtggcggatggcaaactgcctgcggaggagtggcgggtaaagtggaacgttgatggtgaaatcaagaggctgtcttccaaaggggcaaaaaagccggaggataggggccttctccgcgaactggcgggccttaaaaagctctcagcaggagcagctcctcctttcgttcgctttaccctttcaacctatgacccctttgaagttctctacgcggcagactctggaaagggagaatttttgctggcattcgtcctgtattctggcatggccgtcaaagtcccaaagaacgtcttcctgagggccatcgatgaggccatcaaagatgcagaaaaggaacttaaaagggtaaagctatctgggaggtgagctcatgtctttcccctttatcttctttggcttcgaggaggctctcaggggcgaggtgcctgcggatgctctaaccattgccatcaaacacgggatgaaaacagaaattggcataattgccaggaagggttctgagagagtggtgatagggtgcaagagaaacgcacataaaataagcgggaacagcttgcaaagtacgctgagtacgccatcaataagggaatcagaaaagattgaggtgtactatgctggaggcattgagaacataaggggctactattactacacccagtacctgccaaaggagataaagtccaggtttggtgtggacgttgaagtgcgttacctagcttcagaattcgaccgaacctgtttctttatttttcattaatgaatgaaccatggggggagtggtatgggaaccacgtattatgttgtcgccgtgtttgataggccttggggagaagtgcttgagaagctctcgcgcgagttcaagtacactcgcgaactcgcgtaccagcgggaaagacgagaagagcacctgaagttcatctttgatatgaggggatttaggctggttgcagtgggagaactgcactacgagctgaaaaccaccgaggaagattcctttgactggcttgaggtcgaaacgtactcaaaggagaacatgacgctcctccagattggagtctccaccggcaggtggctgttcgtcctaagccccgaacttatgaagtttctcggaaagctgatgagggttggggcggtcctcatctgtggttacacagacgaccacgacctcagagatgcaggctttgaagaaaacaaccagttccttttctacgaatggttggttgagactgtgaaaagaaaaaagcttgaaatcgttccttcggacgttaccatagtgaagaaagaactcttagacttggaggacggtctctacgagctgattgaaagacctggaagggaggatgaagagtatgtcctaatcaagagattggatagttataaaatacttgtttcagtaagagaaagcgatttaaccgatgaagagagctaccgagagctaattgaagacaaaacatggttcagctctcatataattgtggtggtctttaggcgaattggaaaaaaggtcgagaacgagcttctcattaagagggtagaagaatacttcaaagcgcaaacagaagagtgacagcgcttgaaacttttctgaaatgtcagcatcaggcaatccgatgaaaaatctccctccttttcccacaccggaagcctctgaagtaatagccgagagctacagcgccatagaccagctcctctactccggtgacgtccccgagcttgggaaaaatgtcctagtgaacttcggcaacgcgcacagcataaccctcgtcgggacagctttcctcgtgctcgcggcggcccttgaaaagaggaggaaaacaatggtgggccttaacgacgcggccgtgttaagctacacctctgcaggcggcgctgggctcccactgctcacaaaaccgatgctgagaagagtaaccgtggttgcaagcgagtacgccctcgattcgctcctcaacctggccggtcccgttttgctcctctaccacgaccccgacgtccagagcttcgtttacgagaccagcggcgtaccgccggggccgagcaggaagcacgtccacaagggggagggggccttcatctaccgcacccctgaaacggtaaacgtggagtggggcaggatgcccctttaacctctcaaacctcttatcagattctccataacgctcagaaacgtctcgacctcctcaacgctgttgtagacgtggaatgaagccctaacagttccctccactccgagcttcttcatcgcgggcagggcgcagtggtgaccggagcgaaccatgatgttgtgctcgtcgagtatagcggcaacgtcgtgaggatgtagcggcgggacgttgaaactgacgacgccagcgtgctttttcaggttccgcggcccgtaccatggaacctcaagctcgtcaaggccttctgttgtgcgcttcaccagcttgtgctcctgtttttcgatcttctctattccaatcctctcgatgtagcggatcccagcggcgaggcctatggcccctccaatgttcggcgttcccgcctcaaagcgctccggcggctctgccagcttgtaagagtcaaggtcaacgtcctcgattgttccccctcctatgagtggcggctcgaagacgtcgaagaactcgctgttgatgtagaggacaccaatcccagtcggtcccatcggtcccttgtggccagaaaagcccagaaagtcagcgtagagctttttcacatcaacctccatatggccagcactctgggccgcatcaacaacgaatatcgcgccctcctccttcgccatctttccaagctcctcgacctcgtggattactccaagggcgttcgagacatgctgaactgccacgagcttcgctcccttgatcttcttctcggcatcggcgaggtcgaggttcccctccaggtcgccctctatgaactccagcctgaggcccttcttcttcgcgagcctctgccaggggagtaggtctgagtggtgctcgtacggtgtggtcactatcttgtctcccttctcaaagatgtgctccagcccgagggcgacgaggttgaggctctcgctcgtgttcttggtgaagactatctcctcgaacttcgcgttgatgaagtccgccacgacctttctgctctcctcgtacttgtgagtcgctatctgcgagagcctgtggacgcccctgtggacgttggcgcggtacttcaggtagtactcatccattgcctcgatgactggctttggtgtgagtgatgtggcggtgttgtcaaagtaaatgacctcgctcgtgagcggtatgtcctttctaatatcgtccggtatcttcatgcgaccacctccaggattcccgcgcagtcatagatcgtctcggcgatctttcttccaagctcggcatcatcgaggagcttgactattatcttcccgcttggataaacactgacttcatagccctccatttcgagaatgagcatcattcctggaaggagcttcttcacgctgtgccctctctcgcggagacactgggctgtctttgtgaggtctatctttatcggcttctcccaggagtagcccgagatcacgatccccttcatcgtagtgcatggtttggcgattatcactcccaccaccgaagtggatgttggattttgggcttatacggatttcctgaacccaaggttaaggacagaaatgtgaaatgggagagtattttaatttgggctcttaacgtttcgacaagcttataaaggcccagtcgagctggaggttgatgaggacttatctgtctttcagccgcgacgcctatctggtggtcatctactccttcttcggctggttagggggcaatatagcctggttcatagtcccgttctacttcaagtccctcggaatggactattcgagtatgggcgtgcttttctcactctcaactatagcccaggccgctctgcttctcttcacagggccccttgcggtaaaaattgggtataaaagaagtataatcctagcactcatatttttcatgtctggaaggctggtgcaggtctttctgcccgagtttcacttcctggccatagcttcagtactcctagggattggcatggcactagaggggcctgctttgatgtccctcctcagcgaggaggcgagcgatgagaacagacactacctcttttccatgaactccgccatgggaacttttggtgcagcctttgggactctacttgggggttttctccccggggttctggacgggaagaacccgtacagggatacgcttgtggtctcaatagtctttgttcttattcagctggttgttatttccctagtgcacccaatacttgacagaaagggtcgggagataaaatttgagcgcgagaccgtggtaaaaatcctcaagttctcccttcccagcgcccttatcggtctaggggctggagtgactattccatacatgggcctgtggttcaacaggaagttcggcactagcttggaaagcataggcggcctcttcgcgatccagcagttcataatgggcctcggcacctttctccttccggctttggctgatagggccgggagcgttaggacgatagttgcattcaacggcagtgccacgcttctcatcgctggaatgccgttcctgccgagttttccgctcgccgcactcgtctacatcatcaggacgatcctgatgaacatcgtgaaccctatatgggacgcgttcatgatgcgcttcttctcaacggaggagcgctcgacggctttagcactcagaaacctttcgtggacggcaaccttcgggatgggtcagtacattggaggggtgatattcgaccgctccctcacgatgcctttcctgataacgggcttcctgtacggggcttcaatggcgaccttctgggccctcttctcaaaggaagaagagtagaaaatcagcatatcctcggaacggggtctccctcgggaggctccatgaacctctttccacctattcccgtttcgaggagaaccttgccacggtagtcagctattacctcaccgattatcgccgcgttcctgcccttctccgtttttctcattgcctcaagggcctcttccgcgtactccctcgcgactaccatgaccactttaccctcgtttgcgacgtcgtaagggcttattcccagcatctcgctggcagccctaacctctggccttatcgggatgtcagcttccctcacgaggattccaacgttgctcttgcgagcgatctcgttgagggcgttgctcagtccggccctcgtcgggtctttcatcgcgtggatgttctcccagccgattgtctcggcgacagctttgacaacgtcccatatcggtgcgacgtcgctcttgagctcggtctcgaaggctataccttccctgtggctcatcagggctatgccgtggtcgcctatagtcccgctgacaagcacggcgtcgccgacctttgccccggcgtcgcttaccgggtgctccgctattcctattccagcggttatgacgaacatctctattttgtcctcgacgaccttggtgtcgcccgtgactattggaacggggacttcccttgccgtctcgtccatggacttgagaaccctcttcaagacttccatatcaaggccttcgccgattatcatcgagtttgcaagtgctatcggttcagcacccataacggccagatcgttcacggttccactgaccgctaagcggcctatgtctcctccagggaagaagaggggctttaccgtgtgtccatctatcgtgaagacgatgtgcttgtctccaaagggtattgtggcaccatcgtcgagtgcatccaaccctatgcctccggcggatttcagcgtcagggtttttaggataacgtccctcaaaagctcctccattatttctccaccggctccgtgttcgagctttatcttttcacccattttaatcacccagcagacctttttccttcaggtatgagcgtgtgaagtccaaaaactcctcgccttgcgtattatggcagggtaattgatcatacttttatgccctcccgcatcacgttgaggatcagtgggtccgagctcatgtccggtttctcgatgtagggtatgagcgatatcgccactcctttttcgatggcatacttattggtcgcctctgccattctgtcgagctcctcaagcgtcggccaccgcttcacaacgacgagtacatccacgtcgctccactcttcagcctctcccctcgcgtaggagccgaagaggatgatctcgactaggttctctccgaggatttcttggagccttgccttcacgtcccgcagaattttgaggagctcttcttttggaataacgggcattatacgacctccacatccagttccgagacctctctgatgtctttgaagtcagaatcgtgggttatgagtttttcaccattggttatgcatattgccgcaatcataatgtccgcaaactgttttggtcttccaatttttctgagccttctttgaagttctacagccgttgcaatacttcttcgggttatcagaagtacctctccatgaaatttccgataggttatgacagggggatattcaaccacggtaacctctgtgatgttctctcttatttcctctcccgccttaactcgtcttatgactatgtttgtgtcaataactaccatttatcctcgccttctccttttttctcatctctgagagcatttcttcatcgttttcaagaagaacgtcatccgtggtactgtacgtctcgataaagcggagataggtttccctatccaccctcccagaggcgaaagccctctctatctcctcctcaactagtcgttctaccctcctcacgaaatcctcacttacccagtcgggtaccctaatggtgatcacctttcccatgctttcaccccaaagaactttgtcccttctcaacttaaatcttacagcatcagatcctccttcgttaggtagccctcgaggtagagcccaccgaggaatgcctgaccgacgtttaccccgttgtcccctctcggcacctcggtcgtcacgtggaagttcagcccgttcgcctccacgacctttcttatcatcttggttatgagctcgttgtacgcaactcctccgctcagggcaacgttcttcactccgaactctctggccctttcgacggcagtgtgggcaaaggccctcgcgagggcgaggtgggcggagtaggctatgtccgcgggtgatgccccctcaattgcctcaaggatactctggaacagctcttcaacccttatcaattctccttcaactggaacctcgaacttcaggtcgttcttgcccttgaaggcgaagctctcaagcttcattgccggttctccctcgtagtgcctcctgtaggcgacgttgaggaggacggcaatggcatcgaggactcttcccgttgaagaagcgtaggccgtgtttatccccttggcgagctggttgaggacgacgttgaactcgacctttccgtacttgaggctctcgacggccttcgggcagcagcggtttataacaccttcaagctcgtcaatcgaatagaccttgctcagtatccccatcagagccctcaatggatagtagctcgccaaatccccgcccgggagagggtagtagtcgatgtgggccaacctttcaacgtcctcatagcccagataaaggacttccccgccccaagtgtttccgtctgtcccgtagccaacgccgtcgagcgctatcccaatgacagaatcgaggtttttctcggccatgacgctcgctatgtgggcgtagtggtgctgaacctgaaggagttccacgtccagctcgttggccatctccattgcaagcttcgtcgtgttgtaagccggatggaggtcggctatgatgagatcaaggtttttcaccctgagaatcttcctgaagtgtgctattgcctccctcatgaactcgaggacttcaaccttcccggtgttgcctatatactggctcgggtagacctttccgttctttgccacgccgaaggcgttcatgagttcagcgccaactgccaggccgttgtattcgaaaggtatctctattggaagtggcacgaagccgcgggagcgccttatcacggccctcttcccatcaacgaaccttatcacgctgtcgtctgccctgttcagtatcttcctgttgtggaggaggaagtagtcggctacatccttaagttcctcaaaagccctctcgttgtccttgaccatcggcattcctgggtaattggccgaagtcattacataaaccggagttttgctccagtggaagaggatgtagtgggttccagcgtagggaagcatgactccaatggtgtgaagccccggcgcgaggttctcggggagcgggaagggctccttcttgcggagcgttattatcggccgtctgtaggatgtcagctcctcctcttcctctgggctcacataggcgaagctcttgacggtttcgatgtctttggccattatcgcgaagggcttctgtggcctgaaggttctcctcctcagttcagcaactacttcctcgttggctgcgtcgcacgctaaatggattcctcctattcccttgatggccactatgtagcccttgtctatgagctcggccgccttcctgagcggatcgccgtatatctcctgcccgtcgctggtgtagagcctgtatgaaggcccacagacgggacaggccgtcggctcggcgtggtagcgcctgttgagaggatcctcgtactcgctccggcagaagtcgcacatcgggaactccttcatcgtcgtgttctcgcggtcgtaggggaggtcctcaattatcgtgaacctagggccgcagtttgtacagacgatgaagggatacatgtagcgcttgttggtggggtcaaaaagctccctcagacagtcgtcacagatggctatgtcaggtgggattatggaatccccgccctttccccctttggaacttttctcaatgtaaaagcggtcgaaaccctgcggcgggatttccttcttttcaatccggtcaattctcgccagaggaggcttctttttgtagaggtcttcgatgaaggcttcgatgtcctcttccctgccctcaacgactatctcaacgcccgcatcgccgaggtttttgacgtagccccgcaggttgtgctcgtgggctattctgtagacgaacggcctgaatccgaccgcctgaacgatgccttgaacgtgaatgtgataggccttcattcctctcaccggttttgttttgaccttctgagcctttatacctttccaaaaccaaaagttgaaaaccataatggagttctgaacctttggtgcccactgtcatccttctggaccaactacgaaacgagagcctccattatgggaaacagaattcggaaaagagttccttcaagagataggctagaaatggaaaaagcggaatagcgccatcaggcaaatgtaacgctcctgtccttgagggagcgattgagcaggtcggcgtgctcgagggtgacctggtactccgctatcttctcgagcttgatctcctcgccgtcgaggagtatcttgttgacgtagaccttgccctcatcgaagccgacggtgtagacgaagagatccttcttaccgaggtactccctgatcttctcgtccttaagggcctcggcgagtcctcctgccgcgaatatcctgacgtggacgacgaatgctccaggaacgtcctgctcggcgaactgtctgagggtctctacgaatatcttcttggtctcctcgatcggggtctcaccaccgaactggaggactgtaacctgcggggcgaactccttgacgcgcttcgcgatgtccgcctccttgcctgcctctgcaaggaagtggtaggtcactcctccgctgagggttatgtatgtagcctcggttgcggtggctatgctggagcagattatgttcctgctggcaacgacggcaaccttgttgagcccgaggtctgcgagggcctttccaaccagccttccagtgagggccctaaggtagatttcctcctcaaaggtcgtcttcgccattggcaccacctccaatacccagctatgggtgtttgttctcgttattgtccaatgcagttaaggaatataacctttttggttctcctaatgaacttttgttatcctaatcacacttctttttgaacagatgacaaaatcgagtcaaaaaatagccaaatatttgacatttagacaccacaaatgtgtggaatcatcacagtgtcaatcactcggggtggtactgctctcctgctagagctccgatggtagttcgatagataaacttataacgttcgaaaacaacagagaagtgaggtgatggaaatgctgagcgagagaatgctgaaggccctgaacgaacagcttaacaaggagctgttttctgcatacttctacttgggcatagcggcctacttcaaggacatgggctttgacggcttcgccacctggatggaggcccaggccgaggaggagcttggacacgccatgaggttctacgactacatcttcgacaggggcggcaaggtagagcttgagaagattgagaagcccaagcagaccttcgagagcccgctgaaggccttcgaggctgtgtacctccacgaggttggggttactcagtcgatattcaagctcgtcgaacttgcccaggaggagaaagaccacgctacctaccagttcctccagtggttcgtcgaggagcaggtcgaggaggaggccagcacgaaggcgatagtcgacaagctcaagataatcggcgacaacccccagggcctcttcatgctcgacagggagcttggagccagggcgccgaagctcagggcactgctcactcagaagggtgagtgattcttgttttctcttcctagttttttgaggaagaacttccagagaaggaagatgatgaggtagttctcttatgaaaccgttagaatgaggcccaaaatgtacaacaaaaaataaggaagtcagaacagcacgccgtacttgtagaatatctggcatgttccttcgtaggacaccatgcacggcccgaccgggtgtctcggcgtgcaggtctttccgaagagggggcagtcagtaggtaaagccagtcccctcagcacggcgccgcagcggcagcccttttcgaggtcgggcaggttcttgggaacctctactttgtagaagctccttatctcgaaatccttccactccttcctcagctcgaggccgctcttcgggaaaacgccgagggcacgccacttggcatcgacgacctcgaagaacttgtctatcatcttctgggcgaccacgttgccttcgtacttgacagcccgctcgtactcgttgattatcctcgcctcgccttccttgtacatcctgatgagcataagaatcgccatgaggacgtcgttcggctcgaagcccgcgacgacctgagggataccatacttttctgtcaggtactcccagcccttcactccgattatcgtggagacgtgaccaggggctatgaggccctgaaagaccgtgccctgcttgaggagcacctcaacggctggcggggttagcctgtggacggagtatatcttgaagttctcaagctcctcttgggcggcgacgttgagcattccggccgctggagcggttgtcgtctcaaagcccggcgagaagtggacgacggttttgtccgggttctccttggcgattctgtaggtgtcaaagataccatagacgattctgacatcaaagccctcactctttaagtcggcgaagctccccatcggcgtcgggatcttgtacatgtcgccgaaggtcgtcaggattatctcttctccctcttcccgggctttcctcatgatgagctgcatcgccacgatgtcctcaaccggtgttatgcagaccggacagcccggcccgctgacgaccttaacgttctccggaagaagcgagcggattccgtgcctcgttaccgtgtcctcatgggttccgcagacgtgcattatcctgatttcaccgtcgagggtcttcgcttcctctctgatcttttcaacgagtttcatggccacctcacgcgagcggtaggcctcaaagggctcctccatcagaacccctccatggccttctcaacctctgcccaagcctcaaggatttccatcgccttcttctcgtccagcttctctattgcaaagcccgtatgaacgataacccagtctcctggcttggtatctggcattaggtcaagccttacctccctttttactcccccaaaatccacgacagcaacggggccgtttacctcaatgacctttccaggaactgcaaggcacatttttctcaccactttaaagttgggcaaggctcttatagggcttttttaaaccaggggtttagaaccccaaactgtgtgatgactatgattggagcagtcttggctggagggaggggcagacgcttcggcggagacaagctcctattcaggatcagcggaaagcccctcctcctctacaccattgagaggctggagcaggcggagaaaatagacgagatagtcttagttgcatcaaaggaaaacgcggagaagctcagggattttgggcacgatgttgtggttgatgagctgatgatcgggccgatgggtgggattttcaccgccctgagcctcggtgacgcctttgttgtcgccggcgatatgcccctcctcgtcccggagttcatagacttcatcgtcgagcgctttgaagaggccaaaaagccagcctgtgtgccgaggtggagcaacggctaccttgaaccgctccacgccgcttactcaagttctttcagggattttttggaggagaggataaagtccagaaactacgctataaaccaggctataagggagagcgacgcctgttacatcgagattgaaaaactgccagagggctggagggagagcttcttcaacgttaacacgagggaggatttaaggaggctcactccactgagaacccgagacaatccggatacattgagatgatttgaggatggctaaaaccagaagagcacgttggtatcaaccgctattctttctctcaaagaaagccctcctcctcgcccctatgtcctttgcgatctcttcaatgtcctcattggtaagcgtggagttctttaaaatattgttgagctcagctaattctctgagcctttcttccaccagcttggcaaagccccgtgcaattcttggatcgattcctgcagggacgtggattgttatcgtgcccatcttaaccacgatcaaaaattttcacggagttttaaatagctttcttacttgttcttcagaatctccgcaatcagctcagccagcctctccgccctttcctttatcagttcgctcggctcctcaaagaggcccgtcgaacccggctgacagccgatgaggactatatcgctccccgtttgctctttaatatagctcgccacaatcctcaaaggaagcccgtgggtcgatacagcttccccgagggttttcagcgggtcggcgattataaactccccaatctcacccccgaagtggatggcatcaacgaagaccaccaagtctggcttaaaggccgctatcttaccgacgtagctctccggcatctcgccgcagttcaggatgagaacatctggggtcttcaccagctccttcagcctctcggcgacgagaacgccgaaggcgtcgtcccccctcacgtcgtttccgatcccgcagattacgatccgcgtcttcccggagaagacatcttcaaggacgctcattattcaataccccctgaaaattcctttccggtacagctcaatgaattccagccccctgaggatgtatacctgaaagtctcctatctgaagtatcttttcgtcgttcctcatgtctaagaggtctcggtcgtacgtgattattgcatccgcgccgctttcgagggcgagctcaagccacttgttgtcgctttcatcttggcacagtgacagtctcgttttgggctcaacaaacacgctgatttcttttataagcttcaagaggatggctgggtcttggagtggattccgcggggcaaagcccgagcgaagccccattatcttcgggtgggcgaacttctgctcaacctcttcgagcgcttccttcgagatgtaattcaccacggccctattaagcatgaggttcaggataaacgcaactgcgtttttctctggattcttgctgaggagaaaagaaatccacgccgaagtctctatcacaactctaaccccatctccttcagccgcctctcgattttctgccatttttgaatgtcctcctcgatttcattgagagcctcttcaagcccctcgggggcatcctctgttgggaactctacagggattgattctggaatttgggcttctttttcagccctctcaagtttccccatgttctccttccactccatgtaaccgagaaagtcttcaacggtcacacccagggcctcagccagcttaaggactacctcagaaacgagcaatctcttgtccttgtcctccagaagtttttcaatgctgtagagtttggggttcacggcctcgctcattgcattaacgcgtactccccaggagtattttaagctttcgaaattcaaaaatgaaaatcaaagcctccccgccagctccctcaccttcccggcgaactccgtcttcattagttcttcaacgttcccaaccttcgcgtcgaggtcggggtagaatggtatgccgaccaggtagggaacgccgaactcctcggcgagcttttcaacgtccttctcgtcgtcgagctgctccgaacggagtttcatgttctcaacgacgccgatgaccttgtgtccttcctctttgaggagctcgatgagcttcctcacgacgttgagggagagctttgaaggtgtagcgacaacgagaaattcgcctctcttgaggaagcggaggacatccaagagctggtcgccaagacctggcggcatgtctatgacgaggtagtccagctcgtcccagcgggttatcgtgagcagctctattagcgcgtcgcttatctccttaccgcggagcggtgtaggtctgtcttccgtgtaatacgcgatagtcatgaactttatcccgtgaacagtcggcggaacgacacctctgtcctcctcggggaactccttgggctcaaagccgaggatgacgtggtcgctggccccgtggaagtcgaggtcgaggaggccgaccctgtagcccttctcagccaggacgagcgcgagagtagttgagacgagggactttccaacaccgccctttccgctgacgaccgggataatccgcttgactccctcaagcctcgcgtttatcgctatctccctcgggtctatcgcgttcatgaccctccctccttctcgatctttattccagcaacgtaaactccccttcccttgacgacctcgaaatcatgactgccgcacttcgggcaggcgaggaaggcgtggacgacctccgggatgaagtggatgtcctccttaatcctctcgtcgaacttatcctttacctccttgagcttccactcatagttacaattcctgcacttaaagacggcctcttcctcgacgaactctatttcagcaccctcagcaatcgtcccggcgaagagctgctccatcgcgaacttcacgatgtcctccgcaacgtcctggagttccccaagaacaaccctaaccgccttcaccctgcttgccccttccctttgagcataatctaagaccgtccttactatcgcatcggcaagcgcccactcgtgcatggtatcaccgagttcctattggagtgctaccttaaaaaggtctgagttttaaaccatccgtttacataacaaaaatcttttgaacgagtgaacggaaatcgaaatgaggggatgaaagtggcccaccatcaccacggcgagcttaagggcaggatgctgttttcctttgccctgaacatcgtgataaccctagccgaggtcatcggtggtatcctctccggaagtttggcccttctcagcgactcccttcacaacttcagcgattcaatgagtatcctcgcgagctatctcgccataaagataggcgagcgagagaagaacgagaagtacaccttcggctacaagagggctgagattttggtcgcgttcgttaattccgctgtcctggtcggtgttgcgctcttcctcctcgttgaggcttacaagcgctttaagaacccagagccaatagacggccctctgatgctcggggttgctctaatcggcctcttcgccaacttaatctcggttctcctgctccatgagcacgcccacgagagcatgaacgtccgctccgcctacctgcatctcctgagcgacacgctctcttcggttgcggtcgtgataggtggaatcgcgataatacgatgggatgttctctggatcgatcccctcgtcacggttctaatctcggtttacatcctccgcgagggctatgagatactgaaggagagcgtggaggtgctcatggaagcggctcctgatttagatcttgatgagataaaacgcgaaatcgagagtattccgggtatcaggaacgcccatcacttccacgtatggcggataggggagaaggagatccactttgagtgtcacgtcgaagttaacgacatgccgataagcgaggcgcagaggttaatagacgagattgaggagaggcttaagcgcttcgggataacccacgtgacggttcagctcgaggctgggcggtgtgaggataaaaacacgatctgcggtgagaaaggtgattagggtagcagtcccaacatccagaggtgggcttgaagacagagtgcatgagagcctcgtgagggccgagaccttcactctggtggagcttaaggatggagaagtaaaaagcgtggagattgtcgagaaccccctaccgagaggagccctacggagctggttctaaggtggccatgtttctggtcaacctgggagtgaacgtactgctgacccctatggactgcccgaagggaaaggcaatacttgaggcggggggcgttaagataattaaagtaaaatccggggaaaatgtcaaagacgttctaaaccttctcaaggattgaacacgctctcagctccgttcgtgctttcttccttctttttcgtcaggggctttgttatctcaaaggcctttcttatgatcccgtgctctatgacgagcttcttaacgtactcctttggtgggaactctatggcgttacatgggcagaggattgcacaagtgttgcaaccaaccatgcagttgtagggcctcgcaacaacgggctttccctcttcggtgtcccagtcgaagaccctccgtccacaggttataaagcaaaggccacagcgggcgcagacgctgtagtttatctttggataccactctatctcctttctatcaaccccccaccacggaataacgcttaggtccttaacctctctcccgagagcgtccctcccgatgacgggagccttaacatcggccatttcacccacctcaatttatgctgaatctttttcatttaaaatatttttcatatatctaggttatcaaccaagagttttgggcagaagtgtccagaagctttggatgtaggcaaatggaagctagagaaaactcttaaataaaatgacgacaaaataaaagcaatccaaaccgctatgggcatccagtttttcttttctgctccggtttggagcggaggtgtcgtgatgaaaagaacctaccgtgttctggtttttatgttgctagccgggttagttctcataggcggatgcgtggagaacggccccgtttccactggagggggccagacgaccgaaactggaacgagcgtaagcacttccactgatcatataggcgagacagacactgggacagcaaccacaaccgaaactgttactgaaacggtcactcaaaccaatactgagacgggcacggggacagttacggaaacgccgacgcctaatgggagtgtccagttcgacgaggatggattgccgatatgtaccggggacatggacgaggaccttggatgcgaggacaacaagaccatcgatgggagcggccccggcttctccctgccggaggatattctcctcaacataacactcgagcccgttctccagctggtgcccctaaacccgccgaacctcacttacgttggccctctgagctctatggcaagcgttccgggcgaggaggacgttatcgagtgggttggtctggccacgtcatcaacggaacccgggaaaagcgtgactctaacgctccacttcaagaacgagagcctccttagtcagtacatacatgtacccttcattatggatcccgtaacggggaagaaggtaacgtaccagccaaccgtgatgaagctgagcgagggagacgagttcgggaagcgctgggaggtccacctatacggcgggataagcggagggagcttcacgctctacgagattaccggaaacggccctctaaagctccaggaggggacggttgagcttaagggctcctctgcgagcttcatcctcgagaacttctcctcaatctttccggagaagacctacatgagcatggaggccgttccgatgagctccaagttttctaccttcacctacccatcgaaggagagcttcgtgataaaggccaaagagggcaggatagactactacactagcgccttctttggtatagaggatgagccagtgagcatcaggaccacgagcagcgagtacgacctgatttttgagttctacgtaacgaaggacacctggctgtcattcacagggtttattgatagcagtgacgacggaatggccgactggatacttgaagttagagatagaaactacgagctgaaagatgaatccgggagccttttcagagatggaaacgtgaccgttgagaacacccagctgggaaagaaggtcagtctcaggatagagaacttctacagcctcgtcccgtggaggaagttccgcttctggatgacgaactggatcgagcgctttccagcaaagagcaacctctgggttgacgcaagcgagggaatgagcatcgagaaggacgttgacctctacctggtggctgttgtggaggacgtctttgtaaaggagaacggggactatgcggagggggaaatacagctctcctcgtgggcctacggaatgacctggcccgatggaaaggcctggccgataaaccacagctccatctacaccttcggctatccaatcggccactgggtcgaggctgaggacaacagcagacttttgtatcacgacgataggatgacgggctctctcaacatgcccttcgtgaacggctatccgatcctcgcgatgcccattgacgaggcgaagaagtacaagatcatagtcctcgaaacagcgggctgggatagagacgagcccgggaaatacgtcaccaaaacggtaggctacctaacggacttcgccgtgggaatggccaccggggagattgggacggtggcggactacgcctacaaaggagctacatggatgaactggctggcgacgggccagagcggggacgagctctgggggagcgtcttcaactggcttgctggagcggaacccgacaaggtcggaaacgccgtctacgtgctccaccccaacgaggccgacttcaccaggggctaccgcgtgaccgcagaatcgagggacggcaacatgcgcgtaacctacgtcatttacgaggtggaggtgccgaggcttctcaagtacgacaacctcaaggcggagctcctagaggtggacttcacgaaggacaccgagataggggacgacgagtattactactatgcgagggcctgcgctggctttgagagcctcggtgaaactgaggggctccacaacgtcgaggttaacgttttagctccagccggctacgcctactcctatccggtgagctcaagcgagggagcgaccttcaaccgccagccctgctcggcatcaaagctcttccacaagtacctcagcgggaacgagctctccctgaagcccggcttggccatgctggagcgcgacgacgctagggttccattcctctacatggagtactcaggctgggaagaagatgccggaaagtggggcaacgacgacgacccgatgggtaacgttgggataacgatagtcttcgatgacgactacttcgactgggacgttacatcaggaatcccgagcaagtactggtcgctggactttgacgtctgcggcgtctcaggtggctgctctaaggtgtggttcgggctggacgtgaggcgcgagtgagcgtttctctttttctcaattcttccacttcaagcgtgctccctaaaatatgagagcatctgttttaacatttaaaaaactttttaaatgagcgtcatttcatttggcatgacaacaaaaatgagatgagcctaatggactacatagcagtcggcatcatagctttcatcctgagcgtcatcttctccatcggcggagtcggaagcgcgatagcaatagtcccgactatgatgtggctcggaatacccctcatggttgcgaagcccactggccttttcataaacaccctctcgatgctttcggcgacgatcaagaacatcaagcacggcaagctcgaccaccgcttcggtctcccgatactggttatggcgacgatttttgctcccctcggggcctactcgggtaagttcatacccaaagaatacgtcctctggatcttcataatatttctcctgtactctggcactatgatgatcttcttcaagccgaggccgagggacggagatgggaaccatatcgtagagggctcgctcatcggaggcttggcagggttcctcggcggactgctcggcgtcggcggagggggtataataagcccgacgctcataatgctcggctacgagccgaaaaaagtggccgcgacaacggctctggtggtcttcttctcatccctgagcggtttccttacttactggggtatgggcgctctcgactggaagctcctaggggttgtttcaatctccgctataacgggcggctggctcggaacacatctcatgcacttcaagatgagttccgagcaggtaaagaaggtaatcggcgttattctctacctgatagcgctgaagatggttctcaaggttctctgattatttttgattagggagaaaaatggaaaatcacgaggaaaagtcgtggagaagcgttttaacccccgtgaccagccacagggccagaaggaaccagtagagtgcaaaaccgaagtccaccattgcacctatcccgaggctcgtcccaacgttgtaggtcgcgctcacgtaggccccaagggggaagatgaagccccaccaggcgaggctgtaggggagatgcaggtttctgaggtagtggagcgtcatcaggatagccatgatgagccaccagagtccgaagccccagaggataaaggcaaagcccttgaaagcctctcctgcaacgggcagtaccttaacgaggtttaacagcgccactgcacccgctccaagcggtccgaggtttatccagactgccggcgccatcatgggcgggaggagctcgtgggttatgaagcgcctcatcactatggcgaagagggccagatagaggaagaagcccgcgccgaagccgaagtagttgaacgcaataaaaacctctctccacgtttgggactgcgggaggaacggcagggccgtgagaggtatcacgataagcccaaccggcggtataaaccacgctggcgttatcgtctttacatctaccccctcacccacgaaaaacaggtagggtatcaggagggcgaagaccacgacgagaatgctcccaagaatccagagcgggagggctatttccctgtggccgaccattgcgaggtttatcgccactatcgtcatcgctatcggcatcgttccgtagaagtggctcgttacggggtggtagaggtctctcttcgcctcagagggatacttgatccacctcagcagccagggtattaggagaatgaagaagaccgcggcgttcaaatacaccagtgccttcgaaaacgtgccaagcgctggaagcttcgaggagtatgccttactgaccagcgccagggctcccgttcccataacgctcgcaaaccagctcggtgcaaaatctctcacgtttattctcatttttcttcacctgaagaaatcgccatatttttgtttttaagcgttttttgaacgttcagttgagaacccctaaatggcaaaaagagcatagaaagaatggagagaacgggaatgaaaatggaaacaatcagtgctcgcagtgccctcccttttccttctcccgctctatcttctccttccagtgggggtcaacctcaagaacctgctcgatgaaggccttaactacatcgccgacctttccgtaggcgccggttacgaccgttattccaaactggttgaagtattccatcgcccgtcttcccatcccgtagacgatgacgacctcggccccgtgttcctttatgaagttgggcaaatcacctgggccgtgctcctcaaaggggacaggaaccacctcaacgccccttatctcgccgtcctccacgtccacgaaggcgaagtacctggcccttccaaagtgtccgctcatcggactttccagtccaaggtcttcatctacaggaagcgcgattctcatgctatcaccaccacaaccatgaatcatttttcaaatataagctttgtgcatatgcacgcctttactccttggacacatcggttataagaagatgccataggatcatcttaagctcacggatctgccggctttattatctcaacttctccctttatcttctccgccccgacggtgttgaagaccgtcccgtacttctcggccagctccttaacgcgcataatctttttctcgtcctcgttagtgaagacggtgatcttgtaggttatctccttcagctggggctcgtcaagcccgcgccagcccctgacctctacctcaaagcccttcacgtcgagacgcatcttcttgatcagcctgccccagttgacagtcagacagccacctatagcggccaagaggtattccgtcgggtttggtcctttgttgtggccgtccgtgttcgtgtctatgtgaaaggtaaactccctcaccttcgcttcacttccgacgttgccgtcccacttcaggtgtgctgaatactcaaggcgcttcatgaaatcaccattgaaagttatccccgccatttttaaaacccagtacaaaccaaaggttaagaacactaattttccaaaaagcatttaaatcgtgttactatattgggtttcggtgacacaatgaagaacacgcccgatgatcgtatgggaattgtgctccagtacatagggaaactccgagtcggagtgttccaccccttgaaaactcaccagttctatccccggaaaatcccaggggggataaccaaactcgaatggagggcctgaaatgaagagattgatggcagttcttctggtgctgttcgtagttcttgcaggcggttgcgtgggtacttcctcaaatggggcagagaaagcctcacagcagtacataaccgtaacagactccctgggcagaatcgtccaggttcctgtgaatgtccagaaggtcgttgccatcgggccaggagcccttaggctcatcgtctacctcaacgcgagcaatatggtcgtgggagtggaggacttcgagaagaagtactcctacggaaggccctacatcatcgctcacccggagctgaagaacctcccgagcataggcccgggaggccctggaaagcttcccaacctcgaagcactcgccaacgtctcccctgacgtgataatagcggtattcataagcaaggagcaggccgatgagattcaggagaagactgggattccagtcgttgtcctcagctacggtgcgaggggaggaatgaaaggtttcaacgatcctcagctcatagaatcaatacagctggcaggtaaaatactgcacagggaaaagcgggcaaaggaactcgttgacttcttaaactccgtccaggaagacctgcagaagaggatgaagggtgagaagagcccaagggtttacgtaggtgggataggttacaagggtgcccacggaatagagagcacctacggcgactacgcccccttcgaagtgctgaacctcaccaacatagcctcttccctcggccccggctggaagaccgttgacaaggagtggctcctcaaggaagacccggactacctcttcatcgatgaaggcggcttgaaaataatcctcgacgactataggaagaacccggacttctacagggcactgagcgccctaaaagagggcagggtgtacggactgctcccgttcaacttctacaacaccaacctcggaacggctatagcagatacctactacattggaaaagttctctacccggagcgcttcagcgacgttgatccagtgaagaaagcggacgaaatctatgcattcctcgttggaaagccggtctatgaaaccctcaaggagcagttcggcggcttcggaaagatagacttcgagaacggaaccgttaagtactcactgccaacttcaccgtgatgcccatggactacgagggatacatcgccagaaagttcctcatcggcctctttttacttcttctcacactcctggttagcctgtactctctgtcccacggttcgtactcactgtccacgggtgatgtcataaacacgctccttggaagggagggcggaaacgcttacctcatagtctggaaggttcgcctgccgcgtatagttgccgcccttttcgttggtgcttccctcgccgtctccggcgcggtaatgcaggggttcttgagaaaccccctggcgagtccgttcacaatgggagtctcccacggggctatgttcggtgcctctctcgccataatcctcggtgccggctatgcggagagcaccggtagaatctcgctcgacaacccgtatgcagtggtcatcttcgcgttcgctggtgccatggctgctgtgggcgtgattcttttgctggcaaagctcaagggactttccccagaggcaataatcctcgccggagtagctatgagctccctctttgtggcactaacgaccttcatccagtactttgcggatgaactccagctagcggcgatggtctactggagcttcggcgaccttggaagagcaacctggagggaggacgttatactgctcctggtctttgcaccggtgtttgcatacttcatcgtgaagaggtgggatttgaacgcctccgcagttggagaggaagtggccaaaagcgttggtgtggaggtagagagggttcgcctcgtatccactttccttgccgccctgataactgccatcagtgtggccttcgttggggttatagggtttgttggcttgatagctccacatcttatcaggctcatagcggggggagactacaggtttctgatacccctctcggccctcgcaggtgctttactcctcgtcacggcggacaccgttgcgaggcttgtacttgcccccactgtactccccgttgggatagtgacatcattccttggagctccggccttcatatacctcctcgtcaggatggagggacgaagatgaccgctgttgaggccagaaaccttcactactcctacaacggcactgaagtcctgaagggcatcaacctgaagattgaggatggggagtttgtcgcaatactcggcccgaacggcgccgggaagagcaccctgctgaagtgtctctctggaatcctcaggtgcaatggtgtttatatctcaggacggccaattggggagtactctaggaacgaactagcgaggcttgtggcctatatcccgcagagaacggaaccgggttttatgaccgtgttcgatacagttctgcttggtagaagaccctacatgggattgaggccctcgaagagggatgtagaggtcgttaaaaacgcactgaaaaagctggggatagatcacctcgccttaaggcccaccagggggctgagcggtggcgaacttcaaaaggtcggcatagcgcgcgccctggcacaggagcctgagatttttatgtttgacgagccaacgaacaaccttgacatcaggagccagcttgaggtcatgaagcttgcgcgcgagctctcttctgggggcaaaaccgttatcatggtcatgcacgagatcaacctcgccatccgctttgcggagaggttcgtcttcatttcagagggacgggttgttgcggacggtggccgtgagatcctgaagccttcattgttcagggaggtttacggaacggaggtcgaaatcggggaggtgcacgggattccggttgttgtccccctctaattactcaaatgtgggcagtactgtcaaatttctggacaaaccttttaagcccttgggaaaacctaagtcggaggtgttgcagatgacgatcaaagctcctaccctcaacataggcggacttggcgccgatccgctcacccagaggattcaggagaagcagaagaagtggaagtacaaaatagccgtcctgagcggtaagggcggcgttggtaagagcacagtcgcggtcaacctcgctgccgccctcgcgaagatgggctatttcgttggaatcctagatgccgacatacacgggccgaacgtcgccaagatgctcggcgttgacaaggccgacgttcttgccgagagaatggacgatggaaggtttgagatgatccccccaatggcggacttcatgggtcaggtaactcctatcaaggtcatgagcatgggcttcctcgttccagaggatcagcctgtcatatggcgcggttccctcgtgaccaaggccataaaacagctccttggagatacaaagtggggagaacttgacttcatgataatcgacttcccgcctggaaccggcgacgaaatcctcaccgttacccagagcatcccccttgatgcggctgtgatagtcacaactccacaggaggtagccctactcgacactgggaaggccgtcaacatgatgaagaagatggaggttccctacatagcggtcgtcgagaacatgagctacctcatctgcccgcattgcggcaacgagatagacctcttcggcaggggtggtggaagaaagctcgccgaaaaggaaggcgttgagttcctcggtgaaataccgatagacctcaaggccagggaggccagcgatgcgggaatcccgatagtcctctatggagacaccatggcggcaaaggcattcatggagctggctgagaagctcgttaagaagcttgaggaaatgaagggcgagaaagctgaggagtaaaccctttaagttttacatttcaaccttttcagcgcggctcaggccggcgggagccgaagcgatggggccgcgctggaccaggctgcattaactttttaacacctttttcataccaattgcgggaggcagatgaagaaggctcttcctgctctgtttctcatactgatgctggcgggctccgtttcagccgctgaggttagttatcgccctaacaaagatgcgttcgtgaagtttcttgattcgaatctgacgtatcaagttgttccgggcaacgacccatggtcgaggggatgggctgtttacgtcgatgaaaagctctccgctgtcaaaacacacggaaacgataccttcgttctcgttgggaacgtttatacaaacgacctgattgccaagatctggaacgagactggccttgatccctctgcttctctagagccttcaatcattgtgctgaatggcactgtcctgattaccggaagctctgagaacctttatctgacatacgagccgtttgttgatataaaagagaacactgtaaaaattgcggttgttactctgagcattatcgtttatgctgttatcctgatgttagttttaagaagggacgggagctacgctggaagcaccttcctgatgggtgctcttcttttaggggaatgggttctactcgaaccaatccctgcacacctgatttcaaaaacactctacctttctctggcacgtttgaacggcgcccctatcaatgatgtgcccatcgtaataatttcccacactctggaagttcttccccccgatgagaggctgttctgggcagtgaggtggcttttgatctttgtccttctcggcgtaaccgcttacactgcccatagaagggaacgcagtctgggtattgtggcgttctttttggtgctctccgcgccctcgtttagggagtggctcctgacttcgaacgatatattgggattgctggccttcgcggttgtggtggcaattgtgtgcagttcaaacttcgccccctcttcttcgggggtcttttcgatgcttttgatggcgctgttcacggtggtgggaacggccttcaatccctgtctggctctcttgccctttgtctttgttatagtattcccgggtagggtcagcagaaacgttccttacttactgctatcatcaattggagccctctgggtatattacaatcttggaaaatcctggatatcgccttggtatcctggagcattccatactgagattataactgaaaatatcgcgaaagaagcgttgctccagctggtagttctggtgtatgttggggctaagattattgggggaagaaaagatatcaaaatccggaaaaagggtccaacggtgttcgttggagtcgttactgggatactactgcttttaacaccctttaaatccgagcttcttccttatgcactcttctctctatctgtgcttgccgtcaggctgatcagggcttctcctcaaatttgattgccccgaagacggctccgggcaagtgtggtcctatggcctttatgattccaggagcctgggtgcccttcttcagaaccaggagggtctccataaggccgagttcctccagcctcttaacgtcccttccgtgacccgtccttatgagtgcttcctccactttttcactgatggttccgacaacaaagagcttgtcgaatccgtcacttatccatgacttgatgcgcttcaactgctcctcggtgaaggccagctcgacttccctagctccaaactcgaccctagtgacttccacttccactggaaggttatcaacccatccaaacctgcgtatcatccccctgaccggaatgtctccgaaggtctttttgaggtagtaaaggggcaacaaagcgtcctttggggccggtctgaacacgcctatgtccacgtaggccccgtagccgacctttccaaggtcgatgaagcgtccgcggtagctctggccttcttccacgttcttcagactgtaggggacttcgccgaactcctctctgacgaggttggcacttacctcttcgtcttcccctgagagggttaccttcacccagttcttcttaacagctgagagcttccactcaacatcaagctcgccgagaagcgagcggagctttttgttcagcttttcaaagccgcttctgtctccataaaccttctccagaataacaacttcccgcatcttcaccatccccgaagttcattaagaggccattcactcagaccttgacttctttttctttgaggtctttctgggcttcttcttgaggcccagctcgatctcaagctcctcaattcgtcttttgagttcctctatgatgtgtgtgttgtcgtactgcatgagcatcttgccgcagatcgggcactggaactcgtactccattgcctcatcaaaggtgagctttggatgcccctcagtgccgcaccagtagtatatctcactggtttcctcctccagcatctccttgagcttcttaagctccgccatttttctggaacgaattatttcggggagctttttggtctcaaggcgccagtagtagtaataccatccggtttcagggtccctgattctcttgaagtcggccagcccctcgtcgttgagcatgtagagtattctccttaccgtgttcacccttatgcctgttgcctctgccagctcttcatcggtggcctctttcattttttcgagagccttgactacctcaacggcctcttctccacctatctcctgtgcgatttcgaggagctccttgttcttgcgctttgccactgacagcagcctcccagagtttgattttattctgagtggatacaatcgccttaacgggtaaactccaatagaaaaatagggcccaatgatatatatacctttcccgtctccatagaaactataatgaacagaaaaggacatcaatcattaaagtattcgtccagaagctccttggcagagggcttgtaaagctcaagaacctcgattttttctatcacgttcccctcgcggagcttcagttttaccttgcccccgtaaacctgaaggtcatcgagcattccatagatggcatcttcagcctccagagggcttttaaacttcatgatgtactccccatcctcagtgatgagcttgacccagtactcgtttttccttttgaaaggacgggtaatctttggcttgaagttgtcgattacgacttccaaaggactcacctccagcctaagccccttctgctaccatatcattaaggcgatgctcttttaagggttttctatttcgctcttaatgagtcttgtacctgcctatttaaaagttatgaaagcaacttttttagatatcggattgagtttagtcgggtagagatatgaaggccgttgaagttaacaacctcagaaagagctaccccaagaagattcccctccccttccgaaaggttgaatgggtcgaggcagttaagggtataagcttcgaggtcaagaggggagagctcttcgggttgctcggcccaaacggtgcgggaaaaacgactacgataaaaatgctgacgacgctcctcgaaccgagcggggggagcgccaaaatactcggactcgacctcataagagatgcaagggaaattcggaagaggataaaccttgtggccgagggcgagaggacgctctactggaggctctccgcctatgagaacctcaagtactttgcgaggatttattacgtcccgaaatccgagatggagaagagaattgaagagcttctgaagctggtcgggctctgggagagacggaacgacctcgtgatgagctattcacgcggtatgaagcagaggcttgcaatagcgaaggccctgataaacgaccccgaggtgcttttcctcgatgagcccacacttggtctggatgttcagagcgctctctttgtcagggacttcgtgaagaggctcgtaaaggaagagggaaagaccgtgctcctgaccactcactacatggtcgaggcagaggagctctgcgacaggatagccatcatagaccacggaaggatcatagcgcttgatactcccgagggcctgaaaaagctcgtgaaagacgaggaaacagttgaaatcgcggtgagggaattcaatccagcacttctcgaaaaatccccctggaagcttgcagtcgtccagagtactgaagagagaacagtgcttagggggagcgttgacgaggaagaccttccaaagctggtcgagtggctcgtcaaaaatcaggttaaagtggtctccgtcgagagaaaggagccgacgcttgaggatgttttcataaagctgaccggaagggggctgagggattgatatcggcggtgatcgaaaaggagttcaggatgttcttccgctatcccctgagggttataagttccgtcctcgtcggcatagtctttctcctccagttcgtttacttcgggcaggcggtcctcggcgggaggtactcggcgcttctggaggcctcaacagggcttggggattacccgacgtacgcgctcatcggctataccctctggtgggtctcttcatcgcccatagaggcctatgtatggggagttcggagggaactccaaagaggtacgttcgagacgaacgtcctttccccttcgagcctgacggccatccttctcggcctggccctcagctggatgctcatggattcaatactcatgctcatcgtttttctctttggcgtctttctgtttaaaatccctctcagcgctgtgattatcctcaaatccctcccggtgattttcctctcccttctggcatttcttggttttgggttcctctttgcgggcctcgtaatgcttctgaaaaatataggcccgttcgcccagctctttgagttcggaatgctgttcttctctggcgtcttcttcccgctcaccctcatgccgaactgggtgcggagtttcgcggagttcattccccttactcatgcaatctcaactgtcagaaccatattctctggaggtggatattcacaggcctccagctctattgggtggctggtcattcttgccccactgtactggctgattggttatctcctgttccggtgggcagagaggttaaccagggtgataggttatggaggttactgaactcagggcgctctggggcgtcgcagtgaagagctggagggtgttcctcagctataaggtctggttcatcagcgacatagggatgggcttcctcttcgttggacaggccctcctcatagggcttggacttaccggaaagaggaactccgaggccctccagaggctcaccgggtattccgactacgtggcattcgcggttctaggtctgttggttctcggctttggtctgaccttcctcagcggctttgtgtggagcgtcgttgacgagctgtacgcgggaacactggagtactcctttgccgccccgatgaagaggataacgttcttcctcggcaacgtcctggttaggctcttcctctcgctcctttacatggcgatctatctcccagtcttcaagctgctcttcgggctgggaattgacctcctggtagtccttaaagccctcccggttctgctcctcggaagccttgggatggtcgggctcggtatggcggccgctggtatcgtgctctaccttaaagacccggggcccttcataagcatcctggagatgctcgtctttgccctcagcggcgcaatgtaccccctctcagttcttcccagggccctccaaactctggcgaaggccctcccctatgcgccgacaacggaggccctgagaaaagtcgtggtgtacggctacggctcaagcacgggcgaactttggtaccttgccgtgatatcccttctgtattccgttctggggtatctcatctataaatggagtgaaaagcaggcgagaatcgttggcctcaagtcctattgaagggcagatccaggccgacttcccttgctatcctctttacctcctcaagcgggactatggcgctcctcgccccaaccttctggacggtcaggtacgcgagcagcattccaagcttggcggagtcgaggagggaccagccgttgaggacgccgtagataacgcccgcatcgaaggaatctccagcgcccgtcgaatcaactaccttcgcactcagacccctgacctcgaagacgttatccccctccctgacgagcgcaccaccgccgttcagcgtgaccacgaggttcttggccctgcaaagactcgggtcaaggctcccgtacttgcgcctgtactcgtcctcgttcatcatcaggtagtccaccttgctctcaagctcccgcgggagcggcgcctcacctatatccagggagacctttattcccctctggctcgcgaaattaactgcttcctctataagctccggcgggttggatgagaggtggagaaacttggccctcgatgcgtattcgggcttgaacctcctcctgaggtttgccccggggtacttgactattctcttgtcgtcccctgcaaccatcgcaactgccacgcccgagggctcttcaacgacgtctattccgccggtatcaaccccgatgccctggaagtatttgatgtgcatctctccaacgtcgtcgtttcccaccgcccctatgtagcccgttttaaggccgaagtgggcgagccagcttatcgtgttggctgctgcaccgcccagtccaaagtgggcacctctggcattgatcttctcatggaactctggaaagcgttccagcgtgaatattatgtcgtagttcaggttgccgatgccgatgacgtccagcttcactttcaccaccaaaattgggaattgcactgggaggttataacacttggggaaaagatttaaatatccattcctacccacatatgagtaagaggtgaacaaagatgatgctcatacttgaggcctattttaagaactatcccgcgaggagaaaggtcgcggagttcctgtttgagaacggactgagcgtgaagaacggtaaaatctacataaagaacgtcgaggtaccgataagcgagctggcaagggcaatcggcgtaaacaggaagataatctaccatacgatagagtacatagaaaagacctacccctttaagcttgtgtttgagagactgaacccgctcccgagcctgatagacgtcgccccccttatgggctgggaagtcctggagatagacgttgagaaggatcagtaccagatggcgttttcagacgtgctcaggctgctcgccgaagacaacacccccatcatggaggtctttggaaggaacctcaggggaagaaacaagcaagatttacatagtcatagatggaacgctctcaaccgagacatttggcaaaataaagacaatcagaggcttcaagaggctcatactccacacacctgaaaaggataaggagaagttcgtctgcaactactgtgaggtcaagtactgcccgaagagggtgctgcttgagagtctcacccaacgaccttaaagccctccagcccctcgggttcttcccattttacctcgacccttgtgaccctggccagcggcggcccctgatgcgcccatcctattaaagcctccaccctttcaggatcgccctcgataacggcttccaccgtcccatccggcaggtttctgacccatccgtggactccaagctttctggcttcccggctcatgctccagcgaaaaccaaccccctgaacccttccgtatattctaaggtgtgcccttacccgcttcatcacacatcccgttctaaaatctcccgcaagggatttaagctttgcccgatatctatcattgggtgggcatatggaggcgatcatcgtttacacgacgtttccagactgggagagcgccagaaaggtcaccagggagctcctggaaagaaagctgatagtctgcgcaaacctcagggagcacgaggctatgtactggtgggagggcaagatcgaggaagggaaggaagtcggcgccatctacaagaccgaagttagcaagtggaaggagctgagggagacgataaaggagctccacccctacgatgttccgatgatagctaggattgatctcgacaagctcaaccgcgagtactccgagtggatggcgagggtgctcttcggatgatacgaaaggttaagccccagatcagagtactcggcttcgacgacggcaccttctccttttcttcaaagctgaagcatgaaaagacgatactgattggagtcgtgatgaaaggctcccttgaggtcgttggcgttctctcgcgctggataaccgttgatggaagggacgttaccgacgctatgataaactccgtgaactcatcacggttcaaggacttgagggttatccttctcaaagggataacctacgccgggttcaacgtcgttgaccttgagaggctccacaacgagacgggtctccccgtggtggtagtcgttaggaagaaaccggatatcctggcaatggaagatgccctgagaaagcacttccgtgatgcggaagagagaatagccctgctcagaaagactccccctcttgttgaacttgtaccggataagctctacttccaaactgttggtttagacgagaaaacggccgctgaggtgattaaggtcacgacgagaacgggttttatccctgaacccttaaggttggctcacatgatagcaagcgccgtgatgacgggcgagagcaaacgggagtaggtttataaaggactgaaaaaagttaaagccgaccgatgatggcaacagggtagctaccgaagttgatgtggaagccgttccagtctgaggtctcattcacacggaacgaggagcaccgggagttttgagtcccttatgaccctttccgctgtggagccgagtatgagctccttgattatgctcctgcccttcttgccgatgactatgagcgttgcttttttggctagggccgttcctattatggcctgactggccgttccaaccataacctccttttcgaactccactccgagtttctctgcaatttcctctagacgctttttcgctgcctctatgttgctctccagctcatctatttttccgtagtcaaccgagtggagcaggattcccttttcaattagctccctgaactttgcaacggcattcgtgattttttcggagcactctgagaagtccagcgcaacaagcggcctctggaacagctctgaacacttcacggggagctcaaaggagtcgtctttctttgagtacttgaggaggagcactggcctcctcgtggccctgacgaggtttgaagccgtgcttcccaggaacatctgcctccagacgttctcgcccacacttggactgatgatgaggtcagcgcctatgctctccgcttcctccgctatttcaagggagggaatgccgatcctcacggaagtcttgacgtcaatccccttttccctgagagtttttgcaagctcttcgagcttgtttttgtaaatctcttcaagctcaaaggcctggagttctgcgaccgttatgtctatgacgtgaagcaggtggagctcctttgcacccagctcaaacaggtcggggaggcagttgtgaagggcatgaagtgatacatccgagaagtcggtcgggtacaaaatcttctcaaacattctggtcaccccagtatatttttgtacttcaatgcttattagatttgtccatgcattggaaaggattataacgctcaggtcggagttttatcggtgattgcaatggtcaagagagttcacatattcgactggcataaggaacatgccaagaaagttgaggagttcgccggctgggagatgcccatctggtactccagcataaaggaggaacacctcgccgttaggaacggcgttggcatctttgatgtttcccacatgggcgagttcatcttccgcggtaaggacgctctggagttcctccagtacgttactactaacgacataagcaagccgcccgcgataagcggaacctacacgctcgtcctcaacgagagaggtgccgtaaaggacgagaccctcgtcttcaacatgggtaatgacacctacatgatggtctgtgattcagacgccttcgagaagctcgacgcctggttcaacgccatcaagcgcggaattgaaaagttcggcgacatagatctcgagatagagaacaagacctacgacatggcgatgttctcaatccaggggcccaaagctagagacctcgcgaaggagctcttcggcatagacatcaacgacctctggtggttccaggccaaggaggttgagctcgacggcataaagatgctcctttcgaggagcggctacacgggagagaacggctttgaggtctacttcgaggatgcaaacccgtaccacccagacccgagcaagaggggagagcccgagaaggccctccacgtctggaagaccatccttgaggccggcgaaaagtacggcataaagccggccggactgggagcgagggataccctcaggcttgaggcaggatacaccctgtacggaaacgagaccaaggagaagcagctcctcagcacggacatagacgaggttaccccgctccaggccaacctcgactttgcgatcttctgggacaaggagttcataggaaaggaggccctcctcaagcagaaggagcgcggactgccgagcaagatggtgcacttcaagatggttgacaaaggcgtccctagggagggctacaaggtctacaaggacggtgagctcatcggtgaggtcaccagcggaacgctctcacctctcctcggcataggcatcggaatagccttcgtcaagccagagtacgcggttccaggcgttgaaatcgaggtcgagataaggggcaagcccaagaaggcggtcacagtcgctccgcccttctacgaccccaagaagtacggcgccttcagggaggagtgagctttttaagttccctctcatttttttctccgatgtcaaagaaacatgctgtcctcgctgttatcctctggtcaacggtcgcatccgctttcaagctctcgcttaggcatcttactccacttcagctactgttttatgcgtctttaacttccctgctggttttcggacttctccattcccgggagttttctctcgaccggagggatctccgttcggtgtatcttgggcttataaaccctttcctttactatctcgttctcttctcggcatacgacagactgcccgcccaggaagctcaggccctcaactacacgtggcccttaatgctcgtcctgctctccatcccgctcctcggaaggagacctgaaccgagaacagtgctcggtctcctcgttggattcgcgggggcgctggttatcgcgacaaagggtgagcttacgtccctgaccttctctgacccgctgggggttgcactcggccttgggagtgccgttatctgggcttcctactggctcctgaacctccgcgacgagaggcccctcgtggagaagatgttctggaactttctcttcgggtttgcctacgtttcaacgctggttctggtgagcggagaattccagctcccgccgctggaaggcctggcgggggcagtttacgtcgggctcttcgagatgggggtcactttcctgctctggtatagggcggttgagggggatatggcattcgcctccagcatagcctaccttgtgccgttcctgagcctcttttttatatccctcattgtgggagagaaaatagctttctcaacgattctggggctcgttctgatagtcactggaatagttattggaaagaagtagggtcagggccgattaggtcatcacttctcagccacctaccctcacatcatccccttaaaaggtcataaccctattctttcccttatccacagcggaattagcccgattttcggaaacacgagctctgccttggcctcgacggcgtagctagggacgcagccggctatcatcccgttgggcatacggacttcaagggagccttgtgaagttgggtatggcggatcgggaacagggttgttgtccccccacgtgacgaagcaggtctcttcttttccattgagcttcacggttgagatgtatctaacgcggtggattatggggtaggggtaacctgggcgcttgtaaactatcacgtcgttgactctcacctgcgacgggtcggtgacgcccttcagaagaactacgtcaccgcggtagaagacgggctccatcgagccgctgacgactatgaccaggggcgaatcggtatggaggacgaacctgaggcccgagtgtatgccggcgactatgatgatcgtcaaaacgacccatgcgacgtcttttttccactcttccattttaacgcctccatgtacgttgctattctagcgcctatcgcgcccatcgcggtgcacgtttcgaggctcgttctctttccagtcacatccatgtggtaccttgcaatcttaaagatttcctccggcaggccgtgccgtccaagccctatgaggaggagaaagcttctgcccgagagcgcttccctcgttaggtcgaggggggttatctccttctccggccaaggttttctagttgttgcaactggagtcccaaactgtggagggaaccccttcttagggaattcgagaaggtggaacttgtttgccttagccagttcctggaggtactttcccccatctccgatcgtggtatgcctgctgacttcttctgctatctccatcggttttccgtcgagcggaaagccaacgagggccaagtggaacccgtaggcatacgctatgggcgcggccctggctattgccctcaggtgggcttcgtgcaaacgttttgtgtcataagtgttgtacaatgcaagggtcagcgttgccataggtttgaaatttcaaggaacccttataaatattgagtaccaaaaatatatccatgatgagcatagatgatatacttgcccttgccgagaggggacagtttgatgaggccatccaaagggttccagaactctacgatccagtggaacagattagggcactcactaagattgcgctcataatggcggaaaagggtcttggagaatgggtatgggacgttattgaggatgcggagtacatagcagagaactcaaaagagagctacgttaagagcctcggctatgcactgataggtgctgcccttttcaagcttggggatcaagacggcgcagaggagtatctggatatggccttggaagaggcgagtggtatagaagacccgctcgaaaagggggaggtcgtggcggagatagcccgcagtgtagcaatgactggagacctcgatggggcaatggagctttttgacgaggcattcgacttaatagcaagggcagagattgactacaggacgaaggttgatgaactgataaagattggggagattattgaaaaaacgggggacgaccttccttcgagaacagcgagggagttttacaggatagcttttgacatattcgacaagctccgcgtgaatcagagggcggcgatagttgagaaaaaactcctgcttacaaagacagtcgaaaacgttggactgcccgagatacgaaaggcccttctggaaggcaggtatcactatgctttggccctcataaggcgtaagtttaagggcgtgaaagtgcttatgggccagcttgaggttgcactgtggatgaaaatggtgaacgaccccgaatatatagacttgacaaaccagaccttgagcgagcttcagaacacagaagttctcccctcaaatgcctattcaattgcactcattctgacagaactggagtacttgcgggaggccctttactttgtcaggctcatagatgatcaagtaaagagggatgaagcgctccgtaagatagccctggccttctcagagcagggagaattcgaagcagcccggaaagtagcgggtgcaatctccgatccaatactaaggacacaaaccttaagggacatcgaggctattgagatagggtgagcagatgatattcgacgcgcattccgacctgccgacgttcgtttacgatgagaaaaagagcggggcaacaagggttcttgagaggaactactatcgcttctttggggataagataacctccagagttatggccatctggacgcggcccgaacggagaaaggacgcaacagcctacgggcttgaggtgttgaacaccctcctcaaggacatcgacgaaagcgatagctttgagcttgtaaggaacgttgaggaaatgcagaagacgatcagagaaggcagggtcgccctgtggctcggcctcgaaggtggagaacccatcggcgagagcattgagctcctcgaggtcttctaccgtctcggcctccgagttctgactctaacttggagcctcaggaacgccatcggtgacggcgtctttgagagaaccaacggcggcctgaccaggttcggcgttgaagtggtcggaaaggctgaagagctgggaatagtcgttgacctcagccacataaacgaagctggattctgggacacgctcgacgtcacatctttccccgtgattgcgtcccactcaaacgccagggcgctctgcgacagccccagaaacctgaccgacgagcagctgaaggcgatagcggagagggacggcgttgttggggccgttgcaataccctccttcgtggacagggagaagccgacgattgagaagtacgttgagcacatagaatatatggccgacctcataggctatgagcacgtgggcctcggattcgacttcgtgtactaccttagggaatggggtggaaagagcgttgaaggctttgagaacgagtcaaagattccggagctgttaaatctcctccacgagaggttcagtaagaaggaagttgaggggataacattcaaaaacttcgaacgggtgttcgagagaatcacctaacgcctcccgagaaaccttggcaggctgagggttctaacctgatccataatctgggagcgcaggagcatcctcggctctcctgtcagcctaactctgagcatcttgggtattctggtttgagggggtaaaactctgatttcctgtattttctttacttcatgctcaacctcttccggggaaagtggcctatacagtccttgggcgattgccagctccctgtcgtgtgcgccatctttcttacccctgcggtaggcatcaatggccttccttaagacgccgctctcctcagcgctctccaagacggaatctctaagctcacgccatacgccgacccagtcggtatggccgtagtacgctataaagtagcccagaaggtaggccttctttacaggatctccctccgcaagaatctttttgaggtcgagcggccctttcggcagttccttcataaaactggccccctaacaacgaggccctttggtccgaactccaggcggtacatcttggtctcgtgccttgttctcctcatcttgagaacctggattgcccttgccatatcgttgccttccaggtagtagtggagcattatgacgccgtcaacgagatagtgctcctcgctgtacctgtccaggtcggtcagctctgctatcagaaggctggttatcccgagggcactcattgtcctgaggaacgtggcaagctctgccctcttctcagcggggtcagaagtcgggaagtctatggccgtgagcgggtctattacaaggcgagttatgttgctttcccggacaagatcttttatcctgaacatgacactgctccactggggcggctttgcggtcgaaccccagagctccttccccaggtcgtacagtatcaggtttcccttctggacgtagttccagactgccggatcaaaacgctcgtagtcctttattacctcttcaggatcctggacgagggatatgtaagctaccttctcgccccttttggcaccatcaaccagaaactggacaccgaatgtcgttttcccgcttccaggagggccagtgatgaggtatgactttgacttaacaaaacccccctctattagggggtcaaacccttcgataccagttggaaccctttcaacccttccagtaatcatgttgcagcacctatgctcattgtaggttcaaaatcctataaagtttttcgtgaaagttttggtaaaatattcaacttcttgaagggttgaaagggttataaaggtgaacgccagaatagattatggtgagcatcaatgctcagggaaatccttgagaccatcgaagcgcgcggcggggggcttgttttagtggagtattcttccctcgatcacccggagcttgtgttcgctgagatcattaccggctggagagagaaaggtataatacctctgattgtggacattggcgacactctccatattttcacgtccaaattgcggatgatgggggtaaacatcgaggttgaagatttcccagttgttaaagaaattgggaacacgagggttggtaacatcgtaggtgaagtccatgagatagaggattttgattaccatatggcaaaatacgctcaaatagccaaaaaggtgccggaagagagcaaaaagcatacgatagtcctcggaatggagaagttctcttttaccttcatggacaatcccccgaagcttgagaggtactttgagaagataaacagaaggtacctgaaatatcctgatgtgaaggacgttatcttcctgaacacttcagtggctagcgaatacctcaccaagagcctcgaacaggactatgactacgttctccgactgaggggaacagatctcagcctcgtaaaaacacccgggggtgaaagcgttgaagttcggtgagtacttagaaactttaaggccgggagaaagtgttctcgtcgagcacacatctatttcgccctacccagtgctcttctacgagataggaaaaaatagcgggtgggacaacatcctggtgattgacataatagactctgcactccccgttttgaggtggcttaagtttgcgggtttagatgtgcccgagaagagcatagccaggataaaagcgggcggcacttcagagtgggggaggattgtaattgacgtggatccgcataaggatccggggattttcatgagcaagttcctttcgaacctcctcagttattaccgcgcaaacaaaaacgtgacgacgattataatgaaccccgagaggattattcccctccaggacaacagaccttcgttcgttctctaccttgcgaacgcggccgctgggttccttggcaatccgcacaggaaaactttctacttcgtgaattatgaacttgcgcataaggggtaccttgcacttcttgaagaagccttcacgcgcgtcctgaggatagaggacagctcagttaggatactgaagtcgctaaaccttgacgaggaggggacaaccctccagctttgaggcgaagcctttttaacaccctttcaaatttcggaacatggaagagatttattacatcacgttcagagaggccagaatgctcctcgcttcaaggggaaatgtcaagctcaacctcgacctaaggaaaactaacagggtccaagaagtcgagataaaagatgaaggagcggtttttccggacggtaccctcgttgagagggaagttcttgagaagatagccagagacgatgggacggtctacttcgtttctaacggtggggtgtataaagcggccatagcgggtgaatcaggcttttacaagctcgtcccaacgattccaccgacgatagagataaacggtattcgaatgcaccgaacaaaggagatgaaccccctccaggacacgaggaacaaggtgaacactgtgatgccgagggagggtgaaacagtcctcgacacctgcatggggctgggttacaccgctatcgaggcatcaaagaggggagcctacgtcataaccatagagaaagaccccaacgtcattgaaatagcgaggataaacccctggagcagggagctgttcacgggagggaaaatccaggtcatccagggggacgcctttgaggtagttaagaagttcaagcaagcaagctttgacgtgatcatccacgaccccccgcgcttctcattggcgggccatctctactcagaggagttctacagggagcttttcaggattcttaagcctggtggaaggctcttccactacgtaggcaacccggggaagaagtacaggagaaaagacctccaaaagggagtcatggaaaggctgaggagagtcggttttgtcggcgttagaagggtcgaggaagcgcttggggttgtggcaagaaagcctgaaaagggagtaaaagcgagccagcgggattaaatcccgccgacctcttccagctcttcgaaggcttccaggttggtgtagtagtccattagtttagccagctcttttctcagcctgatgctcctgactatggctattccaaagcctatgatcgagggccatatgaggtagaggagcagccttgcgtcgcttatcggtatcggcctcgggtctgtgaagcggttgaagttccatatcataagggctatcatgagccaggccgtcgagaagttggtaagtccactgccgctctctccaagcttaaatcctggaatgacgtccttggttatcggcgggaagaggttgctgcccatgaagcccagctggtcctcgaagacgtggagccactggcctatcatcgaggcgagggcaaggtcagtcgcgtggctgtagccgaagagcttcgccaagaggaagaccacagcaccgattatcactcccatcgtcatcgagtggctgaagccgtggtgccagggcaggaacctgtccttgaccaccgtcttgccctggtgttttgtgagtctgaaggctatctctggccctgagaacgagtctattctcgtcggcttcgggtaggtcttgatgaacggcacgttcaccctcgctattccgtacttcctgtactccggcggctcgcccccaatggcgaccccaccgggggtgactatcggccccatctcgacccttacctccctcttcggcgggtcgaggtgtatccagaactgcctgtaaacgtctcccggaaggcggatgttgtgtatcttgactatcttctcgccctcttcgtaggccttttctattgcctcggctatgatgtcggcgattccctgcgggtgcggggcatcgctgacgacgaacctcagcgagccgtctggatcaacgtccacgtaaccgaacacgagcatttctttgccctcttcgatctgaccgaactcctcctcgaagatcttgtagtcgtctccaaaggcctcaacggttatctttccagtcccgtcattgaggatgaagactatcgtgttgtactcttccgttaccgtcttcacgttgcccttctcatcaaagacctcgtaggacatcgtccctgagccttttgtgagtatctcctcgaccctaccctcgatggcgaagaactggtagcggttcttctcgctcagatcctttattttaacgagcttgggcgcgtagtgcttcttctcgtcccatggagccgggtctatctcgtagtccctcctcgcgaagaacttgccgaacttgaagtccacgaagtcagggaaataagccgaagccgccgctatgaccgctgccagagtgcccatccttatgtcggcaactagggcggggaagaaggtcgccgcggcgaggcccgatatgtagtgagtgaaacccctcatctcacatcaccccagtccgagcaggtgcatgaacacttctgtgtgtccggtcatgctgaggagtactggcagtatgaggccgccgaggcagtagctcctcctcgtgttgaaggcagccgccattaggccgatggcagttgagacgaagagcacgaccactcccatccagcccgtcaggaggtaggagataacgacgagcactgccgcgacgaagtaggagaccttcttgatgtgcatgacgttgaagctcctcgctatgagccttgaaagcccgtaggtgaagaggaagcttattccagaggcgagcaggatgacgccgatggccgctatgtactccgagtagctcttgggcgtgtagagggagctgacgagccacgctccagctcccctcgtgagcctcaggttcggcaggaagagaagtgagaaggccccgacgtagtagaggactctgttgacgccctggctgatgatgaatgcgtcgtcgccgcgctggctcgtcatatgccccgctaccattgctcccatacctccagtgattatcggataaactgcagctattgtccctccgagggcacctccgaagctggccttcagggtgttgtagatactgctctcgactttgtcctcgggcttctgcgggagcatcggcgggttggagagtatgttgagtatcacccacgacattccgaagaagcctatgaacatcggcgttagcctcgtgtaagcactagtcgctggcaggatgttggtgttcgtgactatgaacccgagtatccccgagaggaagaacacgaagattccgccgagtatctgcctccaggcaagccagagcctttccttcaccgtcttgcccctgtcgccttccttgggccactcgctcatgaacatgaagaggacgatggccacgaggaagtaggtgatgtacgggctggtcgcctggtatatcggcggcagcaccttggggaatacgaagagcattccgaggacgaggatcagcgttcccgcaacggccccgatgaggtagagcagtaccgcctcatgccccctgccgaggaggaggtacctctgtgtcgggaagaggaggaacactgcactctcgtcagcaacgctgaagtagacgctggaaattgcgctcacgtaggcgtaagcgactatggctcccactgcgaagaacgggaacgcctggactggcatgagctcacccacgccgaagaccgccaccagtagggctatgatgttgtagatgtggaaccctggaatccaggatatcagcgagccgaagagcacgccggcgaacgaccagattaaaagatctgagagggggagcacggccatcacctcacctctatggcatcggcggtgtacgggatgacctcaaccgtccccttgtactcagtcacgtagcctccgacccttatcgtctgtccctcgctgaaggttaggtctcctccgacgctcttcgggatgaagataaccagctccccgcttccgtcgtctatcgtgagcttgatgaaagtccttccttcgtaaacgtccttgatcgtgccctcaacgattactgttttgcccttcatgtcgagggtgacgtcgccagtcttgtaagtctcggaaggtatagcctcgatgacggtgagtgagaccactttctttgcgtcggcgtcgtaggttatctctatcctgcttcccgttccggcctcgaacgggttcgggaggagttcgcggctgattgagagtgtggcacttcctgtatcgtcgctgacggtgatgtagtagccgttgtcgtagtccaagctatcccagaccacggtaaggttcacctggccagtagctgaggaaagctctgaaacggtgacctccttggtggtctcagttcctccttgcgatggtgctccctcgaccttcactgcctcggtggtgtacactacgagctccggtgcaccgttgtactcttccacgtagcctgccgtatagaccactgagccctcgtcaacgctcagttctgcaccgttcggtatgaacaccgctatcccaccgcttccgtcgtcgagggtgagcttgaggttgtctccaactgccgctaccttgactgctgtcgcgttgagtgctatgaccttacccttcatgtcgagcgtaacctctccagtctggtaaagcttcggtggaactgcttttgcaatctccagggaggttacactgccggagagcgggtcgacaacgagtttgagagtgctcccagtggcagcttcgagcgggttcggtaggagatccttggttgccgtcacggtcgtgcttcccgtgtcgtcgtggattccaaggtagtactctccgctctcataggagagggagtcccatgtgaccgtcaggaggagcggctcggttgcgctcttgaggtcagataccgttccctcaactggcccgctcgcccctatctttctgatggcctctgggtggaagacgacaatctcaggctcgtcgcggtagagctcaacgtagccgcctatctcaactaggtcgccctcctgtgggacgtaggccagctcgttggcagtagtccttggcacgaacaccgggaggcttccaagggttatcttgaggttgccgctgaggttcgcaacgtccgtgaccctgcccgcgacggccactactttgcccaccatgtccgatgtaacgtcctcaggctttatctgaactggcggaaccgcagcctgcacggtcagggactctcccttgagattgttcggatccttgacgaacccccttatgacgaggacgcttccttcacccgcgtcgagtgggttaagggccatcaggacgtccctcgaaatggagacggtgacgctgtcaacgttcaggtagtaggttccgttggcgtaggtgagtccctggagggagccgacgaagtcaacgagctttccagtgtattttccaagctccgaggccttaacctttggaagctcgacttctgaagaaccgactggccttcccagtgcctttattccgctgcccgtgtagacaactacctccaggctgccgcggtactcgtcgaggtagccggcgacctcaacgccgagcccttccttgaggtctgctagggtctcgttggagagctccctgagggcggccgacggtatgaatacgtctatcttccccgttccgtcgctcacgacgagcttgaggttcgaaccgacgttctggacgtcttcaatattcgccttgactgccactatcgtgcccttcatgtcgggtgttaaaactccaatcggaaggaactccgttttgacggcctcaatgacccctagatacgcgccgacgagcctgccgtcgtcacccatctttccagcggccttgattaggcttccgcttgccagctcgaacgggttgaggttggcgaggacttccctcgggacgagaacttcgaggtagttggttccgtcggtgagcgtgaggacgtagcggccgctctcgtaggttattcccgtgaggctgccctgaactgacatgaccattccgacgtagccaggagcttccgccagcggaacgagcggcgcgctctctatcggcgtcacgttgaactgctcaagcgacctgacgacgatttcaggggaggttcccttgtagaggtaaacgataccaggagcataaaccgtgtctccaaccttcacagaaacgttgtttttgatgaggagaaccctcggtatgaggacggtcacgggcgcaactccagtatcaaccgtcaggaggtagccggagctgacgttggagaactcggtaacgacgccctgaacggcgacgtaggtgttgctcatgttctcggtgagctccatcactgttttgggactctcggaatagagcttgttattaaattccaggcccccgagatattggagtatcgcataggtgtaggtctccctaacgcggagctgcacttcagcggtgacgttgtctcccgggaacgggatcacgcccttttcaaccatttcatccgcgagcggcgagtaaaccctgacgtccatctgaccagtcccgtcgtctatcgtgaacgtcagcgagagcttaccgccggattccgatacgtagggaacgctcgagatggttccgctcagccttacgacggcgtagttcatcatgtagttgccagtgacgtcgctgaccttcatcagcggggcctgggcgctctgagcagccaccaggagcaccgcgaccccaatcaccgacagcagaagggagaggtatttcagcttcgatacgtcgatcttcttctgttcctttaggccgtgataatacagctttttctcttgtttttcgccggccataaacctgacctccgattatttaacgtagcggaggggttggtgggtggcctttttaacactttcgtgtcaaatcaattcagaggtgggcagaactgggtaggattcaacatgactttcagatattgtaactctcaagcccttgcactgtcaaggaaaaataaggtgagaagagcgtcaggagtcccccttcagaatcttctcaacctcaaagccttcctcgtacttcttcagcttcctctcgaagaactcgatgaagagcttgtagcgcttggccctgtgcttcgggcttccgcggatgctgtggccgtgtgctcccctcctgaatatcgctatgtatgcctcctttccaaggtctttgagaacgttgtagaacatcaggctctggtcgagcgggcagcggtagtcctcaaggctgtgaatgaggaggagcggcgccttcaccctgtctgcgtagaacagagggcttaacttgcgatagttctcgttttcgagcgggttagggccaattacctcgacatcgtaccagaggcctatgtccgagaatgcgtagctggtcagccagtagcttatcccgttctcgcttatgcctgccttgaagaggtctgactgcgttaccgcccagttcgtcatataacctccatagcttatgcccgttataccaaccctctcgcggtctgcctggggctcaagcttgaggaactcttctatgccgttcattatatcctcgaagtcttccaagcccgtcctttcgagaactctcaaagcgaagtcttcatcgtagccgttgctcccgcgcgggtttacaaagacgacgtagtatcctttgctcgccatcagctgcatctcgtacttgaagtagtggccgtacatccccttcggcccgccgtggacgaagactatgaccggggctttttctccctcattgagttcgggcctgatgtaccagccgtctatctcgaggtctttgctcctgaagaggaagtgcctcggctcgaaggtcttaagcttcgcgaatatcggcccgttgtagtcggttatctgcttaagctcgccatcgtagaggtagagctcccttagcctcgttgctgtctctataaggagtgctatccttccgtcatggacatcgaagcccattatccagtggtcgccgacgatgagcggcttaacttcaccgtcccagaggtagaggttcacccttccagcgtcgggaaccgtgaagtagactttcccgccgtcgagctttgcactccctgtgttgagcggaccttcatatacgggcttaagttctccgtcccagaggtagagccagtcgtgctcgctcatgaacttcttctccctctttccgtggaggaggatggcctttccgtcggaatcaacagcctcgaatgagaccctctcgaagagtttttcctcatctccgtccttccataggtagatgtcgtagaacttgaagagggccggcttactcccttccctgtgcgggacgttgataactactccatcgccgtgccataccccgctggaaaagcgcggcttctcgaactcctcaaggatttcttcgctctccgtgtcaagtatccagaaggtggtcttctcgccgtcgaggaatcccatgttgtcgaaccagacgggaacgtcgtcatcgaagacaaagtcctcatcatcccttctcttgaagcccacaacgagaagcctcctcgagtcgtcgttccactggactgagcggatgtttttggcggagaggactttctttgcgctgagggtctcaatatctgcaacccatatctcggtctccttcttctcctcgttggaacgcatgaatgcgagctttttcccgtccggagaaattctcggcattgaggcgttctcaacgaacctcttggttcctctctcaaggtcttcaaccacaacggtgctctcgtatttgttgtccttcatgttgaccttcgtgagaacgtaggcaactttgcttccccttatcctgggatcgccgaggtaggcgaacttagaaaaggtcttctcgttccattcgatactgctcataacgatatcaccgaattatgtttgagccgaagcttatatcgtttgcggaaggttttaaactccaaaactgtagtttttctccatgagggagacaaccgcggttggaatcatactggcgttgggcgttggaatctcacttgtaacaaggaactacctcggcatagcgttcgccgcgcttggaattccagcgtatctggcctacacagcgagggagcagaacattctggcgaagtccaggctctacgacagggacctcttcctgatgatagttatctcagcggcggtcatactggccttcaactactttttcgacccaagggcgggcctgataatactggcgctggcggttccactgatagcgctatacgcggacaggctaaagaccagaaagaaggctcaggaggcgtgagaggcttccggttctcttgtagtgcctcagggcatctttcatttcttccctgaacttctcgtcgagaccaaatttctcccgcaccctctttgatattgcgttctcacctatgaaaatcatcgccatcgccgaggtcaggttgtttggcttcctgaaccctgctttctcgaagtctatcaagtaaacgtcctcgccgattatgatgtgcttcccgccctgtatctgcccgtggtctatgcccagccgatccaggagtgcggttttctccactatcctgaagagatgctccttttccacgtccgcgaagaggataggttcaccctcggcgaactccctgatgaggtagggaaggccctcgaactcgccaaggccaatgatcggaggagttaccccaaaggtggaggcaattttggtaagttcagcttctttttcgaagttgctcctcggtgagtctggtctttgaagctttatcacgactttcctcccgcctaaaactccagtgaagactaggctcgtcgtccccttggcgagtggctcaacgcctccaacgccctcctcggccaggtgccttagaaatccttccagccttttactacttatgatgtgttcgaacgtcatacgcgataagcttaaatagtccggcgataaaatatttttggtgatagccatggtgacggcttttattctgatggttacggccgccggaaaggaaagggaagttatggagaagcttcttgccatgcccgaagttaaagaggcctacgtcgtttacggtgagtacgacctcgttgttaaggtcgagaccgagacgctcaaggaccttgaccagttcataaccgagaagataaggcgcatgcccgagattcagatgacctcgacgatgatagccatctgaacttctgactctttttgttctcttactcactgacttagctatttctgggtgccaggaataccctgtcattatcgttgtcaaaaaggaaagaaaagggttcattccaccatttttaggaatatttcttcgagggtgggttctttgatttgtagggtgagtatttttgctccttgttttgctacgtagtcgtggagttcttccctgatgtctctctcggccacaatcctgtacttgttttcgccgaggggtgaagcgcgccagggagcactgctccagtcgacgggcttgctcgtctccagaattatcgtgtagcccgctttctcaaggaactcgcgcttaatctcttccaagcttccttccctgatgagttttcccttcacgatgactccaacggtatcgcagatctcctcaacgtgggccaggatgtggcttgagaagaagaccgttttgcccgccttcctctgctccctgattatgtctttgaattctgcgatgccctttggatccaggccgctcattggctcgtcgaggattaagaggtccgggtcgttaattagggcctgagccaggaggagtctctgtctcatgccctttgagaatttgccgacttttctgttcttagcctcgcttaggccgactaagtctaggagttctttgattcttttctccttctcggccttcggaattttgaaggcgtcggcgattatatcgagggtttggactggtgtgagaaagtcccagagggtcgcatgctcgggcatgtagccgattctcttctttgcttggacgaggttgttctcgtcgaattttccatccctgaagacttctaggtcgaagagctgaatgcggccttgttgtgggaagattaggccgagggtgctgaggatggtggtgctttttcctgctccgtttgggcctaggaagccgtagatttggccgggtttaacctcaaggttaaggccgtcgagggccctaacgtccttgtagaatttgacgagattctcaactctcatcacaaaccatcacctcaaatccatcctaaggaacctgactaatccaagcgcgaggtacacgggggtgaggcccaggattatgagaaccggggccggatttttggctatggagtggctgacccccaggtattcaatcgtgtatgttccgtcgttattgaacgagattttttctatgtcttcaaacgcctctatcatcattacctggggtgcgtagaagaggtacttcaggtggtactcttcctgaagctcctcaagcctctgctggtacgccgaggcctcttccggggttaatttgagaaaatctcccctcttctggattccgaattccttatccgctttcttctctgcccacccatcaacaacctggggcatcaccagggaagtcacaaggaataggacaagggcaactccaagggccgtgttctgggagcgtatcacgctcgatataagaattcccagggcaaggagctggagcatcgccaggaggatgagaccgttggccagcacgaggtcggagatcagcttccccgtgagcgagactccgtagtactttgttataacgaaggagagcagggtggcgatgagaatggccacgattatgctgaccgactggcccaggaacttgcccaagagatagggggctcttcttatgggcttgctgagggccagtcttatcgtcccgttctcaaggtcggagttcagcgcggttgccccagcgatgagcgcgtagagccctatgaagaggaatgcacccgctaccacgtattctacgaggctcactgccaggacttcctgaggattcgaggcactctcaaggttgccttggatttcataaaaagccatgatgtagatcagcaccatcagagccgttatcagccagaacttcttctgccgtatgctgttcccagcttctagttttagactccacacctatatcacctcaggtctgcctttttgaacttcaaccaagaggcgacgaggtaaagtaccgttgggacgatcagcataagcaagtttgcctcatagtctaaaatactgtccagtggccctggcggcagtgctttcttcggagacaccgccgatgctaggacagagtgctgaacctctggaaccgggaagtagagggcctttctcgcgaactcttcagagcgtccaaacactgccataaatgctatcggtactgcgaagtccagcaggaaggccagtaggattgaggttaggagtgcttttctgccccctgtgagggttgagagcaggtagccgagggcaaggtagtagaggagcgagaggaataggagaactccgaagacgagcccaatttcaacggccctccttccacccccgaggtgaacggcgtaggcgatgagaaccccagcgtaaagggccgtgccgaggaagaccgccaccacgtcgctcaggagcgttcccaggaagaagtcctttctccttaggggcttgctgagcaggactctggcagttccgttctccacggtcgagcttattgaaagcgccccgagcgggagaaccacgaggggcaggggaaccccgcttaggttgaaaatgagcgagttcaaaaggcctgcagggccgtagtgggtgtagcctttgctgagggagggtaacttcatcagtgccatcaagcctgagaaaactgcaaaggcaatgaagcgcttgctctgcaggctcagaccgaggaagactccgtaaagcccgcgcagtggggaggagacacccacgggcacttccgcgggtagggatctggatcctctgagctccgtcagtctgaagatctccattccagcgattgagagggcaagtgagagggctaaaagctctccaacggacctgtgagatatcgagatttcactttcaagagaaagaacctttccgagataaaccgtcgggataaacgaatagtccagccctcccgcgagggcaaggatgacgaaggccccgaggccgagaacgactccgaagtctcgggaggtcgcgagcgggagcaggaggagggcgattccgattacaccgatcagcgagagcgagagtgcgagcgagccgagaacgtagtccctgacctcgaagtcgtgaaggaacatcgcgagagctcccgaaagcactatcccaatagtggaagctaaggcgagctttaacccctcaatgacccagttgaggaagtagcgccttctcgttagtggctttgagagcatcaggactaagttgccgcgctcaaagtccgagccgaagcgcgagaggaggagaatcaggataactgggaagatcaggtacttgagaaagacgggaagccactctgtcaaaagtctgagtgtcactaagtagccaagcttttctggggggagtgttatgttgtggacgctgaaatagtatagctccagctctactccgatggctgggaagagagaaaggaggaagacgataactggatggttagttccgatccgttccatcagcttggctcctttcatctgaccacgcccctaagctcgattctgagagcgcgcagatggataaggagtataacgggtagcgtgagaataaggaacaagacggcgacgaggattgagttctcctggagcgttggactcatcaaaagccctaaaaacgggagcactacgagcgccagtttcctgctgaagagaccgatgagaaaaatgacggccgacgtgaagagaagcactgggaaggaggggccaaaaacaggtgtgaaaagagtaaaaacggccgaaaccacgaggaaacgcctggttatgtatgtccttcttacgggtttgctgaggattagggagtaatcttccgagaggatctccagcactgccagggggaggaggaatagggagaagaacgccttaagagttccctcaaccggaaggatcaacaccatgaagagcgcgaggaacgctctcgaagcccagagggccgccacctccttccgaacccaccaggggagcgattggacgtacagtgatgggagtgtcggtcttagaagtccgcctggttcgaggcggaggaaagtaaggagggaaaccgcgagtagaagggccgtaaagccaagagaaaccccgaacctaagaaatgcatcttctcgatctccacccgcaacgtcgcgggcaaagagttcgagctggacgccgggtgagaagaacgccatattgccgtactccttttcgagggagtgcacgatagcagagtactcggcttttttggcctcgtaatcagcaaaggtctcgattcccagcgctttctgagcgttgtcttgggccttcatatctatgtagcccattgggacaaacgtcagaaagaggaaaatcacagtccccacgaggacgaccttcttcggatttttgaggaaaaacgcggttaggtatcccattggaaggaagggaagggcaaacacggcatagagggcgcttatgggttttatgactgcagggaggaatacaaaaagggacagtgtgatgtgggagaggaggagtccaatgaagagcccggcccttcggaaaggcttagagagcagtatttcaatgccctcggagatgcccatcgggaaaaccgatgaaagcaagaagccgagggctaagtaaggaattatgggcgagatttcactatcaatgagcatggagatcagggttagggtcgatgcaaccaggaggggtcttgagagccgtcgtgcttctattttgaggatggtcagcattttatcaccacaggaattcaatcgggatttggcaggaggcatgaatgctaatgagccactttttatatatctaaaaactttagcactactttaaagatatcctcaattccaatcaggaaaagttagaaggagaacttaaaaatttacctcttgtctgttcctcatgcgctttagccctcgcggcatccttagaccctttgaacaccgctaagggacatgggataatgggctggccggcatcgtggggagtacactccaacttcgacctctaattctggagggagatacggcataatcacagccgtggctgccactgatcaacgtcctccttgagcacgtttgacaccgcgattgcaaagaacgctattaccaccgccgagacgaggactgcccaccagtagcgacccatcaaggctccctgcttgagaagttctgaggtgtaagagccccaattagtgccaggaataatgttgaacagaccgagcaccgaaacaaacgccaccaccctggggaagagcatgctgacgtaggagagcgtataactgagcacgagggggagaatgtgcctcaatattatgtagacatccgaggcacccatgcttttgctggccgcaatgtactcctgaactttctcattttccactatgccccgtacggagttggagtactggctgaaaaagaagagcgctatgatgatcccggcgagccagtctgggataatgagtttagtgtacgctcccaccttggaaacggcgtatatcattaccaagacgagagggattgccggtattgagtgaaacgcctccacaagcaccctggcagcatcaccgataacgttggagtaatagcctgacatgacgccaaagggcaggcctatgactataacgaacagcactgcaaagccagcgagcacaatagttccccatgtggcccgtacaaagccggcccatagatccctgccatatccgtcggtacccaacaggccgtaggcgttgccgaatagaactacctccccagattcgactctaattgtgtagtcccccatcaaaagagtcccatctccagagaggaagagaatctgagcaggctcgtgaagaacaatactcccctcatcgaggcccagctcccttccgaaggctttgacttgggcggccaaggtgacgttggagttgacgcttcccgttcccgaaagcctgattgaaaggccatccggacggattatgaggagggtggcgtttgaaagcaccaagttggtcggtagggttctcacggacacaacaacctcatccccttcgcttaatttaagcgaccccatgtctgctcttggatgccaaacagggagggcgttttttggatagtcgacccagtaaagcctatcgtcccagtgcttcatctcctctgaagaaaccgagctacgtgcgcccagcatgaacacgataaaaacagccaccatcatgagtcctcgcttgttcaccctcatgccgtaatccccctcgggtcaagtctggttttgaggaattcgactgccatagctataaggaggttcagcactatgaataccaagagagggaatgcaaagaggctggggacgaagtagaaggtttctgccattgaaccggagaagcttgaaccaatcatttgtcccagccctccaagcttaaagaggtggtcaacgacgataactatgccctcgacctcgattaagtgagaaaaccatatggacagcgccggcacggatatcgccctaagggcggacatcagaatcctgttttcgggaaggcccatagcacgtttgtaactcacataggggttgagaacctccctgcttaacaaaaagtaaaactcgacggcaagataccagaaagaggtcaggacgaccgtaagaacggggaacaccatgctctcaaggacatcgagtagcccggcacctggtccgggggatattacgagatcgttggggagcggcgagtaaatgatgagtaggatgaagacaacaccaggccaccaggcgggaattcccaaaaccaccttggtaaggttattcaatagcccagccaccctcggactttttagtgcccaaaaggcaaccatgagcgagagcgggactaaaatgatctcggagataaagaggagaatcaaagttcgcagaagagcctcttttcttggaatcctgaactggtataactcaagttttctccaaattttgtcctgagggggttttaccgacgatacgagtgcattaaagcccacaaccaccgagggctttgtgagttccgggtacttcttgggggctatgtacttcatgtagtactcctctggcgtcatgcccaacttaggggcgtttttgtaaacctcaggatgttttaggatatcgttttttgccatctccctaagtccagccttgacgcccgttcccactaaaaaggtcaccagcaagagcgtcagcgtgaacctgacggccacccggagcagtccccgtgcgtttctcaatcaaatccctccaaaataatgtcccctcagaaatcgacattcccaactgttcctcactttccttttagacttatatcgagacttagggaatcccctccctcgttcctgataataaccttccaagaaccctcgggaagcttcacggtctccttaaccttggtaacgttccccctcttgaaaatctcctttgatccgtccgaggagactatcagcagggtaaacggaccgtttccggagacattcacgtccaaatccacaggtcccttaaaggagtacctgagctctttatgaggtccaattatcttgcccttcgagtaaacgaagtttcctccctccatgcatccggcaacgagagccacaaggagcaaactggttaaaactacgaggccccctctactcatccttcatcccccggccgataactaaaattcccaaagcagaaatgatcacgagacattataaattttacctcttctttgagacattgcactttatggatggggatagataagtagcaaaactaaacacaataacaataaagaaaaatcctcacttgttcatcatcagccttatcctctcggcggcgtccttcgccttgtcggagatgttgctgagggttctggctatgttgaggatgtagaagccctcgctccagtccatcctgccagcgttctggaagaccagcctcataagctccgtatcgaggccgtcgatcttgctttcgactccctcaatctcatgtatgatctcgtactccctctcgatctccttttctgcaaacccgctctcgatgaccctgtccatctggactatcgcctcatagacaagcttagccgctttgatgctctccgtgcccatctgaaggatgacttcttttatctcctctggaatgtttccaggttctttaacgaggagccacttggctgtgtcctctgcggcatcggccaccttgtcctgcatgtggaggtatatgaggacgtcctccctcgccactgccatcatgagctttgagctgagggagtcccttatctcctcttttatcctgtccgcaacgtcctcaagcctgtccacttcgagggcgagcttcttcatctcctcgtagttgccctcacgccacgcctggagcgccttctcaagggtctcaacggtttggagggcaacctcggcgtgctttatcagaggtttaaatggacttttcgcaaagagcttggtccagacctgcatgttatcaccccacaatcatcaggatcttgaataggaaagcactgattagggccgccacgggaaccgtaacgaaccacgagatgattatatccctaacgatgtccttgtttattgcctttactcccctggcgaggccaacgccgatgaccgcgccaacgacaacgtgggtcgttgagatcggaagcccgagccagctcgccacaagaacgacggtagcggccgagaagtctattgtaaagccgcgcgtgttggtaagctcggttatcttcttcccaacggtctccataacgcggtagccgtaggtggccactccaatagctatgccaaggccgcccatggccagtatccacctcggaactggaaccttcattccggccatccccatagttgccaccgcgtaaacagccgccacaggccctatcgcgttggcgacgtcgtttgccccgtgggctaaggcgacgtagccagaggttatgacctgaacgcgcctgaaaatcgactcaacccctataaacgggtcagatgacgggaacttaaccctgagggtgaggaagagtatcaggaacacaacgaggcctgcaggaatgccgtagaagagcactccagtcttcaggctctttccgtggagaaccttgatgtagaacatcgtgcctatcacaacgaaggccagcccaatccagaagggcgaccagattttggagcttctaacggggtcttttctttcgaagatgctcttggtcagggccttgaagaccaggaaggccattatggcgcctattatcggtgagagtatccagctgagaaccacttgagtcatcttgccccagttgactattgagaaccctgcgtagactatgccgtagcccacgattccgcctatgatcgaatgggtagtcgagacgggcaggccgaacttagtggctatgaccagccagatcgtagcggcaagcagagccgcaaccgagccatagataagcaccgttggatcggttatcctgtccgggtagaggattcctttccttatcgtctccgtgacgctctttccgaagaaatacgctccagtgaactcaaggactcccgctatcaaaactgcctgcttaggagttatcgcctttgcaccaacggctgtgctcattgaattcgccgcatcgttcgctcctatggcccacgccattccaaaaccgacgattatagttatcagcaaccagggatccatgaccgccaccagaggtagcaaaattgtgctatataaatatcttgccgcagtagaatatactcatgaagatgtctctatatagggtggatagaataaatagaaaatcagggagagacttcaacaggttcaacctcaatagaaccgtcgtccctcatgaacagacggacgtagtggtagaagccaccctcctctggcttggcgtagagtggagcacctccgccaccagttatgacaaacggaactccctcgtaggtgccgtaccagtagacgtggatgtggccgaagattccaaaggcgttgtattccctcataagttcgagaagcttcttggcatcagaggggtcaagggtgtgctcatcgctcggcctcggatcgtagggcggcgcgtgcatgactatgactggcctctctccgcgttccttcgccctttcaagttctttctccagccacgcccactgttcatcggtgagcctgtagccgttcataacgttgttggcaaagatgtagcggtagcccccgaggctgaaggcgtagtcagtcgggccgaagtagtaatggtagatgttgacgctctccccattgtactcgtggttcccaacggccacgaataccggcttgttccacttccaggccttcataagctcctcccactggtaaatcgtgcccgagtacacgaggtcgccgctgtcaataacaaaggcaccgttttccttgttgattgcgtccctgatcttgaagaagacctctggctgtttctcgccgcttcctggcctgtggtcgccgaacgctaaaacggtgtagttgctaacgtttgcgggtattattgagaagtctccagaagagaccacgactaccttcgttccgccgaagattgcctctttcattgcgtcttcctggtcactcacggccataacgtagttggggttgatgttgtctatcacataggtgagggttatccctttgttgttcttcaccctaacgctcacgttgaagccgagggcacggatgtagaccttggtgtcgttcaccatcctgatgaatcctccgctgactgttatgttctctcctttaacgacgcgccagtagtactggaagggttcgtcgaatattatctggtggagagtaacgaactcatcctcccccgcgattccgtcgaggttcgtgtcccctatctccttcacgagcatcccctcgaagttccccgagcggacaactgccgtcctgtcgagctggactttacctgattttacacccgcgaggaagtttagtgccgcaccgactccggccctgctcgtgccggagaccaccattacagggtttccttctttggagttgaatattgcaacaacgccgtgccaggggccgatgtagtgcatgccgttcctgtaggctatgtatccgaagaaatcaagcttctgcacctgaactggctttccgaagaggattttctttgaataaacgtcctgtggcgataagaccaggatgccgcttccggggtattcggaggagggcttaacgctggcatttgggaagtagtgcttgacaaggtcttcgtagccattgcttacgtagaatgtctcgttgaaaagctcgtaccagctggcgaggaccttgccgggggcgtagctcttgaagtttatgcctgaactcccagcgctcgttgaagctgttttcgtgtttgtgttggtggtgcctcctatgcaaccggctatgaacacgacggacagtattaaaagggcaacagcttttttcatacccatcacctttaactcccttccaaatcgtcggggaacgtttaaatatgattcgattcaatctcctatggtggtaccatgttcgtcgggcactataaggatgtcccggaaaaaaatacgggttttgagggagtgacaatccgctggctcgtttctccgaagctcggggcaaagaacttcgcgatgcgctacttcgtcatgaagaagggctctgagattccaatccatcagcacgactgggagcacgagatattcatcgtcagaggagagggcataataaccaacggaaaggaggagttccacgttaaggaaggcaacttcctctacgttccgcccaacgagccgcacggctacaaggcaactggagaaacgctggagttcctctgcataatccctgccaagaaagaggcgattccagaggaagagtgggcctgagttctcactcacttttttccatctctccccgcagatacgttgaaccagcccacgtaatcttggcccgggttatttcccctttctcaccggcatcgaggattatctccttgtagttgaacgtcctggcatcaattccgcccttctcgcccggaccgtgaacgagaacctcaactttcttcccaagataagtctggtttatctcgtaggctatctggaggcggagtctgtgcaaaatcctggagcgctccttaactttccagccgggcagctgcttccacttcgctgcaatcgtccccggccttggggaatagcgggagacgtttatcttgtccggcctaaccctcttcacaagctcaacggtgttctggaaggcctcttcgccttcgcctggaaagccgactattatgtcggtgttgagattcaaacccggaattttcctgcggaactcactaacgatttcctcgaactcctcaaccgtgtagttccttcccattctcctcaggacttcgttatcgccgctctggacgggcaggtgaaggaacttgtaaaccttagggtcttggtagacctctatcagctcgtcgaggaactttatcacgtggtttgggttcatcatgccgacgcggattctaaagtctccttcgatggctgttatttcgtcgaggagctctgccaggttcgttccgatgtcaaaaccgtagcacccggtatcctcgctagaaagctggatttccttgtagccccttgcgagggcttcctttacccacttcaacacgagttcgggcttgtagctcttgagcacaccgcgggcaaaccttgtcgcgcagtatgtgcaggcgttgaggcaaccctcgcttattggcacaacgaaaactacacctgacttccagagacgcggcagttcgagcttgtctaccttcctttccttccagccctcaactgagaccagctttcctccgcgttcggcaaggtctatcgcctcggcgattctgtctatgctcttgacgccgagcatcccggagacgcgggggtcaataacgtctggattaacgtgaacgaggcatcctgtagcgatgactttctttccggaatcgagcagttcgcgtattctcctcgccatcttgtgctccgttgggtctttaacggcacaggtgttcacaacaacgtaatcagcgctttccggactttcggctaactcatagccagccctaagcagaatagcttccataatctccccgtctgccttatttcttgtgcagccgtaactctcgacgtaaaccctgaccatcggaatgggttcagaagtgggtttaaaaaacagacgggtcaaaagtgggaataaatgagagtgaaaaaagaactctcaatcactcgatgactgaggcgaaagcgaacttcctcttgactgagttgataacgatctcaacctcgtctccgacctgggtgttcgggacgaatatgacgaacccctttatcttggcgatgccgtcaccgccctttccaaggctctcaatcttgaccgtgtatctctccccaaccttaacgggggcttcctgtccatatccaccaaacctgtctccatacatacctaacaccaactctttcaactttcgggggcccttcgggaagactccagaagagtcccgttgttgggttagtcgcggagtatataaacctttgggtcacttcgccagtttttcggcgatctcgaccgctttttgaaccccagcctttacctcatcgctcagctccatgcccaggtctatctccttcgcgactatcccgataaagtgaatctccgctctcttcagcctctcatcgagcgccatgaggagcttcagcccatcgatagcacccatgaagtgggcgctcctgatttcggccttcagcttctcgaatatttcctcgccactaaagtgaactacctctccgggtttcagcttatcgctcaggatggcgtcgatgattactattctctcttcaccgttgtagtggttcgccaggcggaagatgtccgtaccgacctcaaggacgttgtagcccttctccgcgagaattctgcccgctttcagcccggctccgtcgtctttcatcagctcgttgccgagggcgaggatgagtactctcacggctaaccacctatgatttcaaccttttccttctcagccggaaccttgaagtcgtcgtctatcgtggccaaggaaaagccgtgctcgatgcaagtggcaagaataggagcatcgttgggaaggagcgcgtacttctctatcagctcgcgggctttaaagagtgcattctgagtcgtgggtataaaaccgaagtcctctaacaccttgaaaacagtggacagctctttgggtagcctctcgggatgaccctttatcgtccgaggagatgcccccaagaagtatcctaaaagaatgtaaacaacttcactgaacacgacctcattgatataaagaacgtcatcactttcttcaaactgttcaatcaatccaacagcccgctcgtttcccctgaagtactcaatcaggacagaactgtcaatcaataagtccctcatagagctccctctttatctctttccatgacttgtcggtcttcatgatccccttgagctttttcaggttctcaaagagctccttcttgtgggccagataccaagccctagcttcgacttctttccggaactcctcggcgtacttcttcgggactttaacatgaatcacaacatcaacaagctcctcgaccatgccctcaccactggaaaataggcttgaaaacttaaaaaagttgggaggctaaagcctcgccacgtgcactgaacaggagatgcacgggtcgtaggcccttacaaccatctcagcgaggagcttgagcttctccggatcgtcgttgtagtgcttctccgccatcatcctcacgtgctgctccatcatggcgaggttgaatgccgttggggttattatgtctgcgtagctaacccttccgttctcgaccttgagcgcgtaaacgagcactccacgcggggcttcggtagttgagacaccgaagccgtccttcaaagctacctcgtccctcggccttatcggccacttcgcgagggcctcgtcaatcaggtctatcgccctctccgtgaagtagacgagctcaagcgcctgcgcgaggttgttggcgaacggattggtggatctcaaaaggtctttatagctctcgtagagctccttagcccttccgtagagtgtatcggcgttgttcacgaggcgcgaaatggcaccaaccatgaagggctttccgtggtagtggctgtgcttggcgaagctgtgctcaacgacgaactcctttatgtgctccctgtactcctcgctcgggaactcatttccgtccgaggccttgaggtagtcgccgtagatgccgtaaactccgttcctcggcttgaccgctatgtgggtgatcggcccctcgacttcctcgtactgctcaagcttcgtgaagagctcgaaggtgtactccgccttcggaagggcttccttaaggcgtctcttcatattctcaaggacgctcttgtccgggagctttccgaagccgcccaaaactgcgttctcctggtggatggctctgcttccgagttcgtccatcatccagctcccgaggttctttaggtcgagagctatgctcatctctttcttgtactcgtctatcatatggagcggcccggagtagcccagataatcgggcaggacgaggagatacagatggagtgcgtggctctctatcatgtctcctatgtagaggacttccctgagggcctggatttcctcgcgcggggtgaagcctatcgccttctcagcggcctcaacggcggtgagtttgtgggccgccgaacagaaagagcatattcttgggtaaatcgctaaagcttcgtcgagcttcttgccgagggttatggcctcgaaaaacctcggtccttcgatgatgttaagcttgacctccttcacgccatcgtcgccgacaacgatctcaacgccgcccttgccctcgaccctcgctatgtggtcaacggtgatcgggagataaacgttcttcattctttcacctcctggaatatcttgtttaccatctcctcgagcttcgggttgtgggcgttgaacatcctcatcctctcaaggatctcctccttggtcagccccttctccctgaagaccctcgccagggagtcgaaccaggcaacgtcgtagcctatcgccccccgacaaccaatgcacgctattccataggcagggcatctcgcgtcgcagccagccctcgttaccgggccgaggcagggctcgcccctctcaaggagcacacaagtgttgcccctgagcctgcactccaaacagactggatagtcaatgtcttcaggccacgaacctatgaggagcgttccgagggtgtagaggaagtccctcttctccggcgggcagccgtagatgttgtagtcaaccttgatgtagttggagatcggctctgccatctttggctggaacttgaccttggcgtctccatagacggtcttccaaagctcctccagcggtttgtccttctcccagctctgaacgccgccctggacggcgcaggagccgactgcaaccactatcttggcattctcgcggattttcttgacgagctcggcctcttcctccgttgagacgctcccctcgatgaaggctatatcaacgggctcgtcctcgtaggagtccctctccagcatgaaccagcaggctatctcgacgttcggaatgagctggagtatctcgtccatcatcgcgaactggagctggcagccgtagcatgaggtcagagcgtaaaacccaatccttatcttcttctcgctcatcttcatcacctcagtcgagcaagcccggtgttgatattatgtcgaagtaaccgaagacaggcccgtctttgcagacgtacttccagctcgtgctcgttccgacgttgcagtggccgcacttgccaattccgcacttcattttcctctcgagggtcacgtagatgttctcgggccggtagccgtagttgatgagggcctcgaaaacggccttgtacatcctcggtgggccgcagatggccacggcagtcttcttcgggttcgtgttcgcctcgggaatgaagttctggggtcttccgtgtaagcctggccagtcagggtctctcgtaacgctctggattatcttgacgttctccgcctcagccaagtccttcatggcctcaagctccttgtagaagaggagatccttaccatacctcgccgtgttgatgaaggttatgttgccgtacttccagcggttgtccatggcatacaagaagacgctcctgagcggtgcagtcccgagacccgcggctatgaggaggaggtccattccctcccactcgtcaaccgggaagccgtttccgtaggggccgcggacgaggacggtgtctccaggcttgaggcggtggacgaccgttgtgactctcccagccttcctgatgcacagctcgaagaagccgcgcctcatcgctgaggagcagatgcttatcgggacttcaccgactccggggatggtgagctggacgaactgccccggcctgaacgtccacttttctgcaagctcagcatcctcaaacctgaacaggaacagcttttccttctcagtgagcgggtagactctgagcaccttggccctgtgaagagcgtatgggttatcgttcggcatcattatctcctttggaagaaccatgctcatagcccatcaccccttatgtgggaggcgtaggcgaagcccctcttcggaatctcctcggttatctcgcttggacaggatttctcttcgaggccgagaatagtcctcaggttcctcacgaagcttatacctgcagggcagaagtaggtgcaccttccacagccgacgcagtagctcaggccgagcttctcgttgtaggagttcttacagaggtagcggttcctgaagcggtctttcttcgtcggcctgaagttgtggccacccgccacaagcccgtggctcctgaactggcaggagtcccagcgcctctcgcggtagccggtgttcccgtcgaggttcactatgtcctgcacctcgtagcagcggcatgtcgggcaggtggtattgcagattccgcaggcgaggcagaggtcggcctgttcttcccacatcgggtgctccatctcgagctcgaggaggtagcgcaggttgctccagtcctcgtggtacttgaacgcttgagagcgcttgttctcaaactccctgaagttgcagatgtcctcggtggttacctcctcgaagagctccatgttcttgtccactatcctgtggcccgtcggtgagccgactctgacgagccatccatcgggaagctcgtggaggaagaggtcaaagccgtcatcggcaaaatctgtctccctcaggttgcagaagcagtattcatctggcatgcagcttatcccgatgattattcccttttcccttctcgccttgtagtacttgtctgggagctcgtcgaggtagaccgtatcgaggattttgaggccgtggatgtcgcaggcgtgaaggccgaagatcacaaagggttcaacgtcctcgatggtttccctgtactccggcctgctcaggtcgaactcgaagagcttctccctcgggaggaagaagaacttcttcggcggcattatcgtcctgttgtaattgaactcgacctttctgacgtcgtctatctctctgaagtcgtagaacttctccgagatcttcacgggagcgtagagcttaccccactccttcaggcgctcaaggaatgtgtacgtgttttccttcgggagcttaacgtatctcaaccttaccacccccaatgaacataaacatacatgcgtccaattatgttcatttattgagagtaagagacagccttaaaaagcgtttttaaacccagaaattcaaaaccaaaagtttaaactcttttgtttgattaaaatctcttaggtcaacaaaaaagttaaactcatcgtggattctttgtggagcgataatgaacaacactgagttttggggttcaattttggttgtttgtggatttggaaccttcaatacttaaatagggcggtattgaacttttggtttgaaaataaccgtttgaaaaacgcttttatgggcattctttcaaaaaatactgggaacttaaagaagatgtaagcccattcagcgggctcgcaggtgatatctgtgctgaaagcggaactctgtattgggtgcggggcgtgtgcaggtgcctgtccttattcggctattttggtttttgagaatgaagttaggagaatactttttgagcccgcgaaatgcggagactgtgcctttgaatgcaacgaagtttgccccactggagcactggaggggagacctgagagtatggagctggccttggagtttgcccgctgtgctgtctgcggaaaacgtctcaacagcaccaagaaagaagccgattatctcgcaaaccggcttctaaaaactggaggaaaccctgaactcgcctttctgtgtaatgaatgcaagagaaagaggctgtttagggcgtcgaataagtacgaagcttacacggggtgattagggatggaagggattagatttgcgtttctatgtagggaaaaacccgagccaaccggaaagaaggtggccgtcatcggggcgggacccgccggtctggcagccacagggtacctcgtctgccagggacacgaggttcatgtttacgacaagctgcctgaacccggaggtctaatgctgtttggaatacccgagtttaggattcctatctacagggttagagagggctacaaagagcttgagaaggtctacaacgtcaagttcttcacgagaacgaaggtatgcttcggtaatcccaaggagagcggcgatgagttcgttgagcgcagaatagagttcgaggagatcctaaagaactacgatgccgttctgatagccacaggcacttggaacgcctacgttccaacgataccaggttcagaccttgagggggtctacccggcgcttgagtacctgttcaggatcaagagcgccaagctgggccatatggactggagtgaagtgccccctgttgaggggagaaaagtcctcgtggtaggcgcgggacacagcgccgttgacgcggctcttgaaagcataaacctgggggcggagaaggtctacatgagctaccgcagaacgataagggaggcccccgcgggggcttacgagatcaacctcctccagcagagaggggttaagtggctggagaggacaatgcctgtcaggataataggtgaaaacggaagggttagagctgttgaactcgtcaaaacggagctgagcgagccggacgaaaccgggagaagaagaccaatcccgattgagggctccaacttccagatcgaggttgattacatggtctgcgcagttggccagatgccaaccccaccgttttccaaggagatgggcatagcgcttgacaggaagggaaggatcgtcgtggatagcaggcacatgaccagcagggagggcgtcttcgctgcgggagacgttgttctggggccatcaaaagttggaagggctgtcaaggacggcctgtatgcagccgagtccatacacctgtggctgatggggaggtgagggaaatgacgaggaggatactccacgttgattacagcctttgcattggttgtgagacgtgcgaaggagtctgcgactttattcacggcggcagacccaacataaaggtctattacaccattacagggatccccgttcccataaactgtcgtcactgtgagaaagccccatgtatggacgtctgtcctgcgggggcgatctaccgcgacagcgatggggccgttataataaaccccaataagtgcataggctgtctgatgtgcctcgccgcctgtcctttcggagttcccacttttgatgtcaagctcaaggcagttactaagtgcgacatgtgtgctgatagaagaaggcttggaacggccccagcgtgtgccgaaatgtgtccggcaggggccatattcttcggaaagcccgaggaagtcgaggaaaaagttaggagaagaaccgccgaaaagatagcacgggagcggctggcggcggttaacttggagggagtcggacggatgctctgacgccgcttgatgctttgacctttatttttcctgcttggaacggaggttcggaagtatcttaaactcttttgttagccacagtgcttctgagaatacgaaaggtgttaacatagccttattactcaatacctcgactatcataaccttttgttaaaaaccaagcgatttaaaaacggttttaagccagaagcgggagttctgtgtggggataaaaaagtacagtgttgaatattagtgctgtaatgacgcatgatgtacagtgcgatgatggaggtgttgagaatggatgaaaagctcgtccctgtggtctgcccctactgcggtgtggggtgcaggctgtacattaggagttctgacggccatccccttggcatcgagtacgccaatgacatacccggaatctcaaacgaaaatggaaagctctgtcccaagggcaacgccgttcttgagtacgtcctcgcccgggacaggcttaagaagccattaaaggcgaaggagcaaggcaagttcgtcgagataagctggagtcaggccataaaggaggtcgccgagaggcttaaggagtattcaaaggacgatccgaattcaatgatgttcttcggcagtgcaaaaactttcaacgagccaaactaccttatacagaagctggccagaatgctcggaaccaacaacgttgatcactgcgcgagactctgccatgcatcaacagtttccggcctcaaagccgtcttcggcgctggggcgatgacgaacacatacagggacattgaagaggcgaacgttatcttcatcatcggccacaacttcgccgagactcacccggttggcttccgctacgttctcaaggccaaggagaggggagctaaggtcatagtggccgacccgcgctttacaaggacagcctggttcgccgacatttacctgcagcactaccccggtaccgacatcgccctgataaacggcctcattcatgtcatcatagaggagaggctctacgacgagaagttcgtcagggagaggtgcacgggcttcgatgaactcgccaagaccgttgagaagttcactcccgggtacgtcgagaagataaccggcgttccagcagatctgatagtccaggccgcgaggacgtttgcaacgggggggaagggcgtaataacgtgggcgatgggaataacccagcatacccacggacacgacaacgtgagactgctcgcaacgctttcagccatatgtggctaccagggaagggaaggctgtggagtatccccaatgcgcggccagaacaacgtccagggagcctgcgaccttggagtacttccaaacgtcttccccggctacaaagcggtttccgatcctgaagggaggaagttcttcgaggagttctggggaaccgagctgagcggagaggtgggacttacagtcatcgaggctgccacgccatagagaaggggaaggtcagggcctactacgtcatgggtgagaaccctgtcataagcgatgctaacaccaaccacgtcatcaaggccctccataagcttgagttcatggtcgttcaggacatagttcccacaccgaccatggagttcgcggacatagttctcccggctgcggctatgcttgagaacgagggctccctcacgaacaccgagagaagggttcagtggagtttccaggcgatcaacccgccgggggaggcgaggccggactggtggatagtcagtgagataggcaaggccgctggcttcacaggagacgggccgaagggcttcaactattccggcccagaggacattctgcgtgaggtcaacgcctgcaccccacagtatcggggcataactccagagaggctcaaggcaaacttagctggaatacactggccgtgcccgagtgaagaccatcccggcacgagggttctctacaaggagaggttcctgaccagcgatggcaaggcgcacctcgcggccgttgagtaccgcgggccggctgaaacaccggacgaggattacccgttcctcctgacgacagtgaggtacgttggccactaccacaccctcacgatgaccggaaggagcagggccctcgtcaagaggtggcccgagcccctcgctgagatacaccctgaggacgccgagagacttggaataaagaccggggactgggtcaaaatcgtcacaagaagaggagagtatccgatcagggcaaaggtcacgaggacagtcaagaagggggttatagcggttccctggcactggggagcgaacgtcgttaccaacgatgccctcgacccagtggccaagattccggagaccaaggcctgcgcctgcaaagtcgtcaagattacggaggaagaggccagggagctcatgaagaaggtacctcccgttataccagagattgaaattgttagggggtgacctgaatggccagaaagaccgtttttatagacttttcaaagtgcatcgagtgccgcgcctgtgaggtagcctgcgagcgcgaacacaacggaagatcattcataaacgtctttgaatggcaggaaatggccgcgatggccctcaactgccgccactgtgagaaggctccctgcctcgaggtctgcccgacaaacgcactctatcgcgatggggatggagcagttctgctcgccccccagaagtgcattggctgtctgatgtgtggaatcgtgtgcccctttggaataccagagcttgactcccttgacaagataatgatgaagtgcgacctctgcgcccacaggagagccgaaggaaagctcccggcgtgtgtggaaacctgcccgaccgatgcccttctcttcggcgacttcaacgacatccaaaggatgaggagacaaaagttcaccgaaaaggcgatagagatagccaagagcggcgagagaatacagttcaggggtgtgtaggtatttgtagtttcctaactttttccttactcgtggagacgcataccaaacggggggtagggcgaccaaaagtgctgaagagggatgaaaatgcctgaaacgttgaagtgttccttaataccattggaacatcttcctaatggtttgggagtcccgcaaatagacccagagctctgcatcggttgcggcgcctgtgttaatgtttgccctgcgggtgctctgcaggctatagacgactacatggaaggtatcaggaagatatccctcaacatcggaaagtgcactccatgcactcgttgtgaggaggtctgcccgacgggggctattaagatagcaacttttgaggttatctctctgaggaaaagggcttacgttgaggttgtggaactaaggcttcacctatgtcctggttgcgggaactatgccgattacacagagagatcgctggaaaagtccctccagatgctttcggaaggaatgtttgatcgcgatgagatagtgggaagggccgttctctgcaggagttgccgcagaaagctcacggtaaatgaaacgatgagagcaagtagggagggataagatgaaccttcgttcctttctgtgttttctccgtgataccactcggaagggcctatcacgtgggcttggaacatcttgaggaaaggttatgaagaataggaggtgatcgaatggtcgatccgaaagaacaaatcctgtatggtgtggataccacctttgaggggatagccaagaaggccacccccaagttcagaacaacccccggaaggttactctttgccggctttatggctggagcgttcatcgccttcggattcctcttggcggtggtggcggcttccggctacagccccaagctcttccctgacaagggaaacatatccgccttcaagctcctcctcggtgccgtcttccctgtcggcctcattggggttgtcataggcggtgctgacctctggaccggcaacgttcagttcctcagctccgcgaaggttaagggctacgccgacttcaagtgcgtcctctacaactggttcggaagctacgggggcaacttcataggctcaatcttccttgccctgctggcaactaccctaaccggactcttcggccacgttggagaccctaacacctttggaaaagtcacggtgagcatagccacgggcaaggtttcaaaggacatgctcgcgctgtttttcctcggcatcggctgtaactggctcgtcaaccttgcaatatggcagtctgctagggttcaggacggggcaggtaagatactcgctatatggttcccaatctttgccttcgtcgccataggctttgaacacgccatcgccaacatgtgggcgatcccaacggggatactcctcagcaactacaccataacctggacaaagttcttccacaacctgatcccggtgaccttcggcaacgccgtcggcggcttcctcttcgtcgcgttctactactggtacctcagccacccggagctcaccgccgagaggctcatcaaggagatcgttgacttcctggttgtcttcatagcattctggatcgtcgcgaccctcgtacctgctggaatagcaatggcactcgacagcgctctcggcagtggtgcaatgtacgccgttccgcttgcgctttcaatctactacatagcgggcacgttcttcctggccaagattgccaagcccgcctgatgcattttcctttattaccccctaattcgcagcattgaagttcttaatttaacttttagatttgaaccattggttcaaaacgagccgtttaataccttctcttgccaaacaaaagcttgggaaaagcgttttaagcagaatgagaaatcggaagtgagaggtgctgaaaatgtctcatctggaggtggtagtttgccgttcatagtggcgttcctcttcgcctacatcgtgtggctggtcttaacagcgggaagcaatggactgctgtggagcacggaagagctagtggctggactgatattcgcggcaataatcggctatgcgacgaaggacgtggtaggtgagaactcaacgcgcttcctgaaccctgtgaaatggctcggcttcatagcatatgcaccggttctcttctggggcatggtgaaggccaacttcgacgtcgcttacagggtcataacagggaagataaggccggggatagtccgcgtcccagttgacctcaacaacgacgcccagtacacaattctcagcaactcgatcacactcacccctggaaccctgacagttgaagccgatccggaagaaaaggcgctctacgttcactggatcaacgtgccggagggccttgagaggcccgaaagctcggagccggttgctgggcccttcgaaaaatgggccaggaggctgggaagatgatggcattcttctatgcgatggttctcgttgggatagcgggtttaatctcggtgctgaggctcatactcgggccaacggttcccgacagagtagtcggcgttgacaccctcaacacgctcgtcgtcgcgggcatggttctcctcggagcggcctacgacaggacgatctacatcgacatcgcgatagtgtacgcccttctgagctacataggcacgctcgtgatagcgaagtacctccaggggggattggcatgaactacgttgaagtgctcatctacgtcttcctcggaataagcgtgaccttcaacctcctcggaagcttcgcgctcctccgcttccccgacgtctatacaaggctccacggcgccaccaagtgcacgaccttcgggactatctttgccgtcttcgccgtcgtcacccacgccctctaccagctccacaggacaggggactccaagtatctccagatggccctccacagcttcattgccctcatagcgctcctactcacgaacccgacgggagctcacgcgatagccaaagcggcacacctcagcggagtcaagccggttagagcggttgttgatgcctacgaggagaagctcgggggtggttccgaatgaacgccgttgaccttgatatgctcatccaggccataatcctcgtcggagtgctgatcacggcctatcttacgatacgctaccgcgaccttctgtcggcggctttggcctcggcagcgatgagcctcttgctcagccttgagttctacaccctgcacgcgccggacgttgccatagccgaggctgccgtcggagcgggcgttgttacggccgttgttgtttacggcatcgcgaagacggaaaggtgggagcgtgaggtgccatgaagagaaccttagcttatctgtcgctcctgttcatactcggtgcgctcctctacatagcgaaccccaactacggcctcaagttcgggcccggcggagaagactggctgaagtaccgctacaccgacaactactacatcgagcacggcgttgaggaagtcggcggaacgaacatcgttaccgacatcgtgttcgactaccgtggctacgatacccttggagaggctaccgttctcttcaccgccatagccggtgcagttgcccttctaagaccctggaggagggatgaggaatgaacgactccgacatgggtgttatcgtcaggactgctgcgagggctacgataccgctcatcggaatattcggggcctacgttgtcatgcacggccacctcacaccgggtggcggctttcagggaggagccaccatagcaggagccggaatcctgttcctgatagcatttggattaggcgagatgaaaaagcgctacaacaagcacctttactctgccctcgaaggcctcggcggcctcgtcttcctcggtgcggcgatgctgggtataggaacggccttcttctacaataccctctggcacaacggcccgttcttcaacggaaagcctggaacgctgctttccgctggattcctgccgataatgaacctcgcagtcggactgaaggtcttcacgggacttgttagtgccctaactgccatagccctctggaggaggtggaagtcttgattcagttccagttcatagttgcgttcctcatgatagccctcggaatctatgcgttcctcgcgaagaggaacctgctcaagctcgtgttggcgctcaacataatagacgctggaattcacctgctcctcatcagcctcggctacagaatggagctcaacgaagtcccgaccgccccaatttacaccgggtacgagacgctcaaaagcccgatggtcggcccgctgccgcaggcgctcgtcctcacgagcatagtcatcggcgtctgtgtgctttccctagccgttgccctgacgataaacgcctaccgccactacggaacccttgacgtgagagccctgaggaggttgaggggatgaacggcgagacgatcttaccctacctgattatcgtcccgctctttggagcgttctcaatgccgatagtgagcctcgcagggaaaaaagccagagaagcgtgggcggtcattatctctggaataactctcctggttggctccgcggtcttttattcagtctatgaaaacggcccgatactctacaccctcggcgctaagagcccgttcggccagggagccagcttcccggtcaggatagtctgggaggttgacctgctctcagcgttgatggtgctcatggtgaccctcgtcgcgttccttgccgttgtctactcgctcggctacatgaagcgcgacacgggtctggacaagtactacaccctaatcctgatcctcgaactcggaatgctgggcatagcgataaccggcgacctcttcaacttctacgtcttcctggagataatgagcatagccagctacgccctcgtcgccttcaggaacgacacctgggagggcatcgaggcgggcataaagtacatgttcgtgggttcaatagcgagctcgctcgtcctcctcggaatagcgctcctctacggccagtacgggacgctgacgatgggctacctcgcgatcaagctgtctcagaacccgagcgttgttgccaaggtggctttagccttcttcatagcgggtctgctcttcaagagtggtgcttctcctgttcacatgtggctggctgatgcccatccagcagcccccagctcgatttcagcaatgctctctggcctggtcatcaagataggcggtgtctacgccctggcgaggatactcttcagcatctacggggcgagcgtcagcatgaagaccgtcggctgggtgatcataatcttcgcctgcataaccctcatagtaggcaacgcgatggcggtaatacagaccgatatgaagcgccttctggcctactcctccgtcgggcagataggttacatcctcctcggcctcggaataggtttggcagcctacggaagcagaactggagatattgccctcgctggagcgatatatcacaccttcaaccacgccctcatgaaggcgctcctctccctcatagctggagcggttatacacgagctcggaacgaggaacctcaacgaactgagcggtttggccaggacaatgccgaaaacaacgttcgccttcctcatcggagcggccgcgataatcggaatgccgccgctgaacggattcgcgagcaagtggctcatctacgagagttctgcgatcttcaacccggttctcggtgcaatagcgataattggaactgcattctgtacggcggcctacgtcagggttctctacaccttcttcggaaggccgagcgagaaggtcatgaacgccagagacccggaggcgagcatgctctggccgatgataatcctggctttggcaataatcatcatgggactcttcccgtggcagataagcgacaaagtcatgattccagcggctaaggccctcgaaaaccagctcggatacatagcaacactgatggggggtgcctgaaatgttcggttattgggatgccatttacttcgtcttcgtctttatcatcggcctcatcctggcttatctcctcgacaagtgggcgaagagaagcggaatgggaacgagggaaaccggagatgggacgaagatattcatcagcggcgaagatccggacaggataattcccggcttcgagcacctggagggccactacacgggaagaaacgtcatgtggggcctaacctacgccctcaagaacttcttcactgtgctcaggagagaccacacaggcctgctcactgactacgcgagctacctggtgataacgacggccttcgtgctgggggtgctgctgatatggggatgaagggttttccgcgagagctctgcggaggtggtagctgatggcgataacagttcccgccaaccaaaacgggcagaaatcaaatccatcggagcgcgagaggctcgaaaagagaatagcccagctctgcaggttccttggaaagtcgccctgggtattccacgtaaacagcggctcgtgcaacggctgcgacatcgagataatagccgctctaacaccgcgctacgacgctgagcgctttggagtcaagctcgtcggcagcccaaggcacgcagatatactggtcgttacgggccccgtgaccaaccagagccttgagagggttaaactcgtctacgagcagacaccagacccaaagatagtcatagccgttggagcatgcccaaccggtggaagcgtcttctacgagagcccgttcacaaacgccccgctggacagggttatccccgtggacgtttatgttcccggctgcccgccgaggcctgaggccattctacacggcgtcgttcttgccctggagaagctcgccaggatgattaagggggaggttccagaggaggtgggagaatgagtgaagctaatcccattaccgaggttaacgaagtcaaagaaccgacaaaggcggaggatgttgcaaggaaaatagccgagcgcttcccgagcgcgagcgttgaggtgaagaccaacaagtggggcagacagagggtctgggtgagggttccgagggaggactacaaggctttgatgagtttcatcaaggggctcgacccagaggcccactactcgataggaatagagcaggactggggagaagagctgggctttctcagccacatccttatccactacagggacgctcctgcggtttcactcatcgtggacgtccacgcaccaaaggacgacccggtgctcccagatatcagcgacgtcttcccgatagcgctccagttcgagagggaaggcatggagatggtcggacttgacttcgagggtgcccccgacaagaggaggctattccttccagatgacttcccagagggcatctacccgctccgcctcgacgataagggcatttcagaggagatggtacacaatgcgggtcacccatactacatcaaagggggtgcgaagaaatgaccgaaaaagtcgagtactgggtcaaaatacccttcggtccaatccatccaggccttgaagagcccgagaagttcatactcaccctagacggcgagaggatagttgacgttgacgtcaagctcggttacaaccttcgcggaatccaatggatagccctcaggagaaactacatccaaataatgtacctcgccgagaggatgtgcggaatctgctccttctctcacaaccacacctacacgagggccgttgaggaggctggaggcatagaggtgcccgagagggccgagtacatccgcgtaatcatcggcgagcttgagaggattcactcccacctcctcaacctcggcgttcttgcccacgacataggctacgacaccctgcttcacctcacctggctggcaagggagaaggttatggacacccttgaggccgtctcaggaaaccgcgttaactactcgatggtgacgataggcggcgtcaggagggacatcgacgagaagaagagaaggatcatcgaggagatgataaagtactacagggaagtcttcccgcagatagaggaggctttcctccacgatccaacgatagaggcccgtttcagggacacagcagtgataagcaagcgcgttgccctggagcagggagccgttggcccaacgggaagggggagcggaatcagggacgacgcccgctggagcgaggggcttggggtttatccggacctcggcataaagccggtcatgccgcaggatgtaacgggagagaggccgaggggggacgtcttcgacaggatggctgtcaggataggggagctctggcagagccttgagctcatagagcacgccctcgatgcgatgcccgacgggccgataaagaccttcccgaaggacaacgtcctctacgccaagctgaggctgatggttgacggtgagggaataggcaggtacgaggcgccgagaggagagttggtgcactacgtccgcggaaagaagggaagcgataagccgctccgctggaagccgagagagccgacgttcccgaacctcttcgcggttgccaggggagtcatcggcgaccaggtggcggactttgtggttgcggttgcttcaatagacccgtgcctgagctgtaccgacagggttgccgttgtgcaggacgggaagaagaaaatcctgaccgagaaggacctcctgagggagtcgataaagaggacgcgcgagatcaacccggatatcaagggagacccgagcccgcttggtgttggctgtgtgaggtgatagcatggacgtggtaagcaacgtggtttacccaatcgcgggcctgctcggcctctacactttcgtttcacttgcatcactcgtctgggagggaatagacaggaagttagtggccagaatgcagaggagaattggcccgccgatactccagccgatctacgacttcctcaagttggccagcaaggagacgataataccgaacaccgcgaactacatgttcagggccgctcctgttctggccttggccaccgctatagctctcctcgcctacacgccgatgggcttcacgccgattctggcgagcaagggagacgtcatcgtcttcatctacctcttaaccctcatcagcttcttcaagatgctcggcgcaataagctcggggaacccgtacgccaagataggtgcagcgagggaagcgacgataatggtctcaagggaaccagccatgatgctggcgatattcacaataatgtggcgcattggaaagctcggcgttgaggagcccttcagcatggggacattctatcagcacaacatatgggagatagggactccgatgagcttcgtaggggcccttatactcctctacgtctttgccgtctggctggcgagcgagatagaggtcgggttcttcaacatacccgatgccgaggaagagatagcggagggacttctcgtcgagtacagcggaaggtatctggcactcctcaagctgacgcactcgataaaggccttcatctcagcgtcgctcgttgtcgcgatattcttcccgtggggaatctcgggctacttcgggctgagtggcctctcagcgaacgtcgttgacctgctcttccacacgcttaaggtattcgtggttctcttcgtcgtccagagcgtcttcagagctgtgacggggaggctgaagataacgcaggccgttgacttcctctggaagaacgtcttcctggcctcgctgatcggctcgctcctcatagcgatggaggtgataatgtgaaggccccaattctcgtcccagtggtgctcagaaacctcttcaagaagccggcgacaaaccgcttcccgcagacggagccggttccgattcccgaggacttcaggggaatgatagcctacaacgtggacaagtgcgtcggctgcaggatgtgcgtcaacgtctgtccagctggggtcttcgtttacctgccggagataaggaaggtggccctctggacagctcgctgtgtctactgcggccagtgcgttgacgtctgtcctacaggggcgctccagctcagcaaggacttcctgctggccagctacgacaaccacgacgacaggtttatccctctgaagcctgaaaaagtcgaggagataaagaggaagctggaagagcagaagaaggccaaagaggccgcgaagaaggagaaggaagggaaggcatgattacgccgtcacctttacttttattccatactgttcaacgctgaagcccatgagctcagcctcgcccttgagcctctggtaatgggcccactctacgttggcaaggtattggtagacctttctggcctcctcgttctccgttattgaggcgagatgtctgtacagctccatcgcaacgagctcggtctccatcgctattgcgagaactttgggtatgttctccgggtcttcaaaggcctttgagagaacctccgcttcaatgtacggcaggtcaacttttttcggttcttcaccgtaggttttaacgtatatcctcttcagagtgtccccgtgctcctcagattccttggccagcttcctgaaggcagagaggagaccgggcggaagcctaagctcctcagcttttttcgcgagcccccagtaaatcctggcctcctcatattcgccccagatccagtaggagaggatttcgcgctcggagagcccaagcaacatatctttgaacctttccagagtctcttcaaggtcttccattgacgataccccctgccagctttttcagggactcatagtgtcccctctcaacgtccgccagcgtgagataaacccttttgagctcctcctttttgcactcctccgcgagctttctgtatatcgtctcggccagcttctcgctctccatcgctatctccaaaacgtccttcaaatcctcgaccttccagaacttgccgaggacgttgagggattcaacgttcggaacgttcacctcgaccagctcgtccccgtagttctggcggtagattttgtagagctcgtcgccgtgcccctttgactcgtcaccgagcctcttgaaagtgttgacaacttcctctggcagtccaagctccttagcacgctcggcgagcttccagtacgtttcagcctcttcgtattcacctttaatccagtagcttaacagctccctctcgtccagcttccttatctcgttaaggatctccacgaccatttcaatcacccagcttttcgtattccgccttcagggcctcgtaatgggtcctctcaacctcagcgagtttgaggtagagttccttcagccgttcatcttccaccttctcggcgagaagcttgtaaaccttatgggcggtcagctcgctctccatcgcagcctcaaggacttcttttatctggtctgccctctcgaacttgttgagaactgatagaacttctaccggcggtatgtcagtcttcggctcccttgaaaagctctccttgaagattttcgtcagctcctcggcgtgcctctgggagtcttttgagagcttttcaaagaccttgacaatactctccccaagaccgagcgcccttgctctctcggcgagctccttgtagagctttgcctcttccctctccccacttatccagtaggctaaggcctcttcgtagctcagctttgagagcatctcaatgacctcatcaacgtccatcattttgaccacagtgggaaaacggtgcccaccctaataagcctattcctctacctcgaagcggagaagctccccacgcctgagaactcccactccagctttcttcccgaggacttcaacgatgacggtgtagtctggatcactcagattcaccggcaggttatagcgctcgactatgagcgagccgagctttctctcaagctcccgctgggagagttttttgtttcccctgacttttgccctcaccgcaaagctaccctggattctctcagcgaggtttagtactgcatcagctatctcgtcaaaggaggccctcacaaggacttccagcggcacaaccctttggattgcctgcgtttcaaaatctttgagccttcgaagcgcttcttcctttgataggggagtttcagcgagcaggacacccctccaatcggttccatgaaccttaaccttttcaagcgcccactccagctcgagtattgcatcgccttcccttccctgcgggcatgttaccaggagaatcatatcagctcaccgatggacaggtttttatattccgaaggacattctaaatcggtgaggtgaaatggaaagggatggccttaagttttacccttctcattcatatgacgtttatggtctctctcacaacccgtttgagcagctcgcaagcgaaggaatagccgacgttgagagcattcacgtctaccaggaagttgatatgcgcctccagatgataatctcggaggttctcggtcacaaaagttctattgctctcagtatagtcggcccactcggaatgggaaagacccagaggctcaagaacatagccaaggccatcgaggacaacggtggaaaggccatttacgtcaaggttgacaccaacgacatcttgaagctcacgcgcgacatcttctatgcccttaagccgccgaggagcaggacgaacatcttccttgagaacctctcaaggaagttaggcttcatagacagacttgaaaagatgctgagcgacccgaacgagtacaagagcagggacattgcggagcttctggttgagcaactcaaaaagtacccatactccgctctccttttggatgagcttgagaacatgcagggagcgggagagagggagaagatacagttctttgagatgctgaggcacgtgataagcacgatgccgccggggtgtatagtggccttcgcctgcatcccggaggcgtacgaggagtacacgaagatcttcccagcgttcttcatgaggctccactatgagttcaagctgaggccgatgagcgtcgaggagacatttgaacttgtcaagaaaaggctcaacaaggcgagagtgaaggatacggacgacccgatctatccgttcacggaggaggcgattaagctcatccacgatttggcgaggggcaaccctaggcagattttaaggctcctccactacgtcctgagcgaagcggcgaagcacaagttcgaccccatagacgactacgtggtgacgaccatcctcgaagagccgaagagccttgaggagtacctgatgaggattccaaaggactacaaggacctcgttgaggcggtggtttttgagttcaaaggaggccctgtgagttatattcaagtggccaaagcggtcaagaagccgggcatgcaggtttatgagagcctcaacgagctcgtgaggcttggctttctcgttggagacccgaacggcagctacaaggttcctgactatgtcagaaagtttttagaagagggacaggccgaaaagctgaggggtgagtgaatgccgaactacgatgtccacgtcctcagcgggatagttacctatccggtggccgtcctcgtaggtttccttctcaaaatctatcttggggttccgctggagcttactgcaacttccatgatgctcggctatgccttttacgtccttgggagcgatctcccagacctagaccaccccgatgcccttatacacaggggatcaaagccgatagtcagtgttgcagtgggaagcgctgtttacttatgggcaactggatgggtgaacatcagcccagaatgggcctcagttgtcgcggcctgggtgatcggagccgttggtgctttggttggatggtacgccttcacctggctgatgccgcaccacagggggatcgtccactctctcctcttcgcggccgtttacggtctgttggccttcctgctcgttgaatacgggcttagaatgagcactggggaagctatctatgtgggactgtccgcgttcctgggctacaccctgcacttactcctcgacggttccctgaaactcgtctgaattttcgtttttcagttcacacttttgtggaacaaggcttttaaattgtccactctagtggatggcggaggtgagtaaaaatgttcagccttggaggattctcgcgcggtggggagtacgagaagaagacctgggacgttctcatcataggagcagggccagctgggttcacagcggccatttacgccgcccgctacggccttgagacactgatcataagcaaagacctcggcggaaacatggccttgaccgacctcatagagaactaccccggcttcccagaggggatcagcggttcagagctgaccaacagaatgcacgagcaggtgaagaagctcggcgttgacgttatcttcgatgaggtggtgaggatcgatccagcggaatgcgcctactacgaggggccgtgcaagttcaccgtgaagaccgccaacgggaaggaatacaaagccaggacgattatcattgccgtcggtgccgcaccgaggaagctgagggttcctggtgaggaagagcttacaggaaagggcgtttcttactgtgcaacctgcgacggcccgctcttcaagggcaagaaggtcatagtagtcggcggtggaaacacagccctccaggaggccctctacctcaagagcatcggcgttgacgttaccctcgtccacaggaggcagcagtttagagccgacaagatactccaggacaggttcaaggagagcggtatccctgcgatactcgacactgttgttacagagatcatcggaaaggacaaggtcgaggcggttaggctgaagaacgttaagacaggagaagaaaccgtgatggaggtcgacggcgtattcatcttcatcggctacgagccgaagaccgacttcgtgaagcacctcggcataaccgacgagtacggctacatcccggtcgacatgtacatgcgcaccaaggttccgggaatcttcgccgctggagacataacaaacgtcttcaagcagatagcggtggcggtcggccagggcgcaatagcagctaactctgcaaaggaattcctcgaagagtggaagaataagaacagcgagtgatcttactgtttctttttcttacttctcaaatgtttgcttcgtttagctctggatatttctcgaaaaatcttcggtcaaaaatgttcattgatgaacacaggcttatataggggaaggacaacgttcctccggtgatgcgcatggtggttagaccgaacgttaaagaactccccgggcccaaggctaaggaggttattgagaggaacttcaagtaccttgccatgacgacccaggatccggagaacctcccaatagtcatcgagcgcggtgagggtataagggtctatgacgttgacggaaacgtcttctacgactttgcgagtggtgtcggtgttataaacgtcggccactcccacccgagggtcgtcgaggccataaagaagcaggccgagaagttcacccactactcgctgacagacttcttctacgagaacgcgataatcctcgccgagaagctcatcgagctggcccccggtgacatcgagaggaaggtcgtctacggcaacagcggtgccgaggccaacgaagctgccatgaagctcgtcaagtacggaaccggaaggaagcagttcctagcgttctaccacgccttccacggaaggacacaggcggttctcagccttaccgccagcaagtgggtccagcaggacggcttcttcccgacgatgccgggcgttacccacatcccctacccgaacccctacaggaacacctggggcattgacggttacgaagaacccgacgagctgaccaacagggttctcgacttcatcgaggagtacgtcttcaggcacgttcctccgcacgagattggagctatcttcttcgagccgatacagggtgagggcggctacgttgtcccgccgaagggcttcttcaaggccctcaagaagtttgccgacgagtacggaatactcctcgccgatgatgaagttcagatgggcataggaaggaccggaaagttctgggccattgagcacttcggcgttgaacctgacctcatccagttcggaaaggccatcggcggcggtctcccgctggctggtgtcatccacagggcggacataacctttgacaagcccggcaggcacgcgacgaccttcggaggaaacccggttgccattgccgctggaatagaggtcgtcgagatcgtcaaggagctcctcccgcacgtccaggaggtcggagactacctccacaagtacctcgaggagttcaaggagaagtacgaggtcatcggcgatgccaggggtctcggtcttgctcaggcagtcgagatcgtcaagagcaaggagaccaaggagaagtaccccgagctgagggacaggatcgtcaaggagtcggccaagcgcggtctcgtcctcctcggatgcggcgacaacagcatccgcttcataccgccgctcatcgtcaccaaggaagagatcgacgttgccatggagatattcgaagaggccctcaaagcggctctgaagtgaaagcttttaacttccccctatttttttattctggtgatgcaagatgacggatataataagcgagcttgcccactacacaccctacgttttcctcgtagccatagtggtgtttctggcttacatctgggttaacagggagaagttcaagagcgtcaacacaatagccatagcaggcattgctgccgcgctcgttgccgtggctacaaacgtcatcaaagtcccaacgccggcaactggaggctacataaacctcggcgacaccatggtcatgttcacggcgatgctctttggtcctgttattggagcgtttgcaggtggtgtcggttcggcactcggcgacgtcatgggtggctatcctggatgggctcctataaccttggtcgtcaagggcattgagggacttgtggtgggatatgtggcgaagagaatgcaggggaactcagggctcatcgttggtggaacaataggcgggctcctgatggtcacaggttacttcctctttgaggcctacgccttcggagttccggccgcgcttgaagaagtaccggggaatctccttcaggcggttacgggaattatcgtaggaacactgctcacgaacgcaataaaaaagagatatccagaagtggaggcactaatttagacgtcgaggtttttaatctcgttccacacttccttttcttcgattatgggttcaacggaaactcttcttgatgccttctttatctggcccagatagttggagtctgctatgactgcatcatagccaagctcctcaattctgtatattttgaggtttatctgcttcagtgcatcttttgagtactctatgaactgcgggcccgccagcattatgttgggattcattccttcggatctcagttctcctattatcctctctatcacttcgagtatctcactcatcgggggcaccctctactatttttactccactggaggtaccaatcctattggctccagcctctatcatctcaagagcctgctcatacgtccttattcctccggctgccttaacgcccatctcgggcccaacgactttcctcatcagcctgacgtcttcaacagtcgctccccctgttccgaagccggtcgaggtcttaacgaagtcggcgccggcctccttcgccagctcgcaggccttaactttctcttcctcggtaagatagcaggtctcgatgattacctttaccttggcccctctctcgtgggcgactttgacaacttccgctatgtcgttctttacgtactcgtagtccttatccttgagggcgccgatgtttatcaccatgtcgagctcatctgcgccgtcttcaagggccctctttgcctcgaagaccttgacctccgttggggttgctcccaacggaaagcctatgacgctcgcaaccttaacgtcggcgttcttctctctcaggtaatctttggcgagtttgactctgtaaggattgacacagaccgcgtagaaaccgtactcaatggcttcatcgcagagctttattatgtcctccttggtggcatagggcttcaggttcgtttggtcaatataccgtgcaatctccctcttgttcatcttacatccctgcttaaagttagattcattacagtatttaggatttttcccgctaaaaatgagtactccatcatcaaaaatgcgtagttccggaagattataacaaattcctcttaagcacccttagaaatctgtttgagacatcttcgtcgcccaaattgggctcgatctcccccttaacgatcatttccagtacttcaactgcgttgtcccagttctcttccaacgtttttcctttgggtatggggttcctgaggacgtaccagcgggaagttttttcgtcgtacacgattattcgtggaatgtaatccaggtcgaggaaagtattgtcgagcgtgagctctattctgaaaccttgaatttctaggtagccatcctctcgaagttgctttttccagttcatcttgtttacccctgataatcaggtgaaattagcattttaaaaattcgtcccctggattttgaccatcagaattataagagggaacgaaaaatatcacccgaggtgattagcatggagaacccgtttgagataaccaacgttatagcgagggaaatcctcgacagcaggggaaacccaacggttgaggtcgaggtctacaccccgataagcatgggcagggccgccgttccgagcggagcaagcaccggaacccacgaggctcttgagctccgcgacggtggaagcaggtaccacgggaagggcgtcagaagggccgttgagaacgtgaacaagataatcgcccccgagatcatcggaatggacgtcacctggcagagggacattgataccctcatgctcgagctcgacggtaccgagaacaagagcaacctcggtgctaacgcaatactcggcgtttctctagccgttgccaaggcggccgccaacgcccttggactgccgctctaccagtacataggcggaaccaacgcctacgtcatgccggttccgatgagcaacgtcatcaacggcggcgttcacgcgggcaacgagctcgacttccaggagttcatgatcatgcccgttggagctgacagcttccgcgaggctataaggtgggtatccgaaacctatcatgtcctcaagaaggtcatcatggagaagtacggaaggaacgccgtgaacgtcggcgacgagggtggcttcgccccgccgatgaaggaagtaactgaaccgctcgatgttctcatcaaggccatcgaggaggccggctacaagccgggcgacgagatagccttcgccctcgacgccgcttccagcgaattcttcgacggcgagaagggcaagtacgtggttgctggcaaggagtacgacaagggcgagctccttgagctctaccgcgagctcgtcacgacctacccgatagtctccatcgaagacccgttccacgaggaggactgggaaggcttcgtcatgataaccaaggagctcggtagcaaggtacagatcgtcggcgacgacctcttcgtcaccaacccgaagaggataaggaagggtattgagatgggggctgcgaacgcgctcctcctcaaggtcaaccagattggaaccctcagcgaggccatagatgccgcctacacatccttcagagcaggctacggagttgtagtctcccacaggagcggagagacggaggatgcgacaatagcagatctcgccgttgccctcaacgcgggccagataaagacgggtgccccggccagaagcgacaggaacgccaagtacaaccagctcataaggatagaggaggagcttgagggaatagcggtctatcctggaaagaagttcaggaacccgttcctgtgacttcttctccttcttccagcatttttctcagctgttccctctttgtttcgagaatttgtattatgccgtcgaggattttaaggtactccttaatcgcttccctttcgaactcctgcctgctgtagcccttctcctggagcttcttcctcattctttcatggtactcgatggccacgtagagggatttaagggccagctcattggcctcctggagccacctccagccgttctcggtgagtcggtactttacgcgcctcctccttccctggtactcttccttgggctctataaggccctcctcgaccattttgttgagcatggtgtagaggttcccgtgactcggcttccatatcccccaggctatcttctctatctccttgaggatttcatagccgtgcgtctctcctctaagcccgattatcagcagtatcatgttctttattggaaccgtgaacatgtccctcactattttctcctcgggcaacatacgctcaccgccctcgaaaggcttataaatcagggtccgccacatatgtttggattaaacatatttgaatcagacagatttactattgacatataactgtcaacctcttaaaaaggttggggtggtggcaatggcgtggaacgactggatagcgaaacatcccaagattgtgctggcggcgtggatagtcatcatagtcctcatggcgccgctcgcaggaaaactgagtgagcttaccgattacagtacggagcagatggtctcccacgaaatcgagtcaatcaaagttcaggatttaatggcccaggagttcacgggagcacagaacgacaacctcacgtaccttctcatcacgaacatcaacgtgaacgatgaaaacgcgaggaaggcctactattctttcaaagaccgggttgagggcaagtacgcctccaacgttacatcctactacgatgccctggatatgctctgggaaatggactacgagctcacgctcaacgtaacaaggatgaccgccaacataacggggcttctctacacgagcgtcaaaggcgcccacgatggctatggtatggccctcaaccaggttcttctcctcaagaacacaactgatatggtaaaaaccagcctcgtcggaacagcccggggatacgttgcccttaagaacaaccttacgtccctttacacccagctcaacgcgactgcaggactgcttcagatggccgacggcatctacgtccagctctgcgcccagaacccgaacatgacagcccaggagagggcacaggcactccagaacgaactgatggtcaaggttcccgagagtcagcaggctattgttcctgcggtcgtgcaggcggttgtctccgccgacccctactgcacgggaacgctcctctccgacgaggggctgcttgaaaacacgacggttgaactcgtgtacggcatgataacgaatgctggagctccccttccattcgagattccaaaggaagttctcttccagctctacgagagcggtggtagcgagaccgtaatcgacaccatggcagggaacatgctcagggcccaaatagccgagcagatggggggcctcgctccaaacccggaggcccttgcagaggtcatcttgagcgaggtcgtcaaagacccctatggaataataagcggcgaaaaactcgaagatgcaactgtcagtgtggttcttgccctatccccgcagaagactgaggacaccgagaagctggtcagagctctctacaacggcgcggacccgaaagagctcgctagagagctgttcttgaagggaatgcaggaacagatggcaggccaggaaattcctgaagagttcgcgggggttatgaacaacctcatcgagcaggtcatccagaactacccgatgagcgaggaagagctcgaaaaacttgtgaaggacgccgttaagtccatggtatcagaatacgcaaagaacaacccctacggtgtggagttcaactttgaccaggaccttctcgtggacatcgccttcaagttcaaggacaacccccaggcaatatcgaaagatgatgtcaagcccctcgcagaacagctctggccaatcgtcaaggaaaaggctggaacctacctgagcatgctcaaaagcgacgacaacactacgctcctgataaccttcataccgtttggaaggccaggtccgagcggcgatgaattcaggtatctcgcccagaacgcgacggaagtcaagaaggtggccctcgaggagttcggaaagtacttccctgaggtcaaaggcgccctcggtggcacccccgtccagatgcacgagatgacgaagtacggccaggaagacaaccagaagacgagccaggcgagcatcataggcgctctcatcgtgctcttcatcctgatgggcggcgccctcctggcgacgttccttccgttcacgggtgttgcaacgtctgcactcacggccctcggaatagcgtacctcctggccaagggcgggatactcaacgtcggaagctgggcacagatgctgacgatcaccacagccctcggtcttggaattgactactcgacttactacgtccaccgcttcaaggagtacattgctgagggctacgaccacgagaaagcggtcgcagaggcacttaggagggctaaggatgcagtccttgcgagtgcgttcacagacatcatagcctttgccagcttcgttctggcatgggagttcccgatattccagcagattggcataatcgcgccgcttgccgttgttactgtcctagtagcgagccttacgttcatcccggcaataacagcactcataggcgataagagctggttctggtggccgaggcacatcaagcacattgaaaccatggacgtccacgagaggagtagaatagccgagtgggtcgttaagcatgccaaggtagtgctcctcattggcctgctcatagcggttccggcaacgtacacgttcttcacgtttgagggaacccacgacataagcctattcctgccggagggcagtgaaactctcaccttcatggagctgagccaggagaagctcggtgcctcgataacttcgccgaactacgtgatcatagacattggacacaagattaccgacgacgaccttaagctgatcgacgagataacggcccacatagcgggaatggagggagttaaggctgtctattcaccaactagaccctacggcgagccggtcagcaacctcacgctttcagcaatcaaggccctcggtggggacaggttcatctcaaagggcggtaccatggtcatgatacagatcgacccggtctacgctccaactgacgagaaggcgaaggagctcgtcgagggcctcaggagttacatggccgagcttgagaaggagggcaagataagggagggcctcgtcggcggtggagcggcgctctcaatggacctcacagacagaatcaacgatatcttctggcacaggataatcccagtggcgctggtgctgatgttcctgtcgctaatcccgacgctcaagggactcccggcggtcgtctcgacgatgatcaccatcttcatgggcgtcatgacgagcatctgggtatcaacgtggctcttcggcaaggtcttcaatcaagaagtcatgtggttcctgccgctgatggtcttcgtcgtgctcatgggagtcggcattgactacaacagcttctatctggttaaggccagggacgagttcgagcgcaggaagcccgaggaagccctcatagtcgcggcaggaacgatggacatgctcgtcataggccttgcagtagtccttgcaagcacatatggcgccctgatgctcagctcgacgtggggaacgagggagatgggctttgccctctcagcgggaatcctcctgacagctgttatggcagtgtacttcattgggccagccttcatgagcctctttggggagaaggcctggtggccgctgttcaagagccagaaaggtgcaaagaaggagtgatttccttcttttcccatttttgtcccaaaagggttatattctctggacactgtccttttctggagggtaagaatggagcgaaaaaagctcaaaatctacattcccagaatcaacttcccctcgcaggaccggggggtttcaccccccacgtccttgctaaccccctccccccgaaagtggggcttcgccccacataaaccggaaaactgcgtttcccagacccttccttcttttttgaacgccagagggggctccgccccctacaaccccccggttttagaggtgagctaaatggcagaacccaagaaaaagctcaaaatctacattcccaggaattaaattcccctcagtctcactcaccggaaacgcctgtgctttaaactgcgcccactgcggaaagcactacctcgaaggcatgagaaagcccgaacgtggtgaacttttgagctactgcctcaggttagcggaggagggttacaacggctgtctcctgagcggtggcatggatggacgcctgaaggttccccttgacttctacgctaacgagataaaggaaattaagaagagaacgaacctcaagctcaacgcccacgtgggttttattgatgagagcgacctggagtgggttaaatacgttgatgtcgtttcccttgacttcgttggtgacaacgacgtgataaggcgcgtttacaagatagacaagactgttgatgactatctgagggttcttgacattctaactgaagccggtgtgagagtcgcaccgcacataacgataggtttggatttcggaaagattcactgggagtacaaagccatagacatgctggtaaaatatccgatagacgtgctcgttctcgacgttctaattccaacaaaaggcacagaaatggagaacgttccaaagccgagcgtcgaggagagccttgaagtcgttaagtacgcgcgtgagatgttcgatggcgagctgagcataggctgtatgagacctctcggaagatggaggttggagtttgacagaggggcaatcttaacaggcgttgacagactgacgaatccgcccagaaaagttatcgaatgggcaaaagggataagggacgttgagattatctacgagtgctgcgttatgtagggctcaccaaacctcgcatcatcacaaatcagaaaggagaacgccgatcatcgccctctattttcaaagttcttcctttacggtaacgaacgagaccattgtaaccgtctgtccgattccctttatctcccttaacttatcaacaacgattttacctacctcttctgcgcttggagcacggacctttatcatcatatcccattctccagagattatgtggacttcatagacaccatcgagggccgctattctctcggcaacctccctctgggtgaggcctgaatcggggtcgtagcgggccaggatgaaggcagtagtccccaggtcaagcttcttgtagttcggcttcaccgtgaatttctctatgatgccctcgtccacgaggcgctttattctgtagtggactgtggtcctcgggatcccgagcttcttgctgaggctggctatgttctccctggcgttctccttcagttcgttaagcagcttaacgtctatggcatccaatcctcccgtcatcgctatccccgttgtcatttgttcaacaaaaatctggactaattgaagtctctacttatttaaggttttccttcagccagttggcaaattccctcagcgccctgccgcgatgtgatatgcggttcttttcctccgttgtcatttcggcaaacgtcctgtcgaagccttcaggtatgaaaatcgggtcgaacccgaagccgccacttccccggggttccgttgctattttgccgtcaacgcgaccggtaaagatgtgtagctcgccgtcccagtaggctatcacgctcttgaaatgggcttttcggttcttctcaccctggaggagcttcagaatcccctggtatccaatcgttttgtaaacataggcggagtaaacgcctggaaatccttttagagcttcaacgaagagccccgaatcgtcgaggaagaaaggtccatctactctctgtgccagccattttgccccgtactcggccacttcctcgagggtgtccgcctgtatctctgggtagctgacctttagctggtaaacttcgactcccagcggttcaaagtactttctcgcctcttccacctttccaggattagacgtcacaaaggccagcctcatgcaaccaccgaaaagagaaggagaaacggcataaaaggtttgatgtcagtggatcgtgtagccaatcttctcgacgagctccctgcgctcctttctctgctcttccgtctcgatcttgttcgcggccttgccgtccacgacgcccaggacgcttcttccgaggtctgtctcggccactatgacctggaacgggttctcgctagctccatagaccattgcaactgccgggtggttcttgacggtgttgagaacgtttatcgggaatgcgttcctcataaggatgacgaagacgtggccggcccctatcttcacggcgttcttggctgcgagctcctcaagctccttgtcgtttcctgtgaagcgggtgagctggggctttgcctcgttcattgcgattccaaactttatccccggaactgccgtcagaagagccctggcgaggtcatcaactgtgaatatcgagaagttgccctgcccgattatgacctcaaccccctcgggcttttctatgtcaacgacctctatcctgaccatccgacatcaccagaagagtttttaattgtcggataatataacttttctgggtcggtggtgtttgaacatgggggaagtaaagcttgaagagatcgagtttttggtggagctgctgagcaaataccccctggaaagccttaggagcatagcccgggaagaggggttagattattacaagcttaagcgcatctatgacaagtactatggtaaatacctaactgtgagcgcaaggtacaacataagaattataggtctcaagagctttgttgcttttcttgcggtttctcctgagagccttcttgagactgcaatacagctaaccaagaacccctttattaaatatgtgaatccggcttttggctttaagaacggtttgtccttatatttccaggttccgcatgaccaagtggatcttatagatgaaatgcttggaaagtactcagatgacttcgagtactatgaggttagggcgtacactaagggtgaacttcccgatgagtggggggactgggatcttggctatgagtatgccatcctgatggacatcctcaagtgggacgctcgaacacctatcactgaaattgcagaaaaactcggcaagtcaaggcccaccgtcaggtacatgataaaccgcctgaaggagaagggcatactgattaattttgttcctctccccgacatgaatgtctcggatcgaggaattatcggaatcgcgaaagagcttgacgaagaggtgcttaaacgattcaacgactatgagattaccgttggcgtgctcccgggagaggggtatatcttagagtggttcttctcctcaaaggaggatatgggttcaaaaatcttggagttcagcaggtacgttgagaaaatccttgttgagtactttgatccgaccttcaaggagcttaacgacagaaattccaggatggctttccagagaatggtgaaaaaagacgggagcggctacagatcaatacttgagttttaaagcctcattaggatgagtgggcagtactcaagtccgtctatttcaccagtagcttgatactcaagtgctctacagtcatggcagatgtacttgaatgggcagctggaacatgcgggtatgttatccttggtcattctccagaaggccctgaggcgttttctgcgggttaccttcctgaggctctcttttttcagatcgccaacgatgtagtttctgagtaatggacatggcagtacgtagccatcggccgtaaccgcgactgttccagcgagacagtcgtggtactcctccgtggtcgggttcagtatgcgtctgacttctatggtgttaaagctgatttttttaacggaacctggatataatacgtccacgtatagctcccctggaaagctctctcttgtaacatcctctaggtagtctggatccacaacagccagaactccgtgaagccatggatagccggacagttcctctggtccgacgtcagggtactttatctcggctatgaagcgaatctcttctgctggcgtaatctttggaatgtcttcgaacctaacaaccgcataaacttcagggatttctatttcagatgcaaagttagccagcgccatcagaggttcaatgctatcgtagttggttagccagagctccttaccgcccattttcctgaactcgagtatagcccttttgaattcctccaggctcaaaggctcccttctgaggatgaaccggttgtttcctatgcacccaattgacctcggaattccggtaacctctgaaaattttccctttcctgcgccaagttggaggatgagcctctctatcttccccctgtgcttcttattgctccatggaggtttgccaatgattacgttcttgactttattggtcatgctaattggggtggcaatcgactcaaccctctccacgattctcaccgaaaaaagatttgcttcggagtatatatactttatctattccgattttgcaaactactagaaaaagtaagcaaaaaatggaaaattactccctaacagccttgtctccctcaagccagaaagctccttcgggggtgacctccttcttccacactgggacccttcgttttacctcgtcaattgcccactcacaggccctaaacgcctccttcctgtgcttggcactcgccacgatcagtattgtgtcctcgccgacatcaagctctccgtatctgtgccatattaccatgtccagaatcgggaactttttgagtgcctcctctcttatcctctccatctctgcttcggccatctctgggtaagcctcgtatatgagcttctcgacctttcttccaaggttctcgttcctaacctggccgaggaacacaacgtaagcgccggactctggaactcggagcagggaaattgcctcatcaacgctgaatttatctttggtgagtctgactttcatcggaaatcaccccgttatgtcattgtccgaaacccaattaaacctaccgatggatggaaatcagaattcaaggggtgaagagcatgaatggaaaaagggtcttggggcttttaatagccatcctaatcgttgcgtcggccggttgcttggggggagagacaacgaccgatactaaacctgaaaccgccgactcaatgcataccagtggcataaatagtacaaaaacgaacactggcatcgactcctcgtcttctaatagagaaaccggagacgttgaccttgaaagcatagtcgggaaaatagaaacctactcatatcatcaggatgcccttatgaagcttgatgtgaccacaaccgaaggcaacatcacaatgaataccaacgttagcatgctgataatcgagaatggatacgttgatactgtgggaagaaaggctctggttaactccacgatcacaattctcccagataatctgactgagaatatgctccagattgtaatagggaacaagacttacataaagaccagctttggagtcaatgagattaacttcacgaccctatgggattcccatcctcttagactagttgaggccattatccaggaagaaccgctcgccaagtacacagagaacgggactactgttttcgtgtactcactatcggaggacgttatccttcccttagccgaggcatatcttagtccgggcgattcaaacgtgacgataacggatgcagtccttgagatccatgtcgccaacggtacaatcatccagataaagctagcttactcactggttgcaaagatgtctagtgacgatgcctttggacatatcgaggtaattgaaactggaacctggaagagcacggtcagaataacctcaataaacgagaaaagggaagtggaacctccgactacttaagttccactacctcaaagatgttcatggccaggtctatcagaaggagcttgttcaacaggggctctccaatgcccgtcagcagtttgatgacttccattgcctgtatcgaaccaactactccagctgtggcaccgattatcgggaacttctcctctttttccctaactttcggaaaaatctccctgaggctctttgtgatgcctggaactatcgtagtcacctgcccatgcatgccttccactgcgccgtggacgagcgggattcgttttctgtgcacgtactcgtcgagcaggtagcgggtctggaagttgtccaggcagtcaaccacgatatcaacgtccttaaggacttcatcgatgttctctgcagtgagtctgcctgtgtaggcctctatctttatgtcggagttgaagcgttcgagcttccattttgcggattccggctttgacctccttccaacatcttcctcccagtgaagtatctgcctgttgaggttgctcagctcgggggtctgttcgtcgatgaggagaacggtgcctattccagcggcggccaggtaatacgcgacgggactgccgaggccgccaacaccgacgactgcgacttttgcgcccttcagtttttcctgcccttcctctccgaatatcattatctgcctgtcatacctctcaagttctctctcggtcagcatgttaaccaccacttacaggcgggaatatcgcgattacatccccatccttcaacacctcgtcgaaccttacgtagcgcccgtttctggagacgttgacatcggcaaggtcgtcatcttcggcaaaaacttcgttcttaaggacaggatagcgctccttcaggatttcaatgaggtccctcacggttatcccatcgggaacttccagttcttcctcgctcttgcccacgagggagcggtagcgggcgaaatatctgacttttattctcaccttttcatcaccgggataaaatagaaggcggagttaaaaagggttgccaggataaaattgtgaagctctaccatggcacgctcttccagcccatcctgtaggcgaagtagttggccccccaatgaatgaacggggacacgaccagaaggaagattatctgcccgctggaaagagtttttacagggtaggcgaatgccagagcgcttatgaggaagccgagctgatcgagtcctatagcaggatagcccctcgggaggtttgctctcctcttaatgaagcttccgacgagatcaccgataagagcgccgaatgagaggagaaatgcgagctttacggcagtctcaaggcttccgtagaaatcaggggttatgaagtactggactattccgaccagagtccctatcaggacgcctccaatgaatcccctccaggtttttccgtctcccagaagcctcctgccgtctctccagacccttccaccgtctattggtctgccgcctccaacgaggacaggggatgcgttggcgaagtaagcgggaagtatgtaccagaacgcccagaagattgatgaaagccagcccatttaatcacctactttatggcgggtagaatcgcttataaggattaaggcggttggattacaaggtgaaagtcatgaagaaagccgtcgcgattgttatcctgatagttctgattctggccctgtggggagcttacgtcgcctacgctgtgatgactatgaaccccctccttacggcagagtggggcaacgtgagcgaggagaaggttgaggtagtggtcgatgcggggcttggaaaggctctccttgtcccggcttccgttgagagcctttcaatgcagttcaacggcgttgaagtcgcttcccttgaggaatttgactactcacccacgaaatcaaacgcaagaatcgtgataggcatcgacccaaatgaactagtaagggcactcgaaaggtactttgagagcaaccagcacggtgagctcagcgtcgaagccaagctggggcttttcggtctgcttcactccacgctcactttctccagggaattccagcaggacatcctcggccagatggacttcaaagccgagagcaagccgatctttggtggtctcctctacaccccgtccgttgagggaacgaaagtagtttggctgggggctgagaacggcgtctggaatctgaagacctatgcaacgctgaagaatccgaactcattccccattccagtctcaaaccttgagttcgaggtgtctgtaaacggcataaaagtaggtgttggaaacatcagtcagggagttacgataccggctggaggcgttgcgacggttccaattgacactgagatatattcggagtaccttccgacggttctggtagcccacataaagaacggagaggagagctcggttgaggtaaacttctacataacagtgagctcgggcggtaagagtgccaggataaatcttacaagtgagaggatagtaatacagacggacataatggccagcataaacgatgccctttcgggggtttctcctagggaatgacttttaaaccgcttttctccccttatttttggtgagagcatgaggggaaaatttgacgtgagagccgttcatgagttccttaacaagctctgggaggatgtattcacgctcaacgaggagctcaaggaggaactcccaaggttcggctttaaggtggaagacgttgaggaggtctttggagcgtaccttttccttgacggcgagtggaggcagatgctctatccccaccctgcctttgaagtgaagccccagattgaagttggcgcaactccagaaagctattacttcgtcgttgcggttccaaaagagaagattagcgaggactttcttgaggcatttctcgaagcctttccgaagagcttcatctacggaagtgaggacttcctcaacgacgtctacaactgcatgagggacagtcccctgtcggaggagatcatcaagagaatacatgaaagctccgaaaaggtcttccagttcgaggccaactttgacgatgttgaaaagcttaaagagggactcttcaaggttatagaactcggaaagcgctttgaaatctttgacctttgaggtgtgtctatgggctacgaggaggcttttccggccgagctcagggaatactacagaaagctctttgggagcgaggcagaagagatcatggcatcattgagaactccagtcgagaagtactacatcagggtgaacaccctaaagacgagcaggagcgagctgatgaggcggctgaggagagaaggtttgaagcccaagaggagtccttaccttgaggaggggatttacttcgaaagagaaggaccgaacttcgatgatgattacgatccaggcctcaagaaggttgtcgcgaacaagtttgccagcgagagtgtctatcagggagcaatgctctacgccccgggagttctgaaggctgataagggtataaagcccggcgacgaggtcgaaattagggatccgagaggacttctggtcggaatcggtatcgcgaggatgagcgggaaggagatgataaccgccacgaggggactggcggttgaggtaaccctgccgaagttcaagctcccaagtttgagcgagctggagagtttcaaagagggtctcttttacgcccagagcctgccctcgatggtagcttcaagagtcctagagccgagtgaagaggacctcatcattgatatggccgcggcccccggaggaaagacctcacacatagcccagctcatgcagaacaggggggagataatagccatcgacaagtccagaaacaggctgaggaagatggaggaggaacttaagaggctcggcgtgaagaacgtcaggctcatccacatggatgctagaaagctccccgagcttgggattgaagccgataagatactcctcgatgccccctgcaccgcgctcggcataaggcccaagctctgggagacgcggacgccaaaggacattgaggcaaccgcgagataccagagggccttcatctgggccgctataaagtcccttcggaagggggggacgctggtttactctacctgtacaatcagctacgaggaaaacgaggccaacgtgaagtacatgctccagaaaggcctgaagcttgaagagcagagcgttttcatagcatcccacggaattgacatggagggcgtccagaggttttatccgaacaggcacctgactcagggcttctttatagcgaagctcaggaaggtgtgaggatggactggaaaaaggtttcacttttcggggtcgcgatgggaatcatcgccgctctcctctggtgggctggggtagatgaagtaattgccattctaaagggagcccgtattaagtaccttgttcttgcgttttttgtatatatcctgggcctcttagcttgggcaatgagatggaaggttctgatagatgccctcaatatggacgctccgttttcaaaggtcttaatggccttaatggccggcatcttcgtgaacaacgcaactcccggggcgcgaggcggaggggagccagtgaggacgtattttctggccaaagaaattgagatgccctacggccctgtgttcgcgacggtgatgatggacagaatacttgacctcattccagtggtgggaatgcttgccgttgccaccgcgtacgtctattcccttggttcaaggtcgctggcgataatcctgattttcctggatgttgtgttttttggtcttgttgccttcaccctgggaatccttctaagcgagaggaagaccaagggggcgctccgctggttcttcaggcttgtagagcgcttcctgccgttggtggccgaaaagtaccgcgaaaagtttgagagagttgttgaagtagacgttccccgcttccagaacgatttcaggtttctcatgacccacaagagggcttttttacttgccactgtgtactccacactctcctggctaaccgtcgttgttaggggctattatgctttcctcgccatagggtattccataaagtttgcggacgttgtcgtcgttcagatggtcgggatggtagttggaatgttgagcgtgattcctggaggggcaggtctcatagagacggtcaattcagcaacctacgttctccttgggattgagaaagagcacgccgtcaccgctacgctccttgacaggctcatctcctactggataccgacagcggtgggggcactggcgacgacccacctcggggcaaaaatccgcaggaaaaagaaaggtttaattaggtaaatccccaaggattaaggagaagtgccctcggtggttcgatgaagttcggtgtcgttgccaggagagacaaattggaggcactgaagctggcctacagggtttacgatttcctcaaggttagtggttttgatgtcgtggtggatgaggacacctacaggtaccttggagagttcagtgaggacgacgttctccccctggaggagtttgatgtcgacatcatagtcgttatcggcggtgacggtacgatactccgtgtggagcacaaaacaaagaaggagataccgattttaggcattaatatgggcaccctcggttttctgacggaggttgaaccccacgagaccttttttgccctgagcagggttatagagggagactaccacatagacgagaggataaagctgagaacgttccttgacggagaaaaccgagttcccgatgctctcaacgaggtcgcagtacttactgggattcctgggaagataattcacctgaagtactacatcgacggcggtctggctgacgaggttcgcgccgacgggctcatcatctccactccaacaggctcaacaggatacgcgatgagcgcgggcggccccttcgttgatccgaggcttgacgttgtcgtgatagcccctctagctcccatagccctcagctcaaggcccatggtagtaccgtcctccagcaggatagacgtcaggaacgttgccatgactagggaggtaatcctttcagtggacggacagttttacacgtacctctcgccagaaacagagataacgatagtcagatcgccaagaaaaactaagttcgtgcgcttcaacagggagatatatcccaagtacactatgaagataaagagcaggttttagagcggttcgaactccttcagaaggagtgctctctcctggttgctcagcacttcttcatccacgaagactatcagacccgagccgtgctgaatcaccacgtagtccttgagcgcggacaggaacttgaagactgatttgaagtcgttgtagagcatcaggtactcgaggcagtctattataacgaccgagcctggattttcctgtacgaaatcgaggatgattccctgaagaacgtggagggcggttggtgcgacgccttttccgctctgcgtgacccatatggcagaaacgttctccctattgagccccgaataaaaatcaggggacctcgttatgacaagaacggggaagtctccctccttgaggacgtctataacgtcgagcaatctgtttttggaaaagactatgtgggccttaaatgagctctttagctttggaactttctttactgcaggtaagtatttcatttccacaagctttatgtagtggataacagagtatataatgccgacgatggagatgaaatacgtaacatactgaagggtatcgaacgagctagcacagcagaaatcgtcaatcaagtcggttattctaccaatctcccctatcacgaggaaaactagcgaccacttgatgaaagcattcaactgagggtctccgtatttgttgagcctccttataaggaatacaatagcatacccaatagcgaggaagagtataacgtcggctacaaaaacgagccaaggtactatcagtcccatacaacttccacctcatcggtgcggaacttctgtttaactacggtgtcttcaatcttgaaccttacccctccgcggtacattctcaggcctgtgtaggctatcatcgccccgttgtccctgcagaggtcgtagggcggtacgaagaacttaatccccctgtcctcagccatgattttgagcatctcgcggagcctgttgtttgccgcaactcccccgaccaggacaacctcttctttgccagtgtgggcaactgccctctctgtgacctctacgagggccgcgaaggccgtttcctggaaggagtaagcgaggtcttcaatcctgtacttgccagtacggtacttcctgacggcttcagtaagaacgcccgagaaactcaggtccatgcccttgacagcgtagggcagttcaatgtacttctccccttttagggcgagcttctctatcttaggtcccccaggaaagcctataccgagctccctcgcgaaggtatctatcgcgttccctatgccgatgtccagcgtctctccaaagacgcggtagcggccgccctctaatgccaaaacctgcgtgttcccaccgctcacgtagaggccgaccggatctttaacgccgaacatcttcgttatctcgacgtgggctatgcagtggttcacgccgactatgggcttgttgtactttatcgcgagcgccctcgctgctgtggcaacgaccctgagtgcaggccccagcccaggcccctgggaaaatgctattaggtcaacgtcttccatcgttactccagcggtttcaagggcctttctgaggagcggcttcagtagccttgcgtggtgctcggcggcctcctttgggtggatgccacccttttccgttgtgagagtgtcaaatacgttggcgaggacactcttttcggtcactatgcctatgccaagagtgtgggcggttccctctatgccgagcgctatcatgctaaggcatgctaaaaggagagggtataaaagggtttggtattggaagcccagaacaggctatctcatcgagagccacttcagtgccctcgccgctctctcgggcgtcgggaagtttttaatgccgtgctcatcgaggagttcgacaccttccttaaccagctcgcccgccatgaagttcactatcactggcttgtcgcactctgcctctataactgccctcgctatctcctcgcttggtatgaatatcggcggcacgcagataacgaggagtgcatcaacgttctcatccttgcagacgacctcgatagtcttcctatagcgctcgtagtccgcatctgctatcaggtctatcgggttcttcaatgagcactgagggggaaggaaggagcggagctcctcgaccgttttctcctccagcttcgctatctcaagtccgagcctctcgagcttgtcggttgccagaacacccggccccccggagttagtgataacggccacgcgctttccagctctctggtacatttcgaaggccttcgccgcgtcgaacagctcctccatctcctcgacctctatcgctcccgcctgcttgaacgccgcgcggtagatttcataactcccagccagagagccagtgtgggatgctgctgctttggcgccgcttgcgctctttccagccttgagaactatgataggcttcttcgatgaagcgtagcggagcgcgttaaggaagcgtctcccgtccttcactccctcgatgtagagggctatcgccttggtattttcgtcatcggcaaagtactctaaaaaatcgctctcgtttaggtcagcagcgtttccgtaggagacgaaggcggaaaagccgatcctttcgtcgtttcccattgccaacgccgccccgccgaaggcgccgctttggctgatcaatgccagtccaccgggcttaacgcgaacctcgaaggagccgaagaacttcccgtgaacaccgaagatgcccgcgcagttcggccctatcagccttacgccgtgcttcctcgctttcttcacaagctccctctccagctcctcgttgccgacctcagaaaatcccgccgagataaccacggcacccttgatgagcggccctatctcgtcaatcaacgcagggacgattttggctggaaccgctattatggccgtatcaacttgctcgtccagcttctccctgatttcgaaggttttaccgctcacttcaacggttccaccctttgggttcactggaattatcttccccttaaagcccccttcgacaatgttcctcaggatttcgtaggctatagcccccttcttgaacgagccgaagaccgcgacgctcttcgggtagaaaaagaagtctaggctcatcctcaccaccacttaccgttttcagcgggacaaaaaagcttattggtctgcatgagtaagtaggaccatgagaaaaaagtaccgaaaagtcgtcgttggtggaaccttcgacaggcttcacctcggccacaaggccctgctcagaaaggccttcgaggtagggaagatagtctacatcggcctgacttccgacgagatggtcaggaacaagccctacgccgagaggatactcccctatgagcaccgccttaaggatcttctcaagttcattgaggtaaacggctacaccaactacaggataataaagatacatactgcaataggcttcgctgacagcatgaaaagtctcgaggccatagtcgtcagcgaggagacgtacaaaggcgctctcatcgtgaacagggcgcgcgaggagaagggattaaagccgctcgacatcgtgacgattcccataataaagagctacctcggggacaagataagctcttctttaatccgtgccggcttgattgacccctttggaaggccgctccactggaaaggaaactctccgaaagacgtttaagcccaaaggtgataacactaacggtgatacccatggcgaagctaaaggagccgattatagcgataaacttcaagacctacatcgaggcaacaggaaagagggctctggagatagcgaaggcggctgagagagtctggaaggagacgggcataacgatcgtcgtcgccccccagctggccgacctgaggatgatagctgagagtgttgaaatcccagtctttgcacagcacattgacccgataaagcctggaagccacaccggccacgttcttccagaggccgttaaggaagtcggggctgtcggaacgctcctcaaccactcggagaacaggatgattttggccgaccttgaagcggcgataagaagagctgaagaagtcgggctgatgacaatggtctgctccaacaacccggcggtttcagcggcggtcgctgcccttggcccggactacgttgccgttgagccgccagagctaatagggaccggaatcccggtcagtaaggcaaagcccgaggtagtcacgaacaccgtcgagctcgtgaaaaaggtaaaccctgacgttggagtcctaactggagctggcatctccacgggagaagacgtcaagaaggcactcgaactcggaagcgttggggttctcctcgcgagcggcgtcacgaaggccaaagacccagagaatgcgataagggacctcgtgtcacttatcatttgaggcctctttttccaaacttttgcactgttttgtagtcttaaagtttataagccaaaactcgggtctctctatcgggcagccccgtggtgtagcggccaagcatgcgggactttggatcccgcgacccgggttcgaatcccggcggggctaccagtacagccctttcttgcgaaagcgctggcggaaagttggtatgctcttttaaacaggctcgttttatggggggttttacttaccaatctgctgattcaaaaggattttatcaccgcatagtgcccgaagggcactaaaaagaaagtcaaaatcacaattaataagaggttttgagagtaaaacccatgcaaagttgctttctggaaagagcatacgctcctcaataagcaaagttcgagaagaagggcacacttttggtcaagctttttccaaaagcttgaagggcaaagtttcatcaaagagcgaatgtcctttttaaactgctgggtttcagtgattctcaccataaattgggcaatcctcaagggtttactcacaatataacgccccgaagggcgttaaaaaagaaaacccgcattactccgcccctctatcaagagaatctaatcgcatcaagccaacatcaagaagacattcaaacttttggtgaagctttttctaaaagcttcagcgccgctttcactatcgttcaagcgtccttgacggatggcggaaagttggtatgcttttttaaacaggctcgttttatggggggtttactttcaattggctgattcaaaaggattttatcaccgtatagtgcccgaagggcactaaaaagaaagtcaaaaatcacaattagcgggaagattttggaattaaacccgcgtgaacttgcttcctggtggaagcatgcacttcccaacaacaagttcaagggggaaggaaacatttttggtcaagcttttcctaaaagcttgctggcgaagtttgatcaaggttcgtagctctttttttagaatcctaatccatcgtgattttccaattcaaatggctttttgaaagtgagaacccttaacaccctgtcaactcgtgtttaactctaaatcgacgccctttgggcgtcaaagaaaagaaaacacccttttttcaagaagtttcctataaaggttccactcaaaaatgagcacttgcagtccaaaatcctgaataaaaagccacctcaaagaagagctacaaactttgatgaaactttgcttgcaaagtttcttggcaaacatataaaaggagctggagattatgtccaacggtgaaaacaatgagctggaaggacagacttggtttgattcacatctacactggcaacggaaagggaaagaccacggctgcgtttggactcgctgtaaggatgctcggttcaggtggaaaggttgccatagtgcaattcatgaaagctcccaaggtctatggagagcagaagaagatagaggagtgcggagccctcattgagtcctttggtttgcccggctttgttcacggaaaacccagcgaggatgacataaaagctgcaaaacgggcacttgaaagagcgaaggagctggtgtcaagcggcgagtgggatctcgttattctcgatgaggtttgcgtcgccctcggctttggaatgctcggtgttgaggaagttaaggaagtgataaagaacaaagctgaaaacaccgaactcgttctcactgggagatactgcccggaggagctttttgagctggccgactacgtgaccgagatgagggaagttaagcacccgtaccagagagggatcctggcgaggcgcggtgttgaatattgatttcgacaattgaccgaaaagctttttagttagtaaagcttaagataagccgagggagttttagttacaattttttattaaagaagcgaagggggtgaggagagatgagcgagcttatccagcagattgtgcaggttctcaaggagcaggtcgttcaggacaccgtcgtcccgaggaacattaggagggccgccgagcaggccatcgaggttctcctcgatgagagccgcgacccggccgttagggccgccgatgctatagccatccttgaagaaatcagcgaagacccgaacatgccgatgcacacgaggaccataatctgggaagttctcggtgcccttgagcaggtcaagtgagcctttgattttttccgctcatttcctgctcagataccacagctttgcgctttcttccacgagttcagccttgtagaacgcttctctaaggcttcttccaacggtcacaatcccgtgcctctccataagaaccgcgtccgcttccctgattttttcagccacaacttctgccagttcttcggttccggccggtctgaaaggtgctatcggaatcttaccaaggtatatctcggcctctggagtgagtattgggagctctccagtgagcagtgcggaagcaactatcgagtacggcgggtgcaggtgggcgatggccttaacgtcgggtctttcccggtagactgcaaggtgcaggcggtattctgaagagggtttaacgccgcttatctgtcttccgtcgagggcaactacagcgacctgctccggagtcatctcgtccatcacggagccggtggccttgatgaagaccagatccccaactcttatgctcaagtttccaccgaatgccgcagtcaggcccctctcgtgggcttttctggagtacttcacaagctgggcttttgcagttctcattcttccaccaccttcactccgtagccgcagtccaggcagatggccttcttccctctccatgatagttcgccaccgcagatcggacaaacgtcgagctttccactctctttccacctctggagggtgtccttgtcgattacgaggtaaatcccatcttcctcttctctgaagtccccgaagacgggggcactctcaagctccccactctcgaggctgattattgcaggctcgactccaatgttcccctcgtactctatgtcgttcgcggggagaacttcgagaatgagggcgttgagctttctgtcgtggtaggcaatgacctcaagagcgtcgctgacctctccggtcgcgggtattacatcaatcacaaggctctcacgggggaataccaaaacaacaacgtcctggtttctcaggagcgcgagtcccttcccggagtagagctcctcaagtccaagctctttcaagattgtcttcacttcgtcgccgctcgggagggacttcttctccagcattatcttttcaagcctgtaagcgagaggaatggcaaccgttactgggtcgtaggccctcatgttctcaccgagctgaaaatgagagaaaaatttataaacctactccagcgattatggaacgggttgcccagtagggtcccgcggtagcctagcctgggagtggcggcggactgtagatccgcaggtccccggttcaaatccgggccgcgggaccaccagaattcttctatggttctcaacgttgccaattccgtttttaagaagtctcccaagctgtttggttctgtgtgcttttagcaggatgattaacctgcactgcggagtataaaacacttaatcataagcggaattggtgaaattaatgctgtagaacgagaaaagagaaaagaaaggttctcacttcatcttctcgaggatgatcgccgggcagaccttcgtaacgccgtcaattcttcctatcttctctgagattatctcagaaaggtgctctccgtccctggcccatacctcggccattatcatgtggtcgccgctggtcaggtagacatgcttgacgaagtcgaactccttgagcttgttggccacctcgaatatcttctccggcttcgtgtctactccagtaatgctgaccaggttgtagccaagcttcgctgggtcaacgacgatcgtgtactgctttattaccccggcttcttctagggccttgaccctctttctcacggccgtttcgcttatcccaagtaccttggctatctcggcgaatggtgttcgggcatccttggtgagcatctcaagtataatcttgtccctctcgtctaacataatctcaccacctaagtttcaaatacgcactaatcctttattaaggtatcggattttttggtttattattcaaacttttctgagtttgaggactgcctcaacgtggggcgtgtgcggaaacatgtcgaggccaacggcctcttcaatcttgtagccttccgagagctctttgaggttttgggagagagtctttggattgcaggacacgtaaacgagggtctcaggcctgtcttttaagattttcctaacgagcttggggtggaggccagccctgggaggatcaactaccactgtgtcatattcggagaggctgttaacgtctttgtcctcaccaacgcggaattctgcatcaactccgttaatctgggcgtttttctttgccatctcaaccgcgaacgggtttatctcgatgccctcaactttgaaacccctcttcgcaagatagattccgaacgtcccaacgccggagtagaggtcgagaaccttctcaccttccaccagctcggccacttttcggacgaggttaacggcctggtagctgttcgtctggaagaagctgtttgggtggattagataagtgacgtcgtcgagcttctcccttatgaagggctcaccccagtacctctctacatctccgtaagagacgtcgctctcggtcctgttcacgctccagtagatggaagttgcgtacgggaagtattctggaaagctctctgggagtttgccctccgaagttacgaggttcaccatgagttcgcccgtgaacttgccctctctcatgacgatgtatctcagaaagcccgcgttcttccttatctcgtacaaagtcggcttttcgtcttctatgaattccctcagggacttcagaacctttcggcttgtctttccaaaaacggggcattcctcaatgtcaacggcatcccaccatgttccgtatctcctgaaccctattccccctgtgcttataacgacgtctatcctgtttctgtggccatagattacaggggacgggattacatcaacgtccgtcccgatatacctggagagcttctcactcttgaactctatttgcttctcgtaggggagatgctgaagaagacagccgccacatacgccaaagtacgggcattttggttcagtcctgatcggggactcttctataaccttaaaatccgtcgctatcagctttttctttttcctcctccagcgcgcaacttccactacatcgcccggagcggtgtacgggacgaggatctcccttctactagccctgattgtcccaagcccctcgtcgctgagcctttctattgttccccttatcacgctcatggccacaattttgagcaccgttttataaatctgccgagctgacgattcgacaaaagtgttcacagaaggtttatttaggtctccaacgtagtattattggtgccgggttcatgttcggccgccgcaaggatatggtctataaggttttgagcactaagaagagggcagttgccctccaaaagctgagcgcagagcttgaaacccctgccccagcgctgcttaagaccgtcaaggagcttgagtctgagggcctcgttgaggtcttctacggcgttgataaagcctccattatggttcgggccaaaacacttgaggactacttcggctctgaagtgtaactggtcacaataagcaaacgagaagaggagagctgattaacatggttgccgttgtggtcactggaaggggtggggcaggaaaaacaacgatgagcgcgaacctctcaacttatttttctttgaacggctataaaacgctcgtcattgacggcgacctatacctcccaaagctggcctttcattttggtatctacaaccccgtcacaaacctccatactcttctatctactcctgatgctagactcaaggacgctatctaccacgacgtcaagacaggggttgatgttcttcctggcagttcaaagctgtttgatatcctcaccatggatgaaaagcggctcagagatattgtgcgtgacgcggcggagaattacgatgtgacgttcatagactcccccgttggaattccctttgataccatctctaccttcaggctcgcccagtaccagctcatcatcgtggagcttggcagatgtccagttcactccttcaggaagatggtggagaacgaggtggacaagcttaaagcccttggagaagcctacggtctcaaagttggagtcatactgaacaaggtccgcgaggaaaagccaatagttgatgacatcgttgagtaccttgaggagagcgttggcgttcccgttgtgggcatagtttcctttgaccccgccgttccagcgagtcaaaacaggggtattcctgttgttgtgaacgtcccgcactcccatgcagcccgggacatcaggatggccggcgatgtccttagggagtggatctttggtgtagaaatgaaaagaagtttgctcgatagctttcttgatacactccgttcactctttctgaggctctttccttctggcaaaaagctctgagaccctgaccagtgggaggaaagtgtattttgcacctatggtctcttcggccccttcctctctgtcaacgacaaccattatggccgctatttctgccccctccctttcgagaacttctgctgccctcaagacgcttccacccgttgtagtgacgtcctcgacaagaagaactttatcacctgctttaacctcaccctcaagctggcttccggttccgtgtccctttggcttttttcttacgatgacgagcggtttttcagtctccagagcaagggcagtggctatcgggacggctccgagttccggcccggcaaccctgtcaaaggttatccctcttttctgtgcttcccctgccatgagctttgctatgagcttgagtgcgcgaggcttggtgctgagcttcttgacgtttatgtagtagttgctctccttccccgacgtcagtatgaagcggccaaatagtatcgcttcctcgtcaaaaaacatcctgatgagttcatcttttgagtcactcatggtaatccccatgattcacctttgggtttaagtataaaaaactgccgggaaaagcttttaatgtaatcatggaaagtgttaacggtgatattatggtcagtgtaatcatgctgatactttacttgatatccgccctgttggtgggggtaaagctgtacggaaaggttgataactggctctctaccctggacaggataactcctatagtggaaacagggaaagccctgaagtatggatttctggcttttatgttggctgtcgttcttgaactccttgcgttgtatttcattttttctgatgcgggccttctgttcctgccgctcgtagccggttttgtagaggaaggagtgaagctctttccatatctccgtggtggagatgagctctaccgctggaggctgacagtcaaagttgctttgatattcgcggttatagaggccgttctttatggagtgactcttttcttctccggcaacatcctgggtgctctcctcagagttgtcgtggtcatgtatcacgtctccttcacggcgatcgccctcgaaatggctctaaggggctctctcctttcgggctacctgaaggcggcgttgcttcacaccctctacgacgctcctgtttttgtaacattggcagcttcggacctttctctgctggcttccattctgggaatcgtcgcgatcgtgtacacctactatcgtgtggacgaagcctttgaattggctcacagaaaagctagggaagctctggaggaaagaaaaaggaaagctcgggagttctgggagggaaaaggaatctcactcgccgaggatgagggaggggagttcacttcttcgccttgaacctctcctggagctcgtagagctccgccaccctttcaattgtgtcggcctcttctgggcttttgtcttccctaagggcgacgtagcgcgggaatctcagggcgaagccgctcttgtacttcgggctcttctgtatctcctggtaggtgacctcaatgacgaacttcggctctatctcgacgaacttgccttcctggcgtactatgtatggcttgagcatcttcgtgaactcgaccaagtcctcgtctgtgaagccgctcccgactttacccacaggcaggaactcgccgctgtgcgggtcgtaggcagcaacgaggaacgaaccaagcagatgggccctccttccctctccccactctgcaccgatgatgacgagatcgaggttctccatcgtgggcttaatcttgagccacttcttgcctctgttccccggttcgtagatggaatcaagcctctttgccataagcccctcatggccgagctcaagtgctctcctgtagaaggcctccgcttcctcaactttctttgttataagctgttcggcgagctttatcttctcgctctccttcactatttcttcaagcttattcctcctgtcgatgaacttagtctctatcaggctctcgccgtcaacgaacatgacgtcgaagagattcagttcgagcggtatcttctctatcatctcgtcgatgttgtacttcctcctgaagcgcctaagcacgtattggaagggccttggccgtccattttctccaactgcgacaagttctccctcgactatggctttctctggcttcagggccgcttttatggcctcaatgacttctgggattgatctcgtgacgttctcaagccttctggaatacacgatgactttgtccccgtccttgtgcacctgtactctcgcgccatcgtactttatctcgaaggccgcttccccacccatctcgatgagggcatctttaacactggccgcgttctgggcaagcatcggcctgatcggcttgcctatctgtatcctgacctttgagagcccctcgttgccctcgagcttggctatcttggcaacgtatccgaagtcgctcgtcagcatgtaagccctctcaacgagctctggcttcaccctgaaggcttcagctattgcatccctaagaattccctcagcgactccagtgcgcatcgtccccaaaaccgtcctcgccaggtacttgccttcctccggttcagcgtccatgaagaggttggcgaggtacttcatcttcctgtcctggcttccttcgccttgggcctccgctatcttgacaaaggtgtcgtaaacacgctttatcgtgagcggctgtgagaagaagctcttctgcttctttttctttatggccaaagcaacgctctctcccaggtcgccagtgtccctaacggagtcttctatctccttttcggggactcccgttgccatagagacagcttttattaggagcttctctcccacgcctagctccctctcgtcccaatcgggaaagacctttccgaggattaggtatggaactatctcaaggagctcgtctggagtcttttttaaaaaatcggcaacgaactttgtcttcagggtcttgagcgtggtcttttcgagccgtctatagagatcggccagttcagagtagcgcatatcgctcattctcaccaccggataaaatacggcaaggagaataaaagggtagcgggctacccgacccagcgcccgaccttcggcctctcggtgtatatctcggctatgtcgtagggaaggttcatatcactcagcaactgctttgccttttcagcttcttcgtctcttacgagtgcaaaaagcccctttccgagcattatcattgagctcgggttcttcaggactttatcaagctctctcgctatctcggagagttctcccgggagaagacctgtcttttctgcaaagtttctggccagaaccatcattctctctggcttcggctcctttaggagttcttcaagcgcctttctgccctcgacttcgatggcctttacaacgtccccgtcgagcacttcccttgtggacagcctgcctaggggcacaacgagaactttgtagtcctcgaagaacaggttgtcagtaaccccgattccaggacctcctggtttaattctcacctcaattccaccagcgagctgtccgatcacatctccaaggccacccttatgctttacctctgcctcatgggcaagctgagccgctctaagccacgtcccgccgaaggcgtagcttaaagctagagccgttccaagggcaccaccggcgctgtttccgaagccgtagccgttggggaagtcgaagtactgccatacctcaacctctccaaggaagtccttgggtacgagcttttccgcaacgtagtatgtgatctccgcttcttcccttttcacgggttccccgttgaaggcgacgtggatgtgcctctccagcgtcccagtctcgatgctggcgaagacgttggtgcccttcgagaggttcacaccagcgccgagcgaacctgccttcagcggctcttcgtggaacaccggcacgaagaacgccgttatgtgggctggaataaacgccctgatgagcatgctttcaccccagaattgttcagaagaggctcttaaaagcctttcaggatataaaaggaaagaagaggttgaagttcactcctcaacgacgtagatgggcacctttccgtgcgggatgccgtacttcttgccgtaccactcgctgaggacgtaccaagcagccacgaggagcactattccaagcggtagaagtattatccagctcctgactccaaggccgaagagcaggtagagcactgcacctatgctcgccacagtaacagcgtagggtatctgggttgtaacgtggtcgatgtggtccgagccggagaacatcgagctcataatcgttgtgtcgcttatcggtgagcagtggtctccaaagattgccccggtaaaggtcgccccgatcgtggcaaagactatttcgttcacgtggccgccagtaaaggcgagagccagctgaactcccagcggaaccattactgagaatgttccccagctcgttcccgttgtgaacgccacaaacattgccgccaggaacattatcagcggcatccacgggccgaggtcctggccagagctggtggcgaggtttatcacatagcttccggttccgacggagtcagccgcagttccgagagtccacgcaagcacgagtatagtgtttgcgaagagcatctgcttcataccgcggatgacggtgtcttcccactgctctacggtcatcttcttccggccgacgagcattatgctcgcaacgagaaccatggtgaaggatccccatagcaaggctgttgcggcgtctgcttccctgaatgcgtcaacgaacccataatctgtgaagtggaccccaaagggattgtcgagctcagtccaccagtcgagtccctgatcgtatgcgtagaggttggccgctccagtataccacaggccgaggagtgagactatcactagggtcaggatgggtatcacgaagtcccagggacttccgtttggctgtggagcgccaaggtcggtttcagtggtcataagcggcttagctccgtcgcggagaacctttcccgtagtccttgcgcggtactcggcatggagcatcggaccgtagtgcctgtgggtgtaggcaacgatgaagaccagaattatagctagaattgagtagaacctgaacggaaggcttgagagccatgcatcgtaggagttgtaagtaattccgacaccgtcaaatcccttgcctatcatggccagctcgtatccaatccacgttgatatcagcgcaaggcccgcaaccggtgccgcggttgaatcatctatgtatgccagcatctccctagaaaccctcgttctgtcggttatcggcctcatggtgttgccgacgattatggtgtttgtgtagtcatcgaagaacaccagaacgcccatgagccacccgaggactgaggcgcccctgcttgttttgatcctgctcccgagaacttttgcgagtgcgtgcactccgccagatttgtatatcaaaccgacacccgcaccgatgaggaagtcaaacaccagtatccttgcgttccagtcgtctgtaacactgccgacaacccactcgagggtctgagttgtccccgttaggggattccagccagaaaccataaggcctccaatccaggcaccggcaaacagcgccaagacaactctttttgtccatatagcaagacctatcgcaacgaggggtggtagcagagacagcacaccaaagtccgacacattttcacccccaaatattttcaaccaaaggaaattcggacttttataagtctttcgatattttttgccttattggttggatatttcgaagttctctgccatatacttggcgattctttgtcgttatggtactcggcgatatattcaagtacttattaggtcatcaaagctataaaaagtcttcccaagtatcttttggagttttacataaaacatctcttgactttcaatacgagctcaaaaggtttaggtataagaaaaagataatattgatctttgttttgctggaacttttaaatctgtgaaaaaattcagatgttttccaggagtgatttcagcttctgaaagtccttcctcagctcctcccttagcggcggcttgtagagggccgccgctggatggtacatcggcattattatgatcttcccgaagagggtatgcgcctcgaaggtctttccgtggattctgcttatcggttccggctcaaagccgaacttcctgaggaggtagttcattgagtaccttcctagggggattatgaccttcggcctgattatgtctatctgtctgtcgaggtagggagaacaggcctttatttcctcctcggtaggatcgcggttttctggtgggcggcacttgacgatgttggtgatgtacacctcgtccctgctcaggccaatctcagcaagaagctcgtcgaggagctttcccgctcgaccgacgaagggcagacccttctggtcttcccagtagcctggtgcctcaccgacgaacataacttttgcatcgtagctcccagctcctggaactgcgttcgtcctgagcgttccaagtgggcacttctggcagttcctgatcttctcctcaagctttttcatgagctcttcctttcccatcttcatcacgcgagcgttttctggttcagataagccttcagaaactcggcccaagcggtgtagtagcccttctcgtactcgtccctgaactcctgcgctgccatctcggagtacacgctcaaaagctcagttgcccgttccctgtcgttggtcgttaacagctgaacgataagagaatcagtatcgttgtcctttacagcgttcattatgccctcgactgctcttgcgtatcccctgccccactcatcgcttccggctatctttatgagcttctccatgtggcccttcgccttggttaagtccctcctcattattgccctaacgaacatctccatcctcatgtcacgcgccggcattctaccaccgcccctacttcccggcttcccttttaacgttaacctggggacttctcaattttgtcccatacctatgaaggaaaatcttcatatttacgcaaaagtttttatacctgtgaattgaacctcaagccagaggcagaattaggggtgaagccttatggctgaaagcattggcgaagttcccagcggtgaaaaagagtttgctgaatctaccaagcggatcagggatattgttgagttccctgaaataagcgaggaggagttttacgagcttctcaagaatgccagcagagcctatggcgctgaactcccgcacaggacgtactctctctgtcccgagacgaggagggttgttcctgcagtcgtctgggagaaggatggtaaggtctggataaccaagaagtgccccgagggaatgataaccgacctctattacgaggacgttgagatgtattacaggtttaaacggtggaagtgggacgagaaagagctcttcagcgccaacgttcagaacaccggtgtcaactgtccccttgattgcggcctctgcccgaggcatcgctcccatacgaaccttctcaacatcgttctcaccaaccgctgcaacctgagctgctggtactgcttcttctacgcccgcgagggacagccaatctatgagccgacccttgagcagattagaatgatgcttcgcaatgcaaagaaggagcatcctataggcgccaacgccgtccagttcactggaggagagccgactttgagggatgacctcattgagataatcaggatagccaaggaagagggctacgatcacgtccagctcaacaccgacggaataaagcttgcctttgacccagagctggttaagaagataagggaagccggaaccaacaccctctacctcagctacgacggaatgacccctcagaccaactggaagaaccactgggagatcccgctcatcttcgagaacgtgaggaaggcgggtggtccaggtatagtcctcgtgcccaccacgatcagaaacgttaacgaccacgagctcggtgcgataatcaacttcggcctcaaccacctcgatatcgtcaggggagtcaacttccagccgatctcccaggttggaagggttccgaagaaggagcgccagaggttcaggataacgatacccggtgccatcaagagaatcgaggagcagactaacggagctatagccaaagaagactggtatccaattccgatagcaggccacatagcgaggttcttcgaggctttcacgggctcacgctactacatgaccagccacttcgcatgcggtgccgctacctatgtcttccttgaccgcgagaacaagcgcgtcgtcccaatcccgaggttcctcgacgttgagggattcgttgagttccttgagagcaaggccgaggaaatcgagcagtggaagaagcttggaaagctccagaagctcaagctcggtgcggagatattcatgaagttcaggagcttctacgacgacaagtacgccccgaagggagtcaaagtcctcgacctcatcaagaacgccttcatgcacggcaactacgatgccctcggaaagttccacgagaacgctctcttcgtcggcatgatgcacttcatggacgagtacaactacgacgttgagcgcgtagagcgctgcgtcatccactacgcgatgcccgacggaaggattgttcccttctgtaccttcaacgtcattccagagctttaccgtgacaaggtgcaggcccagttcagctacacctgggaggagtggaaggccctccatccggactgggactacaagaaggacaagtacttccgctccaaggagttcgttgagaagatgaggaacagcgagctctacaggaagacctacattgacatcgaggactacttcgggctgaacaaggagtgaggtggtggagatgacaaccgagagggtcttcaacaagaagcttaccagacttgatctgaagttcggcgacatcaactgggagaaggcaacgataaagcagtacgagcttgagaaggacgagagagtgtggagaatattcctcaacggctacgccaggaacggctttgtaatctttgacgaggagctctttccgagagaggaactcctcaaggcgcttgaagagctcaagccagaagtcgtcggggagaaaactctgacggttcaggagctcatcgaggagagcatgagctggaacaacgttttctcccattcttgatctttttgaatcagttatgtttttcttttgtttcgtggattctccctttttgccatcgtaattacctacataagcccctacacaaaagggatttaacaaatgaagtcatagactacttctagagcttccaagattggggggtgattccgttgcaattccggaagaagatagccgtcatcgtgatagccgctgttctcgtgacactcctcattggttctgctacggtcggttatgcgaccctcaagatgagggacaacatccaaaaaacgctcgacgttcagctcaacgaagttctgcccaaggaaatggagaagagcgtccaggagccaataacagaggaggcgggcacgataactgtaagtgccgccgagctgggggcgaggctcttcgacgactacttcgacaagatgcgcatgatgggggatgtggccgttcaggatgtcctggaggcgtattcgaagtacgacgaaagcgatccccagttcaaggcttttcttctcaagcgctttgagatggtcaaaaacctcgatcccaacgtggcctacgtttacttcggaagcaccaccggcgggatgtacatgtggcccgacgagcctctcccagaaggctacgatccccgcgtgaggccatggtataaggaagcagtcgacaagaacggcccagtatggactgagccttataaagacgcatcaacgggcaaatggatagttactttctctgagcctgtttacatcaacggggagttcgttggcgttattggtgttgatgtcttcgtctcgactctgatagatcaggccaagcagataaagataggccagacaggttacatagcgattttgaacaaagacggcaccatcattgttcaccccgatgagagcctcgttcagaagctcaacatccacgacgatccgaacctggcaagcctcgccggtgagctggacaagaacaaggagaccggatggattaggtacacattcaaaggagtggacaagataggcggctacaagaggatgaaaacgaccggctggatagtcctggcaacggttcccataaacgagctaaccgacccgatgatgaacgccattgattcctctctaaaagcgaatactgaaaaggtcgccagcgagataaactcggaagttaactctggcataaaaacctccttactgggatctgttttcgcggcggtcttcggcctgatagtcctgggaatcgcatacaggactttgaacaccacgctaaagcccctcgaacagctccgtgacgtggcccaggccctggcggacggaaggctgagcgaggttcgggagaagctcagagggatacagtacctcgaagacgacgagattggagcgcttataaaggcctttgaatcggttggaaaggacctcgtgggggccctggacaccatagcgagcaaacttgagcgccttgcagagggtgatctaagcaacggcctcagcgtcgaggcaaagggtgaactcagggaggtcctagaagatctgagggacacaacccacaggctcaaaggtctaatcggcgaaatcgtgaacgtcacgaacgagctggacaagagagcaaacgtcctcgctcaggttgcgaacgacgttactgaggctatcaaccaggtgaatgaggctgttcagcaggttagtattgaggcgcagaggcagcaggagaacattaatgagattactgagggcatgcggttggttgctgatatgagtgaggagagcgttagggccatggaggagtttgagggtgctgtcaacgaggttgttcacattgctgaggagggcaggcagaagggtgaggtttcggcacagcagattcagagcattcaggagatgatgggtaacatagaggccgcagtcaacagggttaatgagatgagcaggagtattgaggagattacgaacgttattactgggattgcagagcagactaacctcttagccttgaatgctgccattgaagcggcgagggctggagaggctggtaggggttttgctgtggttgcacaggagatcaggaatctggccgaggagagcaagaaggcggctgacaacattaaggagattatcaacaggatgacggaggagattagggatgccgtcaatgccacgcagaggggtgtgagtgttgttagtgagtcgtcggagactcttagagaaaccacggagtacttgacgaacattgctgaattgattagtgatactggtgctaggttgggtcacgtgaaggagcagattctcaggacgcaggaggaggttgacaaggctctgaaagccttggagaatctcgctgcctctgctgaggagacaactgcctctgctgaggaagtcagctccgccgtcgaagaacaaacagccgcaatagaagaactccagagagccgccacagatctaaaggccatcgtggagaagctgcgcgacatcatcggcaagttcaaactgtaaaaagggagagctcagaggagctctatccttacttttcccttcacctctttttccagctcgaagcccacgattccggagaatgtcctcaggtcgatcacgtttctccctgcctttaggtcaacgatctcttcttccgcagtaccagctggaagtgagaggtcgtactcgtagaccttcagctttatgtcgttcttcacgtagaatatagccctagcactcttgtaaccatcgagaggaatgcccccgaaggttcttttacctgcttttcttaggaggtcgagcgggactgaaaagctcaccgccggcggcctctcctggagtatcttctcgtccagaacgactatatccctgtttccggtgtcgaagggcgtcgcctcggtagcgccggtgtttggtgttgtgttagttgccacaaggagcttcccgtccattttctcgatgctcgttaccctcgctccaaaggctccaactatcttcaccatcggtggagcgatgtaaacgaggacgcttggccccacgagggtgttcgtgaagtcccatccgattccagcatcgcttgaatccttcctgtacgatgcatcgtgatgggagttgaatgccgtgaggattcctccaccgacgtttattgcgttcacacggaagggagcgtagaacgtcgggaagtcgaggaggcggtagaaggtgaatacctcgcccatgtaggggttgccagcgaagattccaccgcggacgaaggcgaaggccctgttgtaggccgaagccattgccccgagttcgggcctctcgtagggctttccgtccacgctaccccctggcttaaaggcctcccacttcccgcttatgaggtcgagggctctgaactccctgactccgcctgtgaagttgttgcccaccccgaagaaggcaacgtcgtggacgcgcgttcccttcggagacggctcggttatgaggggctcggcctttcccctcttcctgtcgagggagtagacgccgaggttggcgtgaccatcctccctcgctaggagaagcctgtcgccatagggatcgtagatgatgtcgcttatctcgccggcccagtcggtctcatggtgtatggactccttccaaaggagcttgaccgagccttccgcggtgtcatagacgtgcacgtgggagtacttgttgttgaagagtatccttctgtcctcgcggtaaaccgctggagcatgtacccagccgccgaagtagatgaactcgtcaacggtctcaacggcgttgtaagtgtccccgccgctcgtgggggcgtctccgaccaaggtgaaatcgtaggtcttttcttcaccgctcttcacgtctatgaagtgtgcctctgcctcgaaggccacggtgaaataaaggacgccattgtggtacctcaatccgaagatcccgccgctcccccactcggggccgtacctacccggaaagcgatagttcttgaagagcatggtatcacccgtggtagtaggtcccttagcttattgccttttcgccggagggcttttatattccgccgcttaagaagaaccatgaacgcttacaggggattggccataatcttcggcttctatgctcttggagagttcactagctctgcctttaacctacctatcccggggagcgtcctcggcatgctgtttctacttgcggctttaactgccggtattgtccggctggaatgggtcgagaacgaggccgaactcttcgtaaagaacatgagcgttatgttcattcctccgggggtcgggataatactctacatcagcctccttaagagccagcttatcccggtcgtgggtgccatcgtggtcagctttctggtcacattgatcacgacggcaaaggtcgttgagcttttgaggagggaaggaaggtgaacccttacggcatggccataaccctcgtagtcttctacgttttttcggagctccacgcgagaaggaaggccttttacacaaatcctgttctcctctcaatagccacgatagcggcatttctctggttcggcggcttttcctacgattcctacatggagagcgccgggatacttaagttcctcctcgggccggctgtggtaagccttgccgtccccgtttacagggggcttgatacaatcaaagcgtactggaaggagatagcagcgggaataacggtcggtggaaccgttgccatactaagtgccttctacacggcagaggttctcggtgggagcagtaatgtgctcctaagcatagcccccaagagtgtcacaactgcaatagccataggaatcagcgaaaaaattggtggaattccctcccttacggcagtcctcgttattctgactggaatactcgggaatgcggttggaccggaactcctgaacgtatttcgagtcagggacagagtggcaagggggctggcaatgggggtcacatctcacggcctgggaacggctaggattctgctggaggatgagattgctgggggagttagcgggcttgcgatggcattaaatggtgtctttaccgccctcgtgcttccctatctcatcaaaatcctctaagatgcactcgctaacgcgaagcctatcctccctgtccaggaagagcgtgaagtccctcttggccagcctgtcatctattggcgcatgttccaccagaaacgctattatctctgccgtgctgtaggggaccttcactccaagctcgtcggccttcttaaagagcttctcgggaacctggaagatgtcctcaccctttttgacctcaacgcttatcttcgagtttatctgctcccacaggagaagagtgttcctggctttttcaatcttttcaagggcccttctttctagaatgctcacattggccctgctcgtcccgagaatttcggctatctcgctctgtttcagccctttggccctaagctggagaaccctaatctgctgctcggttaagaagctcttcatggtaagcaccattagttaacagaacgctggaagttaaaaggtttttgagaagatggtgcggtggccgggatttgaacccgggttaccggcttgggaggccggtgtcctagaccaggctagactaccaccgcagtccaagcccgtagtatagagggatcgtgactttaaaagctttactccacgtttaagtccctacccgtccgtgaggcaggattttgtctcgtttccatcaacaaagttttcaaatcgcccgaacggtagagtttttaagagccccgctgaaagcccatcggtggtgtcaatgccttacctgataatcgagcaccttgaggatattagtgattggctgtggctcgagtactctcacgtcgcccagtggtggggggataagctcatctttaccaacgtccgcgaggatgagagggagaggctggcgaagcttgggagcgtcatcacagagagcgtcacgaagttccccttcgaccgttcaaaactcatcgttcttgacctccaggctgaggaggagctgaagcccgaagacatagaggaggacaccatgatagtggtcggcggaatcctcggagatgcagttccacgcggaaggacgagggagttcataacctcaaagatggaaggcgttaaagtcaggcacatcggaaaacctcagtattcaatagacggcgcctcgatagttgctaagctcatagcggacggaaaacggctggaggaaatcgagtacgaggagcaccccacgataaagctcgacgagttcagtgaaataacgctccactacgcggtgccgaagctggacggaaagctcctcctgacgccgggcctcatagacctccagaagagggagcttggatacactgaagccgacgatgagataagcgacgaggagctgatcgagttctttgagggaaagagggagctttgattactttccccactcctcggccagcgattctatctctctccacacccccttcctatcggctttatcaacgaccaaaaagacctcctgaacgcttccatcgctcttggcgacgagctttaaacccgtctgagtctccctagtgacctttatctcgaaacctctggagtcgctcgcgtatatcctacccgggattacctttttcactccagggattctggctatctcttccagcggcttctctaggcccttgagaaagtggtgctccctcttcactccgcgcttgaagtgcttgggcatgttggaaaacacgcaagtgggatttttagatattgcgcaacgcttaagtcatgtgcactctaaaaatatgcgggggagattatggaagaagtctggatactgaaggagtttgagaaggttgcccagcttatgcctaagagggccgtatccctgataaaacaagacagggagctcttcatggagatcgtgatttctgcatacattgatggactcataagccttggaaaagctgcagaagtccttggagttaccagggaggaagttattgaagagttcaagcgcagggggatccccataagaacgccggacagagacgacgttgcttccgaggtggaggcgatagagtgtttgtagtggacaccacagttatttcgaactttgccaaaacaggacatctcgaccttctggaggttatcttaggcgataaaggcaccacaacggttcaagtgatggaagaatttgaggttggaataaagcgagggaagtacccaaacctcgaaattccactaaacgtcatcgagcttaccgaggaggaaagagagctctacaccttgctcaatcaaagtctcggaaaaggagaggcatcctgcatagccgttgcaaagtttaggggtggaattatgctcagcgatgactacgacgcaaggaagaaagctagactgctaggtgttaaggtttctggcaccattggagtcctcgtacttggcgttagaaaaggagtccttgagctggaggacgcaaacggcctcctgaatgaaatgatcaagaagggcttttattctccaataaagagacttgaagaagtcataccctcttcctcaccttaacggccactcccttcttcgccctgaccatctcctcgccgctgaggactgccttccctacgccgactaccttttcatccctgactatgccgactatgtcatcgggccttatcctcgggtcagcttcttcaacgccgacagcgaagacgtctcctctcagctcgaagtctatcttcacccagtatgacttgagtgcatcgtatatcctctgcattccgtagggagttacgcttatcacgccgtcggtgaaagttccggtctgctggccctcaacgaagatgcgtagcatctttgagcccttaacctgtccgttctcaggaagaatggcctctccagcaccgacgccgaagtagaagtcgaagaccttcctgatgttctcgaagtagcgataagtcctgtcctcctttgtcccctcaatctggaactccctcagggtctcggtgagtgagcggaggctttcgtgactcgtcgtcccgtttttgacgtccgtgaagattatctcccttccggagagctcggaagcgagcttcgctatctcaacgtaggcctcatcgaggtgagctactatcgggatgtcctccgggtacttctcgagcgtcttggccaggagttcagcggcgggctttatctcctcctcgctccagtggccggtgactactatgtcatacttggccagccactcccactccctcgggacgacgccgaagggtgaagtcagtatcagctcgtgaaccttggaggttcccgaaccgagtgcctctttcacggcccttctgtaaagggtgtggctccttgagaaggagtagggttttttcgcggagcaagggaagagcaggaggagttcaacgttcttgggcggtgtgaagcgctcaagcacgcgctcgtgccaccttttgacctcgggccttctgatggatgcatcgctgatgaaatataccgtctccttctggattggagtgtatttctcaagataatctgggtgctcaaggtccgctattctcagaattccagcgttgtactgggtcggaaagaagttttctactagatacctcagcttgccctcttcaagggccttcctcacgagcagtatgacttcgcgggcgaagtcgagggagttgggctcgttgctccaaaggaatggagagaactgggtgaatcccttaccctcgaagtcgtagagcttgagagagcgggtatcgaaggcatcaatgccaagataaaccgccagcgggtagaagaacggctcaaggtcggctataatcatgacgttcgggaacctctcgcggagttcccttaaaatcctcacgaagtagcggtactccttgattagaattttcgagttgccgaggtagacggcatcgaaattgtgtctatctataatcttgaagaactcctcaaggtactccgttcttctcagggcaggaaggtagaaggcgttgaagccatcgtagtttacactccacagcctcccgatggccttctggattacctcatcgggagtgtagaacccgagaggtatcgagggagcgaggttgaagtcgtactcgcccggctctttgggatggaagaaggagttgaagggagacagggtaaagtctatcccgactaacgcgggagttctgaaggaataatcccctagcctgactaccccaagccttccgggtccttcgtgtttgatgacttccatagcgattcctcagacgaggttgtacctctgcaggagcaggagctcgtcgagggtgagcttctcgccgcgcttgaacttctcgagggcttcaactgccttctcgaagttggcgtccttcttggcgcgcatcttggcgacaagacggtaggcgatgagctccttgtgcttctcgtcgtactccctgatcttcctctcgatctccctgagctgcttcctggcttccctgaccttctcgcggagctcgacgaccttctggtggtactcgtcggcctctttcttgacctcgtcagccttgttgaaggcctgaatcatctgctcgtggaactgctggctctggttggcgagcttctgtatctcaaggctgatggctttcctggccttcttgagctggtctacctttttcctcgtctcaacgagcttcttgtggaacctctcagcctgctggatgatctcaagctcggtcgcgagaacctgtatttggtcaacgatctgcttctccctctctggagttatgttcgggttggtctggagctcccactcaagcttctcgatcctctcctgtatcctctcgggggacatcttgagcctcctgagctggttgtactcgtttctcttggtcttgtactcgagtatttcctggtagaggaggtcaagcttggcgttgatctcctcgcggttcttcttaagctcctgtatcttctggtttatttcatccctcttcgccttgtactcgcgccccttctggcggagctgctgtacttccttgttcttttcatccctcttttgaatccagacctggagctccttttcgagctcatccagtttggccctgatctcgtttctctccttttccagggcctcaatctccctcttgatcctcttaatttcctctgggtctactttaaccgttgtcatctctcttacccctctccctttttagaacagctctgttcacttcggacatctggactggaaattgagagagtaaataaaaactttttggatgattcggcggtattgtcttgagcacgatagattcgtttcccttttgtttgatgtagccaactctgtaacagcgaattctacaaaagtcttcaaaaacattcaaaattgagacagaataatggtaaaacaaaaaactttgctccaaattcactcccgtacaacctgcgtccccgtcttcccctcaagcgcctcgacggccctgtcaagggaagctattactgccctctcgcctccccactcaacgaaccttatcgcggcaagaaccttcggccccatgcttcccttcttgaagtggccctctttgtaatagcgcttcagctcgtccacggttaccttcccgagccacttctcatcgggctttccgtagtttattgccgcgccgttcacgtccgtgagtatcatgaagatatccgctttaacctcttcagccagcttttcaccggctaaatctttgtctataaccgcctcaacgcccttaagctctccattctcctcaatcactgggacgccaccgccgccgctcgctatgacgatgaagcccttctcgacgaggtcaactatgaccggagcctctacgtgccccttcgggtcgggactcggaactaccctcctccagcccctcccggcgtcttctataaccgtccagcccttttcctttgctagcttcttggcagtctcctcgtcgtagaacgggccgaccggcttgctcgggttctggaaggctgggtcgttcttgtcaacgatggtctgggttactatcgttgcgacgggcttctcgacccctctcttcctaagctcgtttatgagcgcctggccgatcatgtagcctatctgcccctgggtcatcgctccagcgacgtccataggctgggctgggatgccgtagacctgctggccagcgtccatgtggagaaggagcgcaccaacctgtggaccgtttccgtgggtgataacgacttcataatcgccgtcaaggattatgtcagcgatctgcttggcagtcctcctcacgttctccatctgctcctcgtaagtccccttctggcctcgctggagtatggcgttcccgcccaaggctatgacaactctcttcatgctctcacctccagggatgactaattacgctcactggcataaaaacgttcgttaggcttcactcatgttcacttgaataaggttcgggaaagatgccaaccactctacaaatgtaaagaaaagtgccgctcagaggtaccattcggaaaagcttccaagtccgagcctttcaagggtcttcatgacaccgagggctataccctcgacctctatcccgccgggtagcttgtaggcatcgccgacgatgtagatatcctgaatcgggaagtcctcaacggcctgcccgctggcgaccctgttgacaggatttccgtcgaggtaggtctggatgagcaggatctcgccctcttcatcgaggttagggaagattctgtaaatgtcgtctatgcccttcttctgctcctccttaacgttcctgctctgaagggcatggtggagcattatgagggtgtatccctctggagcgagctccgggcttagagctgttggctcattatagccgtttattctctcagtatcgagagtgaaaacgacggtgttcccgatccttgattctcctttcagggcgacgttgtactttatcccctcgctcggcttcagagactcaacgtgcctgaggtattccctatcgaaattctcccttccgaggagctcaacggtctccttgatgccgatgttcgagataaggacatcgtaaggaaactcctcgttgtcggccgtcaccaccttctttgcctcggcatcgacttcaacggccttcttccccgtcaatatttttccgccgttttccaccacaattctcgcaagctcgtcggttaaggccttacagccgcctctgacgagtccagggccgccccactttagggccgctttaatctccctggccagctctccagcaggtacatccagcacgctgtcggcccagccgaggaagctcttgatgaagaggtcggtgaactcgttgtcgcctatcttttccttaatccacccgcgcccgctcatctcggcctcttctccggtcgggagcttgtttctctttatgtccgccatcagtttcatcgccctggctttctccttccagccgaggtacttccagccctcgcggtagtggaaggtcttgccctcgtagaagatcatgccctttgggttggagttcactatggtgacgttcgcaccgaggagttttaggaggtgtgccagtgggccgtcttcgccgtgagggagcatgtgaaaggctcccgttgagaggccgaagcccttgtaattcagatttgtgaagcggccgccgatataaggagctttttcaagaaccgtgacatcgtagcctttcctggctagaaatccagctgtcaaaagcccgccgattccagagccaataaccactgccctcattctaccacctgaaatgccaagggtgaggaaaaatataagggtttggccgttgtatggatgtacaactcctttactcatgcttcttttgatccgttctaagaagaaaacttaagttttaataattttatacctcaaaaagagaataaaatatggttagcaaaaacaaatagaaaaatttataaatataagttgttcaaaatatattgcaaaaacttaaggaggtgataacgtggaggaattgattgtgctagagaggggagcattcggcttcaacgagccaaactttttcatctgcgggagcttctgtaaccctgtgaaggataacccgaactgatggggttttatctttttatttttaaattttgaactactaaactactgaaaatgggggtggagaaatatgaaaaatgttaaactctcgagatatactctcgctgttccatatcagggacgtataatactatttaataccctttcacgctcattagttgctatttcagaagatgcttggaacaggcttaaaaatagtatcagcaatgccaacgctgatattgacaatggaactcttaatgatagcctaattaaagaactaaccactttgggatttttgataccttcccaattagatgaaaaggagctaatgaggactcatgtgaatgttctaaaatatactccaacacacatgggaatgtttgtgaacttaacttcaagatgtaatctctcctgtccttattgttaccaagacttaagaaaagctttagacagtaatcaggatttaacaactgatagctggaatagaataatgagactaataaacaagaggataaacattctgagaaatgtcaatgttgtgttcttcggaggagaaccaatgttgaattataatactctaaaagtggcagtaagagatttagattctttaaaagaaatcggcattaaaacctctatgtccataataactaatgggacgttattttccaaacaaagagcccaggagctggcaccctacattagctcggttcaaattactttggatggaatgaaagagacgcatgataaaatgaggccatactctgatggaagtggaacctttgatatcattctaaaaaatattatcgataatattgaccaatatcggaaaagaattatattaagatcaaatataaatgatgataatatcgccagtgtcaagtccttattacactatttgaaagaagaatacgggcttcacaagttactaaaaggagttggttttgaatacatattcccaactcaaacgtcgatacatgtaggtgagagctataaattaacccaacatatttcaaaactactaattgagatttattcctacgctgtggatttggggtattccataggaaaccccctaatacttggcccatgtatggcaaaccatgcctttagttttgcagtggatgaacaactaaatgtttataaatgcccaggctttctatattcaaatccggatggatacattgacgaagaaggcaatcttgtcatcacaagttctagatggtattctttaataaacttcgagccaccatgtgctctcaattgtaaatttggcccagtatgctacggaggatgcagatggatggccagttcatcaaagtccaaaatttcctgtaatatagagcacctacagaattacagcgaatttttagcactttatgttaagtcaagatataaaaaacttctggagggcgaaggatgaacgtgatagaaattgacaacctcaccaaggtgtatcccgacggcacaaaggccaacgatggaatctcaatccgcgtcaggaagaatgaaattgttgggatcatcggtcccaacggtgctggaaaaaccacgctcatacgacagcttctggggcttttgaagccaacggaaggctcaatcagggtgatgggaagggacatcgtgaataacccagatattgtaaaaagaacccttgcctacgtgcctcagtatcccctcagctttccctctttgagggttgaggaggttctggagtacgtcctcaggatgcggggcgaaagcatttcaccagccgagatggggaagagaatatcgggtgttctagagctcctcgtctcagtgggggggcaaagttcttcgggtatcagctctcggggggtatgaaaaagtccctgctgctggcgatggccatcattcaggagcttccggtcctcgtgctggacgagcccacgagcatggtggacatcgttacaaagcaccggctgtgggatgtaataaggaattcaaaccgggaaggaattctcctcgccagccacgacatgaacgaagtaaaggcgctctgcgacagggtgtacctcctcgtttatggaaagatagtgacctccggcactcccgcggacatagtctcgatggttaagatgcccaccgaggttcgtttaatccccgggagggagataccccagagcatcctccccaaggagcacaaaaaacgcggagacctctacgagctggccttcgacacgcttgaggatgcattgcggactgtggatgcaatcctcaaaagtgcgggggtgtcctacctcgagattgagtccccctcatttgagaacctcgtgataaacctcatcgggagggatggcgaatgattcgtcctctaattgggatggagcttaagggaatgcggctctacaggacgttcctctttgtcaacctcctgctcatgcccttcgccttgctctttatgatgctcatgaactccagctcgagaactccggaggacatctcttacctggtgagcggctttatcgttgtttctctggttagttctttcctcggaacgctaacgaacagggtcagcaatgtcttcgaacccagtgttcttgagctttactcaacactacccccaagaatatcagcggtagtcctcgcccagttcctcacttactccctgctggtcctcccccaggtgctcctgggtctcgcggttatcgtttactatcagggaactagcagaataaacatcccccttctgattctggcactttcattaactttccttgagctgggggcgcttgcggtttccataggtgcgaagattggaaacccctacaaggcgatggccgtcacgggaatactgccctggctcctcgtggtgttctcccctgcctactaccgctccagctcccctgtgctctacctgaaccccattactttcctgttatcatgtatccgctcgaccattggactgcagagcgtgagccctaccccctgcctgtttcgatggctctaacaggagttttcctgctctttgcactcagaagtctgcgttccggctatatgcttgagaaaccattttaatttctcttttcattaatggggagaaaggaaataaaacggcggttaaagcctccactcgaccccaagcatctcgctgtacgtatcgagcaccttctcaaggtactccctggccgttccgaccttgtcgatcttgaacttctcggcccacttttcgttgccgaactcttcacttcccctggcaacgaggtcgatgacgcgcatgctgtcccagaacactggagtatagccagcctccctcgcgaactctataaggcgctttatctgtttcttagcatgctcctccatgtcaacgttctcaccgtaggcctccatgaagagagccttaagtactggcttcatccagccgcggtggaagcggcaccagccgacgttgtcgtaccagaactcccatagggcgctggcgataatcttctgggcaagctcctcgggctctaggaagactccgaactggtagaacgtccagtacctcccctgaatcgggagcgggatgtagtttccgatggcccagtacatcgtcggcgtcatctcgccgtcctcgccgaggggggtaaacacagcgtagtccttgaagctctcgccatactttagcctgtccttgaacttctcgtcgaggattacgcttgcttttctcttcccgaggccgagtatcttggctatctcgttctcggcgaaggcgacgcggtgggccagttcagcgacgagcttggcgttcttctcgctggcctcgacgggcctctcaaggagggcctctttcgtgaagtctgggacatcgctgaggccgacttcctcaggcttgagtattccgcggtggacgagctcgagaacccacgcagctgttccgccgaactctatggcgtcgaagcccatcgcatcaacggccggaacgcttatgtcactggcgcggagggttataacgccgctgagcgggccgttggcctccctcggctcgtactcgatgtggtgaccgttggcgtacttcttgcacacgaccgggcacggctcaccgcagttcgtccagttcttggtctctatcgcctccttgttgaagggctcccagtagtacttcattattgcctcgtggatcttgatcctctcttctttcgggatgtagggcatctgccagttgagaatcgggacgaagtcgccctccgccgggtagttcccaccgaaagttcctcctgtcttgagcttggggttgtacttgtacttgacggtcttctcagctatgacgtcgttgtagggcttcttgtggacgccttcaacgatctctttggcggttctgaatgacgagatatcctcgcccgggaattccctcttcctcggctttccaccgaagattataccgactacgttgtgggccctgaggaggacgcttccagagccaccccttgccgcccagtcctcgcttccctcaacgcgcttgcccttccttagggtctgggagaagatggcaccgtagttggagttgagggctgcaggacccacgacggcgatgcggtactcgaagtcgaacctctcgccgaaggtgtctatgaggtactgggtgagcgcgtagacgccctcctcgcccttatagtccttccagatctcgatcagcttttcgagctctatctcgtggagctcgacgttgatgttcgagccgtcgttgtagaggatgacaacaaccggcttctcagccttcccttcaaatgtgacgaagtcaacgccgacgttcttgaaggcgtaggcggcaccgcccatcgccgacgggaagagcgtcccgtagagcggcgagcggaagaagaacataagcctgtgggcaccgggcagtattgaacccgagaacggccccatccccattacgacaacgttcttcggatcatacggttcaattgagtgagttccaagcctctcatggagttcgaggccgtagtctatgatgccgtaaactccctctttttcgaactcctcgctctcaactttcctctcgtcaagcttcaggtgaagcaccgtgaacttcatgctcccaccacctttgtatcactccgagtgttgaaatcaacttgaagaatatttaaggtttccgctccagcttagactatagggtgttgaaatataaaaaccttggtggataaaacggtacaggggtaaaatgaacagaaaagggctggaaatcactcgataggctcgaacctgtcggtgagcctcttgagaactcccggaagggtagtgtactccatctcctctagcgggagcctgtgcggttcgaagggtccgtgcctgcgcatgtattcggttatctcaagggccttctggcgggcatagtcgaaggcagggtcgtcaaagaggtcaactgggccgactagctttccttctgggcttatctgccagccgagagcgacaaccctcggcgggccgtcgaacctggtcgggttggcctggtgcatcgggaccggcattagtgggccgttgtgggaacccctcatccagccgctgacgaggtgcgggaaggcgaagggctcgaggacctcaccgagggcgggtagaccgctctgggctctgacgatggcaactgggtcgtcctttccgacgtactctccggctacttcgtatagcttctcggtgctgacaacagcgaccggctcgttctcagggattgggtgcccaggcttcggatagaccctcttgatgacgtagcggctctttgcacctatgagggccagaaggtcgtagagctcttctggagtgttaagaatgaccctcttgtgctcgaggatgtcccagacctcaaagcggaagcccatgtgcatcttcgggtcgatgatgaggcccgcggtgttgaacgggtctgcgaacatcctgaatatcgggaggttgaaggctccgggctctgtcttgtccatgtggaatgtaactacaggctcgctcttcctgagggttatttccatctcggcaactcctggtcccattccgcggacgttgccgctgaaggcatccttgaggaggtcctggccagctccgtagagaccgagttcctttgcgaccttggtggcctcttcgaaggccttccatgcaaggccatgtatgtctggactgtcaacgcccctcttgtgggtcatgatgagctgtaaatcatcgccgcaggttgcaacgtaaaagtctattatagtgccatcttcgactgcttttgaaagaacatcctcggctgtctcaacgagctgcgggtgaacccttgagtgtccaggccagccgcctatatccgctttgataacgctgatggtgatcttatctccaacggccatggcaaccaccggtatttttaacctcttttatgcttataaaacgttaatatcactgtcgatgatactcagaaaactctaaattcgaaggtgatagaagcggaatgttgtacatcaaaatgtctataaaaggagaaattcactcgcagaggtcgctccagccgaacttttcctttgcgatctttatcagctgtttgagctcatccttcttgatgttgacgcttgagctggccccgactagggcaattatgccgtgaacttcttcctgaatctggataacgtcgtcgtgaactttaacgactctcagctccctctttgcggtttcgtcctccccaatcttgaacttgtcgtggccgataactactggctcctccatgggtaccacctcactatatttttgtaatccaaagttaataaaactgtcgggacaaaatttataaaccccaagcggataagctactcccggacgggggcgtggtgtagcctggtccatcatcgcgggctccagaggtatgaggacttgcgggtttactgattggggatgagcctttggagctctgacccggagaaacccgcggaccggggttcaaatccccgcgcccccaccacatcagccctttcttgcgaaagcgctggcggaagagtagtatgcgtttttaatgagctggcttttgagcgggtttgcttatctagttgctagatttacaggatttcctcgcagtatagcgctcaaagagcgctaaaaagaaagttcgaaatcacattaacgggagattttagagttaaacccgcgcgaacttgctttctgagcgagcatacgctcatcaacgggcaagttcaggaagaaagggcactttttggtcaagctttttctaaaagcttgctggcgaaaagtttcatcaaaggtggaatgtccttttaagcgtcctgtttttagtgattcttctcatcaattagcagttttcaaggggtttgctcacagtataacgcccttcgggcgttaaaaagaaaggaaaaccacacttctctgcccgtctatcaagagaatctaaccgcatcaggccaacatcaagaagacattcaaacttttggtgaagcttttcctaaaagcttccatcgcgaagtttgatcagggtttgtggttccttctgaaattgcctttctacgaggattttcaagatacacaagttagcattagtgaattcccctaagtttcagcttatcaagaaggagtttctctctttgacgccctacgggcgtcgattaaaagtaaactcactccgaaagctctcactaaaattgaattcacacttaaacaagagcccttaatgaaaaatccctttcaaaaccgtttacaaacaagaaccacaaactttgatgaaactttgccttgcaaagtttctttggtcaagcttttcctaaaagctccctgaaaagtacttaagccttaactcaaattcttcttggtgatcgtatggatgagtttgaactattaaaacgtctcgtctcaataaagtccccctttggagaggagcacgagatttcggagttcatagcttcactcctcgaagagaacggcatacctgtggagacagttcccgttgaaggctttggcgatgatgtggtcgcttacctcaaaggtaaaggcccgacagttgttttaaacgggcacatggacacggtgcacctatctcagggatggacaaagaacccatggggcgagcttgatggggataggttctacggactcgggagtgccgacatgaaaggtgggctggcagcgctcctaagtgccttccttgagctttcggagcttccaaaaaatgagaggcccaacgtcatcttcaccgctgtcagtgatgaggagggcttttcgagggggagttgggagcttataaagagcggcaggctcgacaaagccgacctcgttctcgttggggaaccaacgaacgagaaactcatgctcggtgccaggggcaggttcgtgattgaggtaggggcaaagggaaagaaggcccacgcggcgagaccttacctcggtatcaatgccattgaagagcttgccaagctcgtctccaacctcaacaggatacggatgaagaaacacccgaagctcggaaaaggctcgtactgcaccctctacttctctggctcggccgatggattgagcgtgccagacgaggcaattgcgataattgacaggcacgtggtcgttggtgaggactgggagaaggttagaggagaactctacaggctcgcagaaagagttggtgtaagggccgagcttgagatagaaaaatacaggcgcccaactcctgagatgctcccctacgttgtgaaggagaacaacaggttcgtcaggcggtttaaggaagcgtacagggaagttgaaagaaaaagcgtcgagattacctacggggcaagcgttggggacttcaactacttcggaacttacctgagcaaaccgacgctcgtcttcggcccaataggcggtaactggcactccgccgacgagtgggtcagtgtctcttccgtcaggagggtcaagggaatctatctgcgcttcctaagggctttggctggcctcagataagccggtctcctcaccggtcggggcagggagttctcctcatcggccaaagccttttaagttctccccttttaaactcgaccatgttcacaatagtcgcaagagctagaaaggacgcgaaggctctccagtacataaacgagcgtaactatggcggctttctcgaagttaaaagcctcggcggtgggaggagctttgaggaaatagaggatggtcttaacgaggttcttggagaaccctatatccctatattcctattcggtgagaaagagaaggccctcatggaggacatccttgaggttgtgaaggagagcgaaaagccgttctacgcaaggcttttgagaaccaagaaggtccgcaacatgcgcgttgatgagctgtacgccaaccttgaggagataaaggcccgcttcaggctcggaatcgagtggaagaacgcttactccctcaatcctgaaaatccattcggggtggaagtacaccccgactacgacatctatctggccgttggcgacggttttagaaaggccatgaagtccctccttgacgttgatctcggcgagaactctctcgttctcaggaagctgatgaaccaggaggtttacttctcgggtccgaataaagttgcagaggttagcaaaaagctcggctttccgaccgaggttctctggaggtgtccctgcacggaggacgtttcgcttgaggacctgatggccgccaacagagactacatcgaggcctttgcaaacgcgagcaaagagtttctgaggagattcaaagggtacgatatagttgtcccctggagcggtggaaaggactccacggcggcccttatactggcaaaggaagcgtttggtgaagttaatgctgtctacgtcaggatggagtacgagatgccagagacggaggaatacatcgagaagctcgcaggaaagctgggcgtcaacctcatcagggtggacgtcccgatgcccatagagaagttcggcatgccaacccatagaaaccgctggtgcaccaagatgaaggtcgaggcattgtacaatgccgtcagcgagtttgagaacccacttttagtcgtcggtgaccgcgatggagagagtgccaggaggcgcctaaagccacctgtagtcgagagaaaaactgactttggccaaatccttgaggttatgcccataaagttctggagcggaatgatggttcagctgttcatcctcatgaggggctttgatctccatccgctctactacgagggcttctacaggctcggatgtaccgtctgcccgagccttgcagaatgggaagtcgagcttttgaaaagaaaaggtgtgaaagacctcccgctcacccacgcctcctcaggagcgggagaagtgcgagggcgagaatgaaagctggaccgcagaccgattgtatccctgagcttgtggtacttgttgaggttgcgctcggcgtggaagtggtttccccgtttgtgtttgtattggttggcaaagctggtatggcagtttcgttgcttggaacgtttggtgtgctctcgttcacctttatcaggaacacgcccgcgctttcccttgcgtactgatagaatatcatagcgttgactaggtcatcggttgtgttgcccttctcgtagctctctgcgaactcgtagtaggctatggagaggagcggatgtagtccgttcatctgcgctacccctatggcggtcttcgcggcctctttcatctcttgtagcttctccctcagaatggtctcgttgtctatgccgagggtgtctaggaacacctccccgcgaaccctcgcttccatggcggtgaagattgccgctgagtactttccgtccccgtagtactgctccgccttttgaatcgtgtccattagatcagttcctatgacgttcccatacatggactcaatgtaggtcactatgaggttcgactcgtctatgtagtttcttgcagtgtctttgagctcttccctatctataacatcacccgttgcaaacctctcgcccagtcctgcccagaagcgcgcagtctgcgctctctcgtaggcataggcggctctgtcaatggcattccagtagtcggcgctgtagtagtacttccacccctcttgtaggcttgccttggcgtcctctaccctctcctctgcggcggcaaccgcctggagcatcgtcattccccttatttccttggacgagacgaggctttcggtctggtttatgtaagagttcacactagtcaggaggttcgcaacgtcctccgggctctcaacgctgatgtaccagtcgacgtgcctcaggactattctcgcctgaaagttcttgctgagggccgtgtaatacattccagagtccaaggcttctttagcgccgtcgagtatgaccttagcctggtccagggcctctttgaggactgtatatgccgtgtagtcaacgttgctctttttgagcttctccctgacgctctcgtagtaagcggtggtgttctgatagtccttaacggcatcgtccttgaggaaggaggtgtctatgaagacgttggctggtgccttcggcttcgggagcgcgtggccggtgaagtaatagacggcctcgtatatgtcgcttacttccttaacctcgaggccccagcgctcctttgcgtattcgactacatcaaccttttcgctcttcgtctgtacaacctgaactattccacctatggttttctgctgggtctcttggatgacctgaatcctctggcctttggggatgaggaaaagctttgccccgaccgaagcggccgctgaagccttttcaaggattccaccgacggggcctatcgttccgtcagggtttatcattccagtcatcatcaccttggggtttacctcccaccccatgagagctgcgattatacccactgtcattgttcctcctgccgatggcccgcctatgatcggagtgtccgttttgacctgtatgaagacgtcgtacttgctcatgtccttgccagtcacctttccagctatttgggccgccagcctcgcgcttgcctgcatgtcaacctctgagagaggccaggtctcgacgtaaacgtgcccgctaccaggagcgacggttatcacgaagtccgttgcgacaccgacgagccgtccatccggggtttttgagactgccggcgccttcaggacaactgtggttccctctgagggacactgcgccttcactggggttaagaacgacgctatgaggaacactgccagcaggattgataacgctcgtttcataatcaccaccagaaccttggtagtttttaaccgtataagctcttcggtttttaggctggcaaaatgatataaacccagctccggactgcctccaggtgagacgagatggaagttgagagactcatcaggtctgcggaagagctggcgagaaagcacggtattggttattatgaaatcaggatttcaagggtggtcatgaccgaggtgtccatgagcaacggtcagctcagggggctttccagtaactccgagacgggaataggcgcgagggccttcaacggagcgtggggattctcaagcgcaaacgactttgaaaggtttgagaaagcgatagaaacagccatgaaaatagccaagctctcccggggagagtcaaagatatacactggcgatcccgttgttgatgatgccgagatgcccgtgaaaaggcccttctccgatataaacattgaagaaaaggttgcccttgtgaaggagaccgattccatgctgactggcgagagaatagtgaacaggaacgtctcttaccgcgatactgttgtggaaaccttctatttcaactccctggggagcgagataaggacggttgttcccaggatacgcttcgggttttccgtaactgcgaaggagaacggggagatgcagcagtactggaagagcttcgggggaacgctgggctgggagatggttgagggaattgacatttctcactggacttccctggtagttgaaaaagcgagggcgctgttaaaagccagttctcccccgtcgggcgagttccaggtgatagccgacccggagcttacgggcctcttcatccatgaggcgcttggacacgcagtcgaggcagacctcgtgaagaacggggacagcattttggccggaaaactcggacagaagatagcggttgatgggcttacagtcgttgatgacccaaccctcccgggcaagttcggctcctacatctacgacgacgagggaataagggccaagagggttgagattattcgcgacggcgtcctggtgaactacctcaacgaccgcgagacggcccagtacttcggccttgagccgaacggccacgggagggcgcagagctatgcccaccagcccctcgtaaggatgggcaacacatacgtcgaagctggcgactggtcgttcgaggaaatgcttgaggaggtcaaatacgggctttatatgataggcgacaagggaggacaggtggataccgccaacggaaccttcaccttcggtgcgagggaaggctacataatcgagaacggcgagcttaggaagatggtgcgcgacgttgccctctcgggaaaaatccttgacgttctcaagagcatccgcgccattggaaaggacgtcaggattgagtaccctggatactgcggcaaggggcagtcggttcccgtggatgatggcggcccgcacctactcacgaaggcccttgtggggggattgaaatgatcgatgtcattgagagcctcgctgaaatcctgaactcaaaggacgttgaatgggaaatctactgggagagcgggaggagcggttccttcaggatagagcgtgagaccctcgaccgctctcagaggaagttctactccggcattggcctaagggtgggactgaacggaaagctcggcttctcttatataactggcatccaccactctcgttcagagcttgaaaagttcgtggagcggacgataaagctggccaaggtaagtgaggttcctttcaggggtttccccgttccatctaaagttcccgaggtcaagggaatatacgacagaaagatcgaagaaataccctttgaggatgcccacgctctcgcgctccagtacgctgagaaaatgagggagctgaaggaaaaagagaccctttcgggctcgatctccctggcctttgagaggtatggtgtcgtgaactccaacggagttgagcttgaagcctcttcaacgtacatgggggtctctgcctacgcggtcagggaggacactccaggaaacgggtcgttctaccagagctaccgctccctccagggcatcgaagcccttgaagaggccataatgaaagcgaaggaggatgcagagctaagcgccagggcgaagaggcttgaaccctacgagggagaagtagtgctggagccagaggccgtcctgtccattgtggaagtcctccttgagaacttctacggtgatgaggtttactacggcaggagcaggttttccagcttcggagatagggtagcttcagaggactttaccctcctggacgattcaacgctcgaaggccttccgggaagctaccccttcgacggcgagggcactcctgggcagagaaccacactgattgagaacggtattctaaagggctttctcctcgaccatacttacgcctccctgctcggacttaagagtactggaaacgcagttagaagcttcaggactgttccatcaataggatcgagtaacctcgtggtcgaacctgggaaagaaggcctggaggactttgaagggataatcataaagaacgtcttcggtgagcacaccgccaatccggtcagcggtgacttttcacttccagttggtctcggctacgttgtcagagatggagagctcgttcccttcaaagacaacatgctcgtgggcaacgtctttgatctcctaaagacggccgagcctggaaaggccattaaaagaatctcctcatttatggctccgagggttaaggttcacgcaaagattgtttaattatttgaacaatcttccgagtttcgatacttttttatatttcctcgttaagtaaccacaggtggttgacgtgtcagtgctaaatctccgtgagttcttgtctgccttttaccccggcgagacagtgatgattgagtacgacacggtttcaatgcccgaagtgctgttctacctcatatacctgaacagggaaaaccgaccggtgctcattgacgacgttgcggatactctctgcgagactctcaccaaacttgagttcatgggttttgacgtttccgggttcaacgatgtgcccgttattaaaataggcggtggggaaagaaactgcggcaacgtcctcggcgaggttgacgttgacaggtattctctggatataagctactacggcaggatagttgagaaggcgtccttcaatgacgtcgttctaaacccagttctcggagtccacaagctcttcctggctctcgaaaggaggggggccctcaggctcgtcaagaacatagcaacgtttgagggcgacaagaggagaatagccttttacttcatcaaccgggacgtggttgagatgtcttaccccgagcttctgcctctcctagaggagattgcaagcacggtgatgaactggtcctttgagggtgaagaattcgtgctttacgtttcaaagtccgcaaacctgaatattatggggaaaggaatctcttttaccctcgatgaaatctcttccctttagcccaaagcttttaactgccctctcttatcacttctggtgatacaatggggagactggtctcggtagtgctgatagtcctactccttactcccatcgcctctgcctgggaagttcccgagcgggggataatataccaggtcatggtggatcgattttacgacggcaacacctcaaacaacgaaccgttctacgatccgactcactccaactaccgcctctactggggtggagatttagagggcctcattgagaagctcgactacatcaagagccttggagtctcaatgatatgggtctcgccgctcaacgacaacatcaactccctcgcctacgggagcgctccctatcacggctactggacgagggactacaagagaatagaggagcactttgggggctgggaggacttcaggcggctcgttaaggaggccaaaaagcggggaatctgcataatcgttgactacgtgcccaaccactcgaacccggtgaactacggtgaatatggtgccctctacgacaacggcaccttcctgacggactacttcaaggacacgaagaacgctgaagtgaacccgattaccggaatccgtgagaacgtctaccaccacaacggcaacatctacacctggagcgggataccgcttaagtacgcaaacctctatggcctcgccgatttcaaccagctcaacccgtgggtggattcatacctcaccgagggggccatgctcttcgttgactcgggcgcctgcggcctcagaatagacgccgtaaagcacatggagctcggctggctcgagacattttacctccgcctctactccaaggggccgctcttcatctacggcgagtacttcactccctctctccagaagggcgatgacctctacgagttctaccgctactcgaacgtctccccggttctcagtattccaatcagagaggacattgtgaggatcttcgccttcttcggcggtctcgacaagctctccgaggagcttggagattattactcccacttcgtctatccaacaaaggctgtgaactttctcgacagccacgacctcgtccgctttttaaacgctggcgatagaaaagacgaaattcagcgctttcacatggctcttgcattaaccctaactctgccggggattcctgtaatctactacggcgacgagagctacctcgttagcaaggacggaaagggcgatccctacaacaggccgacgatggtcttcgacaacaccaccgaagcttccagaataatccgcactcttggggggctgagaaagaccaacgacgcccttgtcttcggcgacttcatgactgtaacagcatcctacgagacctgggcctttgaaagaacctttgggaaccacagccttctcgtggtcatgaacaaggggcctgcggtcaacctgactttctccgtagactggcccgatggtaactaccgcgacgccctctacggtggagaaatggtcgtgtcgggcgggaaggcttctgtttatcttccacgggacagcgtctacgtctttcacatcgagggggaacagaaaaagccacttatcggctcaataactccctatgccgcccggcctggccaggagatagtaatcggaggtgcagggtttggaaagggtggcaaggtcataatcggcggtagggaagcaaaggttctttcctgggaagacgggaagatagtcgttgaagtccccaggctggagacctcggcggcctgggtgaacgttacggtcgtttcagacggagggagaagtcccccgaggcctctccgctactactcaggaaacgacgttcccgcgctcatagccctcaacgccagcctcgtgggggaggtctctgggacgctgtggcttagcggcgaccttccagagcttggagaaccaaggccgctcctgaagtcgtcaatgggctactacttcacggttgctccactaccagaaggcgtgccgttctcagtcaggctctacgagggaaaagcctggggcgctttaaggccgctgaacttaaccctctacggcgttgggaacagaaccgttacccttactgagaaaccgcccggggtttcagaggggcaaaaagctggccagaaagatgttgctctctatgctctctcagtggttatgatagcggccttgattgcagtagtatggaaacgaaaagggtgaagtcaaatctcctccaacagcttctttctcttttcttcgtactcctcctggcttatcacgcccatgtcgtagagctccttgagcttcttcagcttttcgagcgggtcttctttctcttcccgaacctgggctggctggtaagctggcatagtcctcgttacgaattccctcggcttcttcagaacccacgtctcgctggtcagccctttgttgacgtctattgagacgggttctacggctatggcgttgagggcatcctttatggcgtttatcgcctttctagcttcctccttgtccatccagccaagcttgagcgttatgttctcctctccctctatgataaattccgagctcattataccgagcttgaccacgacctgctcaagcttctggtatgggatggccttgaagtcgtaccttccgagaactttctcgtcgaggtatattatcctcctgtcggtaacgaggagccactttggcttttcgatgcttatcttcttctttatggcgaacagaaccctctcatccggctcaagatgtctttgaactgactttggaagtttggggttttcctcgactcccatgcgtatcacccatgatgtctctgcggttatcgtatatgtactttgcttccatcccctcttacagtgcatctttgtttctatctgtggattcctccagttaggtagctcccataccaagtgcacacttacccgtctaatttcctgaacctttcgggcttgatctttcccagggggtatatcctccaaactccctcgacgcctttcctgggattcacccgggctgtccacgcttcaactctctccctctctcgtgattgagaactcaaagcgaagggacccttgatattactcacgagctccccagacttcagtttttgaacaatatcttccaacgggacttcttccagcgtccacgttttgttgctcggggcttttactttcgccgttgttgagactgtaacattgcccgggtaatgagtgaccgccctaatcgtgccgttctctccagcttatgaactccagtattacattcctctcaggaacgctcatgggtgaaggcaggcgaagcaaacctctgtatcctaagggggcctcgtagaatcccgtgatctcccactcttcccgttattttgcctgctgatatttcgctgtccttgacgagtacaaagttaacgtaggtagtgctcttcttggggactttttcaatcgataggtagatgctctcaatctccccgttcctgtaaattttgcccttgtagaggagttccctgcaattatcgcagtttttgaagtccttcagcttttctggacttgttgcgaggactgaataattaaagggagtcttgcaggttatcttgcttctcttcattctcggccagatcttcagaaacttgtaaaccttgaaagtgtaaatactgagggtcttgttttctggattgtaaaaagcgaactggtactttctgaacccgttaaaaccagtttgagaggaataataagcggtaagaagttgcgagtttcccctaacttgctccggaatcttttgatagagattgtccatgctctcacttgggagataaaaatagctaaagaagagaaaaaccaaaaaagcgaggacgagcaactttcccctcatttaactttacccccaatctactaacctcaacctgctctctggcatgcatccccaatcatggatctcagtattgttttcatcccagaaggctttaacctggcagtactgactgccgaaatacttgccggaggcataaccttctgaagtcaccatgatctgcacgattcctggccctttttcaatcttctcgagtacttcacggataatctgaccatctgtttgcttgtaagcagaggcactccactcaggactttctccactcccttttaaggtaatccctggatagtatgcgagtacctcagaattatactgatctacaggcttttcctttactcaaaggagttttgtgtccttgtaggagggaaagactagtacgccgttcattccgatgctcccatagcaaagataatcgtgagcgaaaagactccgcttttcacatacttcttttgaccttatccatattgccttgctcgttccaagcgcgtaaatctggtaaaacgtttcattcggctttataacctcactgagattccaccagtaagaaccgttaatctcatcatcgtacttccatccgagggttttgaagaggagtgccttctcgtgggacttataatcctttagagcacctaggtctagtattaccggagagtaattcacgaaagctcttgcactctctacctttttcttttttagccagaattgagaggattggctaacagtgtagagcttgagcacattagtctcctcgttgtaagtcgcgaactgccagagagtgtcctcgtgataaactgctatcaacccttccccttttggaattcctgcgagtttgtacgctccttccgccgttgagagctcgtggtaagtgtaggcattgtacgcgaaaaaagaaaagagaaggagcaggactccagtagctaatgccctcttcatccccagatcaccccagttagccgcagtggtatcctaatattctatcaaagtagattttctgaatgctattggatggataaattctccagtatgcgtggaaattgttttcagtgttaatccagtctgagaatacctctagttttccgtcgtatttgaagatcgagattgtaaatctcaggcttccttttattgtctgcttgaatctctcaggttcaattttttcaaacacctgctcccatggaacttccctgagagtccatgtttcgtttgtcaaaactttgaatttaatgttgtccgtaaagatgacccctccgggatatatgacctttctccttgcgctttgattatctatcggtagaatttcgagaataatccccttcattggatcttccatcataccgggaaggtacagaaggtctgcgtactcaaacggatctgaatatctaattgtatcccccgaagataactctaaggatcctattgacaactcggaacttttgataacagcaagttcaatgtatttactattatttttctcttggttgttaacaatatcctgcattgaagggtaaatgctctcaatttctccattcctgtaaaccctatccctgtagaggagttgtctgcagttgttgcagtttttgaagtctttcagcttttctgggttcgttgagagggtggagtaattgaatggtgttttgcaagtgattttgcttttcttcatcctcggccagatcttcaagaatttgtaagtcttaaaagtgtaaatgctaatagtcttgttttctggatcgtacaaagcgaactggtactctctaaaaccatcaaaaccagtttgggagtaatagtaagcggcaacaagctgcgagttttccctaacttgagctggaatccgatgatagaggttgctcatgctctcacttgggagataaaagtagccaaagaggaagagaaaaatcaaaaaagcaagggcaagcaactttcccttcatccataggtcacctccatgaagtagccgactcatgtgtgtatcttagtttcatctcttgaagtacttattatcctccagacacgacgcattttttcgtgtagtggagagtttttgtagttccattgaagtaaattgtagttttttccaccactgggcaccttaagttggattcatcaagcaatttcgttgggaaaggatttataataatttcagaggcgtttatgagaatttcctggccactgcagggaattgtgaggttctccgggattttcgtcacgttgatcgttggaccactgaggtttcccactcttcctgacacgttccatgttggatataatgccaaaagtgtatcatttccccgattttcaaaggctacaacccatgttgagtacgtgcactttgagggtgagggcatcacgaggtaacccccaacgagcggattgccgtctatagaaggctcctttgccctgtccacaaagatgaacctaacgccgttgaactttttaagaatgtccctgaagttccaagtttggttaaggattttctttatttcctcccctttgaggactctgactttcccgtcgatttttataatcattgccgtttcgtcttggtgggcaggaatgtcgtctattgagaaagaaacctgactgtagttgagccctgtttttacctgtcttttttcaacatttatcctcttcacgatgaggtttcttttcaaagttgcagttatctctgaaagggcaccgttttcataagttatgaccctccattccccttctttgtgatatactactactaagcccctctccgcgtccatgcggttaagcatgcaggatggtgaactaaaacaggcatctttcctgtagttataggttaaagctaaaagtgaaaggagaaggattgctataaacgctagaactctgaggaatcttcctttcatttccaagtcacctccatgaagtagccgacgcctgtgtaaggcccagttacagggacatacatagaactgaaaggcatgtctgggattatactaggtttatggactaaaagattgtccggctgaattgtgatataccattcttctctgataaactttgcaaatgcttcccagcaacttctagatactttccattgctctgtcacatgttcctctactgaatttttgaacatttctgttaatgtcgaattaaaccgagcgtagtcttgtggccaacttagttcgctatatctaaactgcacgttcatgacagaatggggtggtacttctccgaaccacattttgagagcattcattttataatctttgatactatagtaatttctgccttttacatcaagatactcatcataaagccaaaatacgtagtgtcccaattcgtgccctaatgtttttccccagtccacatctccaatagagattacaatgttttggtctgagaatgcagaagccgctgagattatcttcttggacatcattatatggaactcgtgtttctgactctcagttgcattagagaacctttttatccaatatcctccgatagatgcttttggccatcccttgtacaaaagttcagttcttgtttgagggattacccacttagtcttatgtactctcacgtccgcatcatcccactgtctcttatcgtcccatatctgcacgctggttatcatcgcgtacccgtcagtgtagtcgtaaacgaagtcgctcgcctttctaatactgtaaaccaaatttctcttgtcttcctcactcaaagcccactctgtggagacagtgaggctaatcccgagaatgtccctcttcgcaggatcttttccaatgaacagttcaacactgttcggaacgccatcaccgtcgtagtccccgttcatgtcgtcggcttttctgtcactgggatcaaagcgctcggtaaatccatttgcctcaagctctttgttcagctcgatttcacggtagaagggtatcccgtctgcgtcgttggtggttatgacgaaccagatttcgccgtcaggagtgtcgtcagctgaggagtaagaaacgacaaggtctgacttcaggggcatttctcctgaagaagtcacaactttgacatcacctttaagtgtctttacgtcgttgctcatgctcccattgctcagaatctcagcgggactagaggagcttgtcgtcgcgacgacctcgtttcccggtgaagtcacatcagtcccgtaggtgttcacgagggtgacgttgatcaccgttccattctccagccgaacccgagcaactttcagatttttcggtttcactattgagaatgctgtagttccatctttcaccgtaacgtcattaacgccttcaatcgtttttatgtcgatgatctcaccattaattttagccttttcaagtatactttcgtatttcacgtataccttgaggtctttgtccggctcttttggcccgacgttacaggagccgtcaccacatccgctcaagtgaccatagccgaaatatttttcttcatccccctgataatcgtcaccgctccacgttccggttttaaggttgtaatgtattacagcaacggttcctttgctaggggagacgtccatttcggttctcttcccattgtcatctctgtcgtagaggtggaaccgtatgatggcaacttccttgtcgtctggaacatcaaaggtagttagtgcaatcgcatagctttggacgttgacgagtggattggtgattggaattattttcttctcgtaatcatcctgattatcagttaggaaaagggttttggtttgtccatttacggtaagctccaaactcatatccgctggattgtgaccagcaattgaactgtcaacatcgtccaatgccttcgctcttaggatgtagactgtaaccttcacgtccctcaaggggtcaacgtcctttgagtcaatcaccccgtcaccatccgtgtcattactgtagggattcatcccgtactcccactctaaggcattgcaccaaccatccttatcgctgtccgtgagaaccggcacgactttcgtcacggtctcccccactttcccatactcatcaacgggcgtaaagcgaatggtcacgttctcgcgacagttagtgtggttgtagatcggagcgagggggaacctgtgcgggtatcccgggtacaggccagtcctcctaaagctgaagcgcccgacgacttccacactcacgttcaccctgtcgccttccgcatcgttaacgacgatcgtgccgttgctccactcgtttgagtacaggaaaggtggaagatcaaccctcacaacttctgggggcgagttctctcttacgtaaatgttcctcgcccacgtggagtacaccacagtaccgttggcattgtagagctttatctcgacgtcgtggaagcccctgcccggcttcttccaccaaaggtcaaagctccacctcttgtaaacgtagctgttgagcctgctgatttccacgccatcaacgaagagcttgaggattacgtccttcctgttgccggagggattgacgacgttgacgtggaacctaatcgggtgcttttcaacgagcatcgtgtgggaaaccccggagatgtacggcctggactctgaaactttgagcgttgttgagcttgaggacgggcttcccccgtagtccgggacgaacctcgccgtgaggacgtggctcccgggagtcgcgcgccacacgttgtacatcttatactcccacgtgtgataagcgtagaccgtgacggcggatttcttgataagcacgccgtccaagtaaagctcgatgtgcccctttccatttaccggcccactgttgtcgaggtttattgtgacatggaggtaatcgccctccttggggggactgggtgagtaggagattctcctgaccgttaccttgggcgctccggtataagagtaaatgtccgccaggttccccttgttatcgatcaggtagaccgtgtccccggcattgttcaggattgcggacgaggaagaactggcaaccagtattctcctgacctctcccgggccgaggcttaccgagaacttgcgcacgtggtctctcccaaaagagtcgtagcagtggttcttggggattgagggggtttcgtttacccagcagcgctcgttgttgtaggcgtagctgtccattaagtaccatccagaggcggtgaacgttgatgagccgccgttgtagaggactacgtactctccgttattgtcgtttgtgaggtagtccacgtcgattatctgaaggccgcgggaagtgctcagcggctccacggtgaaggcttttgcaagggactcttcggtggtttccccggtttttgcttttctcagcgctccgagggctctctccgggttttcccacttgtaggtctgcattgctattggctggttgttgtcgtaccaccatatttggaagatgaggctggtgccgttccagtggatgtttctgattctcatggtgtctgacacgattatgtccccattgagggtttcgtttaggagggcttccatgagtgctattagggcttctctctcaccgtcttctgcggtggagagttcttttagggggttcttgaagagggggtttatcgtgcctgctttctcctcttgagttcctgcgagtgtcgtgcccggcactccgctaaggagtatcagcaccaccagaacaagggccgctctcctcttcattcccaccaccaggaatttaaagacaattactaaaccaccaagaacacataaaaatttttcggctttctcctttagtacctccaggggaacggaagcagctgtttatggtggagggctcgggactttaaactgccttcaattcactcaacaggtttaatataccctccacgaaattccaccgtggtgataacatggacttcgagagaaagcccctcatcgggatggttcacctcaagcccctccctggttcctacctctacaacggggacttcgattcagtcattgaggccgcactaagagacgccgtgacgcttgaagaagctggtttcgacgcggtaatggtggagaactttggcgacgttcccttcccgaagtacgccgacaaaaccacggtcgcttccctcgcggttgtcgcaaaagcgatacgagatgaggtctccctccctcttggagttaatgtcctccgcaacgatgggatagccgcctactcgattgcctacgccgtgaaggccgacttcataagggtgaacgtgctgagtggggttgcatacaccgaccagggaataatagagggcattgcccacgagctggcgatgctgaggaagaggcttccctcagagataaaggtctttgccgatgtgcacgtcaagcacgccgtccacttcggtgactttgaggacgccttcctcgacacagtggagaggggtttggccgatgccgtcgtcgtcagtggaaaagcaaccggaaggcccgtggacgttgataaactcgcgctcgcgaaggagatttccccagtccctgtcatagtcggctccgggacgagctacgacaaccttcccgagctctggaagtacgccgacggcttcatcgtgggtacgtggataaagcgcgatggaagggtggagaacgaggtctctctggagagggcgaggaagctggttgagcttgcgaaagaacttcgtcaaagttccatttgaagttgctctttgtcgaatttctttttgcgaaaggtttattacccatggctgtgtaatatgtacaaagggaacctgtcccgcttttctcttctgcgagatggttctcagggaagtgagaaagttgtcttcattgctcattgaatccctcatctttggtccaattattgggaccgtgcagtccagtttattgggcatttgggacattttcgttttttccagtattgaacggaggaatgccgtgtgaacgtgcgcgtttttgtgggtgtaatgattgtgattctcttcctggcccccttcaccaccggggcggtgagtccgccaacgggcgcgcttcagggacttggaataaacatcgtgcaaacttccagcattcaggagaacggtgctaacagcgtagttctgaggggcaggattgttaaggatggcgtgaactacactgtcctagtaacgataaccgagtatccaattagaactagtgaagaccttaccgccgtggaaatcggagacgttccagaaccaggagtcagcatcgccccagctctgagtaaagttcttcaaaactctggtggctctgaaaacggtggggacgtgagtttcctcctgggctacaacgtttatgaggcttcattttatcccacgactctagatggaaaaccggttgaagataatgtcaccgtgagcgtaaacacgggcctgacctctttctacgccctcgacttccccttcggagacctcaggatctcgattcagcttttgggaaaatacttgaacttccagcgtgatcccgattctttcctttccacggcctgcaacctcaaccagaacaaccagacggagtgccacacggagttcatggaggatgaatacaactcctacctatcatcaatgctctcaatgaaggcctacgcctactcccaggcgagctctctgggaaaaagcgtgagaaatgccgttttggcgtccctcaagtcccagtcctatcccgcgaagctccttagcgacttccagctctgcgttccgggctccggatgcgttaagatttcccccggttacctcggaaccctgacgttcaacgagaccgacgtagaaaacggcgcgagacttatgttcacgacggccgttttcgacagaaacagcgacgtctcgggaattcaagcctactacatagacccgagcggacagtacgggggagaggcgataaagctccactctgcccaggagttttacacctacatggcaaccccaaagaacagcactgtggcctacgcttggataaacaggtcgagcacaaccatacccgttgtcctcgatgtggcgataaagcccgggcagttgaaggagggaaaggtaagggtggttttcgtggtcagcgacggcagcgggagtcgttccaaggaaatctcctgggattttgtgttcgctggaaacttcacggattactccctcgacgtactcacgccaaaggacggcgccagcctcaagcagataattgacggcctcttctccgtgcctctctacgcggaggtcagggggagcggtgccaaggatctctacgctctcgtcaccctccccgatgggagctccaagaggctgcccgttgagggcggcgagatacttgacgtcctctacattagtgacccgaccgtgaaggaaggggcgctcaccataggcctctacgggaaggtgaagggcgaggagaagctcttggcaaagagaagcgtccacgtaacccttgcgagtgttgaagtgcccggagacgagatagacaacgacatggacggcctcgttgattgcgacgacccggacatagcgacctgcgacgcttgtatcatgcagaagaagctcgaatgggctgaatcgctgatggagaggcatattgactacatcaacaagatgatagagaccgacccgggcatgaagagcgtttacgacctctacattgaacaccttcgcgagctccatgatcggtacaaggacgatcctgacagaatggccaaggagatgaacgcctacatggaggagaaggtctacaggaaccaggagatcaagggctacatctccatatttgcggatgaccctgaaaagcgccaccagctcaggcagatagccgagaaataccggtacgatccgataatgaggaggataaagatgaggagcttcatatacgagaactccaagagcgaggccgagagagaagccacgatgaacgctatcctcaccggaatccttgagccgcccaagtggctcgtcggcggccagtacggttctggaggggccctcgactgggccaacttcgtggcgagcaacttcgagaccgttggagacaccgtcaagctgaaggggacctcgaccgtgaagatgctcaggacgcccgcaaacatttttatcgttgcacaggacgcgagggcattgatgaagcaggctgaagagctcaagaagatgaacctgcccgagagcacgaaggtttccataatagtgctcgatggtgccaccaaaatcggaaagctcctcgatccgacgggctacttcgggaacatggcagatgcaaccataggtgcagtggtcaatctccgcaagaagatagaggagaggaaccagggctggttcacgtggaacggctacgtactccacgagacggcaaagcccggcatctacgaggactacgagacgggcaagaagttcaagcggatttccggcgggtggcttagtcccccaaccttcgtggaggtgaaggaaaatgagtaagttcaccggcctgctcctgatactcatcctacttggtgcggcttacatctattacacgaatcctcacataatcgaagacctcacgaagatgaaggacagcttccccaacggcttcgattcgggtgggacaactacccattcttcgggcgggagtggtttctctgaaacatcttctggaaaccatagcgagtccttccccggcgagaaggggtgggttgattcggacaacgatggaaggaaagacgtttacatcggggacgactacgccgaggttccaacaaccaacggctcggtactcttcgttgatcggaacaaggacgggaagatagatgccatctacctcgacacgaccggcgacgggagctacgacactgcctacctcgacgaggactacaatgggaagaccgacacgtggagaacgactttcaacggggttgatagctacgcgtgggacatcaccggcgatgggattcccgatgtctatgactccaacggggacgggaaggttgacgcctgggacacaaactccgatggaataatagacgagcgcgacgttgattacgacggaacccctgatctacacgactacgacttcgacggggtctttgacgagttcgagaggaacgttactctctaccctccggagagtgcgaacgggacatcgggggctttcctctgcccggacaacaaggacgacgcctatcggctcttcgtccaggcctacaacaacgtcacttctcttcaatcttcgggggcgagcgatgaggaaattcaggaggcctacgctaagtatcagaaggccagggcttgctacgagtccttcctgacctcaacgacctcagccgcttccagttcagggatgagggagatcaagaccgttaccctcgatacggaaggaacggcaggtgtgaagttctccacgggcgagctgaagggctacaacgagataagcgataacgtgtgggaggacgttgatctcgtggcagagccgtggtgcgttgagtatccggctttgctaggacactggatagacctcggtgaggggaacctcgataccttagacccaagcgagatacctacctcaggctatccaacgggtgagattgccgaagagatcaagatgggccacgtctacgtgaacctcaactccgatggaacacttacagccttcgagctcgtctcccacgagaagaccggcgactgctcccacaggataacgatacggtactcaaacctcggggggagctgaaacggaacccccaactggattccacgtccttggcccgtttctgggtcttttcctgcttttggtagcgttagctctccttgttttgtttgcaaagctgacctttaggctaattcggaggcttgtttgatgagactggaaagaaaattggaaggtgtttgagatggagaaagtcctttacgtaataccaaacctggagtaccacaagggcttcttcaagagcgcccttgtgaacctggtcgtcacagacgagaagataattgtcgcccacgtgaagaaggagatgatccagaaggcaagggaagaagcgaaggagagaggagacggcttctttaagaggcttgcatctggctggacgatgcacgagcgctactacgacatgtcccctgaggatgttctcaaagaatccccagagaacttctcaattccactgaacggaataaaggaggttaagctcaagggaggcaacgttgacgagggcaaaaaggaggagatggagataaggtggaaggagaagagcaagttctcagggagcatgaaccagcgggagataaagaaaaagctctccgacctcggcgttaaggtcaagggaggaggtctcttcgggttttaggggtgatgggggtgagaaggatgggattctttaagaaactgatcctggggtttttcttgctgatagtgctcggcatcgtggcggcgttcggcatgcagtactattacgagaccttctacgataaggtccccgtggaagtgaagagcgacactgtgactggggatgttttctatctgtcgcacaccttggaacctggcacgtacaagatagaggccgggggaactggggtcgttaagggcatcaagatactcgatccagacactaacgaggtagtctcttcctacgaggacagtacgagcatgatttacggctcggcaaagccctttgtggtcagagttgactacgcgccaccgaaccccgacgaaagctacactgcaaaggttggaatatacaggctcgtgaagaagtgaggtgggagtatgaggaaggtttacgcgctctcggccctgctgctcgtggtgtttgtgctcacgagcggctgtgtcgagagcccggacgttaacgtcgagagtgaaaaaaccctcagtgtaaacggggttacagtccactattcgggaaaggtatccacggatcaggcaaaggcgcttattaacctcataaacgccgaactgaaccccaatgagatagacgtttacgtaaagaaggataacggctacgttgttggattgacaagcacctacacgagctccagcgaaatggaggattctctgaagttttacctcatctttctggcgtcaaagatgtcccaggacgttttcagcggcgagaaggtgcttctccagattctcgatgacgaaaagaacgtactctaccaggtggagagcaaataccgctacgtttcctcgagcggtatcaacgtatggtacagagtggcgagcgaggaagaggctcggaaagctctcgattatcttgtcgaattcgctggtcaggggccctgggatgtgatccttgagaagagcggttccacataccacgtcagggctatgagctccttcacgacggctgacgaagcgaactcggccaaagatgcttatacggaacttgtctcgggccttgaggagaggctgaacggagacgtcgttgtccatgtcctcgacccgaacgggatcgagctgacgacctttggcccgtgatcccgttttctttgttccttttctcccattggaattgtttaacctgggcggaaaggttatatttgaacctaggaactttcccccataactttcatgggtgattatcatggggaagtacttcggaaccagcggaatcagggaagtctttaatgagaagctgacacctgagctggctctaaaggtcggcaaagcccttggaacgtacctcggcggcggaaaggttgttatcgggaaggataccaggactagcggcgacgttataaaatcagcagtcataagcggacttctctcaactggtgttgatgtgattgacataggtttagcgccaacgccgctcacgggctttgcgataaagctctacggtgccgatgctggcgttaccatcacagcttctcacaacccgccggagtacaacggcataaaggtgtggcaggccaacggaatggcatacacctctgagatggagcgtgaactcgagtccataatggactcagggaacttcaaaaaagctccctggaatgagatcgggacgcttagaagggccgaccccagtgaggagtacataaacgcggcgctaaaattcgtcaaacttgagaactcctacacggtcgtcctcgattctggaaacggtgcgggctcggtggtctccccctacctccagcgggagctgggcaatagggttatctcgctcaactcccacccgagcggcttcttcgtcagggaacttgagccgaacgcgaagagcctctccgccctagcgaagaccgttagagtgatgaaagccgacgtcggcatagcccacgacggcgacgcagataggatcggcgtcgttgatgatcagggcaacttcgttgagtacgaggtcatgctctcgctcatagcgggctacatgctgaggaagttcgggaaggggaaaatagttaccaccgttgatgcgggctttgctttggacgactacctcagaccccttggcggagaagtcataaggacgcgcgttggtgatgtggccgttgccgacgagctcgcaaaacacggcggcgtcttcggcggcgagccgagtggcacgtggataatcccgcagtggaacctcacccccgacggaatctttgctggggcccttgttctggagatgattgacagactcggtccgataagcgagctggccaaggaagtcccgcgctacgtgacgctccgcgccaaaatcccctgtccgaacgagaagaaggcgaaagccatggagataatagcgcgcgaggcactaaagacgttcgactacgaggggctgatagacatagatggaattaggatagaaaacggtgactggtggatcctcttccgcccgagcggaaccgagccgataatgcgcataactttggaggcccacgaggaagagaaggcgaaggagctgatggggaaggcggagaggctggttaagaaagccatctcggaggcctgaacgtgaaaatccctctctacatcatctacgcactcctcgcggcgttcttcgccgccctcgtcccgatctttgggaaactcggtctcaggaacgttgattcaacggtggctactgtgatcagggcgttcataatgttcgcgtttcttctcttcgtctccctcgccacaggaaaaacaaacacggccggcttcgatcatcgtgccctgctcttcgttactctatcaggccttgcgggggctctctcctggcttttctacttcatggcgataaaaggagggagaactaccgcggtgatagcgatagacaagaccagcgttgccctcgcggtactccttacctggctcgtccttggagagaagatagacttcaaaacggccgttggggcgttgctgatagttctgggcgcgctgctggtgtcgctgtgatgcgtgtttttggagtcccaatttaactcaaaagcctgattaagaggttccactccctctcgttccaagctctgctgtctgtcaccacgatcacgcttccgttgttaaggtatgcgatgtctcggatggtgctcagccatttggccatcgcatcaaagccgttgtacatgtggatgtactcgatgccgtcaatgaggactatccctccgcttcccgctgctctgaggtatctgttaatgatctctgtgattttagggaggtttgtgggaggtacagtacgttcgcgctccacctggcttatggtgtaaacagtccatttttcggggggatcccttgagttccggacgaaggctaggagcgggcggtcttggagcacaggcaggatctttctatactcctcaggggacaatatggtaagcccgggctttacttccttcagcggcttttgggtctcggagggtgtctttaagaactcctcatggcctgcgaactttacgaagaagtaggcgatgagaacggtcagtaaagcgctcagagagaaccctatgggtgcgaaccactcaacagggcgaaggaggggatagtccatctcatgtgccccatacacaatcagcaggaccccaaggtacttcatgctgtttccatagatgtttctcaagcctacgagcagaaagccagaaaggaggacgaagaggccagaaaccgcgtacgcaactccaaccgtggcgagccagtttggatcgcttgagcgctcggcggcgagcatgtaaagggtgaggatgatgggggttatggagacgtaatagccgcggctgacggtgaacgagagtccctcttcatcaaggagtctgagactcccatagaagagaagtgaggcgaagagggcttccatggttatggcaagtaattcaataccgataaggtcgccgagaacctgtagggaggcggcgaggaacgcaagggcaaaaatcagggctgactttctaagtgacttctggtaagagtaccacaggtatatcacagtgaagagctttgcaccgaggcttagggtctggccggcgatgagtagtgtggggttcatgaatgattcccgtcataatttaatgaggtgcccgttaataagatttgtgcatctgtgcatctatgtagcaataagtcctcttttgtgcaatattcttatctcaagactcaccttgtcccccttgttgtaatgtcttttccgtccgggtgaattctgcggtgggggaagtggatcactcgaattcattggcgcttttgttttcctccgtttatctttaattttgtaaagattttggtgggatttcggaaaactcttttattttggggtcatacattcaattttaggtggacgtatggagagatcgtccaagctacacaaccgattttaaaattgtggggtgagcgagatgaaagaagccctccaaaggctccgggaatactttacccgaacgacggaaggcaggtatttggtagtcgttctggccatggcccttatcgtcttcaccgccgtgctggcccttcccgttaagctcatcgagcccgatgatgcgacctactacgcggcgatgaaggcctttgcccagggaaagctcataataacccgctctgaacttatggacttccagagggagataatcgagaaggggctcgccgtcgggaactttagagccattcagtacgttagcgttggcacaggctacgccctcgaaaaggctccggggtatcctttcatcctcgccgccttctacaggctcggcattgaaagatttgtgaacttattcttcggcctcctcgcgctcatcgtgttttaccggatgatgtcgaaggccttcagcccgaggacggccctcttttcctcgataatcctcctctccaacgccacctttttggctatgttctacaggatttacatgtccgacttcgtcagcatggccctcgtgctcatcggccttggcctctactacctcggccttgaggatggggactggaaaaagggaatcatctcgagcctctcgctcggggcatcagtgctggtcaggtacaccaacgtcgtggcatacgttgcactcgccatctacgttctctggcttctccggaagggcgagaagagggcgctacgctattccgctattgccgttggagcctccgtcccgatgctactcgctctcatggcatataactgggcggttttcgggtctccgttcacggttggctactcaaagaccataggctacacgaacttcgccttccagtacattttagccggtaaagtcggcgaagggctgagtctaatatggagaaacctcctgacgcacccgaagctcctcttcgagggctttccgtcgctcatacttcttcctgctggagcatacatcgccaggagaagtaagataacgccgctcctgctcctctggttccttgcttactttggcctctacttccagtacgagtggcttagaacgggcctctacatcttcatgacacgcttctaccttccgatggcgccggcggtggcgggccttgcggggattgcaatagaaaggctgatggagggagaagatgggaaggcagttgccctgactctactcgccttcatactgctcgttgacatctcctcgctcgcgggctttttcagcttcgcactctcgggagtaggggccttgggagggaggcctacttcagtgccaggtagaggagcaccgccagggccagggcgatgaagaagtcgggaaccacgaggacgggcccggggccgatcgccctcgtgtgccccaccagcctgtggaagagggggttggcagtcacggcgtacacgagcagggcggaggtggccaccataaggccgagagtgaactctgagcggaccttcctgtagaggttcccgtatatccagaggagcacgatgccgatcgccgcactcaaagaagtcaaccccgcctttatggccgtgtagagcctcgcggtagcagggtcaatcacgcaggggctctggattatcctctccacctcacccgggcctggaggcccaacgtacctgtagcctagaaaggccccaatcaaacctatgaggataaccgtgagcactatcaatacctttctcatttttctccctcccctatttccgtcttaactctgccccagatctcctcaaactccgagtaattatcgaggagaagctgggaaaggaagtacatccttccgtagcggttctccgtagaagtgacaagcccgtttttctggaggatatcgaggtgatagcgaaccgtggtgtagttcagaccgagccttttggcgagctgtctcgcgttggacggcctctccagcagtgccgcaattatcctcgccctgttcagtcccccttcacttcccgctattagccaccagagcagctgctttacagggttcatctcaaaacccctttggccgggagcatataaaggcttttctaagcccagaaagacgttagatttagtattatcttgtaaattcggcccttaacccctgcgcgaacctctgctcatctaccgagtggtgaagagagctttctccagccttttgatacttccctcagcgtcgtccttatcgaactcaatgtaaacccactctggaaacctcgccatcagtatttcgaagagtattccggggagaagcttcagctcgaagttctgctctcttaccagctcctttgagcgctttagcctttcctccttgctcaggtagaaaaactcctgcattgccctgtagggatatttatccggattgctggagctggtgtagaagacgccgcaggtgggagagcctttaacgccgacaaagactaccttctccggtttttcttcagttagaacgcgcccaatgaagtccgctattatcttagctctttccctcatgccgagcctctcgtaaacttccctgctggctggagcgcgcggccagccgaccagctcgtactcgggacagggataagctaaaacctgccactcgccgccgagccttcctataagctccctcagccttctagccgtctcgtactccttctccttcggcccgcgatagacgtagaaggggctgagcaggcagggagctatgatgaggagtttcatcccattacctccgaaattatctcctcaaccttctccctcagctcctccagagtcccttcgttgactataacgtagtcagcgatatccttcagtttcgtcgtgtggtacagcttttcctcttcttcgtccattttcaaaaagtcctcaaagctctgaatgaccctgtccttctccgctcttctttttcttaatctttcgtaccttatctctggccttgcctccacgtagataacttttccgccgaggcgtttgatcgtttcaacttcttcccgcgagcgaacgccgtcgatgacgatgtttttgcagtgtctcttcttgtcaaccgccaggcggatgaggatgtctccgccgtacttgtccttcaggtactttccaaactcgatgagcctgtcgcgggttggttcggccttcttgggcagttcggggatccaggagtagtcggagacgttgtgagtgagcaggtctatcagcgggtcactacaggaaaccctgcagaagcccttctcctcgaagaactttgcaacagtcgtttttccggcggctatctttccaacgacgcctattatcatcttccccgcctccatgcgcgccatatcaggtttgcaccatccgttgactccatgaggccctcatacgttagcccgacaacaaagtcaataagggcgtttttgtccacgatggtcggccagtcgaagccgaagaggtacttcagctcgaagaagccaatgtggagaaagcggaacgggttcaggagtgctatatcacccctccacgtgagtccgaacgggaagtctgcaagaaccagctccgctcccttccccttggcaattttaacgagcttctcttcgtctggaaagaacaattctctgggttctccctcaatgggttcatagttgagcttgggaaacgcgtacttcagcccaacggccttgtaaggtaatcccagcttttcggcgaaaccaacaagggccctcgcgttgaagctgaggaatatgagtgtgtttagttccccccttacatcgggccactctctcggtggaaacctcttttcggcctctattatgggtaggaggaactcaagcttcgttcccttaacggctttttcagccagttccagctttctacgctttatttcaaggtcgaggttcgaatagaccgttacctgtcctactcccagcctctctctcagcttcccgatcaccaggctgttgccgatgatgacgctcttgtccgtcctgtcgtgggcaattatgaagagcttgtcgtttttttcgtcgtaccttacctcatctatcctgaacgggctgtccggaaggccatgttcgcgccttatttctctgacaagcttttcaatgtccttaacttccatcgcactttggtgggactcctggcttataagcggattgttctatgtatggaacaaaaatttaaaaatttgggtacaaacttgtaacggtggtgggggatgaaaatcagttcaaaagaaatcgctattatcggtctaatgctggcccttgccctcgctctggacgtaatgcccgtcgagatgccgacagtgtggggcatgaaaatagacctcgttgcagttccgatcatcgttgcctacttcatcctcggcttctggggaggattgatagccctcgccatgctcttcctcggtctgagcgtcgtatcctccgcgagctggctgggtgcaatgatgaagaccctggcgacgttcggtgttctcgtaggcctcgaagttgccagaaggacactgggtttcgattattctgacaagaaacggctcttcgtgtttgggctggctgcttacatcgttggaattctccttagaatcccactgatgatagccctcaactactacgttgcactccccatctggctgggtctccccagggagcaggttatctcggcggtggaagactggacgggtgttcccttctggtttgcaatagcccttccgaacgccatccagagtgtcatagacgtctttatcagcctgctggttacagtaccagtcctcaaacgtgttccccatgtggttgtggaaacttctgagccgcaaagaataatagaaaaagagctataggttttgggctatctcgtcttcatttatcgtcctctcgcagtagtggcagcggagcttgaggggttctctgctctctacgtggaatctcggcgtaacgtactcatggttgctgacgcagttcgggttcgggcacttgaggattcccgttatctcgtcgggtatctcgacgttgaacttctcgattatcttgtagtccttcacgatgttcacagtcgccatcggggctatgagggctattttgttcacctcttcctcgctcaggtacctcccctcaaccttgacgatgtcctttcttccgagcttcttgctgggaacgttcgatgctataaggagcgttcctccgttcggctttgtcagcccgagaatctcgatgaccttgagccacttgcccgctggaatgtggtctataacggttccctcggggattacctctatcttaaggttctctggcatttttcacacccccagaactccgagcgtcagtccaagcagggccattctaacgggcacgcctgagaacacctgcctgaagtagagagcgtgcttcgtcttgtccacttcggggtgaatctcgtcgacccttggaagcgggtgcataaccttgagcgtttccttggcgtttttcagaacttcaaggttcacctggtagctgcccttcaccttcaggtactcctcctcgtccgggaagcgctccctctgtatcctcgtgacgtagaggacgtcgagtttgggaatcgcgccctcaaggtcagttgtctcatagaccttaacgcccctctcgcggagctcatcaacgatgtgcttcggcatcctcaggagttccggcgaaatcaggtagagctcgacgtcgtagaaggccagagcttccgcgaggctgtggacggttctcccgtacttcaggtctccgagcaggcctatcgtgagcccgtctatcttcccgaatgctttcttgatggtgtacaggtcgagaagcgtctgcgtcgggtgctggttgctcccgtcgcccgcgttgatgactggaatcccggcgacctctgccgccaacctcgctgccccctccatcgggtggcgaataactataacgtcgctgtactgctcgacggtctttatcgtgtcggccaggctctcccccttcttgacgctcgtgctcgaggcggaggagaatccaattacggaacccccaaggcggtgcatcgcgctttcaaagctcagcctcgtcctcgttgatggctcgaagaagagcgtcgcgagaatcttcccgcgggcataatccagagagcccttctcgttcagctcctcctcaagccgttcggcaaccttcaaaacaaactcgatgtcctccttcgagaagtcccttatgcttatcacgtcgcgacctttccagtccataagtgcccttccgatgtaaaaatcggtgggtttttaaagcttttttgacatacacctgacgacaataacgatttaaacttgatgcagttgaataacctggttgtagggtgagagctatgagggttccaagcgtctatatagcggaggagcttatgccttaccttcgtgcgagagtttcaaaaatcctgtactctaagggctttactcaggctcagatagcggcctggcttggaacgactcaggcgatggtgagcaagtacctttctggcaaagtcaaagcacctccgcgcgaagttgaagaacttctcaatgtgcttgccgaggagattgccagactgatagaggagggtgcggtgaaggaggagcttatcctgttcacaacgagacgcatcatcggcctcttcagggataaaacgttctgcgagcactactcccgctacgctggagtcagcaccgaagtgtgctcccagttcttctcctcaacgccagaaaaggacgtcctctccgagctggggattgcattgagggagctccttgcccttgaagggttcggcgatctcatccccgaagtcaggagcaactttgcctacgcccttcctggagctaagaatccctcggacgtcgcctcagtaccagggagaataacactagtcaagggcagaccattcgctcttccacccgagtttggggcgagcaagttcactgcaggacttctccttgaggttatgaagcgcagacctgggatcaggagcgttataaacatccgctacggaaaaaatgtggaaagggccctgaaaatggtgagattcaagacagcaaaggtaaagacaggcggtatgaatgagggagatgccatgagggccattgccgctcccttcgaaaagggagtttacgacgccatcatagatgaaggaggagaaggcgttgagccgctcgtttacatctttggggggactccttttgaggtgctgagaaaggtcgagaaactaattgaggttctcagaggtgatgtttcatgaaggtctttacaagggaactgcgcttttcaacggaaggtgagatagacctggtggacataacccatgaagtcgagaggatcgtggaagagagcggggttcagaacggccaggttctcgtcttcgtgcccggagccacgggggctataatcacgatcgagcacgagagcggcctcctggaggacttcaagagggctctgaaggagctgatcccgaagggtgcgggctaccttcacgacaggatagacgacaacgcccacagccacctgagggcgagcctgctcggtgcgagcgagtgcttcccagtggtggatggaaggctggtaagggggacgtggcagcagatattcttcgtcgagctcgacgtgaggccgaggcacaggcgcgttgtggtgcaggttattggggagtagcttaactttataaaatcttgagaactttcagttctcactcatttataaaccctgagaagcccaagttctcacacgccccacaagaataaagggggtactaacccgcccaagttcatcggctccgccttcggcggcactccccgggcagaaggagttggacgtttttggataaaaggttttgggtggacagcaaagcgcccgaaagtgaaggtgacatataaaagcccatcaggaggagaggttttgaaaaatcctggaaaatgaactaaaactccatcatgctcttgaagagccccttcaggtcggtaggggagcctcccgtgaggaagtctatgaacctcgccccaccctcgtagaacaatgttcgatcccagggcttttcgaggccgtagtggttctctggcagtccgagcctcctgagtatcctgttctctatgaacctcgccagtccttccttccactcctgccagaccatgtattcgtactccttctttgttaggtgctctctgagctctctgcggctcttctttacgccctcagcgtctcccctttcgagagccgagagaaattcggcgtaggccctttggaactcccccttctcataggggaacggatagttcagctcccaggagtagttgcctttggcctgctcctccaggaacacttcgagcgactttttaagctcgagctcgcagcactcgaactgatagcagtgcacgaactcgtggaatattgaaacgtagcctctcagggactcaaagacgtcatcagagacaacgcaggccattttgtagtcgtactcttcaacgggaaaagcggctctgatgccttctggcaggggagttttggatttggctgtctttacgagattgtaggtctgcttggattcgtccggctcaaaaatccacagttcgtcgccctttacgaccacgatcggatagaccttctttaaaattggatggatgtccgatatttccctctggacttcaaataccttcttcagttcggcagcatacattaagctaccaccgaatataagaaagaaaaggggcttaaaaagttcacttcttgagcttctcgcagttcttggcccactcctcaaggacctccttgagcttgggctggccgatctcctcgagctcgtacttaaccctaacagccggcttgttgaggttcatgaacctgcggaggtcaactggagtgcccatgatgacgacgtcggcatcggcgcggttgatggtctcttcaagctccttgatctgcttcttgccgtagcccatagcggggagtataacgtcgaggtgcgggtacttcttgtaggtctcgatgatagagccgacggcgtagggcctcgggtcgatgatctcagcggctccgaacttcttggcggcaacgtagcccgctccgtacttcatgccgccgtgggtgagggtcggaccgtcttctacaaccagaacgcgcttgcccttgatgagctcgggcttgtcaacgaagatcggtgaagcagcctcgatgacggtcgcgttcgggttgaccttctcaatgctctcgcgaaccttctggatgtcgtcgcggttggcggtgtctatcttgttgatgattatgacgtcggccgccctgaagttggtctcacctgggtggtacttgagctcgtggccgggcctgtgcgggtcggtaacgactatccagaggtccggctcgtagaacgggaagtcgttgtttccgccgtcccagaggattatgtcggcttccttctcggcctctctcagtatcttctcgtagtcaacgcccgcgtagacgaccatgccgcgctcgatgtacggctcgtactcctccctctcctcgatggtgcactcgtacttgtcaaggtcctcaaaggtcgcaaagcgctgaacgacctgcttcctgaggtcgccgtagggcatcgggtgtctgattgccacaaccttgtagcccatctcttggaggagctgggcgaccttccttgaggtctggctctttccacagccggttcttacggcggtaaccgctacgacgggcttgcttgacttgagcatggtgctcttcggcccgaggagccagaagtcggctccggctgagtgagccctgctggcgaggtgcattacgtgctcgtgggagacgtcggagtaagcgaacacgacgacgtcaatgtcgtgctccttgatgatcttctccatgtcgtcctcgctccagatgggaattccgttcgggtagagctcaccggcgagctcgggcgggtaaatcctgccctcgatgtcgggaatctgggtggcggtgaaagcgactacctcgtactcggggttgtccctgaagaacacgttgaagttgtggaagtcccttccggcggcgcccaaaatcagaaccctcttctttttcttctctgccataggcatcacctcaaaatttccgttttggcgctagtgtattgtttttggcatttataacagtttttgtttaccggtgtaagcgttctgtgagggtttttcgatgtgggcattgatgatgtgaagacttttcgcgaaacggtgaacaagaactggaggcggcttggtggggccgcacttgaggtagattaataagccccgtggactattgggtatagtaaaaaatgaggtgagtgcaatgaagggagtgcgcgattattccgcgttggcgattgctttggcagttcttctcctgggctggttcttcagaccatggttccacgggctcgtgatgggcttctacaggaatcctgcgctactctacatgttcctcgccctgggggcgttaatggctgtcaaaccaaagcgctacatcctggggaaaaactacacgcttccgctgatcctcggcgggctgttcatcctttcgatagtggctctaattctctcgtctcccttcgccaatacggacttgtacaaggagtaccatccgtcgctcgtaacgggagagctcaatctctccacgagctacattagaatccttcccaaatttaccgcttatcgctacgccatagacacgatcgagtacgcgcgctacaccctcagcgacgggcatctgacgatgctgaacggcacccctgtgtggggcttctacatagttcccgacggcgcctggaactctatcaggctcaaggataagggcgtcctgttcgtggatatgggcacgactcaggccaagatgcagcgcatcgaggaagaacttcaggtcggcccggggatgcagttctttgacaacctgaactgggttctctacaagaagcactacctcgttgacctagaccttccgagggccctgcactacaacgggaaactctacatagtcgtcccttacatctcctacgacttcaaagttttctacacggttccaaagtggggcggcgtcttcatcgttgatgaggacggcaacgttgaggatctaagtcctgaagaagccatcaaggacgagcgtctcaaggacttccctatctttcctgaaaaccttgttagggacgttgtggaggctcagaactactggaaggatagcgtcttcgccaacataaagaacctctggccccaccacgagaaccagatagagctcatcgatgtcagcaaccaggggaacagacagccttttttggttgtggccaccgatggggggaagtactggatgacggcagttgaaccctacggaaaggcccacggtttggctgcaatctaccttatgaatgcccgtacgggcgagatgagccaggtcaagtttgaaactcccctgacgggcccagtgaaggcaatagactacgtgaagaaggcccttccgacctttgactggagtcagttcatggccgttgagccgatacccgttttcatcgacgggacgctctggtggcgcgtggcgatcattccgcggagcggctcgggcgttgccaagatagctttcgtcaacgcggagaccaaggaggtaaagatattcgaagacgagagggaagttaaggagttccttctccggggagaggtcgttcaggcggaggaaataaccggcgaagtaaaggccctctactcatacatcaaggacggcaacacccactggatacttgtagttggcaacaggacgctctacataagcgcggctgacctgagcgaagagcttatcctcaagctgctgtccattaagcagggggacaacgtcacggtggtcataagcgagggcaggattgtagacataaagcgctgagggagttttgctttatgcttttttctgtctcttttcaagtaaaaacttatacagcggaactactttgacttctttacccctttcctctattctgtcctcggtatccatcgttacaaggattaaatcatcgcatttgagctttttccctgctttaacgaggctcaaaacttccctctcgtagtttgaggcgttgagctcgtaggttacctgtatcagtttttttacgacgtttccttccctcacgacaaagtcaacttcgctctctccgtcggaatagtacgaaaggtcaatcatcgggttgaagtagctcttttctctcaggagttcgaggaaaaccatgttttcgatttttctgccggcgtcttcccccttaaagaacagattcgtgaatgaagtgtccacaagataaagtttcctcgggttcacgagcgtctttctgtgggagggactgaagagggggagctggaatatcaggaaggcgctctccatggcgctgagatagtttatcagggtcttcacatttagctccagtcctagggccttcaggctcctctggagtgagcggtatgtgaaatagctaccgtaaagagacagggcgtggtaaaagacctccttgaactccccgacgtcccggaaggaaaacctttcgattatgtccctgtaaagaaccgtttccaggattgagatgaccttttccctagacctggtcttccaaacctcaggaaagcccccccatttcaggtagtcctgcaaaagggctttcagccttcctctctccctgaacgtatcagctttggtggttccggtaatctctctaaaagacaggggaagtacgaaccgtgagaggtgccttcccctaagcctcgtgggtatctcagaggagaggagtgctgacgaggagcctgagacgtatacgtcaaagtctttaacgtcgtggagccagcggagctttctgtcccagtccccccactcctgaacttcgtcgagaaacagggtgacctttccgcttggatactccttcctgacttcttcggcgagctctctcgcctccattcttgccagctcgggctcgtcgagcggaaggtagagaacgttctcaccgttttccagcatattctttgcctttttcagcatgaggaaagtttttccaaccctcctgggtccgattatggcctttatgtcgcttccatgcggcatttcaacttcccgcacgatctcctcaacgtaatcaagggcacctatgtactcaagggttatctccttcagcccaaccatgtgtaaaaataatgcacgatagtatttaaagcttgtgtattggaaatacacaaaatagggataaagtgtgtatttcaactacacgctactccctcacccacagcgcccctgccatgccgaagtacgtcgggcaggcgtaggcgctctcgacgagcttgactggaactctgtgcatcgccccaagcattatgagcatctgccagtagctgtcgggtaaggccttctctatcagttcgtccggaatttctggaagctcctcaaggcggctctcgtttatcagctccataataagcctgtcgtactcctcgctctccttcctgtagccgtagggaccgttctcgtcgtgcgcgtgcccgtggtctgcgctcactatgagcgcgattttcttctcactcccctcaaggacttcgccgaggacttccccagccttgattagtgtctccctgctaagccttctcgcgggggttagcagaacgagcggctttttttcaaggaactggagcggtataagttctccccaggttagaggccatcttgaataccttccgctcctgctggcgaagtgcaggtcaacggtcgggatttcggcccctttccaggcgttgtaaacctcctcggcaagccccctatctgtctcccactccccgggaagttcaacgccctcaaagccgagccaggagatgagatgctgggccatgataacgccgagatggtcacttatcctgacgttgtgagggcttatgaggacgtaggagtcagcgtctgagaaggccttcccgatgtccttcaggactccggcgagcttttccgtttccttatcttcgggactcagagcggggttcccgtggggcatgaggcctattccaaagagcatggtaccaccattttaaataataaaaaagagtctaaaaggttcatccccactgtaggggaacctcatagtagttgccgttctcggaatattttgcaaagtagagaacgttgccgtgccagctgtttattatcaccttaacagcaggtctgttgtttgaggactgtctgtatgtatctactgttccagagaagcatatctggactccctctccagcacatgccgagactgaggttgaaaagtataccccaccatcgtctgatgattcttggaaatacgccgtaaactcgtcacctgcatctctgaggtgactgtacctgatcaagtttgagggtattgttccaggatcgttatcagtgtctatttttgagaagtacacgatttcttgggggataagttcataaactgtcctgcagattaggtatccacatacatcgtacctatcaatgcggtaccttacagtggcgtacactgttttcattttcccatcagaagtcgggacttcggaggcatatccaaagggggtgctaacccttccagaacgctcccatctgtcactgcttggctgttcccattgggccacggtctgggaaaatgaatcaatggctagggtatcgtcttcgtttattatcaggtgctcttctacccctgggacgctgtgaagcctgaatatttttacgtcctccatgaacatatctcccactttcacgctagtagcttggaattcatttttagggttgaggttctggattgagggtcctatgttgtccctgtggagggggacttttatgttcacggaggtcaatggtttctcgggatggaactcaatgaacttggttccccagtagttctcacccgagacgataatcagtagcttaactggcctgtagacagtcctaggctccctaacaacctttccatctttgattactgtctctatttttgtgcccttaggaatcctttgtatcttgactgtaggtgtcagcatcggtccttgatagaggatcttgggttccccgagggtgtaatccacaaccacaagggtggccctttgaatctggtggtccattcccaagctaattttcgccagccccactggctttccctggagccagtcgaggtatgtagagtacagcgttccggcgttgtccggctggactccgtaggctgagggtattatcatagttaccatcactgcgacgattactgcagctactgcaagtttctttttacttctcaagagagccacctccactccttctcaagggagccacctttgtggctcaagtgagtcattgttttttatcttatataagtatttcgcgatctgatgtattcagcaactcatcgttacatctttggcagaatactttactaaaatgacacacagttctccagtccttccagcggacaatttactattttgccggagggcatatgtgcgagcacttttaatcctgaccccgtgagaatagacacaacttttgccccttcatcgattttttcactctcgacgagctttttgagaacagcaatccccgttgcgctcgctggctggacgaagaggccttcctttgcaagctctctctgcgcttcgaggatttcttcgtcgctcacggtggtgcacttccagcctaagtcgcggagcaacttaaggacggcgtttccgctcggcgggtacggatttgctatggccttcgctatcgtgtttgggttttcgaagcgctttattctctcgttcccttcgttaaaggccctgcatatcggcgaacagccttcagcctggactgctatcagcgttgggagtttttcgatgagcccgctctccttcagctcgatgaagcccttggcaattcccctgaacagaccgcctgagctcgtggggattaagacgtagtcaggagtaagctcctccgccatctcgaaggcaatccccttgtagccctcgacgcggaatgggttgtcggaattgatgaagtatatcccaagcttctcacccagctccaggctctcgaagtagagccttccgtaatctcccctaacccttatcacgtccgcaccgtaaacgctcacagttttgagcttctcctcgctcgcgctctctgagacgagaattttggcctttaggccagccctcgcggcgtaagcagctacactggccgccatgttgccagtggaaaccgttccaatggccttgtatcccgctttgaccgcgtagctcaccgccagaaacgttcccctgtccttgaagctccaggtcgggtttgcggtctcattcttcaggtagagctttaccccgagctcttttccaagtttggacttcacgaggggagtatccccctcgccgagcgagagatccattgctggttctattggccagaagtcccagaatctctcccagacggtctttccaaggtaaggctctgcattgaaggcttcaaactcaactggttcaccgcactcgcacctctggacgggctcatcgtaagtttttccacatattggacatttaagcttcaactctaaccctcctaacggcttttaaggtaacgacattatcatcccgaattatctcgaaggtcgcgtatgtgttcccatcggcgagcttctccagggtttccgcgaagagttcggcggctttttcatcctcaaactcaaccttccagaggataacgtaatcggtaccgttgttggccaggatcagtctgtcccccatccagctcgttgagacgttccatgccgtatcgttgtcgagcttcgcaacgtccctcatgaggacgtaaaggtagaacgcgcccattctatcgtttctaaggatgctccagttctctgggacttctaccgtcacgttctttggcttcctgttttcaaggtagtactctggaaccattacctgaagggttgtttctggatagcgttcgtaggcccgattcacgagcgtccagttgcccttttcgtagaggtatctcacgaaggagtctccgaagacgtaggggaatatgtggatgtccgttagtggatccccgctcagcgagcgtatcttgtggatcggaattccgttcctctcgcagtagatatctgcaaccagatcagcatctccctctattagagcctggatcgcgagggttccgtcgaaggtgtctgcgccgtatttggcgttgaaccactgcttctggagtacgtggacgctctcgtgggctatcgtccttctcgccgtgtcgggatctgccatgaagttctcctcgatgatgtagattgtatctccaacggtcgccgctatccagcccgcgctcctctcgctctcctctttgatgtattcgtagtcgggtgggagaagaagggtcatcttgtagaccagctcctccctgcggagcctctcgagatcgggctttccgggcttccacatttcgagagcagtggttttgcttatgacgacgatcgttggtttctctttaaactccagcccccttatctcctcgacctgggtcagtatcttgtcggttttcctcagtatggagccggccccttcgctgactttaacggcagagtacagggacgagaacaggagcaggattaaaccgagtgcgagggttttgctctccggtttccacatggtagggattccgaagaaagaggttaaaaaagattggttcactccttgaactcgacgaactcttccttcatgccgtccttgcttatgacgacgacctggaccttcctgtccccggtgtaaacgtccctctttccagcggttctcactgccctgactgccagctccttggcttcctcaaggctcatgtccttcctgaacccgtcctcaagaacggctattgcgaagggactgcccgagccggttgcagtgtagtcgtcgaagatgagccctccgagcgggtcgaggttggccagtgtgggttcctccacgtagccgccgatgattatctgaaccatgtacgggaaccacttgttctcgttgaggatgttgctgagcaggtgggccatcgccttggcggtcatgggcctgccccacgtgaactggtagtacctcgcctcggcctccagcatcctcgcgagggcctggacgtcgcccacgcttccagccgttgttatcgctatcctgtcggttatcgggagtatcttccttatgttgagggtctcaaccatgtggtcgagtgaagcctgagtgtcagcggcaaggacgacgccttccttcgtcctgattcccacggttgtcgtacccgttttcttctccacctttctcacccctaacctaagaaacgcacgttcgttttaaacctttgccagctctgggataaagaccctgtgggagtcaacttccactatttttgccctaattccgtaaaccctttcaaggacatcgggcgttatctcccctggcttcccctcccagaacttctctccatctttcatcacgacgagtctgtctgcatactcgagggccaggtttacgtcgtggagaacagctatgattatcctttccgtcttcaactcgcggagaagctccataaccgttagcgcgtggttgacatcgaggtggctcgtgggctcgtcgaggagcaccgccctgctcccctgtgccagtgccctcgctatcagagcaagctggaactccccgccgctgagggccgttatcctgtccctccttctctcccagagacccactttcctgagggcgtcttcgacgcttccaccggtcatgtagctccccatctccacgaactcctcaactgtgaaggcaaactccgggaaggagctctgggggacgtacgttattagcttggccctctcggccggcttgagagtgagaatgtccctcccgtccagctcgacctttccaatcggcttcaaaatgcccacgagggacttgagaagggttgatttaccggccccgtttggtcctattatggccaacagctcgccccttctggcctctatctcaacatctttcaggacttccctctgcccgtaggagtatgaaaccctcgcgaagagcctcatctcatcagctcacccctcttgtgcttcatgagtaaatacaggaagaagggcgcgcccataaatgctgtgattatgccgacgggaattacctgcggctttgcaacggttctcgccaggaggtctgcgaccacgagtaggattccgccgaacagggcagttgatggagtaagctccctgtggttcggtcccagaatgatgcgcattatgtgggggctgacgagaccaacaaagcctataacacccgaggtgtagaccgcgaaggccgtcagcgtggcgataacgccaaggaagacttttctgtacaggtggagatctaaaccgagggctatgctctcctcgccgagcaaaatcaggttcagctcgcgccacttccagatgagaaagcccgtcccgagcgaggaaacaacgagcattatcagaacttccttccactccgccccgttgaagcttcccagaagccacgtccaagtgatgtaggcgttgtgcgggtgggtgacgtagatgtaccaggtggcggcgttggcgaggaagccataggctattcctgcaaggagaagggtatcaacgggcaccttcccgtttgtcctggccagggagtacacgatgaaaaccgagaggaaagagaaggccagcgacaggtagggcatgtaggttatccctaccagcagggagagcgcagcgccgaacgccgcaccggagcttattccgattatgtaagggtctgcgagcgggtttctgaagagtgcctgcgatgcaactcctgccgacgcgagagataggcccaccagataggcaagaagaacctcgggaaggcggattttccagattattgagaagtacttcggcggctcgccgaggttgaacgggaagaatcttgagagggtcaccttgaccccgtaggctatgccgctcgttacatcggaaggactcaggccgaccggacctatgtagaccccgaggaatattgaaaggagcgagagcacgatgagcgctgggataatcttccgcatgtgctggactttttgtccaggtgtttaaacctttcgctactccagcggacttcttccgtacttcaggaacaccctcagctcggggctctcggcctttattatgttgagcagggctttaagttcggcctcaaaggccttcttttcgatcttgacgccctcgtgtgccctctggagcggcctgaagtagccgttgctctcgtgccatagaatctcgctcaaaagatcatcgtctacctcgcggttgctctggagcaggtagattaccccgcccttcatagtcctcacgtaggccatgggcacgccgtgctcaatgtagtgctcgacgagcgggaacgtctcccttagaacctttggcatcttgtggcttatcgccttgcccccttgggttatgatgaagtaccccggaatctcctcgccgaagcgcttccttagatatgcatcgaggtagggcacgtcaacgatgtctattccgagcttctgggtcagcttcctgttgtagaagctcttggcgacgtagacgaggtttagcctcaggagcttttcaagggagtagaggtactcaaggtagcccagaacgacgtggactgcatttctcgcgtcgtcgagggaaagctccctctcctcgccgtactcgtttaagagttcctggaatatctcctctgcgctcttccttcccttcaggtactcgtctatcgttgcccgggatatctttatccccctcggcgtcgttccggcaaagtccctaaccttgtagcctttcatggctttgtagaactcctcgaactcctcaagcttctcgtcggcgaggattacgtttccatttatcttgcccttctccctcagcccgtcctcaagctccttatagtgctcatccaagaggctcacgaacttcttgacgagttctttaagcttgcctttcccgagggcgttctctatcgtggttaaacccttcacgctctcaggatagactggtggcctcgtcagggagcccgtcagggttccgtccatcatgacgtagtcaacgtccccgagcttcgcggacaggtagcccagcttgttctcaagggtctccatctggagcctgatgatctgatcggagatgccctggttgtagagcatcgcgttggtgtagacaagccgataagctggcccgttgccgaaggcgtagcttgaaacggcgtagaagatcgtgccgctcagcctctgctttccctggcttccgtcaacggcgtagaccctcgtctgcttcctctccttcgggagaggtttccactctatctcggccagcttgctctctgcctcgcggtagcccctctccaggagcgcctttatcctgtccacgctcctcctgtcgatgagcctgtacatcagcccacctccgcttccctgacgactgaaacgccgttctcaaggctcacccttatcaccctatccgccgcgtccttcagctcctcgtcgtgggaaacaacgatgacctgcggtatcttcctgaggtagcgctgcattatgtccacgagccttctcctcctctcctcgtcgaggtacggcgtcggctcgtcgagaatgagcaggcttatctctccggcgaggtatagggagagggcaagcctgaaagcaaggcctaaagctatcctctcgccgccgctgaggaagccgagtccgtattcctttccgttgtagaccacgccgagcctcaccttgttctcctcggccttcacggtgactcccgaatatttttcctcggtaagctcctcaaatatctcgctcgccatctcgccaaccttggccaaggccccttccttgagcaggttcttgtaggccttaaccttctccctgagcctctgcacgcgctctctcgctttcttgagcttctcaagctcctttgccttctcctttctggtttccttctcctccctcagcttctcaaggctggcctttacctcgtccctgcgttcttcgagcgacttcaggcgggcctcaaggccagcaagctcgtttgaaagctccctcgtcttccccttcagctcctcgtgtctgtccttatcgtaggacttttcgagctcttcaactctcttcctcagctcctcgaccctcttcgaggtcttctcgatttccttaagaatggccgtgagatcaagcttgaggctcttcagaaggtcttcctcccgcttgagctcgtccctcgctggcctaagctcgatgtagcgcttgtaagcgggctcgagctctttcagcctctcctcaagctccttaacgtctccaaatccgagctttttcagctcgccgagaagggaagccctctcctcctcaagctccctcagcttcttttctacaagggcgagcttcttcttgaggagctcccctttcttaatctcatcctccaggctttttatctcgccctctaaaccagccagctttttcttcagctcttcggctttctcgttggcctcttcgagcttttcgaggtcgtattccttgagcttctcctcggtttccctgatctgctcaaggacttctttgagggcgaacagctccctctccttcttcagcgtcttctcgacctccacgagctcggccctgagcttcttttccctcttttcgagctctttcatctcggcggagatctccttcagctcggccgtgtacttctcgaggagctcctttctgtgctcctcggtcagctccctcccgcagaccgggcatctgccctttgccttcttgagctccattagcgccttgttcctctcaccagcaatgctcttcagctcgcccctccttgagcctatctcctcgagttctttcatgatctcttcctttctctccctggccttttggatttctgcttctagcttttctatttcctcctcgctcagcgtgagcctcttcttcagcctctcaaggttggccatcagctccttagccctctggtatgctttgaggtcctcttcgagggctcccagctctttttgaagtccttctttctccttcaggagctccttcactcgggcctctttcttgctcagctcgtcaatgcgctccctcaggttctccgcctgctgggagtaagtggccaggagcttttctattctgtttatgccctcggtaaagttcctgtagaacctagagagcctttcgtattcctttgccttttcctccaggctctcaagctcctttaccttctccttcagttcttcaaccctcttctcggtttccctgatcatgctctggattccgctcttcttagcctccagctccctcaggtttccctcttcactcttcagctcgacccttgcctttgcgagttcctcagcagttttttcaagttccttcagctccttctcaagccccccaagctcccctctcagctccgggagtttcggcgagatttcgtttatttccctgaggacggaagtgagctccttttcgaggtttcctattagctcgtctatgttctcggtgctcttgaggtagtcctcgattgcctttatccttgcatcaatctcctttctcacatccagaaggttcttgtaggagttttcgtatcgatcgaggccgagaacctgcctgactactttttccctgctctcgtcgctctcgaggatagcgtctatctcgccctgtcggatgtagatcgcgttgaggaagacatcgtagggaaccagcttctccatccaatccctcacgggcttctggcccgtctcaagggtcttccaggagcttccgtcgtggtacttcacaaaggccagtcccctgccgatgttcctgtgtatctggtacttcacgttccccttctcgaagaacacggtaatttccgtcccgctcccgtttatcctctcgaagtcgtcctttttcaggtctttcggctttgacggccagtagagccccacgaggagggcatcgaggatagagctcttcccgctcccgttctggccgattatcaggtttatcccgctcgagaagttcaccttcgtgagggcgtgagagcggaagtcctttattatgagcttttcaatcttcatctcccaccaccgagccagtcgaggaggtttgaacctttggaaggccttttaacgaccttcttttcagagtccttgcgctctttcgtctccctctgttctttcccttgggttttgggcctcttttctttctcagggcctccttctttcttggctgtagcatcttctttcctttcgggctcttcagttttcttaggaagcttctcgtcccatccctcacccaggaagagctcaacgacttcttcaatagactcgatagccttttcgcccgtgaggtttatcgccttcagctcgacgggaatgaagtactcctctggctttggaacttctcccgagggggttcttccggtcagcttcctctcgaacctcgtcctcacgtagacgtagcgggcctttatcagctcggtgagctttgaaacgtcgtagggcctctcccagcggatgtcgagcctcacaaaggcttcctctggaatcttggtggagaggcgcttcagctccctctttgctgtctcttcgtcggcctttatgttgacgtcaatgaagggcctgacattcagctccacgaacctcggctcccagtcctcgacgatgtagaagcccttagggttcccagcggtcggtttgaaggtattcccgtcccagcggtaccttatctcgtagtccccgaagtcccacctctggagcgagccgggatagacgagctttccgatgtcgtagctcgtcaggaacgccctgtggatgtggccgagggcgtagtagaggtagcccttcggcaggtcgccgagcttgagctcgtagtagtcgcgctggctctcaggcagtttgcccatcatctcctcgacgagttccctaaccccttggtggagcatgagtatggagtccccctccggcctgaatatctccttcggcgggttcttttcgagccacgccgcactcatgtacttcataccgtgtatctcgacgcttttgttgcccttctcaaaaacccctttaacgagccagcccctctcggtcttctcgctcgtctggtgctcgctctcaaccttctcctccctgaggccgatgaggtagagcaggccgagcttttcgaggagatggtaagcagaaaccctcctctgcgtcctgtcgtggtttccctcgattccaaaaactggtatgcccttctccttcggcagtgagagtatttccatcgcctgtttcagcgtttcagggctgggtctgctggagtggaagaggtctccagctatgagtatgaagtccaccttctcctctacggctatctcaatcgcccgcctgaatgcctccgcgaactcgtcggctctatacggcaggcggtactgctcgaagccgagatgaacgtcagctatgtgtgcgaacttcattggagattcctcccaccagcccaaaactccagaaccttatgctggagttcaaccgagttatacttgggcttaatatccccgagggcacctttccagggcagttccggtctttttcttgcattttccctcacgatatcacctcaaaagtcaacctcgatgccctcttcttcatacatctcttccttctccttctcctcaagctcgcgcctcttcctttcaagccacctctcgaccgcgcctatgtcttctcctccgtagttcccgccgagggccttgaagttgtatatcttaaccaaagccggaaggcttatcgcctgaccgactatcaccgcctcacccttgcccagtccagcgatgtcgctcataagctccccgctcacctgctcgctggcccttaccacgtactgctggtcgttcggattaacgatgcgcatgatgatcttggtgtttgtctggctcaggacgtcttcgctgagcctgctcggcctctgggagaccagaccgaggccgacgccgaacttccttccctcccttgctatcctcccaaggattctaacggcccctcccttctcgccatgcggtgcgaagatgtgggcctcttccacgatgaccataacaggttcagcaagggctgggtagttcttctcaactcccctcaggaattcttccagctcgtttatctcatccgaaacggccgatatgttgctcgaataggcagttctgaggtagtcgagcctctttctagctttttcgtagtccatcctcgtctcgaagaccttttcgaggaacttggcaactaccagtttcatctgtccctcgtcgagcgggccgaggtcgatcacgttcaccttgccgggctctatgagggcaactatgtcctcgctcgagagcagatggccgtagttcctcaggaagcgggagactttcatggtaagcctcattatcgtctccttctccgccgattttatctctccgaggtctctatactggccggcatgcggatcccagtatgtccctccgccctcgctagcccaccgctggagtaaatcgtggacgagcttgaccgcttcccggccgccaattccctggttctcgtgaagaaccgtgtcccaggccctgagcaggtaggagcgctgtatgctcgcgttgctctggatctccatcaaatctgccagctcctcgccgtccattgcttccggccttatcttggcctctatcaggttcacatattctcttcccgtcccaggcaggctcaacttcgtgtagtcaccgtgggggtcgaggactatcacagttccgcctaattcttccacaagcttccagagcattactgagacggtgttgctttttccggcacctgtcacagctaaaattgcgaagtgccttgacacaagctcgttcacgttgaggtaaaccgggacgtcttccctgattatcagtcttccaagctctatgtagccgtttccgccgtagtatattgccctcaaaaggtctgagctggctaaataaaccctgttcccgtttgggacgggaactctggtcgggactacttcagccttctcgccgttgagttgaaccttcccgaggacgtggacggtaactatcagcgcctcgttctctcctatgctctcgccgtactcccttatgtcgagctcaagggacgtgtatgtgctcttaccctcgctcaggagccagtttatgttcttaagccctcttattgtgccgataacccactcaacaccctcttcattctctccccagcggcagttttgatctttggcttccttacagagcctcgcaaccacgaagtctccgaacttcaggtccgtgtcgggatgagcgtagaactggaacgaactaaccgttgcctccccagtcacgattccaacgggcttgttaatatcctcggctatcctcataactcccacctatcgagtaacttccagtttcagagttttaaactttgctgcttgcctattcttaccacaaaaggagaaaaatcagccaggaatccgctcatcatcctgcccgtcaggttcgagagtgctcatcaccttgggtggccacccatcaagggctctcctcaatccttttaaggctttggagggagtttgtaatatgagcacatcagccagagaggccagcagaaggattcccctcgcgatggtcgtgataaggccggcgaagctcttcgacatccctgaggttatgaggatagagcgcgaatctttccgcgaggcctacccgagagggattttcttaatgtttctcgagaacaatcccgaaacctttctcgtggcggagtacaacgggaaggttgttggctacgtgatgggctacctcagaccagaccttgaaggacacataatgagcatagccgttgataaagagtaccggggcaacgggataggttctgccctcctatctgaagccattgaaagactcataaagaggggcgcccgctacatcggcctggaagtcagggtgagcaacgaaaacgcgataaggctctacgaacgctttggcttcaggaaggttaagaggattataggttactactccgacggcgaggatgcctactacatgctactcccagcggaggaatggaggggaagctgatgataatcttctacctgagcggcgacagggtcttctcaaccgatcagaacgcgataaacgggctctacaacaagcgatactttggaaaggtcgttgagggtaagctgtttctatctcttctagaagcggcctatctagtggagcgcggcaagattgaggtcagggacggcaagaggaagctctcgcttgaggagataatgaacctcggcagggccagggatgagctctttgatgcaaaatatctcgtctacaaggacctgagagataggggctacactgtgaagtccggcctgaagttcggctcccacttcagggtctaccggaggggaatggaagagcactccgagtggctcgtctgggttgtccccgagaactccaggttaagtccaaacgacataaccgctcgcgtcagggtggctcacggcgtgaggaagaacatgataatggcgatagttgacgaggacgccgacgtgacctactacaaggtcgagtgggtgaagttctagactcattcggctttttcttggagggattcaaactccctcctcagcaggttccactccctctcattgaaggatgccttctcggcgggcactaagatcacagtgttggtaatgagggcatagtcctttagggctgaaaggaacttgtagacgggaataaagccgttttcgataactaggtattcaagaccatcgagataaataagctttggggtttcctcccgccgcatgaaattgaccagggtgtggagcaggtactcaagcctgcggggattaacacagccctcgctgcattcagcggctgtaatccacaaaaccggaacctctttaatgttaagggcctttctcacgctttttggcattgtacgggttattatgagaggagcacggcccttaataagctttgacagaaggttggggcctgaaccagagggggtaatatacactccgggggacatctcttcgggctcgccctctatctccacaacgggaacgagctcgtatctccttgttatggacgatattatacctgcccagccgaaaatcataggaaagagccctatgaagaggaggaggttcccaatagtgccgaggaaattctccgtactctgctctaagtggataaaccctgcatcgttgaggtcgaggggtaggaaaatcgtctttgccagggaggtgagtgaaaaaccgagtgtgattaaatcgtacgagcgggagaactggggatagtgggaaataaattggtgtctgtagtacaagctaagcagggttatagtgagcagcgccactaggcaatccctgctaggcaatcctgcaaggacgatgtgcataatgttggctgtcacgtcttacacctaaatatgtaatatgtgacaaaagtttataagcccttcctgctgactttataatctgaatcttgactaagggttgcaaaaacataacaaaaatggaaaaaatgttcaaagttagaacttcacttcaggaacccggtcttctttccgaggtcttcgaaggcatctatgacgtactgaagatcctccttgctgtgggcggctgagggttcgagcctaatcctcgcagttccgagcggaactgtcggatagacgatcgcctgcgcgaagatgttgtactcgtcgtacagccttctcgagaactcctgggcgagcttctcatcgtagagcataactggggttatcgggtgcttggtgttgccgaggtcgtagccgaggtctctgaggcccttctggaggaagttggtgttgtcccagagcttcctaacgagctcgtcactcctctggagtatctcaacggccgctatagccgctgcaacatcaggtgggttcggggcgctcgagaagaggaacggcctcgccctctggcggaggtattcgatagcctcctccggacccgctacgtagcctccaatgacaccgaaggccttgctgagggtacccatttcgaagtcaaccttgtcgtggagcttgaagtggtcaacgataccccttccgctgtcaccgaggacaccctcaccgtgggcgtcgtcgatgtagagtatggcatcgtactgttcagccagctcggccatctccgggagcggtgctaaatcgccgtccatcgagaagacgccgtcgctgacgatgattttcttcttcttgtccttgttctcttcgaggcgcttctttaagtcctccatatctatgtgcttgtagatgaccttaggcgcaccgctgaggcgcattccatctatgatgctcgcgtggttgagttcttcgctgatgaacacaccgtcctcgcccttcttaaggagcgcgcttatagctccgaggttggcgttgtaaccgctctggaagagtatggccgcttccctcttcttgaacttggccagcttctcctcgagctccacgtggagctccatggttccggcgatagttctaacagctccagcaccaacaccgtagtcaaggatagcccttatggccgcgtatcttatctccgggtgggcggctaggccgagatagttgttggagcacatgttgagaactttcttcccgtcaactacaacccacgggccctgggcgctctcaagctttctgatggttacatacaatcccttatccttgagctcctggagctcctccctaatccagtcaagctttcccatgagaatcaccgatggttcttggtcattgaagtataaaagttttgcagtgggcaggtcagtgcagttccacgagaagacaatggttggttgggtacagcgtcccagtgagacggcaaaagccttaaactccgggggctcataaaggtttaggtgaaaatccatgtccgaggaagtgaaggaagttaaaattctcgaaaagccgtgggtcgagaagtacagaccccagaggctcgaggacatagtaggtcaggatcacatagtcaagaggctgaagcactacgttaaaaccggctcgatgccgcaccttctattcgcagggccacccggcgtcgggaagtgcctcactggggatgctaaggtcatagccaacggcaggctctttgagctgggagaactcgttgaaaaagtttccaagggtaggttcggccccacaccagttgaaggtctcaaagtccttggaatagatgaggacggaaagctgagggagttcgaggttcagtacgtctacaaggacagggccgagaggctgataaaggtaaggactcgcctcggtagggagctcaaggtcactccctatcacccgctactcgtgaacaggaaaaacggggagatcatgtgggtaaaggctgaggaactcagaccaggcgacaggcttgccgtgccgcgcttccttccggccatagctgaggaagaccccctggctgagtggcttggctattttattggggacggccacgccgactcgaagaataaagtaatcacctttacaaacacagacccatctttaaggcagcgctttatggagctgaccgagaggctcttcccagatgcgaagatcagggaaagaatccacaaaaacagggcaccggacgtttacgtgaactcacggagggcctgggagcttgtaagttcgcttggtttggccgggagaaaagcggataaggtttacatacctgagaaaggctgggaggggattcgctccttcctcagggcatactttgactgcgatgctggagttgataagaacgccgtagtactggcaactgccagcagggaaatggcggagcaggtgacctatgccttagctggttttggaataacctcaaagataagggagaaaaaagtcaggggtaagacatactaccatgtcacaatctcaggttcagagaacttggagaggtttctgagcgagatcggcttctcccacagggaaaaattggaaagaaccctaaagctcgtcaagaagcccaacccgaacctcgacagcttgaatgtcaactatgaacttatctcctacgttagagacaggcttaagctaaacttctccgacgataagaggagctggagccacagaaaggctagaaagatctcgtgggagctgatgaaggaaatttactaccgcctcgatgagcttgagagactgaaagaatccctctcaaggagcatcctcatagactggaacgagatggcggagcggagaaaggagatagcggaaaagacggggattagggccgacagactcctcgagtacattaagggcaagaggaagccgagcctgaggaactacatcaagatagcgaaggcccttgggatcgaccttgaacctacgattaatgccatgagggtctttgcaaggaagtactcaagctatgccgaaatcggaaggaaactcggcacctggaactccagcgtgagaataattcttgagagcaacacggagaagatcaaggaacttgaggaaataaggaaaatcgagctcgaactaataggggaaatcctctccgacgagaagcttaaggaaggggtagcatacctgatattcctctcccagaatgagctctactgggacgagataaccgaagtgaaggagcttaagggcgacttcgtcatctacgacctccacgttccaggataccacaacttcatcgccggaaacatgccgacggttgttcacaacacaaccgctgcactggctttagctagagaactcttcggtgagaactggaggcacaacttcctagagctgaacgcgagcgatgagaggggtataaacgtcatccgtgaaaaggtaaaggagttcgcgaggacgaagccgataggcggtgcgagctttaagataatcttccttgatgaggcagatgccctcacacaggacgctcagcaggccctcagaaggacgatggagatgttctcgaacaacgtccgctttatcctgagctgtaactactcctcaaagatcatcgaacccatacagtcgaggtgtgccatcttccgcttcagaccgctccgcgatgaggacatagcgaagcgcatcaggtacatagccgaaaatgagggtctcgagctcaccgaggaaggcctgcaggcgatactctacgtcgctgagggcgatctcaggagggcaatcaacgtccttcaggcggcagcagccctcgacacgaagataaccgacgagaacgtcttcctcgtggccagcagggcgaggcctgaagacgtacgtgaaatgatgacccttgctctggaaggcaacttcctgaaggccagagagaagctgagggatatcctgttaaggcagggcctcagcggtgaagatgtcctcatccagatgcacaaggaggtcttcaacctcccgattcccgaggacaagaaggtggccctggcggacaagataggagagtacaacttccgcctggttgaaggggctaacgagatgatacagctcgaggcactccttgcccagttcacgattatgggtaagtgatccctatgacggaagtcccatgggttgaaaaatacagacctaggaagctcagcgagatagtaaaccaggagaaagcgttagagcaggttagggcgtgggtcgaagcctggctccacggaaatccgccgaagaagaaggccctccttctagcaggcccccctggagtcggcaaaacgaccaccgtctatgccctggccaacgagtacggcttcgaggtcatcgagctcaacgcaagcgacgagaggacgtatgaaaagatagagcgctacgttcaagctgcatacactatggatattctcggaaagaggaggaagctgatattccttgacgaggctgacaacatcgagccctctggggcgagggagatagcgaagctcatcgacaaggccagaaacccgataataatgagcgccaaccactactgggaggttcccagggagatacgcaacaaagcccagatagtcgagtacaagaggttgacgcagagggacatcataaaggccctcgtgagaatcctcaagcgtgagggactcgaagttcccaaggaggttctctacgagatagcgaagagggctaacggcgacctgagggcagctgtaaacgatcttcagaccgttgttaccggtggagtcgaggatgccgttgaagtcctggcttaccgcgacactgagaagagcgttttccaggcgcttgcccagctgttcgcaacggacaacgccaagagggcaaagttagctgttcttggagttgacatgatgcctaacgagcttctccagtggatagacgagaacgtcccgtatgtctactacaggcctgaagacatagcgagggcctacgaggcgctcagcagggctgacatatacctcggtagggcacagaggactggaaactacggcctctggaagtacgcgaccgacatgatgacggctggggtggcggtcgctggcatcaagaagaagggcttcgttaagatctacccacctaagacgataaagctcctcaccgagagcaaggaggagcgttcgctcagggactcagtaatcaagaagataatgagcgagatgcacatggctaagcttgaggccatagagaccctccgctaccttagagttatcttcgagaacaaccccgatttggcggcccactttgtcgttttcctcgacctcagcgagaaggaagttgagttcataactggagacaaggagaaggcgaagacgatatgggcaaagagcatgaacattgagaagaaactcaaaaaagaaggcgagcttgaggcgagagcaaaggaagccgaaagaagggtggaagcggctgaggaagaggaaactatggaagctggggaacctgaagaagaacttgaagaagtcgaggaggaagagttaaccgaggaggagcttgaggaagcggaggaagagatagagaccgttgggaagaaggagaagcccgagaaggagaaaaccaagaagggcaagcaggcgacgctgttcgacttcctcaagaagtgaattgtattgcgaaaaatataaaaacccacttttcttatattttctgtgatataaaatgctgagccgggaagagcttattgaggtgcttgccccctacaacttttggggtagagagcaggatactggcatcacgagaggagattatcttaaagatataagacggaagctctccacggggaacgccctggctctcgtgggggttaggagggcgggcaagaccacgttagcccgtcagtacctgagattcctaatagagaagggtcttccgccggaggagacgctctacgttaaccttgaggagcctaggttctatccagacctgagcctggagcttctggaagagatcttctcggcgtttaaaacctacatctcaaggggagctagacccgtggtggttctcgacgaggtccagaacgtcgagggctgggagcggtgggtcaggaaggttctggatttgggtgaagccgaggtcatagtaaccgggtcgagctcctccctcctccgctccgagcttgcgaccctcttaaccggacgcgttttagtaacagaggtttaccccctctcattcagagagtttctctccttcaaggggctccccattgaacttcctgcccttctcggaaggaggggggaggttgagagggccttaagggagtaccttgagttcggcgggttcccgcaggtcgtcctaaccgatgacgagggattgaagagggagcttttgagggaactgttcgagggaataatccttagggacgttgcctaccgccacggcttcagggacgcgaggctcgtcaaactcgtcgccgagctggccttaagccggttctcctctctagtgagcgcatcaaggctgaggaacgaagtctcggggatagttgggagaaaggtctcgccaaaccttgtagattccgtcctcgacgcaatggaggaggcttaccttatccacagggttccgatcctctcgccaaaggtgaaggacgtgaggaggtatccgaagaagctctatgcggttgacaccgggctggccaacgtcatgataacgcggttcacagagaacatagggagattggcggaaaatgcggtggcgaggcacctcgtgcagaggcacgggagggagaacgtcttctactacaggaacggccacgaggttgacttcgtggtgagagagaatctaaagatatcgaggctcgttcaggtgagctgggacgttgacgagagctgggagcgggaggtggagggccttgtcgaagcggcgaagcactttggcttaagcgaagggatcctggtaacgggctggaagtcctgcgaggagagggtgaaggggataaacgtcagatgcctccccctgtggaggttcctgctctcttgatgtggatcctttactccccacttcccctctcggtgaaaaagggccatctcaggccctcatggaactgagggctcaagatgcttcgctcataccccatgacaaccctgtctacgagctggcgatggaagaggttagcatagccgaggccctgaagctggcgagggatatgctcgaaaaccctgagaagtacgggataaaagagaaggatgaacgcagaagaggggagaaagccgccgagatgctgaggaagacgatggaagagggaaaggtcgtcgggttcttccacaaggaaagggcctaaatactcctctccatcccttctttcgcaatctcaaccagatcctcgggcgttaggacttcaacgccctcaggcttcctttcgagaacgttttcgtctggaaccaccaaaatcctcctgcagtcaaagcggttgagtttctcctctattctcctcacttcctccctcttaactctctccttccacttgacctctccaaccacttcgagcttcttgaagccctgaagatgctatgtcaagctccaaatctgtgtgcatttcaatcctcacaggcctcaggccgaggctcttggccaaaagcccttcaacgaaggcctcaacgtgcctcggtagtttcctgtctatcgccttccttatgaactccacaggagtctcaagctccgtgtaggcgtattttgcctcaaggtagaagtgaagtgtcgaagaggggtgacgcgtgcctgtaaacgaacttcttcctcctctttccagtgacctgggttctcctaagtatccccatgtccgttaggactccaaggtacctctgcaagactccagtgttgtccttgcttatcaggctgagggagtagaggaacgaagaaagctccgtgctcgtttcctttccatcggcgatgcccttcattattgccctgtaaacttccgtcagctccctctcctcctccgtgaaggcctcgccaacgagctcgcctatcagcaaacccgaagaactcagatagccggccaagaactccctcaaaggcgacctgtaaagggggacgaggataggctccctgaggtaggtagatgcctcaattagctcctttcccctcacttctctgctcatctcggctaaaatctccctctcgtctatgggatctatccttatcggctggactatcccgaggagcggactcccggttccaaggagtttcctcttcgctagccagcgggttgaggttatgaggatgagctccccggttccagagtaggcgtggaggaggtcgaggaacctatccggtagcctgtggaactcgtccaccaccaccttaccgcccttcagcaggcgagggaagagcctcatgaactcgccgtaagtcattgtggagccctcatttaggtccctaaccattccctcccgctcaacgaagaagaactcgtcgtagtcgaggaaattcctaacgaggaaggtctttcctgtcttccgcctaccgtagagcatcttccagccttcgccctcgagcctcgacagttctattcttctgtgaattattctcatgtgcataattacggcgtgaatacttataagaattttgaccgatcaacccagaatctcaacatccgcacaaaccttgaacacatgcggcttgaagtcgctgaccttctttatcctgaccctgcaatcttttccctgttttctgcactcttcgaggattctctccccgaactctcctatcttctcctcgtgcacgaagtcgtagtagtggagccacttctgggctttgcttagggttaaagcaagggcatcaacgcccctcggtgtgggacttatcaccctctcgaaagttggcagttctggcaggaccttgaaggcgtctccttgtatgagctctatctcccccttgagcctcttcctgttcagctcgatgttctccagccccagcctgtaggcatcttcgttcagctcgacggcggtgattttgactttcttatagcgggctataacgagtgcatatggcaggactccagcgaagggaattaaaatccgctcgccgtccttcacgagctgggccagcctgtaccgctcgcccttcattctcgggttgaagaaagctttactcaaatcaacctttatctcgaccccgttctccttgtgaactgttgtcagccgtttctccccccagattatggagtagtcccttattctgaaggcaccctcatggaagcccttcttggcaacgaccttgatgaacgggtggactttcctcaggccccagacaatatcctcggctctgtgctcaagctcgggagggatttggataacagctatgtcgccgatgacgtcgtagcgcctcagatacttcagctcctcagacgtcagcctctccgctagaacgctctcaaggttcttgtatatctgcctttcaggcctcagcgggagttcaacgggcagaacctcgtgtcccagctcgtaaacacgaggatcatctataaccggaagcaggacgaagtcaccttcactccttggccttctcttcccgtcgtagaggttcagcttcttgagcttcctctttagtggctcggcctccctcttcgggacttttatcgctggcatctttggcatccccactctttgttgctgggggaaggacaccaaacagtgctatttcctcggctctttcgggggacaaggcctgactgagctttttaatgagctcctcttcatttatttcctcgaactccctgagcagtataatctcttgttttttgtcaaagatgccctccggaaggtggatgagcatgagtgagtttttaatcattaccatgtccttgactgcgaacaggaacttggccaccgctgggaagtcgttgtagagggttaggtactccagcccatcaaagtacacaacaactggcccacgctgctccatgaactggagaatctttccctggatgacgtggagttttgaggggtcgatagaattctcgacgtctgccctcgacagccagaggaactcgtccggctgaactccgaacttctcgacccactcttcgcgggactttctgctgacgactatcaggccactggagacttctttaagaatgtggaacaactgagcggagggctctttgcgcagtgaataccctccatgtaggggaagttccttttctctagtctcatttctttctggagttttttgagctgtgctcctttctttaaccccttccggtttctcaatactagttgctactgcccttaaactcaggaatatcgtggacaaaattgcagcatatgagagggtgtagaatatcaccatcaaaaaccagaggggcctcggggtgagtgagtctataattgcactcacagagcccagaccaaagaacagaagcgagataagggttcttttggcgaggctcttccccggctctgggactcttttgtagtagtacaacgcccggtatataccaatgagtgccccgagaagtagcaaccatcccgctatgaagccgttgaaattaatcgggttaaccattgctagcctccaaattttgttatccacgttatccctaaaaaccttgcccaactttgacttcttgttctgaataaaagctctattagggcatcatttccagtacggctccctcataagaacggcccttttgaagatttcaactatctcctcgtcgctcgctccgtttctcatagcagaaaggaagtctatgaggtcgttgttcctcaacaagcaagttttaaacttgccatcggaggtcaccctcagtctcgtgcagttggcgcagaagacagtgttgtgcatcgccctaacgacttcaacctctgctatgccgtagtcggtcgggatgaagtacttcttcctccggtgcatcctcctttccttagtttcgacggcgagcttctccagcttctcttcaacgggcttgagcgggtagaagtacttcctgaaaaatgccgtctcggccatctcccttggcgcttcaagctctataagctgaaggatggttccagtcttagccgcgaattccaccatgtcccagatttcaccgtcgttcaggcccttcatgacggtcatgttgagtttaactggcgagaggtatttcaccgcttcctcgatgccctcaagaacggcctcaagcccatcaacgccggttatccttttgtaaacctccggctttaagctgtgaagcgatacgttcaccctgtcgaggcctgctttggccagcggcttcgccagctccttcagtctactcccgttagtagtcatgctgaggtcgatgacgtagggctttattctcttcacgatttcaagtatatcctctctgactgtcggttccccgcccgtgagcttgacctttcttattccgagccttgatgcgattctaacgaggcgctctatctcctctggagtgagctcgtttttcgccagaaacctctggccttcccggtgacagaagaagcaacggtaattgcactcctgcgtgagcgaaatcctgaggttcgttactggcctgccgaagcggtcgtagagcacttcgtccacccatttgtattatgaaggggcttaaaaaaggatttcggttaagcgtttctgttttcccaagattgcctcccctcaatggaaaagtaaaagtagtggtagttgcaacttaggattagggggtgccgatggacgttgatgaactgaaggccaggctcggtgattttgaggggatgcattcgtcctttgaggaggtcttttcacggctctatgaaccggaagaggagcccacggaggttgtgaggaagcttcactctttgtcggcaaaaaagcttgagttagcctctcacctctacaaggaactatccgcaataggtggaagggtcgaagatctcgctaaggaactttacaagaacgagcatcagatgaagttccgccttgaagaagtgatgtcccttcttgggcgcgacgactatgagggcagggcgaggcttaaggccgctttggacaggctggttcagttccacaggctctacgattatgccatccggaaggccctgagtgagctttctgccgaggttgaaggtctgacgctcctaggcgaaaaccaaaaaaaggttccagtcagcatacttgaggagcttagaaaaactaaagcaattgagagccagcttgagaccctcaagaggttcctttacaggctttacgttcacccctcggacgttcacagggtcgagcaggccctaagggagtggcacgcaaaaggcctgctctgggtcgaggcgagaaacgttgagaaggccagcggagtgagagaggctggcgagatacttgagggactcgcgctcattggggtaatcgagaaaaaggataggggtggtgaaagtgtctacagacacaaggcctacagtcagaattaggggaatatacagcactgccctgacgaaactcttcctcgacagggggttcggcatcagccagcccagcaacaagatcgtcgagcgcttcggcctcgagaagacctacgacgacttcgacgttgacatctacgataagaaggacagacacggggttgtgctcgttggggatgccgttgaagaggccaagaaggtccttgaagaggaacttattgacgtcttttttagaaggctcccgtaccagctctacggcatatacaagggacttgttgtgaaaatcgacgaaaagtacgtttacgttgacctgggaagtgccattggtacaatcccaaggaaggatcttccgaaggccgttgaaggcgatgagatactcgtccaggtcaagaagcacaacctccttccacacctcagcaccaccctcacgataccgggggactacgctgtcctcataccgaagcccataggggcacagaggcacgttaagatatcgaggaagataagggacaaccaggagcgtgagaggctcaggattctgggtctcagcatagacctcggcaagtggggagtcctctggaggactgcagccgcttacaaggactggaaccttctcagggacgagatagtgaggctctccaagctcgccgacaggctggcaaaggccgacacgtactttgcaccttccctgataatcgagggcaggaacatatatgaagtggagttcggaggaggagcgaagagaaagctcgacgagataaggaacaaggtcgtcccaaccgttgatggccaccaccagctcaaggccaaagacccggagcttggctttgccgtcgagatagccgagggaatactctcaaaggtacctggccagagggtcaaggttaaccagggcttctgggaggcgctcgtggagaacaaagggcctaagaagggctggctcttcacccttgagcacgtcaagcccgatgggcagaggattaggctagggcctggagaggtcttggaggtctcccacaacccgcttagggtcacaataaagagacacctcaagccgggcaagttctacgacggccttgagcttccgattgagtttggagattatgccataaccgagctcgaagctggaaagtggtggttcgtgcacaggtattacgacaagaacggcaacctgaagggagagtactacaacataaacacgcccgttgagatatatcctgacggggctcgctacgttgacctcgaagttgatatagttaagtggccggacggcaagaaggagataatcgatcaggaggagctcaaggagcactacgaagagggcatcatcagcgagaagctctaccgcgccgtgctcaggataacgcaggaggtatttgagagggtttaaggcagggtcttgatttccagcttttcagcctcttttttcagccttttatcgtatgttgccagtctcttgaagtcctctgccgtggctagtattaccatgtcattgaaccgctttgggtttctggtgagttctagcgcgcgtttcgtgtacttcccagtgtcgcagataacccgcgtccttgggctgtttaggattgaggagatgacgttatttatttcctcgcttttgtacccttcttccctgaaaaaccagtagagctcgtagaggacaatgctcggaactatccatctttccagccctgccagcagtttcctcgcctctgcgttgaactctgagtcccgtagggtggcgtatatgaagacgttggtgtctattaccgtcactcatcctcaccctggccctttcttatggcttcctcgatgtcctcgatcttcagtccctttccgccgggtagcaggggaagttcgaggtcgctcttttttatcacggctttcccatcttcgatctcgatgacaagaacgtcccccaccttgatgcccagcttcttcctgatatcgcttgggatagtaatctgatagttcctagttacctttgtgatccccatagtctcaccggattatagtagaaataagggacgtaaaaacgttgcggtggaaaccttagcatccctttgcgctctaaagtctggaactacacgataggcggctaccgcgtcgtcgagaagtacctgaagggcaggaagggaaggaagctcagcttagaagagcttgagcacgtttataaagtcgtcgaaatcctcaagcggacgatagagctcgttagggaactggagaagatcgagcctgggttctgagctttcctcttttcttatcctaaaagaaaccaatcggtgatattactgaattggtactatactcaccaagtaatatctgccaacaagaagaactgtcatcataccactcactcaacgtcctctattcccctctccgttatcctgaaatatgccataagcccttcgggtctgaagcggtgtctttcgaggacggcaacccttagccctggcttcggcagcttatcgaggcggaggatgtccttacagcggtatccaagggtctgctcggcgacgggctttgtcatctcggttctgctgtcgaagtggacctggttgatgactattaccggtatgttatgcttccgggctatccagaggagaacctgaagctgtctgctcagttcagctatcaggccgcttctgttttcctctgctctatagtgagcggttattgagtcaactacgactagtgcaaagttgctgtccaccgtctttttcagcgaacctataacgcgcctctgctccttgaaatctgaaggtgtaaacagaatgaacctcgagagggcctcttcggggtttagacctctcgtctcagccatctggacaagtctttcgggagaaaatcccccctcggtatcgacgtatgctacctttttcccactaagcaggccggtctgcagggccagggtcgtcttaccgctcgcataaggcccgtaaacctgggttaagaccccgggagcgaacccgcccccgagaagactgtccaggctcttagtgcccgtcgagagcatgaagttccctcaaacttcgatctctctgtacagttctggctttatgaagcgaacccatatccttctcttcctcagctcgctctcaagctttgaggggtcttcgtcgttgtaaactccgtagtgcatgggtataacaaccttgggtctgatatcttcgattatctgagctgcctctctctcgttcgctgtggaacggccgctgataggaaccaggagaacgtcgatcttccccctcagcctctggaaggcgggtgttgagtacgtgtccccagggtggaaaaccgttttgtcaccttcgattatataaccgagagggtactggcttgaaggatgctcaacgtagattgcagtaaccttaacgccgttctcgagttctatagtctctccggcgtcaatttccctcgccttggtgacaccgtcggctactgccatgaggtacacctgcttcggcccgatgactgttgcatccctaagccttgagagcagttcgaccttcccataatggtccgtgtgctcgtgggttatcaggatgtagtccacgtcacctatcctgtcgtcgtcaacctctggatacgggtctatgaggaacttcactcccttcgtctctatccagaagcaggaatgaccgtaccatatgatcttcatcggcatgacctcctcgggaagtttcggtggggttaacttaaagttttctcggcgttggctttattaagggttgtgggtagttcaccatgatgactgagaagaagaaaggactgatagttagggagccgtacgcgaccctcatcgtcgagggcgagaaggtgtgggagatacgcaagtccaggacgaagataaggggagaagtgctcatcataagcaacgggaaggccataggaaaggcagagctcgtggacgttctggggcctttttctccggaggagcttgcggagcactttgacaagcaccgcgccgagcccgagtttctgaaggagtactccaatggaaagccgctctacgcgtgggtctttaagaacgccgagaagtttgagaagcctaaggaagttgagatggccaagggggttcagatatgggccaacgtggttctcaaagattagccctctttttcccagccctccgctggccagttctcctgctcctcggcctctttctggtaattgtgtttgctttcttctccggggctgttctcgttgcttttcgaaggctgggactcccgccagaagtggcccttacgatgttcgtctttgccctcgttgggagcttcataaacatcccaatagcagaggagagagcctacgagcccgtcatcaagctgagagaagtcagcttctttgggttcctctacccaattccgtactttggggtggaagagcggagaatgataatctcgataaacgtcggcggcgcgcttgtccccctgagcatagtcctctacgagcttatccgaattgcaatgttgggacagtacggactactctttaacacactcctcgcagtcctgatagcggcactcatatgcaacgctgtctctgtaccagtcaggggcgtgggtatagcgatgccctcaatcgtcccacctctcgttgcggtcctcctcgggtggctgctcggggacggaaacccaacgttggttgcctacgtcagcggaacccttggcgcgcttcttggtgcggacataatgaactggaaaaaactgaagcaccttgatgctcccatggtcagcattggtggggcgggtaccttcgacggtgtgttcttagcgggagttattgccgtcctcctggtatgacggtgagtttataaggggtaaattcgacaggaattcggcaaaggaggtggttggatgtttcttctgggcagcggtggaaagcacttcgaggatgagctcaggaatgcaggtgcgaagattcttgaggttgagataaagcgcttccccgatggtgagaagtacgtgagggttatgggcaacggggatgaagcaacagtcgtaagctcaacattctacccgcaggacgagaagatagtcgagctgttactccttggggatgctctgagagagaaaggttttgaaaagctgaagctggttgttccgtacttcgcctacagcaggcaggacagggtgaccaaggatggggagccgataagcgtcagggcggtcatgagggcgctcggcatctactacgaggagctctacatctttgacacccacaaccctgagactctcaggttcttcccagggaaggcagttaatgtttcacctgccagggttattggcgagtacttccgtgagaagctgggggacggccttgtgctcgcacccgacaaaggtgcgttggagagggccagggccgttgcggaagtccttggtcttgagtacagccactttgagaagcgcaggatatccccgacagaggtcgagatgcatcccgttgacgttgatgtgaagggcaaaaacgtcctgatagtggacgacataatcagcacgggcggtactatggtgagggccgctgaactgttgaggaagctcggggccaagaaaatttacgtctccgcaacgcacggtgtctttgccgagggggcaatagaaagggtcagcagggctgttgatgagcttgccgttaccaacaccataccaactccggtatcgaggataagcatagtgccagagttgctaaagcttgagtgatcttgctaggttctatcattatgttttgacatttttatgctaatttttccacatttggaactcctttttaacgctttcattttcaaaaatatggctcctccagggttttgcaaaaatttttcactgcaggggttcgtccctatagggtggagcgcccgaacagggcgcgacgaaacccgagcgccaagacggcggcgtcggggggaacgggtgcaaagcacccaggatgaaccccgccctccagctcgggtcacaaaaaggtgcgctcccgaggaaacgccgaaaggcggacccctcgggggtaaggcaggcccgacatcccgaccaaaccccggacgggaattatggtacttcccgctaagggaagtcccaccggccgtactccttgctcaattccggttgatcctgccggaggccactgctatgggggtccgactaagccatgcgagtcatggggcgcgctctgcgcgcaccggcggacggctcagtaacacgtcggtaacctaccctcgggagggggataaccccgggaaactggggctaatcccccataggcctgaggtactggaaggtcctcaggccgaaaggggcatctgcccgcccgaggatgggccggcggccgattaggtagttggtggggtaacggcccaccaagccgaagatcggtacgggccatgagagtgggagcccggagatggacactgagacacgggtccaggccctacggggcgcagcaggcgcgaaacctccgcaatgcgggcaaccgcgacggggggacccccagtgccgtggcatagccacggcttttccggagtgtaaaaagctccgggaataagggctgggcaaggccggtggcagccgccgcggtaataccggcggcccgagtggtggccgctattattgggcctaaagcgtccgtagccgggcccgtaagtccctggcgaaatcccacggctcaaccgtggggcttgctggggatactgcgggccttgggaccgggagaggccgggggtacccctggggtaggggtgaaatcctataatcccagggggaccgccagtggcgaaggcgcccggctggaacgggtccgacggtgagggacgaaggccaggggagcgaaccggattagatacccgggtagtcctggctgtaaaggatgcgggctaggtgtcgggcgagcttcgagctcgcccggtgccggagggaagccgttaagcccgccgcctggggagtacggccgcaaggctgaaacttaaaggaattggcgggggagcactacaaggggtggagcgtgcggtttaattggattcaacgccgggaacctcaccgggggcgacggcaggatgaaggccaggctgaaggtcttgccggacacgccgagaggaggtgcatggccgccgtcagctcgtaccgtgaggcgtccacttaagtgtggtaacgagcgagacccgcgcccccagttgccagtcctccccgctggggaggaggcactctggggggaccgccggcgataagccggaggaaggagcgggcgacggtaggtcagtatgccccgaaacccccgggctacacgcgcgctacaatgggcgggacaatgggatccgaccccgaaaggggaagggaatcccctaaacccgccctcagttcggatcgcgggctgcaactcgcccgcgtgaagctggaatccctagtacccgcgtgtcatcatcgcgcggcgaatacgtccctgctccttgcacacaccgcccgtcactccacccgagcggggtccgggtgaggcctggtctcccttcggggaggccgggtcgagcctgggctccgtgaggggggagaagtcgtaacaaggtagccgtaggggaacctacggctcgatcacctcctatcgccggaaatcccgtccggggggtttaagggatgtcgggcctgccatcagtgggccggtagctcagcctgggagagcgtcggctttgcaagccgaaggccccgggttcgaatcccggccggtccaccacgaagaggtgcacatcccgagcacggctcggggtggaagggcctgagaccccgaacaggggtcacgatgagggccgtgcataggcgagctggtccagaaaacgtcccgcccggtggcaactaagccgcctggtggatggctcggctcggggcgccgacgaagggcgtggcaagctgcgataagccccggcgaggcgcaggcagccgtcgaaccggggatgcccgaatgggacctcccgcggcttttgccgcactcccagtcgggagggggaacgcggggaattgaaacatcttagtacccgcaggaaaagaaagcaaaagcgatgccgttagtaggggcgaccgaaagcggcacagggcaaactgaaccccgggccgaaaggttcgggggatgtggtgttgtagggcccgcggaggagccctgggggcgaagccgaagtccgctggaacgcggcgccggagagggtgaaagccccgtaggcgtaagcccccgagctcctgcggtgtccctgagtaccgtcggtcggatatccggcgggaagctgggaggcatcggctcccaaccctaaatacgtcccgagaccgatagcgaactagtaccgtgagggaaagctgaaaagcaccccgggaggggggtgaaaagagcctgaaaccaggcggcgataggagggtgcggcccgaaagggttgaccctccccgaaggaaacacgggcgaccgtggagtacgaggggaggtgaccggggttgcaccgtccgtcttggatcacggggcagggagttcacccgagcggcgaggttaagggggtcaaccccgaagccgcagggaaaccgacaggtccgcagcccgtaagggcgagggacggggtgtgaaagcgcccggagtcgctcgggtgagacccgaagccggtcgatctagcccggggcagggtgaagtccctcaacagagggatggaggcccgctaggggtgctgacgtgcaattcgctcccgtgaccccgggctaggggtgaaaggccaatcgaggccggcgatagctggttcccgccgaattatcccccaggatagcccggccggaggtaggcagtggggtagagcactgattgggggtttagggggcgaaagcctccggctccctgtcaaactccgaacccactgccgccgtagatggccggagtaggggggcggtgtaagccgtcacccgagaggggaacaacccagaccggggttaaggccccaaagtgccggctaagtgttactccaaagggtgtccctggccttagacagcggggaggtaggcttagaagcagccatcctttaaagagtgcgtaacagctcacccgtcgaggtcaggggccccgaaaatggacggggcttaagccggccgccgagaccccggcgcacggaccgattggtccgtgatcgggtaggcgggcgtgccgatggggcggaagccgggccgtgaggtccggtggacccgtcggtattgcggatcctgccgggagtagcagcatagccgggtgagaatcccggccgccgtaggggccagggttccacggcaatgttcgtcagccgtgggttagtcggtcctaacccgacccgtaactcggcgtcggggaaagggaaacgggtttatattcccgtaccgcggtggtaggtgcggcaacgcaagcccgaggggtgacgcctcggggtaggcggaccggtccacaaggccggctaagcgtataagcccggggagtgccgtaatggcgagaaccgggtgaaagcgcgaatggcctcccgtaaggggggttccgccgatccctggggcccgtgaaaagcccctcgggaacgatccaccgcgaccgtaccgagaaccgacactggtgcccctgggtgagaagcctaaggcgtgtcgggggaaacccagccgagggaactcggcaaattggccccgtaacttcgggagaaggggtgcctgcgggtgtgtaacccgcaggtcgcagtgactaggggggcccgactgtttagtaaaaacacaggtcccagctagcccgaaagggtttgtactggggccgacgcctgcccagtgccggtatgtgaagcccgggtacaaccgggtgaagcaccggtaaacggcgggggtaactataaccctcttaaggtagcgaaattccttgtcggttaaatgccgacctgcatgaatggcgtaacgaggtccccactgtccccggctggggcccggcgaaacctctgccaggcgcatatgcctgggacctccggtgggaagcgaagaccccatggagctttactgcagcctgccgttgccgtacggcggggggtgcgcagcgtaggcgggaggcgtcgaagcccgccctccggggcgggtggagccgcccatgagacaccgcccaccctctgccgtacggctaacccgcggaagcggggacagcggtaggtgggcagtttggctggggcggcacaccctcgaaaaggtatcgagggtgccctaaggtcggctcaggcgggtcaggaatccgccgtagagtgcaagggcaaaagccggcctgactggacccgtaacagaggcgggtccagccgcgaaagcgtggcctagcgaacccctgtgcctccccggtgggggccagggatgacagaaaagctaccctggggataacagagtcgtctcgggcgagagcccatatcgaccccgaggcttgctacctcgctgtcggctcttcccatcctggccctgcagcaggggccaagggtgggggtgttcacccattaaaggggaacgtgagctgggtttagaccgtcgtgagacaggtcggatgctatctaccggaggtgttggccgcctgaggggaaggctcccccagtacgagaggaacagggagccgcggcctctggtctaccggttgtcctacagggcatagccgggcagctacgccgcagccgataaggcctgaaagcatctaaggccgaagcggcccccgaaaacaggcggccactcctgggcgttgggcctgggcgaccggtccgttgcccaggacgagggcccgggaagaagacccggttgatggggcggggatgtaagcgggaagggaaaccgacccgttcagtctgccgctcccaacagcccgagtgctaccgggcgggacgtctgagagaccagctcgcctatgcacggccctcaagccccaataatccttctgaaaattctgttctctgtgatcgttgtgattaactgcaatgataagtattgattgcgttcctgtttattctgatagcaactgttaaattgttgcttattgagatcttttggtggtttgcatgaggttattgattcttgaccttgatggaactctctgggatcatgaagacgcttctcgacttactccaccctacgagtttcatggcgattacctcgtcgatgcctacggtgaggaactgcacctttttccaggcgtccgcgagtttcttgactgggccagcgaacgctttctcctctcaatagccagctggaacgtggaggagaaagtgaggcccatcctcgaaggctttggcctctgggactacttcctgttcccgaaaatcgagggacaccccaacaaggcggacatgatacgaagaaccattgaggagctcgaatcgattggttatacaatcgacgacgtcatctacgttgacgatagggcaatccacgtggacaagattaaacaggaactgccagatgttgacttcatccacatgtgggttgatgtaaagtcttttgaggagcttaaacaactccttgaaaagctggactgaggtgattgaaatggaacttcttatcgtcaaggacaaaagaatagactacgacggctctgcaatccagagccactgggcctacagaaactttggaatcctcggcgactcgatagtgatcttccgcgggaaatgcgacgttaaagtggaggagatgattgacatcgaagacctccgtcagagcaaggagataaagagccacgacatggtgcactacatcatcgaggtttttgaccttgtaaacacactctttgcctcgacgctccagaagctcttcatagcaaggctgtgcgaggttctgggtgagtacggagtaaagactcaaaggaagggcgacgacatctatgtgaacggaaagaagctcagcatctcgatagccacggtctctcccgtcagtgtgaagatgcacatcggcataaacgtcgaggccaggggaattccagagggcgttgacgcgataggcctgaaagagcttggggtaaccgacgttgatgagttcatggagaagactggtaaggccctcgttgaggagttcaacaaggtaaagagggacagcctcaaggtaaggtgggctcagtagaagaaatagagtagagacccaacgaggggaaccgcgaggttgtcgtccacccacggctggtattcagccagcatgagcacgaatgcccaccctatttttcctattgtgctcccttcgagaagggcaatcgcgattataactgccgttactaggtagcctaaactcccagtccagtgctttttgagctttacgttgaagccgttccgcctgaagtagtggtgcctgattatcccggtaactccgtcgcttattgccatcgccaaaagcagggccgttgaatagtttcttggcatgaagtaacttattccagcggcggaaagagcgaagaacacttcaccgtagttgttctggagctgataccacgagaattcgctccgttttaggtggggccacagctgtgtgaggccgaaggcgaaggccgctggtgcgaatacctctttcggaatgagcccataatagaacatcagtattgctggaacaatgctgaagtgtatgagcttcctgttcacccaggcccattcctgccctaggtactttgtaaaccagatcgtcccgactatgattgaagctccaataacggcatagggaacccagctgaagtccacgttatttcaccaaagatgaaaagcgtgaggagggttatataccttgctcatccgaaggccttatgcactgcctctagggcgtttacgaaatccccagcgtgcacaacgatataccactctcttgttctcgtcagctctcccctcgactttccgatcagctctccgtaaaggccctggattcttatcctgggctctgtggtcgttagcttcagcgttatctccgttggctttccgttttcccagatcacgccgacttttaagcccgctttcgtctccttcctcttcttcagcccgagctttaggtagcggagcctctcctctggaaccccattctcctctgctttctctcgtaggtactcatccgctagggttaatccatgaagtccgagggcgtatccgaagactggtatcccgaggtctttcctgcttctccccttgtaggcgtagacctctattctgcttccagagccctttgaagccagctgaattcccatggcctcttcgtctttgaaagccccgaactcctcaacgatgtcctcgtacgctgagaatgggagcgaaaagctcgcccacgttccccagagccgcggtggcacggaaagaaagcccctctcctcaaggtggtactccatgggctttggcttcagcacgagaaagcccttctcagttacgtctagttcgatcaccgcccgctcttctgggaggagggcgaactttccatcgccctcatagtctcttgccttcagcaacctcgattccctaatttttctgtgttctcttgagcttacgacaactggaacgggtgtttttcttccgctctctttatcgtacggcaccttgaatcctgccttcaggagctcttcctgtatctccagcgacgccggaaagaaaacttggctccttagaagttcaacttccacttcgatcaccgttttatttttctgtcgtcttgtttttaccattaagctttataacttttacccttaataacgtagttttgaaccggccgtaaccttaaaagggcattccacgagctaagcgcggtggtgaaaatggttcactgggctgactacatggccgagaagatcatcagggaaaggggcgacaaggaggagtacgtggtagagagcggaataaccccgagcggttacgttcacataggcaacttccgcgagttctttaccgcttacatcgttggacacgccctcagggacaggggcaagagggtcaggcacatccacatgtgggacgactacgaccgctttaggaaggttcccaagaacgtcccacccgaatggaaagagcacctcacgaagccggtccgcgaggttccggacccctggggctgccatgagagctacgcggaccacttcatgagcctcttcgaggaggaaatctcaaagcttggcattgaggctgactttctccacgcgagcgagttgtacaagagcggcgaatatgccaaggagataaggctcgcccttgagaagagggacgagataaaggccattctcgacaagtaccgcgagagggcaaagcagccgccactcgaagactcctggcagccggtcatgatctactgcccacactgcaggaaggaagctgagttcgtctcctgggacggcgagtggaaggtgtcttataagtgcccccactgcggcgctgagggcgagactgatatcagagaaggcaacgtcaagctccgctggcgcgttgactggccgatgagatgggctcactttaaggttgacttcgagccagcgggtaaggatcacctggccgctggaagctcctacgacactggaaaggagatagtggagaaggtctttggctggaaggcacctctgacactcatgtatgagttcgtcggcataaagggccagaagggcaagatgagcgggagcaagggtaacgtgattttactttccgacctctacgaggttcttgagcccggaataatccgcttcatctacgcaaaggccagaccgaacaaggagctgaggatagacctcggcctcggtctgctcaacctctacgacgagttcgacagggtcgagcgcatctacttcggccttgagcatgcaaagaatcccgaagaggaagaagagctgaagaggacgtacgagctttcgatgccgaagctcccggagaggctggtggctcaggcacccttccgattcctggttaccctcgtccagatgccgcacctcgatgaggacgggataataaggattctccaggagcagggccatgtcccggagaacctcaccgatgatgacatcgagaggataaagcttcgcatacgcctggccaagaactgggtcgagaagtacgcaccagacgacgttaagttctcgctcctcgaaaggcctcccgagatagagctcaggcccgaaattagggaagcaatgctcgaagttgcagagtggcttgaggagcacgagaggttcagcgtcgatgagctgaacaacgttatcttcgacgcggcaaagaagcgtggtattccaagtaaggagtggttcaaggcactctataacatcttcataggcaaggacagagggccgaggctggcaccgttcctggcttccctgaacagggagttcgtcatcaagaggctgaggctagagggttaaacccctctatttctttggtccatagacctggaagtaggagtgctcgttcagcttttcttctccctctttcctgaagtagagcttcgcgagcagttcaactgccattttgccccaaacgttgaacttcaccctgaacgagtccttttcgctctgaaactctatgacgacggtcttttcttcttggtctggtagaaccttgtttacccagtactcggctccgactacctggccgttcatgagaactggcaggagcgcccttaggtctgtgaactgaaggataaactttcctccaggcttcagaactcttgcagtttctttgaaaaccttggctaagtcctgaggttcaaagtggacgaggctgtctataaagagcacgtagtcaaagctgtcgttttcgaacgggagttctctcgcgtctccttcgatgaactctacacgagactccttctctttcgcaaactccctcgctttttccagcatgaacctgctgttgtcaagtccgactacctcaaatccgaggtcctctagaaggaacgagaagcccccaacaccgcaggcgaggtcaaggaccctacctctcgttttcatgaacttcataagtagcggctccaggttctctatccttctccgatactcctcggagtttatgtcgctgtaggctttaaatgctgagtagtactctacaaaccccatgttggtaggtttgttttgagaccttatatacctaacccgcgcactagatttttaatgactccaattgagattccgtcggggtgaggttaatggattcgatcagaatcaaagcgccggcccatcttcacactgggaaccccgacctcagcggtgacatgggcaggctctacgggacagttggttttgcaatcgagaccccttctctggaggttgaagttaggaagtctgatagggaccgttcgaacgacaacgacgctttgaagtttttaaggcggttcagggagtcctacgactttccgccggttgaggttacagtccgcaggtacattcctaaatgggtcgggataggtttccacacgacccttgcactgaccatgggcgcggcaatatccaaactctacggtctcggcttgtcccttgaggacgttgctttggccatgcgcaggggtttgataaccgctctgggcttctacgctgttaaagtaggaggctttatctacgagggcggcttcccggttgataggcgggaaaaagtagtccccccgctgatattcaggggcgaaatgcccgaggactggctcttcgtggtcgccattccggagacgccgaggaaggccctcaccgaggtcaggaagagggaggacgagattctcggaaacctgaagaagatgccccctgagctggccgacaggctctcaaggatagtcctcatgaagatccttccagctttcgttgagagagacatcagaaccttcggagaaggtctgtaccagttcaaccacctcctcggcgagttctggagcgattaccaggagaacgtctactgctgtgacatcgtgaacgagggaatcaagctgatgctcgaaagggcccactgcgcctgccagacgagctgggggccgaccttctatggcctcgttgatggtattgaacatgctgaaaggctcagggccgaggttgaggccttcctcagggagaacggagacggtggtgaggtcttcgtcacgaaggccgacaacaggggaatggtggtgctggatggttaaggcggttggtatagactccgggacgaagagcatggacatcttcggcttcgacgacgagactggggaggttatagttgacgcatccgtggacaggaaccgcgttaccgagaacccagggataataatcgaacttctcagggaggttcaggaggagcacgggaagatagacgccatagtcggcccctgcggctatggaattcccttaaaacctgccagggaagccaccgatgccgagatagccctggcgactttcataacggaggccgatgtggggagaaggctaaagatagttggcctaagggaactgatgctcatgatgcgagaagccgacgatctcaacatatacttcaccccaggggttatacaccttccaacggttccagagtggaggaaggccaacaggatagacctcggtacggcggacaaggtgttcaccgcggccctctccatcgttagggaggctgagaggaagggagtgccctattccgagaccaacctcatagcagttgagataggctttgcctacacttccgcaatggcagttaagaacggccagatcgttgatggaatggcgggcaccgctggattccccggctaccttgggatggggttcatggacggcgagctggcctacgccctggcgaacgccctggaggacttcgggaagatggtgctcttccagggtggggcggcctacgtggctggaatagaccccttcagcgtttctccagaagagttcgttgggctggcaaaggaagacgaggaagtgaggaaaggctacgaagcgatgatagaggccatagtcaaggacgtctttgccctgctcccctcggtaacgcccgattcgatatacctgagcggtcgcttctcaaggatcccggagttcttcagggacgtcaaggaggcgcttgaaaacgcctttgaaacctacggcttctccgttgatgttctcaaactcgagagcagggcaagggcgaaggaggcagcggagggaagctcaataatagcgaacggcattgcaggcggaaaataccgggagctcgttgagacactcaggctgggggagagctccggttcgatctttgactgggtcaagctgaaggagagggaaaagctcaggatattcgagaaactgatagtttgaccgaacctttttgagcttaggtttttatgtttcttcccaaactttttctggtggtgggaatggagttcaacctcatcataaccggtgtcggcggccagggcggtttgaccctctcgagaatagtcgggaacgccgcaatggtagaaggttacaacgtcaggatcggtgagacccttgggatgagtcagcgttatgggagcgttctgagctacctccgcttcggtgaggaagtgtattcccctctcattgaggagggagaagcggatttgatgctggccctcgagcctgccgaggctttaaggaacgcccgcttcctgagcaggaagagccacgcgataatcaacgcctacccaatccacaccgctacgaccctcgtcggaaaggagcgctacccggagcttaatgaaataaaggaggcaataggccggatctgtccggtggatatgctcgatttccagaaagaggccgataaaataaaccctagaaccctgggagtactcatgctcgggtacgcttatgggaagggactgattccgctcaggaaggagagcatccttgagggcatcaagctgacgctcagggagaagctctgggagatgaacttcagggcctttgagaggggagttgagctgtcgaaagaatgaacgtctcaatgttctccacaacctttatatcttctctcttcttcttgtagttgctatatagatggggtgagttaatatggagttcagaaagattcagtttactgggaggagctcctacataatctcgctcccaaaaaaatgggtcaagatgaacaacctcaagcagggtgatgccgttcccctcgttgtgaaccccgatggcagcataacgatattcccgaaggaggtcaaagaagttagcgaaaagaaaattttgacaatttcaaagaaatactcgcctgacatggcaataaggctcgtcatctctgcttatatccaggctacgacgttcttgagataaacctcacggaggagatgcccatatacaaggttaagctgaggaaaactcttcagagcctccctggagttgagataatcctggacgagccgaccaggatagtcgccaagagccttctcgatgaggatgaggtgaacctggcggagctcctgaacaggatacgctccctaatactctcaatgctcggtgacatcgagctcctgatacagtcccctggaaacgaggagatcctgagggatattaacgaccttgaaagcgagcttgacaggttctacttcctgataatccggaccgtcagcaggctcctgacaaaacgcggcatcacggaggagagcggcataataaggagaacctttgacctaatcggcatactcttcatagtgcgcaacatcgagaggattggggaccacctcataagaatcgcggagaatcccgacagaataaacgttccctatctcaaggagaagttcagccagatgcttgaccagattgaggaacgtgaccttatgaaggtggacaagctcatgctggagcttaaggaggagataaagtccatagactaccacaggtcaatagctatggagagctaccgcagaatcctcgagtaccttgagaacatcggcgagaccataataaacatggccttgagttagcttcgtttccataattcttttaacctttcgaggaaactcttctcggtgattctcatggccgctatcatagtccacggtggggctggaacaataaggaaagaggagagaatacccaaggtcattgagggtgttagggaggctgttctcgccggctggagagagctgaagaggggttccgcgctggatgcagttgaggaggcagttaaagccctcgaggacaaccctatttttaatgcaggaactggaagcgttcttacccttgatgggaaggtcgagatggacgccgctataatgcgcggtaaaacgctcgacgctggcgccgttgctggaatctggggcgtcaagaacccgataagcgttgccagaaaggtcatggagaaaaccgaccacgttctcctgataggtgagggagctgtaaagttcgccagactgctcggcttcgaggagtacgacccgataacggaggagaggctcaagcagtgggaggagctcagaaagaagctcatagagaagggcgaaacaaagcactggaagaagctcaacgagctgatcaaggagtatccagaagtcctgaggagcactgttggcgctgtggccttcgacggtgaggaagttgttgcaggaacttccactggtggggttttcctcaagatgttcggccgcgttggagacactccaataatcggcggcggaacttacgcgaacgaagttgcgggagcttcctgtaccggcctcggcgaggtcgcgataaagctcgcactggcaaagagtgctgccgacttcgtcaggcttggcatggacgctcagacggcaagcgaagccgctataagcctcgccacgaagtacttcggcccagatacgatgggcattatcatggtcgatgcaaagggcaacgtcggcttcgccaagaacaccaagcacatgagctacgccttcatgaaggacggaatggacgagccggaggctggtgtttagtggaaaaaacgctcagaaacatctggctcctcaacctctcgacgtttttcttcttcctcggcatcagcttaaccaaccccatagtttccccctttgcgataacgctcggggcaagcccttttcttgttggtttggtggctggtgttacatcctttgtttccctcgtttcaaagccagttggcggtctcatcggggatagaggctaccgccttgagatgatgatagccggaaacgtgctctctctcataagtggccttctctacgtcgtttccgcctacacatccaacattgtacttttcgcgttttcaagggcactccacggcttttcaatggggatattcttcccctcaagcctctccacagccgttgatctggcaccgcccggcagggtgggtgagaccctcggatggcgtggcatgatgttctcgctcggcaacataatcgggccagccctgggaggctatctgtccgactacctcggcttcgccggagctttttccttcgtgtcgctcttctctctcctcggcgcgggctttgtgatacccgtgtggaaagaggtcgggagaataaccggcgacgaagaatcctccggagggagcgtcagctatcgggcacttcttaaagtctcgttcgttttcacttcactggcactcctctttttctctgcctcttattcgggtataacgacctaccttccggctttctacaaatacctcggcttcccgcagaggactttcggcctctacatgatggtggttggtgcgtcgagcttcgcaaccagattagttgggggtaagactgcagacaggattggcccggttcccgtttcctttggtggcatcctggtcgtcataactggatacgtcttcctcaactacagaattcttccgccagagtcctacataagtgccgttctcatcggtgcgggctttggtctttcagtccccgcgatgcagatgatggccctcgctccccttcccggaaaaatccgcgcaatgggctcgagcatatacacgatgttctttgatcttggtacactgggtggtcaggtcgccctaggctacgttgcggaccttagaggatacgaggctgttttcccgctgctccccttcatcgcaggagtggcacttataagcatcctgatcacgaaggttaagggtgaagggaatgcctgaaatggtaagggtctcctatggaactgcaatagcgatgggcctaatcagggcgaagctgttggcgaggccaactaccgcttatctcatgacctattggccaggaaggtgctccaacgactgtgctttctgcgctcaggcccgctcaagcagggcagaccttgagaagctgtcgagggttgtgtggccttctttcatgctggaggatgtactcgaaggtttgaagaagggaaactttgcaagaatctgcctccagaccattgattatccgggaatggttgaggacgtttttgacctccttgaagccttctccgaccttaatcttccgatttcagtctcgataacccctgttgattcggagacccttgaacgcttcaaggagcgcggcgtggactacataggtgtcggcctcgatgttgccagcgagaggctctttagggagataaagccagacctgtcatgggaagaagtgtgggactttgcgggcagagtgattgatgtttttggccgtggaaaggccctacttcatgttatagttggccttggagagactgacggggagcttgtgaataccttcatacgcgcgagggaaatcggcgctgatgtttccatatattgccttcacgcctataaagggaacccgccttgaaaatagggaaccgccgagcctcgaacattaccgaaaaatccagctcgctaaatacctcgtgagcatcgggaaggaagatgccatagtcttcgatggggactccatcaagggctttgcactctccaaggacgaagttgcaaagattcccacgacggttttcatgacccacggctgtccgggctgcaaccggccttactacaacgagagacctggaaaggaaccctacaactacccgttagcaccaaaaagggaagattttgagagaacattgaggctcatcctttgagtgcttccagcgcttcgttcatctccttgaccgggaactccacgctgacttcttccccttttgccgcttttattagggcttcgaggaacttgctgaggagtttgtcctctttgaggagaactctgagtgaatccatgttctccgtgagctccagttcttttccggcatctctgattatcgttagtatgtccccgagcctcttgaagccgaggcggaagagatcgtcgttcggcgcgttgtaaatagctctaagcgcgcacttgaccgctcccctgtagttgtcttcctgaaggaagatatcagcgaggcggaagcaggcctcgaagtacagctcgggctcttcctccatgctctcgtgaaggatctcatcgagctttttcttggcagtttcgaggtctttttggttttcggcctctatggcctccctgaagagccttgctatcctctccttcctgttgaggggctcgtacttaattaccaccttcctcacccctgctctccttccaggctgattcaaactcgggccagaccttttcaaactccttttttactccccaccttctcctgaaggcgttcaaaaggacggttatgtccctcttaagcagttcgtagctctccggatgggccgtgctgatgtactgtgcccagtctattatcaggatgtctccatctttagtcaggactatgttgaactcgctcatgtccgagtgaactataccaaacctaacgatcttgaggtactcctcaagaaccctatcgagtatcctctctgcttcctctctggttaaatcagtgtccctgagttcggccagctcggttccctccacaaactccattacgactacgtgcctgttccaggctaccggccgcggaaccctcgctatcgggctgagcaggacgagggcctcgtgctccttcttggctatcagccttgaaacgtagagccagctggtgtggtgcttgtcctggaagacgtggccgtggtagccggcccttctggaagctgtcctccctcctatcctgttgaactttaccgcgaccttctccccagaaggagttatgcctacgtaaacatcagcgtccttcccaacacctatctgcgtcgtgcttatggcctctattactccctttttggcgagcgccctgattgccagcgcgtcgtagccgtgtatcgtgagctggtagcctatgtagccgatgtcgctcctcctgacgactagtccccagtcgtcgagctttccaaggcggaaggatgcagtctcaacgtccaccctggcaaagcgggctatgtcctctaagggaacccacctgtggtggcgcatgttgagctctactcccctaagtatcctgaagtccaggtccctgagtgatgggtaagcctcgagtgcgagcagtttgctgaccatgttctctcccgtaactggttgcccgcgccttttataaacttactttgctatccaacaaacttttaagcgtttcatcttctctcgaacctatgcggaagagactcctgttgctgctctccctcggctggatattcaactacgcccacaggatggcgataccaccccttatccccataatcaagtcggaactgggcgtaaccaacgccgaggcaggtctgctgatgactgcgttgctactcccctatgcactcgtccaggtacccgcgggctatcttggagacaggctcgggagaaagcgtcttttggtggtgagcatcgttggatactccctctcttctgcgctcatagttttcgcgcgccagtactgggagcttctggcggttagggctctctatgggattttctctggcctgtactatgctccagcgacggctctcataagcgaggtctatcgggagagaaagggctccgctatggggatcttcatggtcgggccgccagtagggagtggaattgctcctctgatagtcgtacccatagcgctctccctccagtggaggtacgcctttgctgtgctctcttccatgagccttcttgttggagtcgcccttgccctcgccgtcaagggggaagtctcgaagccttttagggcctcactctcgattccgatgaacgttctccccttgagcgctgcgaatttccttgcgctcgccgcattcttcggccttctaacgtttctggtgtcattcctggtgcactcaggagtctccctcgggattgcctcgggtcttttctctctgctttcggttgtgggtgtagcaggatctttcctcggtggcttggtctatgatagaacgggaaggagaagcgtctcgctgatactcgtgctcaacgcactgctaacgttcctccttgcggtaacggcatctccctggattataatccccctcgggcttacgttctactctgtgggtccagtagttactgcctacacctccgagaaagcaagtccagaaaacctgggttcggtcatgggtttcgtcaacatggttggattcttcggcgcgacggtcgggccttatctcgtcggcctgcttatagatatctttggatacaggcctgctttcttgtctattcccgtaatgtatctgcttgcgtgggcaatactgtgggttgagggtcttgtggaaaggaaaaaacttggaacaagcccgaaaagaatgtagtattgtaaatactcgctttaaatcaggggtagaagaaaaaagagaatggcttcagccgtacattacctcgtgcatagctatctgctgtgccagcctcttctccgagccaatgactttatccacggccttgaggaagtcgtcctgcgtaacgtacgtcctcctgtccctgatggcgaacatgcctgcctcggtagctatggccttgagatctgctccgctcgccccctcggttatctccgctataacgcgcaggtcaacgcccttgaggttcatctttctcgtgtgaaccttgagtatctcgagcctgccctggtagtccgggagcggaacctctatgagcctgtcgaacctgcccggcctgagtaatgctggatcgagtatatcgggcctgttggttgccgctatgaccttcacgttgcccctcgggtcgaagccgtccatctcagcgaggagctgcatgagggttctgttgacttccctctcgccgccggtggtttcgtccatcctctttgcgcctatggcgtctatttcgtctatgaatattatcgtgggtgccttctccttggcaagctcaaagagttcgtggaccagtctggcaccctctccgatgaacttccttaccagctcgcttccgacgacgcggatgaaagtggcgttgacgtgattggcaactgcctttgccatcagggtctttccacagcccggcgggccgtagaggagaactcccttcggcggctcgatgccgacctgttcaaacagctcagggtgcttgagcgggagctctattgcctccctgagttcctggagctgcttctcaagtccgcctatgtcgttgtaggtgaccttgggcctttcaatgacttcgaaaccgaggacactcgggtctttctcgctcggcaggagctcgactatcgccatcgtcctctggtcgagtgccaccctggctcctggcttgagcttgtccctctctatccaaggcgctatcctgacaacgaagcgcggcccgttgtagttctgaacgatagccctttcgtcgtcgagcacctctatgacgttccccgcaaaggccggcggctgtctgagccttgacatttccattctcagccttgaaagctccctctcaagtctctccttgtctgcctccagcgttctcacctgtaactccagctgcctgattctccttttgaggaaagtgacgtagtcatcgtaaccctccgggtgaacgtcagtgttctcaatactcatggtatctcacctctaacttctctcctgatgtatgtctcgttgggactctttttaactctatccatcccagcagaaacaggtttgggttttggacaatttctatctaatgcacaagtttatcatccgttgattcacaatggtcttcaaactcaacttcgaaacacttattaacctttttgacgttggatatattggcactacaatggaggggtcaataatgaggattgaaataaaactccgacccgctgaggtgggcacaattcttccgtttaactacaactacgaggtctattctcagctgcttgagaaggtctatctggtttctcccgaacttggaaaggaggttgaatctagtggtgttgactacttcacgttctcaaggataatggtcaggaagagggagctcattcccgaggctggcattagagttctctccgatgacgtttctctctacgtctcctcccattccgccgatgtcatccatgccatcgccgagggctttctcgatgaccccctcctgaagattaaggatgccacttttattgcagatgacgttaaggttctgaaggagcccgaacttaaaggtcccgttctcttctcaacgctcagtccgatcctcgttaggacggttaagttcgtcaacggcaggatgaaggtgtgggacctctatcccgacgatgaaatgttctttgacaagctcagaaagataatgctcatgcgctattcgagcatttacggcagaatgcccgaaaacaaggagttcaaaattgaggttctcaagtttaagcccgtccggattctcgttagggatacctactacaggagctcccttatggtcttcaagtactctggctcacccgagctggcctggctgggatatgaaacggggtttggtgaaaagactcgctacggctttggcatggttaaagtaattgactcagagcaagggcaagaaggccaagaatgaactctatggcccacactattgcgaccagctttggttcgttcacgcgcacttttctcattatcatccccagaaagcttggataaggtggtgcctttagcgtcccgtcaggcaagacttcggttcttccatgctttctgactccaaacctcaccccaactgcttttataacgaagtcaagaaagtgtggtatcaggagaaccgccccgtaggcttcaacctttcccacaacggcaacgagtccaataagtgctccgaggctcagggttccagtatcgccaggaaataccctggctggatatctgttccaccagagaaagcctagagctgcagcagttccgataagggccagctctctggccgttccgtcggtaagcactcccaggaaagccagcgctatcgcgctcgtcccgacttccagtccgttgaagcccgctagcatgttcaccaggttcgctgagcccaccacgtacagaagtgccactatgggatagataactccgagattaagggggaatccgaatacgtcaacgtatcggggaatgtcaaaaaacattacaggtgaagcgactatcagggacagagcaaccttgtgggactgctttaaagcagcaaggtcatcaataattcccactatcccgaacaggagaaaaacgagaccgatctctggtttgattaaagatgacactgccccaatagatatgagcagtgccaatccacccatttcggggacttcgggtttggtcagcttgtgtatatccctcccaactatcctcgcctttttcatgagtccggcgatgtagggggttagtaccgccgagagagttaaggctataaggggagccgccgcttccattactgacaccgcattccgttggaacccgcaaaaataaacccttcggtggtagtatggacatcagactggtggtctttgacctcgacggcacgctgatcggtgccccaaaggcgttctcagaagtcaaggaggagcttagaaaaaggctcctggagaggggcataagcgaagagcttattggagacctaacgcccatgtacgagactctgatcgagatctctgagaaaacgggtatcccctttgatgaactccattcaatccaggtcgagcttgagaccgagaggatgaaggacgcctttctcttcaaaggtgttcgtgagtccctagagttcttgagggagaaaggaatcaggatggcggttgtaaccaggagttcaagggatgccgccctatttgccctccagaaaactggcattgctgactactttgacgttattgtggcaagagaagatgttcccccagaccagttgaagccaaatggggggcaaataaagcgggttctggatgcccttggagttccccccgagaagaccttggttgtgggtgatcacggctacgacgtcatagccgcgaaaaacgcgggtgcactcagcctcttggtgacgtcccacgatgcaggaaggatgagtttctcggttgaggctactcccaatttcgaaattcccactatggaacactttattccgttaatggggcggttgctgtcgagctacgtcgttgttcccgcttacaacgaggagaaaacaataggctcggttctcaccgacctcctgcgttatttcaggcgtgaagaaatagtcgttgtcaacgatggttcgaaggacagaactgaagagatagcgaggtccttcggtgtccacgttctcacccatctcgtgaacagaggccttggtggggcgctcggtacggggctcgcttacgcggtaaggaagggcgctaaaatgattcttaccttcgatgccgacggtcagcacttgataggcgatgcattgaaggtcatgaagcccgttgcggagggaaaagcggactttgcagtcggttcccgccttaaaggagacaccagtcagatgccctttatcaaaaagtttggaaacttcgtcctcgatttcataactgcactgtttgcgcgtaagtacgtcagcgacagccagagcgggctcagatgcttcagcggtgagtgtgccgcgaagatcaagattacctgcgacaggtatgctgtttcaagcgagattataattgaagcagttaaaaacggctgcagaatcgtggaggttccgataaaggccgtctataccgagtactcgatgaggaaggggacaaacgtccttgagggtgttaagatagccctcaatctgctgtttgacaaactgaggtgaggtatcatgtatgtggctcagatcatagcactgttagttctcgcgtaccttctccttagaatatatcgctactactcagaaggacggctggactggcagagcgtaatatcatgggctctgcttgtactggtgtttgtagtcgttgcgatcttcccaattcaggtatcccagacgataaaggatttgctgggtcttgggagggggctcgatgccctttttgtggtatccataggcctactgttttttatcgtctttgacctctacctgaaaatcgacaagactgagagggagataaccgagctgacgaggaaagttgctatagaactcgaagagatcaacgaacggctcaaggcactggaagaaaaagttggagagcgctaaaagtcctccccaaacagttcctccaggaagagcctcaccctttcctttttgagcttgaactgtctgatcttcactattcccttttcctgtgcctctctcaggagtatctcggtggcctcgttggggtacatttcttcgtagactatctccctgatgcccgcgtttatcagaagcttgaagcaggtgtcgcaggggaagtgagtgacgtaaagcgttgccccttctaggcttatgcccttccttgccgccatcgctatgacgttctgctcggcgtggactgccctgtgacagtggccgtcaactatgagacaccccacatcaatgcagtgatccatacccctcggtgcgccgttgtatcctgtcgcgaggatgtagccatctttcactgcgaccgctccaactctaagccgcggacaggtcgctcgaagggataccagcttcgctatcagcatgaagtactcgtccttggtcggtctgatcttctttatcctctctgccttttcatgatcgaggattatctctatcttcgacataccgcatcactggaggcgtttgttgaggtttgtaatatacatcgtgattctcgttatcctctcctcataggagggatgggtctcgacaaaggatacccacttaggcccttggtctctctctatactgggttcaatactcggcagggcgttgatctttacatcggctcttaggtcttcgtagtacttcatctcttcgagcgcccttttgaggctcattggagtaggtagcagcctcagtgcagtgtcgtcggccataaactctctctttttcatgaggcttattcttgaggcctcgtaagaaatgtacagcaagggagcgattatcctgaccgcaaggtttccgccgatcatcagcagaatagtcgttatgagcattagataccgtccgtacgtgaccattgggaacagctttgtgtccccgttttttatgtggccgagctcgtgtgcggctactgccaggatttcatcctcatccagaacctcaaagagccccaacgagaggacgatatttccaccgaaggagtatgcgttggggatgtagtcatcctgaaggtacacagctgggacttttgttccagccttttttgacatctccactatgccctcgtggagccacttcatttcgctttcatccagcggtatgagcccgctattagccccacctctgttcgccattaggtacatggtcacaagggctagtgcggcgagaagtgtagccgctattcccaccgctcctagagataggtacagcaacagcacctcgagggctactatgaggggtatcatacatcatcactttttcatccttgagaggtaggcataggtcgcctccctgaagttgttcattagggcatccagtatgctcttgacgactttctgctcaaactcctccctggtcgttgttattgagtaaacatacctcattccaccccttccgcgctccaccgttctcttcagcagtcctttctcgcatagtctgttcatcagtatgctgacggttgatcttctgatttcggggtgtttcctcttcagctcttcatacacctgcccagcagtcgcgactttgaagcgccacataagctccattatctccgcttccatcggtggaagaacggcctttatgccctcttcggtgagcttgaattcgtggggttccatgatgatccctcctcctattggggaatagtaaagaatacgataaaaacttttctagcaagcttttgggaaaagcttcactaaaaagtttgaacgtctttgttagattggctgagaaatgagaaattctcctagttcacaggcggagtaatgtgggttttcttctttttaacgcctttcgggcgttatgctacgagcaaacccctgaaaattgctaattgatgagaagaatcactaaaaaacagggcgcttaaaaggacattccacctttgatgaaacttttcgccagcaagcttgaccaaaagcttatagcttttctttgaggtggttttattcaggattttccactgctagcgtgcctgttcttgtagtgagaacatgtttaggggggagtttcctggaaaggtgttttctttctttgacgcccgaaggacgttgatttagagttaaacacgcgttaacaggatgagtttgagagttctcacattcgagaccagctgtttggtgggaaaatcacgatgaattgggattctaaaaaagagctatgaaccttgatcaaacttcgccagcaagcttttggaaaaagcttgactaaaagggttcccttctcctcaatctcgcctgttaggggtgtatgctcttatagaaggcaagctcgcgcgggtttaattccaaatcttcccgctaattgtgattttggctttctttttagtgctctttgggcactatacagtgagagaatcctttgaatcaggccaattgaaagtaaaccccttataaaatgagcctgcttaaaaacgcatactatttttccgccagcgctgaagcttttgggaaaagcttcaccaaaagtttgaatgtctttgtgagattgactgagtaagtagattctcgtgataaatttgcagggaattttggttttttcttctttttaacgcccttcgggcgttatactgtgagtaaacccccttaaaaccgctagttgagcattgagaatcactgaaaactcggtagtataaaaaaaggacattccatctttgatgaaactttgcccagcaaagtttctatggcgggccgggcgggattcgaacccgcggccacggggttaaaagccccgcgctctaaccaggctgagctaccggcccatacccgaatctttaacccgatgaagcttttataagctttgccctctgaagaccaagggttttatattggtgctcattaagcagtgacggtggtgacagtggcaaagctctctataaacctctcgggtctggagtttgagaaccctctcatccttgcgtcggggataaacgataaggtcccggagcaatggataagggcccacgaagagggagccggcggcgtagttacaaaatcaattggaatcgagccgaggaagggctacgacaaccccacaatcgtcgaactcccatatgggttaataaacgctatgggcctcccaaaccctggatggaagggctttcttgagatggttgagggatacagctttgacttccccctcatcgtgtccattttcggcggaacgccggaggagttcgcctttctagcggaaaagctgagcgaagttgccgatgcttttgagcttaatctgtcctgccctcacgccaagggctatggtatggagataggtcaaaagccagagaacgtctatgctgtggtaaaagccgttaaagacgccaccgataaaccagtcatagcgaagctcacacccaacattgacgacataaccaagctcggcctagccgctgagaacgctggagccgatgccgtctctgctataaacacactgaaggcaatcgcgatagatatctacgccagaaaacccatactgagcaataaggtcggtggctactctggacctggcgttaagcccgttgccctgagggctgtctatgacctcgcgaggacgcttgacattcctgtgatcggaatcggcggcataacgacctggcaggatgctgtggagtttctcttggctggagcgtcagcccttcagattggaaccgcagtttcccttcggggctggaaggtgttcagagagataaatgagggaatcgagcgttaccttagggaagaagggttttcgagcgtagaggagatagtcggcttggctctggaataatcgaaagaattatctagtaggaaagtctactatactatggtgagctactatgcctttgacgaaggtcacccgcaactaccagataacgattccggccgagataagaaaggcccttgggataaaggaaggcgagtacctcgacgttgagctcaggggggacgagatagtgattaaaagggccaaaaggaagtggaaaaccttcaggctcggcaggaagataaccgaagaggagcttgagaggctcgaagaggaagccatggaggaggaaatggcatggaggccgtgatagacaccaacgttttcctatacgcggcggttgaggagatgccccgccacagggaggcctttgaactcctgcactccccctctctggagaaatggatcgtgccaaccattgtcatttacgaagtcgtctggaactttagaaagctcggattctcaagtgaagaggccagggaactcgtagagcagatagttgaagacgagagaacaaaactcgtagacgacaggaggtatttgataaaggcgtttgaaaccctccaaagcctttccttgacacactacaatgactcggtgttgctgacaatagctacggaagttggggcccttgcaacctacgacaagaagcgtaggaaaagagctaagaaactgggcattaaactgcttccagaggtggtagaatgaagcgcgcggtcgtcctcttcagcggtgggcttgacagtaccgcctgcctctactgggcaaagaagaactacgacgaggtcataatgctgacagttaactacggcagcaacgaggagaaggttaccaacaaagtggcagagttcttctcgaaggagctggatgtcccgctcaagatagttaggttagacttcctcgaggagttctcgaagctccgcgggacgacgctcgtcggcggggagacgccgaaggttaccggggaagagcttgaaaacattgaggttgctcaagaaactgccaaaagcgtctgggttcccgctaggaacgtcgttctgatagcagttgcagcttctctccttgatgctctcggcggcggggacatagtggttggcttcaacgccgaggaaggggccacgtttccggacaacacaccagagttcgttgagaaaatgaacgagatgctcaagtatgggacaatggctgaggtaagggtggttgcacctctaataaatctggacaaaagggggatagcaaaactcctgaaggagctcggagcgaagtacgagtactccaactcctgctacatgccgaagggcttcaccgaggacgggaagccgatccactgtggcgagtgtgagagctgcgtgagaaggcacaggggcttgatagagggcatcggtgaggacaaaaccgtctatgctgtggagccaaagatttagagttttgtttctgttgtctttagttttctggatttcgcagacagcgttagaagtctggattaggtatttagacaaaaataagcaaaaggaagaactaactcgcaatctccatgactagaaggattttcggcactgttatcgttgtcattccgtcggatacggttgttggtacgtagtcaatcaaaaggtagaatctgtcgcattgctgtatgacttctgcccagttttcactggagaatgctgccattatcgagtaatcaacgagcttctgggcagtaatgggggagtagtataaccagaagtattcgtcggataggtacaacccccatcccctactaaatcctggaggcaagtatgcattggaaggctctccagtggatttcgtggattccatgtcctgctctgcgagagattttaaccggggatcttctttgtactgggggtacaggagtaggaatttttcttttgctatttccataatctgccttatggcctcttcgtttaagatgtatgctttttcctttagctcctccccgctccatgtccaagtatctgtaacttctggttctcctcttgtgttgagcctcacctcgtagaaggttatgttagctattatctttgaattatttttgatagcccatgtccaatagtaattacctataggaattgggggcaaatgctggtcaagaacgaatagttccccctctattttgactgctactgcagcatggccaactttggagttttcgaaactgatatccaacaggtaaaccggagacactcccgagtccaagagcattgccgctgttaatattgcataatctccgcagataccttttttgtaaacaataatatcgtttggggcgtaaagtctcgttaggttatcatagagctccttctgctctgatgttagctttgaccagttgtacacaagagcatcaacgtaatctgctttagtgtactcatactcgatattctcatcaatccattccagaattgcccaggctttatccaaagttgtgctgtacttcgtgaaatcctttgtaactgttctgagcttttccctgaaatacttgcttaatcctgccttaaacgcttcttcattataggtgtgcctccaatcgtataatgggtcagtacccaattgcccctcatatccatcgggtaggtaatccccgtccgtgtcgggatctaaggggtcagtcccgtataatattacctcctgcccatcgtctaagccatcattatcgctatctggtttcaatggatttgttttgtatgtattgatttcttccccatctacaagcccatcttggtcgctatctttattaagtggatccgttcccaacggtagctcctcaggatcggatagtccgtctccgtcggtatctaaggtcaatgggctcgttttgtacgttttaacttcatcaaagtcggaaagtccatcttcgtctgtatcttttgagagggggtttgtgctgaattcgagtatttcttctgggtctgttaagccatcgttgtctgtatccgtcttgtgaggatcagaacccttctttacctcaagtgaatcagaaaccccatctccatcggtgtcaggatttaggggatccgtcatataagcggttacttcttgcccatcaaggagaccatctccgtcgctatctggattcagcggatccgtagaatatctattgatttcgtctccatcattgacttcatctttgtcggtatccggattcgttggatttgttttgtatatctgtatctctttagtgtccattagcccgtccttatcagtatcggttgctgttggattagttttgtgcaccacgacctcgcttttatcgtcaagtccgtcctcatcactatctccagagagagggttggttccgtatgttttgacctcttcgccatctgaaagaccgtcatcatcggtgtcttggcttaggggattcgttttgtactctgagatttcatctccatcggtgagcccatcactgtcgctgtctattcgggtggggctcgttgcatacaacttaacttctgctccatcagtcagcccatccccgtccgtgtcaggattaaacggatcagtgtggtactttgtcagttcctccacaatactgagggagtcatggtcgtcgttttttatggctgcccccgcgacaaaaacaagcattataacggccatttcaactagatacctcgccaatttacttcctcgagaatatccatcctttgtcacagaatcaccgattgttaatacctaatttcaaatttaaattttttgtaaatgttaaacgttatcttctgattgttagcagtgccatgttcaattttggatgggccaaacctaccgcaagatttataaatcccctttgtctccctatttttggagcgtggggcggtagctcagcctgggagagcgccggactgaagatccgggtgtcgggggttcaaatccccctcgccccaccactttcttgcagtgcggtggtagtctagcctggtctaggacaccggccttccaagccggtgacccgggttcaaatcccggccaccgcaccacaaaacgtttttatcacgtttctatccagcacttcttgttaggagtttcccgtgtattcttttcagtggataagggttagctgaatacctttgggctatgttctctcaagttcatcccttacctcttcatcgaggagaaccgccaggattaggcctgcaaggagagacagagtaatagacgaggccgacggcatcccaatcgtccagataattccaaagacaaagtcaagcagtgctatataaacggagaatcttatcaggtttcttactcctctgaagatccccactgcaagaacaccatggatcagaccaatgaggagcagtatccagtccgggccccttaagagagctaatccactgaagaaaagggcgattaaaagaaaagcaaggaagagggttgttctggccttcattctccgagctcctccactgggagtctcattcttgagaccgttaccagtgtcaggatgccgaggagcggcattaatgtgagctcagcaagggcgagcttctcgctgatggaagccagggcttctgtgaccgatggagctatggcgtttgcagagtttgagataaggccaagggcgaacgaagcttttggatagatgcgctttggataggtggcgggggcactcgtccagaaagccggccccgtcccctgaagggcaccaacgagtacaacgctcgcgagagccatggcatagttccctgcaagcattgcctttgagtagaggataagcccgatgaaggctattgtgtaggatatcatcatgacctgtacgatggctttgaagagtccccttggagtggtgttcttcttggatagctggaagccgacgaaacccatggctatgctccagagggcctttgagacgttgagggtcgtgctgaggttggagacctggtcttttgtccagccgaggtcgtagccgaggctcgcggagaagccgactatcgtgaatatcacccacagggccgggaagaaagtcagaccaaggacccacgtgaagggcatcttccagatgttcacgtcgctacccgtcttctcatggatgatctcaaagtcctcaacgagaagccaccagaggagcaggacggcgtacattatgattgcagttacaacgaagcccatcttccagccaaccgcttcgacgaggtagcgggcgctaatgcttccgaaaaccccgccccagaatattccagagaggattatgcccttggcgaagggtctttctgcgacaaagaagcgtgctatctgggtgctgaagagcgggacaaggctgactacaaaaccctggatgaagcggagggcaacgacgaggtaccagttacccacgtagggtatgaggagctgtggaatcgcggcccagctgagtgctatcgcgacgctcctcttaaagctcccctcgtagagctttgtgtgtccgagcaggaaagcgacgaagagaccaaagacgtaggcaacgtgctgtaggtcataggccgagttgcttattccaaagtggctgataatatcgggctttgcaacgcccatcatgctcagcgtcccaaaacccgccgtcatgacgagcgtgtccagtatgaccgttttccaccttttatccgccaattatatcccccctcacatttttccaagcagcattaagatgccaaagactatgaacagaacgccagcgcctttgtgaataacttcaatcggtagaacatctccaattttatccccaataagggcacctatcagattaacggtcgctaaccccaggatagcccccagaaaggcggttttccacccgtactttgaggcgaaggctattgtcgcgagctgggtcttatccccgagctccgccagaaaaatagaaacgaagacggcaagcaggttttccatggaaccacctcacagcttcgagagggcctctttcattctctccatggcctctatgagcttttccttctctgtggcgtagcttatccttatccagccctcgccctgccttccaaaggcagttccagggataaccacaactccagcgttctcaaggagccactcggcgaagtcttcgctggtcatatcgagctccggatcaatcttggcccagatgtagaaagctcccttcggtctgaaaggtgttatgtgcggcatatcgttgaggtacttgaggacgagctttctcctctcgtcgtacacctgcctcatcctttcgacggcttcccagctcctcttgtcgcgcagggccgttatgcccgctatctggatgaaggacgtaacgttgccgatgacataagcgtggagctttatcatatcgcggatgacctgctcaggcgctatggcgaagccgaggcgccagcccgtcatggcgaaggtcttcgagaagctgttggcgagtatcgtgttgtccggggcgtactttatcattgggtggtgtctggctccctcgtagaggaagtgttcatagggctcgtcgctgaggatgtagatgttgtagtcctgggctatatcggctatagccttcgcaacgtccttcttcattatagctcccgtcgggttgtttgggtagttcatgactatcattcttgtcctctttgttatcgcctcaaggagctcgtcagggtcaatgcggaacttgttctcctccctgagcgggatgcggattatccctgcctcggctattttggcatcttcgacgtagcagacaaaggccgggtcggggattatcacgtcgtcgccctgttccaggatgctctcgaaggcgaggtaagtagcctcgtacgcacccgcggtgactattatgttgttcatatcaacatcaacgttgtagaactccttatagtactcggcgatggcctccctaaactcagggatgcctgcgttgggggtgtaatgagtgtagccttcatcaatcgccctcttggcggcttcttttatgacctcgggcgtgtcaaaatctggctcgccgatgccgagtgagatgacgttttccatcttggaagccttctcaaaaagctcccttatcttcgacctctggaggatgtttatcctgccggccatgaagtactttctcttcttatacctcatcgatgttccccccgggcagttcgggaatgataaaggcagttatataaacctatccaatagaatcgccaaaaatgttgtaaaaacccctataaaacttcgactaaggcgcttttttcaaagaatcttttcacttcctcatcggaacagtccttgatttcgatctcttcgagaccaaggcttcttagaatctcttctgcctccgagttgtccccaaacactacgaggtagttggggccgtttttggctcctacctcttttattgcttcccttatctggtgggttccagccaagcggaggagcagctcccccccaagagtttttgcgtggggggtgcccctttttactgccctctcagcgagtactgccgcgaaggccaccgctctccagcactcaacgctaactagttgcacattcgaacctaagtaaccgagtatatcatcaacattgtgtacatcgactctcgctatatgtatgcttttggttacggggatcaccctcaatcacctgtctcatcgttcagaaatgggccttaaaagagttcttcaaaaaatttttgaaaatcataatatcaaaatattaaaattaagccacaaagtatttaactacttaaatcattaactaattcagcggcctggtgaactgggtggtgcagggatgagcagaatgaggatcatcagcgtccagctcccgcaggggctaataaacgccatggatcagctcgtcaaaaaaggcgtttatccgaacaggagtgaggtcattcgtgaggccatccgcgaacttctgaaaaaggaactgtaccgcctggagactgaagaacgctcaacgccggactacatcatcaaataagtgctaaaattagtgataaaataatgttggaatctccgatgggagagggggttggaaaatggtgtttaaactgctcgagcaggcggggataaaaatagacctggacgatgagccaaaaaaagttcaaactgcacctcagttcgatgacgacgatgagaacgaaataaggatagttatagtgggcgtcggtggctctggaaacaacactataacaaggctttacgatctcggtgttcagggtgccgagcttattgccatgaacacagacgcgcaggccctcaagcacgccaaagctcacaagaaactcctccttggaaaggatctgacccagggaaagggttctggcggcgatccagaagttggataccgtgccgcagaggcgagtgcacatgagatagccgagacaattggggacgctgacctggtattcataacggccggaatgggtaacggaactggtacaggtgccgctcccgtcgttgccagggttataaaggagcgcgcccgccacaacggccgctttagagagcctctcgtcataagcgttgttacctacccgtttaagaacgaaggaaagatcagggaagagaaagccaaagctggaataaaggccctcctgtactattcggacacagtcgtaataattgagaacgacaagctcctccagctcgtccccaagcttccgatcaacgcggcattccgctttgcggatgagattatagccaggatggtcaagggcataaccgaaactataaagctcccgtccatggtgaacatagacttcgccgacgtttacagcataatgcacaacggcggtgctgccctcataggtatcggtgaaagcgactcaagcaacagggccgttgacgccgtcaagaacgctctccagaacaagctcctcgacgtggagtacggcagtggagagaaggcactcgtccacttcacagttggtcccgacgtcagcctcggtgaaatcaacgaggccatgaacatcgtctatgagaagcttggcgaaaagagcgaaatcaagtggggtgccaggatagacgaggacatgggtaagatggtccgcgccatggtcataatgaccggcgtcaagagcccgcacatcctcggcggtgaaacagccctccagctcccagtgaaggagtccctgctcccagctgagccaaaagcaggattcaactcctttgaggacaagatatacaaggtgatatctcgcaagtccgacgaaaagccgggaagtgacatgaggggatacataaacaagctcctggccgatttcgacgatctcagctgacttttattccttttagggtgaaaccgatggcagtcgtaatcagcgttgccaatcagaaggggggagtgggcaagacaacgctcacgatgaacctcggcttcgccctttccgagatgggcaagagggttctcctggttgacgttgacccccagttcaacctcacctttggtctaatcgggatgaaggttcttgagcactccagcaggaacgttggaacgctgatgacaagggaaagcgagattgaggagaccattgtccctgtcaaggagaaccttgatctcattccaagccatttgaacctatcggccaaggagatcgagataataaacgcctacaaccgtgagagacgacttgaaaaggcccttatcccggtactcccagactacgactacgtcctcattgacaacccgcccagcatgggaatattcctcgtgaattctctcaccgcgtcggactacgttctgataccgctcgagcttagctacttcggagtaatcggcatgcagctcatgttcaacctgatgagaatgatcagggaggagaccaacgagaacctcaagctcctcggcctcgttcccaataagtttaccaagcaaacaaaagtcccgaagatgcgcctcaaggagctgaaggaggcctatccagacgctccaatactgaccacgataccaaaggccatagccctagaaaaggcccagagtgagggtaagagcatatttgagtttgagccgaacggtagggcttctaaggccttccaaaagcttgccaaagaggtggttgaaattgtcgaaggataaactcccgaggctttttgacggctcaataaacgagttgacccgcccttctaagcccaagaaagagaaaaccaccgatttgaagaaggataaaatgcagaagactctctacatcaccaaagatatgaacagaaagctcatcgagctctacggtgaggaggggaggagacagagcataatagtcgaggatgcggtcaacctgtactactacctcaagcgggccctcggcgagaagaagttcgaggagctaatgagcgcggtcaaaagggaagaccccgaattccttcgcgattatctgagcaggtttaagctctaatcagacgcttcaatttagaggtttaataaaactctttaaaatcaaaccctgaaaatcactaaactgctgaaatcagggagttcaatcattcacagaaggtttccacaatcctttggattattttgctcgtcttcgccctgtcgctcttgtagaggtagggtatccgtatcacttcggcgtttatcccgtgctttctcagttcctccttcagcttttcacagttgaagaactggtctgggccgattgctatgacgtcagggtctattctcttcactagctccatgtctatcgtcccgggcgttcctatgtaaacttcatccacataccttatcgcccttagaagttcggccctgtcttctgctgggtttatgggctctctcctcttctgcatcctcacggtctcgtcgtgtgcaactataacgaccagctcgtcaccaagctccttggcctgcttcaaaaaatggatgtggccgacgtggaggatgtcaaagactcccccaactaggaccctgatcttcttccgcttctcttccatttcatcccaccgtgacctgccagattttatccttcgcgtggtggatgttcttcacggccttgccctttggcttctccttcatcttcctgccgtccatgagggctatccctatcgccaggggccttccgtagttctcctcgaccacgaagacgaagtcgccctcgttgatgttctcgtctgcgtcaactatgccagccgccataacgtcggcaccgttcaggatgtatggaactgcgccctcatccacaacgaccctcctcggccacttcctcaggtcttcttcgttagagagctcgtagagcgctatgacgaggggaaaaacaagctcctttctccttatgaagaagggcttcccgttcacgaggagaatttcggtggtcttgtcgaactcagccacttccaccctgtccttcttgttcagcattttcttcgctatctcctcgccgaagatctcgctcatctcgcggattatctcctttatttccttcttgctgagggggtgtttgactttcaactccatcaaaccacctccagaatttcctcatagagtctccttgctgcctcgcgcgggttattactgccgtagatcgagcgcccgactatcacgtagtcagcaccggccttgatggcatcactggctttcccaccctgggcacccactccgggagtcaaaatccttatccccctctcgagccttgaacggatgtacgagacccgctccggcctggtcgcaggagctattacgccgaagggttccagctcgtttgcaagttcgatcagcttgtcggtgacgggctgaatgaactctttagctccgggatggctcatctcgacaacgatgatcgtttttccaagctccataacggcctcaacgctgtccctgcctacgaagccgtgggcaattatgtagtctgccccagcctcgaatactttactcgctatcagtctgttcgtgttggggatatcagcgagtttgaggtcggctattatcggaagccctgtgacctgcttgagctcggtgattatcttcaatccggaaccgatgatgaggggccagtttaccttaattgcccagaggtaatctgctgtgcactccgctatctcaagtgccctctccctatcataaacgtcgagcgccagaatgagcctgctctcctccatctcctcacctcacgagagacttgagttcttcggggatttcgtcattctttaaggtcagggcaacgtgataggcgctcttcatggcatctgacgggttttctgcccatgtcacgacgattaggtctccatctgagaagttcaggacttcctcaatgttcattgcaagttcttccattgtatctctcagcggcctctcgtcctcggggaagacaggttctccgtttttaacgatcagtatcatggccccctttgcgaagaaccttattgcctcgtccctcagctcgatgctcttgaactgaggcgggtttttaacgacgatagcataggcgggcattccatcgactttcccaacgaagtgtgcctccgagaatagccccttaagcctctcaaggagttttttccctgttttgcttagaaagtgcccacgctgggccgaatctatgacatcaatccagttgagctttttgagtagagtcctgacgctgccttcgccgatgtcgagagtttcggcgattgcctttctcccaatcggttccctcagaagaaaaatcgttgcaatgacgtcttcaagagtaaactcgggataagctcccctcttccagctcattggtttccctccagaagaagtgggaggaagttattaaaaaagttgccgaaagggagaaaaagccctcagagccacctgggcttcagcccggcccacatcctcatcttctcgtgggcgattatcctcggtatgttcctggcctccttaggtccggggttcttcatgtagaaggcgttgacctcgtagacggttccgaactccttcttctcgatagctatctttccgagcctgacgaggtcaacgagcaggccagcgagggcagggctgtcgtttatcctgccggtgatgacgagctcgtcgtgggcaccgttgaagctgacgtactcgatgtgcatggctatgaacttcttgtcgccgagcggttcgaggaagccggtcggcttgatgtagtgcggggcgttgtagccgagcaggtcctcaacgaccgagctcttggtgaactccttgcttctgttcctctcctcatcggttaaagccaggaagtcctggtttccacctatgttgaactgggctatgtcgaggacgtagcggttcctctgggcgaggtggctgagaatgtctgcggtaagcggtgttgcacctgttgcaccgtcgtcaccgaagataactaggttgctctccttcgcaagctcaacgaagaccgggtcgttcgctatgagggttggaatggcattgacgaaggccgctccaccgacttccttggcatacttggcggctgcatacacgtagaactgtgtcgctgtgagcctctccttgttgttctcctcgatggccttctcaagctcctccctgctctcgaacgggacgaatgcctctgttgtgcagacgttcacgaaaacatcaggcttaagctccttccactcgttaacgaggtggtcaacagcctccttaagcgtcatctcgtcgtcgaggccggtaggggtgagcggaaggttcctgaggcttccgaggtggacgcccttccttatggttattcccctgaggctctccggggcatcggggtcgtagctcttaacgacttcatagaggtcctttccaaccttgttggagtcaacgtcgtatgaacccacgatctcgatgtcctttatcttaatcggaagctcatctgccagcgggactccgtagggctccatcttccctgcctttatcttctcaagcccgctcgcgaagatgctggcaacgtatccctgtccgagtatgacaaccctcaccatcttccttcacctcctttagtgctgtaagatattttacagtagttaaatagttttcggatgtgaaactttcttgacgacgaaatacagggttagtgcaaccctaaagttcgtcagtacggcaagggtcaggaagagtgcctttatcgaggccgcaatctgatacagcaggaagagcatcgtcaggaatactctctcgtccctttttccgggcagttttctgagggccggtacctccttgtaggcgtccctgcagaaggctcccctgaatctctccgttgagtagctgaccatcaccgagccgaggagggctagcagtgccacgaagtaccagattggctcgtttatcgtcgcataggccagcagtgccaggaagcttccgtcaacgtagcggtcgaggattgaatcaacgtagccgccgagcttacttgtcctcaactgtgcccttgcgagctctccatcaatgccgtcaaggattgagctgagctggtagagtattcccgccagcggaaggcttaccagtgtcgtcaacgccgagataatgccgagtaagaacgttacaaccgtcatctggttcggcgtaactttctctaccagcagttcactgaccctcgttgaaatcctcctgttcaggtgtctgctgacgaacccgtcccccgttccctttactgcggttctgacgagcatcctccttgccctcttgatctcttcgggggtgtcaacgtccgtccagccgagtccgtcaacgaaggtcactgaaacctttgcccgttccataacctcgctcagggagtagtcgccgttcttctcattttcgaggatctctgtaaccttgaaaatctcatcatcgaggacgaagaacccagtatcaattgcatcccattccttgagccttttcccgattttccagaccttttcgtcctttacctgaactttcgttgcctccccaatatcaacccatctcggctccctgtccgctattagtcctcgccctcttactgccctctcgatgaagtccctggaatagacatggtcgctcattgtcagtgcgaacttccctgagactttctccttggcaaggtgaagggaatggccgttgcccttctccggctcggggtttatgatgatttcagcgtcaaagccgtgcctctctatgaactcctgataaaggggtgcgtacctctcgttggtgaccacaatgaactttttaacaccgttttcctggagcagccttattgtcctgtacagaatctccctcccggctactctgacaagtcccttgggctttctacccatccttgtcccgaggccagccgctaggattactgccctctctggaaccatggccatcacctttttaacggccctctccaagagccgtcagaaggactcaaacgctcgagattaaattaacccttagtatttaaaaattttcgggtgagcaaaatgcgcgttgcggtcctctactcaggcgggaaagactcgaactacgccctctactgggcgctgaagcaggggtttgaggtgaagtacctcgtctcaatggtgagcgagagcgacgagagctacatgtaccacgtcccaaacatacacctcactgaacttcaggcaagggcaatagggattcccctcgtcaagggtttcacctccggagagaaggagaaggaagtcgaggacatgaaggccgtccttgaggggctgaagattgatggagtcgttgtaggcgctttggcgagcgagtaccagaagcagagagtagatagggtcgccaaagagcttggaatagagagttttgcccccgcatggcacagagaccctgtggactacatgagggagatcataggcatctttgacgtggtcatagtcggaacagcggcttacggtcttgaccagaactggctcggaagaaggatagatgagaaggccctggaagagctgataaagctcaacgaaaagtacaaggtccacgttgctggggaaggcggtgagtttgagaccttcgtgagggacgcgccgttctttagggcaagggttgtctttgacgaggtcgagaagaagtggaacgagtgcagttattcgggagttctagaggtaaggagtgcacacttagagccgaaaggcagttcttggtagtacagttgccaattcatgaaaatatttataatcttcttctcctttttacgttgggtggttgtttatgataatcatagaagaccttgttaagagcttcggaccgacgacagcagtgaggggaataagcttctccgtgaacgatggcgagatatacggccttcttggacctaacgggagcggtaaatcgacgacgatgaagatagtggctggaataataccgcccacgtcgggaaaggtaacggtaaatggaattgacgtttctgctaatcctctcaaagttaaggaaatcgcaggatacatccctgagactccagcactttacgaaagcctcactccaatggagttcttctcattcgtcggaagcataagacgagttcccaaggaggagcttgaagagagggttgaaaagctctccagggcctttgggatagattccttcctcggggagctaatagggacgctcagctttggtacgaagcagaaggtttcgataatctccgccctcctccacgatcctgaggttctcgttctcgatgaggctgtaaacgggctcgacccaaagagcgcaaggattctgaaggagctactccttgacttcaagaaacgggggaggagcatactcttctcgacccatgtattagaggtcgcggaggcgctctgcgacaggatagggatcatctaccgcggcgagatcgtcgccgaggggactccaaaggagcttaaggaattcacaaaggaggagagccttgaagaggtattcctgaagctcaccgagggcaagagcgaggtggagggcatagtaaaagccctaagggaggcgttctgatgaaagtccttgaagtcctctaccgcgaggtcgtttacaggaggatgaaggacaacccgcgttcggcgggcaagatttccctcggtctcggctcttccggagacctgaaaaagacgctcctgtttcagacagctatgtatgccgttttcggcctgatgctcttcccttcgctcaaaggagagcgtgatgcagtgcttgtgatggcctccacgtacgccatcctgccgttcataatagctttctatgccacggttacgaattctagttacatagcttcgctcgaccttttcaagcccctccttccgctcccgattaaactcggcgggaggtatatgagcgttctcctgctcctcgaatcgctcccagtgatggctttcatggttccaggggccgtcaggattgggatggtcgtttcggctacatccgggttgttagtactcctttggtctgccgtaggcctgatgctcggccacgtttttgggctgctcgtttactactcctttgggaagacctcctccggaaggttcgcggacctcaagagtctggctaaggcactgggagtcatcctaatattcggcctcttctacggcttcagctacttccaggattacgtcctccagaactacacctccatcaaggagtccctcggcggttacgagtttatctacccgctctccgtactttccgtggacaggccgtcgttttcggcaccgctcgctggaatctacatcgctatcctgggggttgcctactatgtccttatctcccgcctctgggtgaggataagcgagggttcttacacaagtggaagaaggaggagagcgggcggactcggggtgtatccgcctgagctggctctgatggtgaaggatttcaagaccgcgctgaggaacacacccgtccttacgggcctgctggtgcccatagttatccccatcataaacgtggcgggaattttttcgaatccagatatcggggcgttcgggggcaggctcgcaaccataactttcgtggcggcgctcggctgggtctctgcggtgtccgtggaaaccctcaccaaaatagaggtgaagtctttcgagctcctcctttcccttccgcttgagcggggtcggttcctcagaggcaagctcctgactatggcggcgattccatcggcggtgggggtcttggcgctgctcggcctgtcccttaagggtttttcatccccgatctaccttccaatggccgtcctcgtcccgctggcaacgtgcggcatcgccctccatgtgtactaccacggcacagagggcctggccctgcctcagggcggcattttgaagagcctggcagtgtggatcctaaacgcggtggtagtcggcatcatagccggttcttggtacctctcgtatccaatcgcccttctcctgacggctgcaatagatgccctccttctctggagccttaacaggtgatgtggaatattcccagcacttttttctttccatagagttcgttgaagacttcgacggcctttttggttgggagttcaaggacttctttcccttttatgagttctctgctctcaggtaggagtgacagctttccgtacatcccagttcccacaacgagaacgtcaaagtcctcggttaggtattctttcagttcctcggggtcgagcttgtggctcgtcccgtgtttttgcttgcttattttcttcttcctgcgctcgacctttccgcttggatagaggacgatgtcgtgctcgtaggtggctccatcaacgattatcttcccgaaagcggggtattcgagcctcatgctctcacctcagactgagcgcgtccctgagtatctccccgtggtcaaatgccagtgggaggttcagggcttcctctatcgggaacacgaagacttccttggcgtcgtcgcctgccttcagctctccctccccgatgcagaggaaagcaaccgttaccgtgtgtcctctggggtccctgtcgggccttgaataaacgcccactagcttcactggcttcacgtcaagtcccgtctcttccttaacctcacgcagaagggcctcctcaacggtctcgccgtattcgacgaagcctcctggaagggcgtagtggtctttgaagggctcgtttttccgctttatcaggacgattccattgttgtacactatcacggcatcgaccgtaaggccgatacacctgtgggtctctgcttcaaagccgtatttctctgccagcgcctttgcttcgtctctaaaggaagataagtcggcccctctcggggccttaaccagaagaacgtacctgtccattgaaaccacctcagggaagtcccttctcatcatcattcagcgtgctgacgtttcatcatcggtgttgggagttggaagagggggtttatacccttttcacctcgactttcatcgcaagctcgttcacgtcatccatggaaaaatcaacgctcctgttcttgaggaacagcgccgtaaaggcggctgctcgtttaagggcctgcacgaagggacactgtgagtagaatccagtaaaggctccaagaaaaacatctcccgccccagtcgattcgtccactcccacgtggactggctcaaacgtgtactcccttccgtgcagaaatgccttccccggctctggcccgttggagaggagaagaacgtcaacgaattcgggggagaacccctgcagatattggtattccccaaggtctgcgtgaagaatctttaccccctttaagaatgaaccgtcgatgggctggtactgaatttctcctggacttgaggaacggataaacccctgtatgtcaaccgcaacaaatgggaactttttgagagcactggtaaccagggcagggggcacttctcttgcaacgggattcatgaggaggacatcgtattctccatctggaagctcttcaattggagacgccctctctagaagttttagcctcctcctgttgccgtcgaggtacgttagttcgtaagtcgtcgttgtctcagagggaactacctgcagtttcgccattgactccaattctttgatccactcctctgggagatttgagaaagaagtgagtatctcaacatcgcagaatcttgaaagggcgagtgcagaataataagcaccgccaccgagcctttcaagaaccttgttgccttttttaactatgtccctgacaacatggccaacaacaagacacttcattttacccttcccaaatcttactattcggcactctctgttaaaaatctttctctgattatcgaaagctttataaaggggaaaagcgaaaagtttaaaaggaaacctggttttggggtggggctatgaaacgcctgggagttgtttctcactacgcgaagcagggctttctcatagttaggacgaactgggtgccgtcgcttaatgacccagttgtcgacaaggaactgaagcccgtcggagtagtcaaggatgtttttggtccggttaattatccctatgtcgccgttaagcctcgggttaaagatcccgagaagtacgttggtgcccttctctacgttggcaggcgggaaaaaggtggcaagaaggccccccagaaaggaaagactagcggtaaaaacagatctccaaagaaggctagaaaaggtaagactggcaagcgttccggccccacccccaggagaagggggtgagagggattagcccgaagagggtatgccctatttgcggttcgaccgaatttatatacgacccgcgaaggggagagatagtctgtgccaagtgcggctacgtaattgaggagaacgtagtggatgaggggccggagtggagggcgttcgagccaggtcagagggaaaagcgcgccagaacaggggcgcccatgacgttgatgatccacgacaaaggcctttctacggatatagactggcgcgacaaggatatacacgggaaccagataaccggcatgtacaggaacaagcttagaaggctccgcatgtggcagcgcaggatgcgcatcaacgacgccgccgagagaaaccttgcattcgccctcagcgagcttgacaggatggccgcccagctccgcctgccgaggcaccttaaggaggtcgccgcttccctctacaggaaggcggtcatgaagaagctcatccgcggccgttcaatagagggtatggtctctgccgcactctacgccgcctgcaggatggagggcattccaagaacgctggacgagattgcatcggtatccaaggtctcaaagaaggaaattgggaggagctaccgctttatggccagggggttaggtttgaacctcaggccaaccagcccaatagagtacgttgaccgctttggcgacgcccttggagtgagtgccaggactaagaagagggccaaggaaatcctgaacgaggctataaagcgcgggataaccagcggtaagggcccaacgggtctcgccgcggcggctctctacatagcggctctccttgagggcgaaaagaagacgcagagggaagtcgctgaagttgctcacgtaaccgaagtaaccgtcaggaaccgctataaggagctcgttgaaaagctcggcataaacgtcccgatatgagggatacccttgaaggtggcagtagtaagtgacactcactacggggacaagacgagaaacctccctactcttttatttgaacacctcatgaaaatccagccagagcttattctccatgcaggcgacataaccagccctgagcttcttgagaagcttgaggagatcgccccaacactcgccgtcaggggaaacgttgacaggcttaaccttcccgaggaagaggtcgtcgaggccgaagacgtaaagataggcatgatccacggccatcagctgctctctctgaacgcccacttcctaactctcaaggccctcgagatggacgttgacgttcttgttttcggtcacactcatagatactattatgatatacactccctttatggcaaaaaagttattctgctcaatccggggtcgccggtgtttcccaggatggattccccaggctttgctgttctcaagttctccggagaaaacgtgggtgttgagagaataacgttctggtaggcttcagaaaggttgtgaaaaggcaaagaggcaaaaagcgccatcagctcttgatggcaagcttgatgtcctcagccttgacggtctttctgccggcgtgctgggcgagggcgacggccttcttggcgatctccagggccttctcctcaaggtgctcggcgagaaccttggcggcctcctcgctgacgcgggcggcaccggccttccttataagcctgtcaaccggggcaatcggaagctcggccattcacaacacctcctttatggttgtctgcagagttctgcgttctaaattaggagcaaaggcctatataaatctttcggaaaaggacggttatggggccagctttctggcgattttgggtgggatagttagaaatttggccgggaaaacttattgacttataaggtcaaaaactgagagtttttaaccgtcatctgatttagacatgaaaacgccccgattggcctaataaactctcattaagctccgctgtccaatatcttttctgtaaaattgtgtgcttaggtggccaaatctgtccagaaaactttttatgtgtgtcaatgtaacgttaaatttacctggggtgaaaggcatggttgagaagtttgatacgatatacgactactatgttgacaagggctacgagcccagcaagaagagggacatcatagctgtattccgtgtgacgccggcagagggctacactatcgagcaggcggctggagccgtggcagctgagagctcaactggaacctggacgacactctatccctggtacgagcaggagagatgggccgacctctcggccaaggcctacgacttccacgacatgggcgacggcagctggatagtcagaatagcctacccgttccacgcctttgaggaggccaaccttccgggccttctcgcgagcatagccggaaacattttcggaatgaagcgcgtaaaggggctccgccttgaggatctttacttcccggagaagctcataagggagttcgacggcccggccttcggtatcgagggcgtaaggaagatgctcgagattaaggacaggcctatctatggtgtcgttccaaagccaaaggtcggttattctccggaggagttcgagaagctggcctacgaccttctctcaaacggtgccgactacatgaaggacgacgagaacctcacgagcccgtggtacaaccgcttcgaggagagggccgagataatggcgaagataattgacaaggtagagaacgagacgggtgagaagaagacatggttcgcgaacataaccgctgacctcctcgaaatggagcagaggcttgaggttcttgctgaccttggtctcaagcatgcgatggttgatgttgttataaccggctggggagcgctaaggtacatcagggacctcgcggccgattacgggcttgccatccacggccacagggcaatgcacgcggccttcacgaggaacccgtaccacggcatctcgatgttcgttcttgcgaagctttacaggctcataggcattgaccagctccacgttggaaccgctggagctggcaagcttgagggcggcaagtgggacgtcattcagaacgccaggattctcagggagagccactacaagcccgatgaaaacgacgtcttccaccttgagcagaagttctacagcataaaggccgcgttcccgacaagctctggtggattacatccgggcaacatccagcccgttatagaggccctcggaaccgacatagtcctccagctcggaggtggaaccctcggccatccggacgggcctgccgcaggtgcacgggcagtcaggcaggcaatcgatgccataatgcagggaataccgctcgacgagtacgcgaagactcacaaggagcttgcgagggccctggagaagtggggtcacgttactccagtctgagctgtttcagggttagtgttcttttcttccttttctatctgtcctttatctccatgtgtgtttgacattaccaccagctcaaaccgaaaaaggtttaaatactttttactaactttgggttagggaaagggggtgagagctatggagtcaaatcgagaccttgggagactcctcgatatcctgggtaatgagacgaggaggagaatactcctcctgctcacaaagaggccatacttcgtcagcgagctgagtcaagagcttggcgttgggcagaaggcggtgctggagcaccttagaatactcgagagtgcagggctgatcgaggggaggacagaaaagatacccaggggcagacccagaaagtactacacgataaagcgcggcttcaggcttgaggtactgctcactccatacacattcggcacagacatatacgaaccgaagaaaccgagggcgacggccgagtaccagcaggctagggagctgataaagtcaacggagccaattgagactaaggtggacgagctggttcagttcctcgatgaggtgcagaggcgcattgatgaggccatgagaatgaagcaggagcttgaggaagtccgcctgcttgttgagacttacatagagaaccttatgcgaaggattgcccaggaaaacgaggcggagttcgagagattactgaaagagctcagacctaaacttccaaagaagatactggaagacctagagagcttttaggaagtcgttaaaggagaaagctgaaaaagagagactttagagtattttgccctcttccttcattcttacgagcctcgttatgtagccggcgatcctgttccttatcgtcttgctggtaacgttggtgagctcggccaccatcttcttgttgtgctcaaagtccctggtgaacttgtcagggtacctgtcaaagagctcacgggcagtcctcttaatgaacgtctgcttgatgtttcccattctcaccacctctcggataatcttcagccgtaaccaaaatcaggagtgtccttttaaaggttttcccgtccggctggttcttcaaagaagcaaacgttattaaccgcctccgggaacgtgagaccatgttgagggaagtaatccactgccacgggcacgagaacgtcaaagccacgcaccgctcaacccttgaattcaccaaagaggactttctgacaccgagaggagactgcataatatgcattggggcagacaaagcaatcaacgacctcaacgatgagttcaaaaatgcacttagggaaggtaaaaagctcctgataaggataaaggtcggtgacctcgtggatgaggtcgttgcgtgggggagtcccgagcttattcttgaccatgatgtatccatggtcgtcagaaaaagcacctacatagatgcgagaacgctcgctataagggccaacaaggccgccagagatgtggacaggcgtatcatcgaactcctgaaaaatcccgggcagagggccatcattgagcttatcatcgaggacaacgaaaacctttaaaagctcaacatttttactaacctttggtgatgaaaatgctcgagggatactacatagtcgagaacaccggtgttgtcccggccgagaggaggttcaagtttaaggacctcaaggcctggggctacgacctccaccttgggacgatagacggcagggaagcctacttcgtctcaaaggctggcaccagggaagagggagagacatacacggaaggaggaaaggagtaccacatcagcgagacccagaaagagataccaaagaacgcgagactcttggcgagaatagtcatcgagaagggtcagccttacctggagttctggctcgacacagaggacggcaacttcccgctggcaaaggaagacccgaggctcatactccaccgcttctggaccgagaagaagttcaaccagctcgagaagcacgtgggaagcgtcggcctgacgacggacttcttcaaggacagggtcttcgtcaagagcattccccttccctacgaggagtacccgccgaaggttagaagggtcttaagggaggtaagggacgtccacagagacctgacgggctttggaaggttcgtcttccagtactttggagaggaagacaagacccaccagtaccgcctctggtggctcctgccgacgatacacctcttcgacgttgaggtctccaacgaggtcgacaagatactcgctatgctcgactgaagggctttaagccgttttcaattttcttcgggtgggaatatggacatcagaaggctcgtacggacgagggacctgctggttttgtggaagctgaagataacgagggcggcgagttacctcagcatcgccaacagcttcatgatactcttcgttttcgttaaggagctctattcggttccatggatagctgagaggttctcattcagggagttcgtgggtatagcctacgccttggcgattgtcgggtttatagttctggcccagctcgactggcacttcatgtacaagagggagcagagctacgccctgaccaggaacccactcctcccagcccagtgctttacgactctgtacctccttgaaaaggccgttgaggagggtaggataaccgaggaagaagccagaagggtcattgcttccctccagttggcgggctgcgatgtcaggaatgcaaagattgaagctgggccgagtgggaatgggaattaattgatgttgtttcaaactttaacaagctcccaaccccgcttgtgcgtctctattccctcggttttcactccaagctctttgatttctctcctgagcttctctacgaacttcccgaactttccgtcgtcggttaggatttcgtaaatctccggatacccctcctgaaggagtctttgaaactccctgccggaagcgcggaggttgaggacttcgaagaagtagtagtcggcgaagtcccgtgtttcttccactatggaagagatgtcagtaacttccggtattatagggctcacgaaaacgtaggttttcaggccggcttctttaagctccttcagggcgttaatccgggcttcctgaactggcgttaggggctcaaagagccttttctccctccctctaaacccgtttattgtcagtccgacctctatcctgtcaaagagcctgaaaaggtctatgtcccgggtgacgagcggcgacttcgttagtattgagagctcgttcctcttgtccatgtactggagaacccgcctcgtaagcttcaacttggcctctattggctggtaggggtcgctgaccgttgacatgacgacgcttcccttcaccctctttcttgcaagctcgggtgcgttgaccttaacctcaacccagcttccccacttaccgtagtccttccacttcgtgaggaacttggcgtagcagtaggagcaggcgaaggcgcagccgacgtactggttgaccgtccagtcaactcttggtatcctggagggagtgtagatgctctttatccgggtctttatgatattcacttccatctcaacgcaccgggagtaaaggttggaaaagaaaagtcagagactcaaaccgagagccagcttgggcttcttccactcgtcgaggatttctttcagttcttcgttctcgactttctcgtaaagttcatcaaagcgcttcttggcctcgtcgtctcccgccttccacctggcgagctcccctatggccctgaagaagtatgctgtgtcgtcctcgaaaagctcggcaaaggcctccatgttctttgcaacggcctcgtaggagccttcctcaaagagtccacttatgaagtctatcaaggtgtcgaagacgattccgaagatgtcatcgctcacgtctatcgctttgacgagggcctcgcgcagggccttgaaggctttatcgtagtctcccctcccagcccagatttcggcctcaatgagcttggcgttaatctctatttcgtcgtccctagggttcctgaggacttcctttatcagggcctcggcttcgtcgtattcgcccagctcgtacttgaagtgggccaaatcgagaaggcttatgaggtagttcttctcctcgttcagcctctcgaatatctctctggccttctccatgagctctatggccttctcggtctcgcctatctcgtcgtagttcaccgcaaggttggcgagggtcagggctatctccttctcgttcttcaggactttctcttcatgctcaaggagcttctggtaggtctctatagctttctcaggcattccaaagtgctcgtaggcgtcggcgaggtaatagagtgccgtcgcgtactcttcgggatcgtcctttttcatctcgacgagcttcttgtagagttcaattcccgcctcaacatcgccgaggtgggaataaacatgggctatctcatgggccaggtcgtaggggtcttcgcactggagggcaacttctttgagacgttcaagctcctttctgagggtctcttcgtcctcgattgagtcgatataatcgtcaaagagctcaaggagcttctcgcagtccttctcttcaagggcctttttccattcgagtttaatttcactcatttctgatcaccgggccttatcttggttgaggggttaaaaaggtatgccgtccagattcggagcattttgctagaaaaattcttgtatttttgaataaatgtcaaaattctgacgcattttatttggatgtggggttctcctgacgttttgacctgtaagaacgtcaataattgggtggccaatttggataatttatccaaaacttgccacatttatggaacagtgaccatcggttcaaaggtaatcgttattaactcccttctcattcaccctatttggataaattatccaggtgttgaaaatggaggcagtgaagaaggacgtgatccaagaatacgctggctggaaaagtctggacgtgctcgaaaacgccaaccgctatccaggtccgacggggttcttcgcctacgtcatggaggaggccctgaaggagagcacggccttggttccagaggacgggaggaaggcgcacttctcgggggaggtctacatccacaagctcccttacagcctgtacataccctactgctctggccacagcacctcaaggctgctcaaaaaggggctgagaactccgacgataacttctagaccagccaggcacttcgacacctacgttgaccacatagcgaactacctcataaccatgcagcactacttcagcggcgctcaggctctctcaagcgtcgagtggtacgcggggcccttcataagaaaggacggtctgagcagggagaagatacgccagcacgttcagaggctcgtctacaacctcaactacccgagcagggtcgggatgcagacgccttttacaaacttcaccgtgaccctcgacgctcccaaggagatgctcacgggcgatatggctgtctacgacgggaaggaggttggcccgctcgggggctacgagagggaagcaaaggagttcttcctggctctggttgacgttctcagggagggcgatgctaagggccagcccttcaccttcccgataccaacgataatgggaaccgcgaagatgctctgggacgatcccgaggtgttcgagcccgttttcacgacggctgcgaagagggggagcttctactggctcaacacgaacgtggttgacccagatgcgagctactcgatgtgctgcaggataaacatagacaagagggagttcgcattcgccttcagcgcttccccaaagagcgccgaggaggaggcgatggagatgcttgagagacagcgctttggtggcctctgggcgatgccagacgtaaccggttctgtgaacgtcacaacggttaacctgccgaggctcgcgctgaaggcgggggacgacgataggttctgggaggagtacgccagaatcctcgaaaccgtcagaaagactaccgactggttcagggaaaggtacgtgaagctgctgacgaactaccgcgagatgtacagcatgatacacacataccttgaggagttcccgtcaagccacttcaacaccatcggaatcctcggccttcccgaggcagcggcggtatacctcaacgagcccgatctgtggaaagagggctcaagggccgagtggatgaaggccgcgaagctgatgaagaggatggtggagttcgcagtcgaaaaagctagggagtggatgagggagagcggaattccctggaacgttgaggaagtccccggagagagcgccgcggcaaagctcgccattaaagacctgcgcgagttcccggagctgagggattacctcgacgaccccgagaacccgatatactcaacgagcatcgccccctactacgggccgattgagctggccgacaggattaggatcgaggaagaagtccaggggagcttcacgggaggagtcatgatgcacatcttccttggagaggagcccgacccagaggcgctggcgaagctcaccaaaaggctcctgaggacgaagctggtctactggagctacacacctgcagtaacggtctgcaatgcctgcgggaggtcatcaacgggactccacacggcttgcccccactgcgggagcgaggacgtcgaggtctggagcagaatcataggctactaccgcccgctcaagaactggaacccctacaggaagagggagttctggagcaggaggcactactcctcctgatttttggaggtggttccgtgctcacaagcggctggaagagcgtcagcatggtcgatgtacacgggaaggtgacctttaccctctggctctgcggctgcaatctgaagtgccctttctgccacaactggctgatagcggagggtaaggagtgcttccccctcgatagaggtgctctcctcggcgacttgtcctcaagctccttcctagtggactacttccacataaccggcggcgagccactgatgcagtgggccgagctgtcatccctgctcgcggaagccaaggaactcctccccatcagtctcaacaccaacctcacgctcttgaaacccctggagagactcctgaaggcggagctggttgaccacatagcgaccgacctgaaggcccctcctgctgagctctacggcctcccaggggaagcatcaaagcgcctctgggagcttttccttatgggccttgagttaatctcggactacggcatccccttggagctaaggatacccgtggccagagggctcgaccagtggccgtggatagaggaggggcttaagcacgttgacacggacttttacgctgtcctgaaccccctcgtgggcccacctttgaccagccccagaaatggagcctggtgctcggagcactgctggcctgagagagaagtggaaggtctgaaggagaggctgggagaaattgggattagaacctacgtgaaccgctttgcttgactttttcatttcctttttgagtcacaggagctttaagtgcccagtcaccttgtccacgacctcttctggcccgggcccgatggcgagaaccgttacagtcccgggtggaatttccgtcagccctgcgtcctttatcagggccgttggaagtccgagcttctctgcctccgctttcagcttaaacagctcctccaggttttcagccttgacgacgaccttcttctgtccctcgtggaaccatgccttgaaccactcgggcttttccttctgggcttttatcgcggcagtaacggccccgtgggcaacctggacggcgaacttccccttgctgagcttgaggtcttttctagccactataacctgcttgtacttgaacatgacaaccacccttcaggtcttttcttcggggagatatccgaactttctcaagatgtgctctatggcctccgcacctccttccccatagggcttagtcgtcacgtagtcagctttttccttgaggctttctggggcctgtgcaactgcaacccgataaccaacgactccaaatgcgtcgaggtcgttttccccgtcaccgatgtgggcgacttcctttggcgagatgcccaaatactcgcaggccttctctatcccggtccccttgtttatccagggcttctttatgtggattgcaaaaccagaatcaacggcgatgagattgagtccaagttcctttatgagctccctcacggctttcacaggaacagtcctgagcacgacgaggccggctttcctctcgggcattgagaagctcaagagagcctcgggatacctctttttcagctcgccccagagtatccactcctcgtccatgttggtcaggtagaccctctttctgagctttccttccttaatcgagagcgctcccccgtcctctccaacaacgggtccgctcgtccctattagtatcgccgccgcctccccgaattggactgtgtttcctgtaaccagcattacgggtactccaaggctttctgcgagccttattgcctcgagggccttctcgtgaagacgccggtcgggataggttatcgtgccgtctatgtcgacagatattgcctttattgtcatttatctcacccggaaaatgagggagaagctcccaataaaagggttcccatcagtgatctttcatgatttccctgagaacgctcgtggcgtatgttcccttcggcaggaagaagcggaagcacattccctcctcctggatgtacccataggccatccccatgggcctcagtaggagctctcttctcccgccaggttcggccataggcttcggcagcctcctgaaggtttcgaggcttaggccctcttcctcaagtatttctttctcaagctctcctggaaggccctttgccctcctcatcgcgaacccaaagagcggacctgaaaccatagcttggttcttccttaccttttccctcacgaactcaaggttggtctcagttacgcggtaagtcctgtccctgtatggaattcctcccttgacctgcaccactatgtcaccgacgaggggttcgttcaggggcaggccctcttcaatcctcctcgagaggtagaggttgaagaggtagctctggtaggcgtggatgaatatgcgcattattgggagcggaaggctgagaaaggccctcttccagttcccagtatctttgtacctgtggaggagcgttctttcatacctcagaaagcccgggaactcctcaagcgccctctcaacgtctccggtctcccagaagttctttctggcttcatctccttccatgcttccatcgtgcgcccctaagaagagcctcgcagctccttcaaagtccccctgaaggagcagtttgcctattatgtggtttactaccctcctttctccgaacctctggtagccgaagtagttggggaagccgcccttctccctgagctcccgcactatttccttagtcctatcaaaggcatcttcgctgacatctctaactattatcctgaacctgttgccgagaagatgtccgagcttgatgaacctgccgtaggagacgaagcgcagttcaatgtccctgatactcacctgctcaaccctttccctggcctcggccggcacgcttatgtactggtaggtgaccgcgtgcctgtccttcgttccagcgaagccgatttccctgtagtttatccctgccctcttggctatttccttcactgccgccatcgtctcccagttccgcttcttgaggaggaagatggcgtacttccttccttcaaagattgaagggataggctcttctattacaatgaagtcctcggggtaaatttttatcttcccgcctatcccaggcttctcgctgaggtgcttgaattgggagaagaactcgcggtagtccatccctatcaccgctctatcgttcccgttgccattgcggtggttggcttttaatcattaccgaaaactttataaatagcacaaaagaacaatagcgcggaaaacacgaattgtaactaaaactcatccaccctcaaaaacaaaaaagggtgggggtgaggggagatggcccagctcgcaggccagccagttgttattctgcccgagggaacccagaggtatgttggaagggacgcccagaggctcaacattcttgctgccaggattatagccgagacggttagaaccaccctcggtccaaagggaatggacaagatgctcgttgacagcctcggcgacatcgtcatcaccaacgacggtgcaaccattctcgacgagatggacatccagcaccctgctgctaagatgatggttgaggttgctaagactcaggacaaggaggccggtgacggaaccaccactgccgttgtcatcgccggtgagcttctgaggaaggctgaggagcttctcgaccagaacattcacccgagcataatcatcaagggttacgccctcgcggcagagaaagcccaggaaatactcgacgagatagccaaggacgttgacgtcgaggacagggagattctcaagaaggccgcggtcacctccatcaccggaaaggctgccgaggaggagagggagtacctcgctgagatagcagttgaggccgtcaagcaggttgccgagaaggttggcgagacctacaaggtcgacctcgacaacatcaagttcgagaagaaggaaggtggaagcgtcaaggacacccagctcataaagggtgtcgtcatcgacaaggaggtcgtccacccaggcatgccgaagagggtcgagggtgctaagatcgccctcatcaacgaggccctcgaggtcaaggagaccgagaccgacgccgagatcaggatcaccagcccggagcagctccaggccttccttgagcaggaggagaagatgctcagggagatggtcgacaagatcaaggaggtcggcgcgaatgtcgtcttcgtccagaagggcattgacgacctcgcccagcactaccttgccaagtacggcataatggccgttagaagggtcaagaagagcgacatggagaagctcgccaaggccaccggcgccaagatcgtcaccaacgtccgcgacctcactccggaggacctcggtgaggccgagctcgtcgagcagaggaaggtcgccggcgagaacatgatcttcgtcgagggctgcaagaacccgaaggccgtcacaatactcatcaggggcggcaccgagcacgtcgttgatgaggtcgagagggcccttgaggacgccgtcaaggtcgtcaaggacatcgtcgaggacggcaagatcgtcgccgccggtggtgctccggagatcgagctcgccatcaggctcgacgagtacgcgaaggaggtcggcggcaaggagcagctcgccatcgaggcctttgccgaggccctcaaggtcatcccgaggaccctcgccgagaacgccggtctcgacccgatcgagaccctcgttaaggtcatcgccgcccacaaggagaagggaccgaccatcggtgttgacgtcttcgagggcgagccggccgacatgctcgagcgcggcgttatcgccccggtcagggttccgaagcaggccatcaagagcgccagcgaggctgccataatgatcctcaggatcgacgacgtcatcgccgccagcaagctcgagaaggacaaggagggcggcaagggcggtagcgaggatttcggaagcgaccttgactgaagccctttgatttcttttctcttcaaatttgtgttcttatttgagaatctgctcttctctggtcaggtagttcagggctgtggttagtgggatgttaaagtcgttttacctcttcagcttcgctatgaagaagctgttgcagtcgtgcctgtgcgtccaggccctgaaaaccttatcccctatatccagaaagcccctatcgccccagctgaagggataatccaacagttcgaggccgaccctgttaatagcaaagagaacgttctcctcatcctcatcaatccttattgaacaggtagaataagtcatctcacctccttctctgaggttctcgtaggcgttcctcagcatgttcctctggacgctgataatcttctttatcttcgcctcgtcgaagcgccacttcacctctggaaactggcggtatgttcctgatgacgagcaaggggcgtcgaggattatcttatcgaacttctctttatctctgaagctctggccgtcggcgtggacgaagcggacgttcttaacgccaagaaccttcgccttctccttcatgcgcataagccggtcgtaggagtagtcaacggccacaatttctcccttgttctccatcagcgccgcggcgtggaaggtctttgagccaggagctgccgccagatcgagcaacctctccccaggctctggagaaaggacatgagcgacgtaagccgaagctaaatcctgaatcacgaacttgccctctttgtaccagtcaagcctcgtgacgggtgttttgtactcaagaacctttaaaacgtctggaactggggttagtgcagtcctaacgccgttctcctcaaggtagtcgcggagggaatcaatgtccgtctttagcgtgttggccctcacgtaatacctctggggccggttgttgctgaggaggagccttacggcctcgtcgtagccgaagaggtttataacgtactccacataccagcgggggtgggaaaagcgaacggagagccactcaattctgtccttctctttgagtctctttaaggccctctctacgtcgaacttctctatctcgtgcattagggcgtttacgaacttggctctggagaagtcgaacttctcctttacaaccctgactatcgagtccgtcgccagggcgggcggcactttgcggaagtgtatttcgaaagtccctatacggagaaggttcgcaagataggggtcaaggtcttcaacctttgaacccttgagaactgagtttattatgaagtctattttcgcgcgccacttctcgatctcgaagacgtaggcatgggccaaaccgcgcgccttctcgcggtctctcccggctaccttcttaaagaccctctcaagggcgtgcttcgatgacagctcacgctcctccacaagcatgagcgcatcagccacaacttcctgaaagctcacgcggtaaaacagctccatgagagggcctttgaaagttggcttaaaaaggtggcggtgaagtttattaggttaaaagtctacctattgtaggtgagagtatggaggagatagaccgcattgtgttcagctttcccctgttcaaggattatcgcgaaaaggagcggttcctcaaggtagttggtcttctggtaagtcatcagataacctttgagaaagccgcccaactgctcgggattaagcttgaggagctctcgtttctcctcgacaagctcggagtcgaatactctttccttgacgaagaagaggccgagcttgagatcgaggaaataagaagagtaagggaggagctgaagcgtgagggtcgtctttaattcctctccgattattgtcctcggaaaacttggctaccttgagaaggcagttgaactttttggcgaggttttcatccccaaagcagtggccgatgaaatcaacgtgagagaagatgaagttacttcactgctctcccggctcattgcagagggcaaaatatccttagaaactgtcgaggatacgtctccattcgaatatcctggactccatgcaggagaaattgaagttattggtctggctaagaggctcaacgcggtagctatcctggatgatctaaaagccagaaaagccgcaaggcttgagggcctgcgggttatggggacggttgcagttttgcgcctactcaaagatgccggttttataacggagaaaaatggggagctattacgatctctccttgatgtggggtttagaataaagcctggattgttctacaagattatgggggatgaaaga

SEQ ID NO: 2 - protein, 1671 aa, Thermococcus kodakaraensis KOD1
  misc_feature (414542)..(414542): n is a or c or g or t.
  misc_feature (786890)..(786890): n is a or c or g or t.
  misc_feature (786907)..(786907): n is a or c or g or t.
  misc_feature (786944)..(786946): n is a or c or g or t.
  misc_feature (839139)..(839139): n is a or c or g or t.
  misc_feature (1128488)..(1128488): n is a or c or g or t.
  misc_feature (1128499)..(1128499): n is a or c or g or t.
  misc_feature (1128505)..(1128506): n is a or c or g or t.
  misc_feature (1128517)..(1128518): n is a or c or g or t.
  misc_feature (1128539)..(1128540): n is a or c or g or t.
  misc_feature (1561400)..(1561400): n is a or c or g or t.
  misc_feature (1561477)..(1561477): n is a or c or g or t.
  misc_feature (1561545)..(1561545): n is a or c or g or t.
  misc_feature (1767941)..(1767941): n is a or c or g or t.
MILDTDYITEDGKPVIRIFKKENGEFKIEYDRTFEPYFYALLKDDSAIEEVKKITAERHGTVVTVKRVEKVQKKFLGRPVEVWKLYFTHPQDVPAIRDKIREHPAVIDIYEYDIPFAKRYLIDKGLVPMEGDEELKMLAFDIETLYHEGEEFAEGPILMISYADEEGARVITWKNVDLPYVDVVSTEREMIKRFLRVVKEKDPDVLITYNGDNFDFAYLKKRCEKLGINFALGRDGSEPKIQRMGDRFAVEVKGRIHFDLYPVIRRTINLPTYTLEAVYEAVFGQPKEKVYAEEITTAWETGENLERVARYSMEDAKVTYELGKEFLPMEAQLSRLIGQSLWDVSRSSTGNLVEWFLLRKAYERNELAPNKPDEKELARRRQSYEGGYVKEPERGLWENIVYLDFRCHPADTKVVVKGKGIINISEVQEGDYVLGIDGWQRVRKVWEYDYKGELVNINGLKCTPNHKLPVVTKNERQTRIRDSLAKSFLTKKVKGKIITTPLFYEIGRATSENIPEEEVLKGELAGILLAEGTLLRKDVEYFDSSRKKRRISHQYRVEITIGKDEEEFRDRITYIFERLFGITPSISEKKGTNAVTLKVAKKNVYLKVKEIMDNIESLHAPSVLRGFFEGDGSVNRVRRSIVATQGTKNEWKIKLVSKLLSQLGIPHQTYTYQYQENGKDRSRYILEITGKDGLILFQTLIGFISERKNALLNKAISQREMNNLENNGFYRLSEFNVSTEYYEGKVYDLTLEGTPYYFANGILTHNSLYPSIIITHNVSPDTLNREGCKEYDVAPQVGHRFCKDFPGFIPSLLGDLLEERQKIKKKMKATIDPIERKLLDYRQRAIKILANSILPEEWLPVLEEGEVHFVRIGELIDRMMEENAGKVKREGETEVLEVSGLEVPSFNRRTKKAELKRVKALIRHDYSGKVYTIRLKSGRRIKITSGHSLFSVRNGELVEVTGDELKPGDLVAVPRRLELPERNHVLNLVELLLGTPEEETLDIVMTIPVKGKKNFFKGMLRTLRWIFGEEKRPRTARRYLRHLEDLGYVRLKKIGYEVLDWDSLKNYRRLYEALVENVRYNGNKREYLVEFNSIRDAVGIMPLKELKEWKIGTLNGFRMSPLIEVDESLAKLLGYYVSEGYARKQRNPKNGWSYSVKLYNEDPEVLDDMERLASRFFGKVRRGRNYVEIPKKIGYLLFENMCGVLAENKRIPEFVFTSPKGVRLAFLEGYFIGDGDVHPNKRLRLSTKSELLANQLVLLLNSVGVSAVKLGHDSGVYRVYINEELPFVKLDKKKNAYYSHVIPKEVLSEVFGKVFQKNVSPQTFRKMVEDGRLDPEKAQRLSWLIEGDVVLDRVESVDVEDYDGYVYDLSVEDNENFLVGFGLVYAHNSYYGYYGYARARWYCKECAESVTAWGREYITMTIKEIEEKYGFKVIYSDTDGFFATIPGADAETVKKKAMEFLKYINAKLPGALELEYEGFYKRGFFVTKKKYAVIDEEGKITTRGLEIVRRDWSEIAKETQARVLEALLKDGDVEKAVRIVKEVTEKLSKYEVPPEKLVIHEQITRDLKDYKATGPHVAVAKRLAARGVKIRPGTVISYIVLKGSGRIGDRAIPFDEFDPTKHKYDAEYYIENQVLPAVERILRAFGYRKEDLRYQKTRQVGLSAWLKPKGT

SEQ ID NO: 3 - protein, 199 aa, Thermococcus kodakaraensis KOD1
  misc_feature (414542)..(414542): n is a or c or g or t.
  misc_feature (786890)..(786890): n is a or c or g or t.
  misc_feature (786907)..(786907): n is a or c or g or t.
  misc_feature (786944)..(786946): n is a or c or g or t.
  misc_feature (839139)..(839139): n is a or c or g or t.
  misc_feature (1128488)..(1128488): n is a or c or g or t.
  misc_feature (1128499)..(1128499): n is a or c or g or t.
  misc_feature (1128505)..(1128506): n is a or c or g or t.
  misc_feature (1128517)..(1128518): n is a or c or g or t.
  misc_feature (1128539)..(1128540): n is a or c or g or t.
  misc_feature (1561400)..(1561400): n is a or c or g or t.
  misc_feature (1561477)..(1561477): n is a or c or g or t.
  misc_feature (1561545)..(1561545): n is a or c or g or t.
  misc_feature (1767941)..(1767941): n is a or c or g or t.
VKPDGRVVVTAPEGFNVEKFIAKNAAWLEGKLAQIEGLKELAESGFPLNGEFYKVIHGRRAKVHDSFRTVVLPPYPEDMREELKRLLRPEIFGLIEKYAGKMGVSPGKVFIRSQRTRWGSCSGKGNLNFNLRLIALPPELREYVVVHELAHLKHRNHSKAFWSLVSRFYPDYRSAREELKKWWSILELNPYWRWLEGRE

SEQ ID NO: 4 - protein, 142 aa, Thermococcus kodakaraensis KOD1
  misc_feature (414542)..(414542): n is a or c or g or t.
  misc_feature (786890)..(786890): n is a or c or g or t.
  misc_feature (786907)..(786907): n is a or c or g or t.
  misc_feature (786944)..(786946): n is a or c or g or t.
  misc_feature (839139)..(839139): n is a or c or g or t.
  misc_feature (1128488)..(1128488): n is a or c or g or t.
  misc_feature (1128499)..(1128499): n is a or c or g or t.
  misc_feature (1128505)..(1128506): n is a or c or g or t.
  misc_feature (1128517)..(1128518): n is a or c or g or t.
  misc_feature (1128539)..(1128540): n is a or c or g or t.
  misc_feature (1561400)..(1561400): n is a or c or g or t.
  misc_feature (1561477)..(1561477): n is a or c or g or t.
  misc_feature (1561545)..(1561545): n is a or c or g or t.
  misc_feature (1767941)..(1767941): n is a or c or g or t.
MVRIMPVDRLSDEEVREILTKYRKIALVGASPKPERDANRVMRYLLEHGYEVYPVNPRYDEVLGRKCYPSVLDIPDEVEIVDLFVRPEFTMDYVEQAIKKGAKVVWFQFNTYNREAFRKAKEAGLTAVAHRCIKQEHERLIG

SEQ ID NO: 5 - protein, 333 aa, Thermococcus kodakaraensis KOD1
  misc_feature (414542)..(414542): n is a or c or g or t.
  misc_feature (786890)..(786890): n is a or c or g or t.
  misc_feature (786907)..(786907): n is a or c or g or t.
  misc_feature (786944)..(786946): n is a or c or g or t.
  misc_feature (839139)..(839139): n is a or c or g or t.
  misc_feature (1128488)..(1128488): n is a or c or g or t.
  misc_feature (1128499)..(1128499): n is a or c or g or t.
  misc_feature (1128505)..(1128506): n is a or c or g or t.
  misc_feature (1128517)..(1128518): n is a or c or g or t.
  misc_feature (1128539)..(1128540): n is a or c or g or t.
  misc_feature (1561400)..(1561400): n is a or c or g or t.
  misc_feature (1561477)..(1561477): n is a or c or g or t.
  misc_feature (1561545)..(1561545): n is a or c or g or t.
  misc_feature (1767941)..(1767941): n is a or c or g or t.
VRIMVLMVEGISKDYREFHLRDVTFSVEKGEHFIILGPSGAGKTVLLEVIAGIIEPDSGRIFLNGEDITDLPPEKRGLAYIPQNYALFPNMSVFDNIAFGLKVRKVPKAEIGRKVRELSEVLGISHLLKRKPKTLSGGEMQRVAIARALAVEPELLLLDEPFANLDVQTRGRLINEMKRWRKELGFTALHVTHSFEEAVSLGDRVGVMLNGRLVQVGPVREVFSRPASEEVAKFLGFENIVEGLAEGRILRANGLVIELPIEASGRIRVGIRPEDIVLSDEPLKSSMRNTFQAEVQADVEELGELGPRTRKAKGRWSGAFSIRYPLFGAGAGA

SEQ ID NO: 6 - protein, 295 aa, Thermococcus kodakaraensis KOD1
  misc_feature (414542)..(414542): n is a or c or g or t.
  misc_feature (786890)..(786890): n is a or c or g or t.
  misc_feature (786907)..(786907): n is a or c or g or t.
  misc_feature (786944)..(786946): n is a or c or g or t.
  misc_feature (839139)..(839139): n is a or c or g or t.
  misc_feature (1128488)..(1128488): n is a or c or g or t.
  misc_feature (1128499)..(1128499): n is a or c or g or t.
  misc_feature (1128505)..(1128506): n is a or c or g or t.
  misc_feature (1128517)..(1128518): n is a or c or g or t.
  misc_feature (1128539)..(1128540): n is a or c or g or t.
  misc_feature (1561400)..(1561400): n is a or c or g or t.
  misc_feature (1561477)..(1561477): n is a or c or g or t.
  misc_feature (1561545)..(1561545): n is a or c or g or t.
  misc_feature (1767941)..(1767941): n is a or c or g or t.
VKTMGVRKLGDSAYLYPGSPSTLIRIHEGNAVLVDPGHGSGRHKDLRREVGKLGLEVNLQLATHGHADHVSVCPKIDAPLLTHRFEFSIAESPLNREILTFGSKAPEGFLAYAFPEEVKVHGVFEWGDEIAGLKAVQLNGHSPGMTGFLDEENGLIYAGDSFFGERLLQSVGLPYLVDVGLFWKSLETLREYAGSGYLLIPSHGKSVSGEEAIETLEFNIKRVEDSEKLALEFLREPLTVDELAFRIMRALGVELTPKKLALNLVPVRALIAELYNRGELEAVVENGLKWVRRKE

SEQ ID NO: 7 - protein, 351 aa, Thermococcus kodakaraensis KOD1
  misc_feature (414542)..(414542): n is a or c or g or t.
  misc_feature (786890)..(786890): n is a or c or g or t.
  misc_feature (786907)..(786907): n is a or c or g or t.
  misc_feature (786944)..(786946): n is a or c or g or t.
  misc_feature (839139)..(839139): n is a or c or g or t.
  misc_feature (1128488)..(1128488): n is a or c or g or t.
  misc_feature (1128499)..(1128499): n is a or c or g or t.
  misc_feature (1128505)..(1128506): n is a or c or g or t.
  misc_feature (1128517)..(1128518): n is a or c or g or t.
  misc_feature (1128539)..(1128540): n is a or c or g or t.
  misc_feature (1561400)..(1561400): n is a or c or g or t.
  misc_feature (1561477)..(1561477): n is a or c or g or t.
  misc_feature (1561545)..(1561545): n is a or c or g or t.
  misc_feature (1767941)..(1767941): n is a or c or g or t.
MLGKSKGGKGDWDYIVQNHPEIIEELKSLHNWDEIKSIIPEAENLGAYHLISLQAIAALIRELKIQRGHLSERIERLSSNLDYFHSTQREQNTSFEKRLKELEDRISTLEQRTLFMDSVEAIIPRMNELEEKLEGLPAELYKRLEGAYSQKLDEEMRKIVAEKVEELKKELEQETLSVGVELARTLKEIQEHYERLVQENVKLKGLARENEALKRELLEKERELEELRKRLALMDEMTMRVEKLGEKINAYEVQLRKMKAVEKQLLEITGARDVSSAIEIIKKEFIPRSKFEKILGEVKAAVAEMDVLKEENERLRRENEKLKDALKMLLQERTSSENTEQESLLLKEEES

SEQ ID NO: 8 - protein, 299 aa, Thermococcus kodakaraensis KOD1
  misc_feature (414542)..(414542): n is a or c or g or t.
  misc_feature (786890)..(786890): n is a or c or g or t.
  misc_feature (786907)..(786907): n is a or c or g or t.
  misc_feature (786944)..(786946): n is a or c or g or t.
  misc_feature (839139)..(839139): n is a or c or g or t.
  misc_feature (1128488)..(1128488): n is a or c or g or t.
  misc_feature (1128499)..(1128499): n is a or c or g or t.
  misc_feature (1128505)..(1128506): n is a or c or g or t.
  misc_feature (1128517)..(1128518): n is a or c or g or t.
  misc_feature (1128539)..(1128540): n is a or c or g or t.
  misc_feature (1561400)..(1561400): n is a or c or g or t.
  misc_feature (1561477)..(1561477): n is a or c or g or t.
  misc_feature (1561545)..(1561545): n is a or c or g or t.
  misc_feature (1767941)..(1767941): n is a or c or g or t.
VANTMGKLYDFTVKDGVIYAAGGDYFISGPNSSVTYRGSLYAVNLGKNLTFIWNVSVDDMLSRVRVGKGVIYASSGFPSGYSFSHQFGSLYAFSLDGRPLWNITLGHWVRDMEVWNGSALLGTGFDNSRGEIYLVSPNGEVLMKGSAFYVEDILVVGDTAYVSGYNGQNGSVMSLKLPSGQVIWEQELPYRAKVMAYSDGLLLVGVGKFEQKTENGTTYIYSVGSLYALDPESGEVVGSVSNTGYVRSIAVLGDRAVVGTASSEFYVIDVSALKGKNGTCGPAGIVLLAVLFGLLIKRL

SEQ ID NO: 9 - protein, 54 aa, Thermococcus kodakaraensis KOD1
  misc_feature (414542)..(414542): n is a or c or g or t.
  misc_feature (786890)..(786890): n is a or c or g or t.
  misc_feature (786907)..(786907): n is a or c or g or t.
  misc_feature (786944)..(786946): n is a or c or g or t.
  misc_feature (839139)..(839139): n is a or c or g or t.
  misc_feature (1128488)..(1128488): n is a or c or g or t.
  misc_feature (1128499)..(1128499): n is a or c or g or t.
  misc_feature (1128505)..(1128506): n is a or c or g or t.
  misc_feature (1128517)..(1128518): n is a or c or g or t.
  misc_feature (1128539)..(1128540): n is a or c or g or t.
  misc_feature (1561400)..(1561400): n is a or c or g or t.
  misc_feature (1561477)..(1561477): n is a or c or g or t.
  misc_feature (1561545)..(1561545): n is a or c or g or t.
  misc_feature (1767941)..(1767941): n is a or c or g or t.
VGLGNRYNNESSLVYLGLVEEISRNGFKYYRLTEYGKRVVDYLREYHRYYRRFL

SEQ ID NO: 10 - protein, 273 aa, Thermococcus kodakaraensis KOD1
  misc_feature (414542)..(414542): n is a or c or g or t.
  misc_feature (786890)..(786890): n is a or c or g or t.
  misc_feature (786907)..(786907): n is a or c or g or t.
  misc_feature (786944)..(786946): n is a or c or g or t.
  misc_feature (839139)..(839139): n is a or c or g or t.
  misc_feature (1128488)..(1128488): n is a or c or g or t.
  misc_feature (1128499)..(1128499): n is a or c or g or t.
  misc_feature (1128505)..(1128506): n is a or c or g or t.
  misc_feature (1128517)..(1128518): n is a or c or g or t.
  misc_feature (1128539)..(1128540): n is a or c or g or t.
  misc_feature (1561400)..(1561400): n is a or c or g or t.
  misc_feature (1561477)..(1561477): n is a or c or g or t.
  misc_feature (1561545)..(1561545): n is a or c or g or t.
  misc_feature (1767941)..(1767941): n is a or c or g or t.
MDEVRIPNRRLLSRFLATLDRLGMVKTTNDHIELAEFSHNLVVAAERYGALVSDWASVLEEIYKMADYAFITPTHPQILMDFDKDADFWDMRMSTSFSNLYRRAIAEVAEIKPGMSVLDIGCGSVSPSYFGRLVGYNGFYLGLDYSYALLDIARARIAGEALPVVLKEIDATIIRPVNSYDVVIMSFVLEYIQNRKRAIKNALEGLREGGKLVIVDPFRDRFKYVPALEFFEALNKDFVGFPSVSEIEGIVSSLNFKVSVRSPSRSVLLLEKL

SEQ ID NO: 11 - protein, 275 aa, Thermococcus kodakaraensis KOD1
  misc_feature (414542)..(414542): n is a or c or g or t.
  misc_feature (786890)..(786890): n is a or c or g or t.
  misc_feature (786907)..(786907): n is a or c or g or t.
  misc_feature (786944)..(786946): n is a or c or g or t.
  misc_feature (839139)..(839139): n is a or c or g or t.
  misc_feature (1128488)..(1128488): n is a or c or g or t.
  misc_feature (1128499)..(1128499): n is a or c or g or t.
  misc_feature (1128505)..(1128506): n is a or c or g or t.
  misc_feature (1128517)..(1128518): n is a or c or g or t.
  misc_feature (1128539)..(1128540): n is a or c or g or t.
  misc_feature (1561400)..(1561400): n is a or c or g or t.
  misc_feature (1561477)..(1561477): n is a or c or g or t.
  misc_feature (1561545)..(1561545): n is a or c or g or t.
  misc_feature (1767941)..(1767941): n is a or c or g or t.
MRRGAIGIGTLIVFIAMVLVAAVAAGVLISTSGYLQQKAMSAGRQTTQEVASGIKVLNVYGYINGSTPGAHNITRLVLYVSPNAGSGGIDLAHVKVVISDGKRMAVYRYYDPNEDKNSDIQPAYIHYTGDIANVFAYEKWEPYYKGKYPTGFDPNNKFYITDNIDISAVWWNLYSAYNKTSNNDKDYGKLLFGIAVVQDGDESLDSENHPSLSWGDIAAIMLWTFPFDDNNNPIDGFGLPPSTKVTGKVIPENGAGGVIDFTTPSTYTDNILELQ

SEQ ID NO: 12 - protein, 190 aa, Thermococcus kodakaraensis KOD1
  misc_feature (414542)..(414542): n is a or c or g or t.
  misc_feature (786890)..(786890): n is a or c or g or t.
  misc_feature (786907)..(786907): n is a or c or g or t.
  misc_feature (786944)..(786946): n is a or c or g or t.
  misc_feature (839139)..(839139): n is a or c or g or t.
  misc_feature (1128488)..(1128488): n is a or c or g or t.
  misc_feature (1128499)..(1128499): n is a or c or g or t.
  misc_feature (1128505)..(1128506): n is a or c or g or t.
  misc_feature (1128517)..(1128518): n is a or c or g or t.
  misc_feature (1128539)..(1128540): n is a or c or g or t.
  misc_feature (1561400)..(1561400): n is a or c or g or t.
  misc_feature (1561477)..(1561477): n is a or c or g or t.
  misc_feature (1561545)..(1561545): n is a or c or g or t.
  misc_feature (1767941)..(1767941): n is a or c or g or t.
VLAQDELALHGKFCGARWHQRGLSSGGGMMAAGGPASELIMFMVAVLVAGSVAGALAYVTTDIANGMNDRGAMLADQLRTDFAIINDPTNIPVAGTGPYTYTFYIKNIGKTSIPFTSDAIQVFINGEIVPPANLAFTDVNGNSITSLPPYEVGVIVVTRETALTPGNYYKLTVVLENGKKRSLVFKAPSP

SEQ ID NO: 13 - protein, 236 aa, Thermococcus kodakaraensis KOD1
  misc_feature (414542)..(414542): n is a or c or g or t.
  misc_feature (786890)..(786890): n is a or c or g or t.
  misc_feature (786907)..(786907): n is a or c or g or t.
  misc_feature (786944)..(786946): n is a or c or g or t.
  misc_feature (839139)..(839139): n is a or c or g or t.
  misc_feature (1128488)..(1128488): n is a or c or g or t.
  misc_feature (1128499)..(1128499): n is a or c or g or t.
  misc_feature (1128505)..(1128506): n is a or c or g or t.
  misc_feature (1128517)..(1128518): n is a or c or g or t.
  misc_feature (1128539)..(1128540): n is a or c or g or t.
  misc_feature (1561400)..(1561400): n is a or c or g or t.
  misc_feature (1561477)..(1561477): n is a or c or g or t.
  misc_feature (1561545)..(1561545): n is a or c or g or t.
  misc_feature (1767941)..(1767941): n is a or c or g or t.
VVVTLVEELLKIELKGDELHRRLGGGIPAGTIMLVEGDRGSGKSIFVQRLLYGFLMNGYTASYISSQYTTVEYIKQMESLGYGIIPFLIRKKLVFVSLYPLLSGVSEKRKFLSRLFGEPRLWEPNVMIIDAFSSLLSREQDPDAVRDFLLYVKKMASLDKVIILTANTEEIDRDSLFVLEEASTMLIRLNVKVFGGDLKNSATIVKYNNAKGVFQKIIPFRVEPKAGLIVEIAAVV

SEQ ID NO: 14 - protein, 160 aa, Thermococcus kodakaraensis KOD1
  misc_feature (414542)..(414542): n is a or c or g or t.
  misc_feature (786890)..(786890): n is a or c or g or t.
  misc_feature (786907)..(786907): n is a or c or g or t.
  misc_feature (786944)..(786946): n is a or c or g or t.
  misc_feature (839139)..(839139): n is a or c or g or t.
  misc_feature (1128488)..(1128488): n is a or c or g or t.
  misc_feature (1128499)..(1128499): n is a or c or g or t.
  misc_feature (1128505)..(1128506): n is a or c or g or t.
  misc_feature (1128517)..(1128518): n is a or c or g or t.
  misc_feature (1128539)..(1128540): n is a or c or g or t.
  misc_feature (1561400)..(1561400): n is a or c or g or t.
  misc_feature (1561477)..(1561477): n is a or c or g or t.
  misc_feature (1561545)..(1561545): n is a or c or g or t.
  misc_feature (1767941)..(1767941): n is a or c or g or t.
VARLDASLWKGHTKDEILEWVSSVEYMEGAKELIELLKENGFKIAILSSGLMCLAKRVGEELGVDYVYANELIFDDEGRITGEVNPVVDFQGKGAILRRLKEELKPELTVAVGDGYNDISMFMEADVAIAINPHEGVEGDHNVESLYEVREIIEELIRGQ

SEQ ID NO: 15 - protein, 112 aa, Thermococcus kodakaraensis KOD1
  misc_feature (414542)..(414542): n is a or c or g or t.
  misc_feature (786890)..(786890): n is a or c or g or t.
  misc_feature (786907)..(786907): n is a or c or g or t.
  misc_feature (786944)..(786946): n is a or c or g or t.
  misc_feature (839139)..(839139): n is a or c or g or t.
  misc_feature (1128488)..(1128488): n is a or c or g or t.
  misc_feature (1128499)..(1128499): n is a or c or g or t.
  misc_feature (1128505)..(1128506): n is a or c or g or t.
  misc_feature (1128517)..(1128518): n is a or c or g or t.
  misc_feature (1128539)..(1128540): n is a or c or g or t.
  misc_feature (1561400)..(1561400): n is a or c or g or t.
  misc_feature (1561477)..(1561477): n is a or c or g or t.
  misc_feature (1561545)..(1561545): n is a or c or g or t.
  misc_feature (1767941)..(1767941): n is a or c or g or t.
MKVYRLFVKDEYLNFIRSGEKRIEVRVAYPQFRNIRPGDKIIFNDSIPAVVTEVKKYETFRQVLREEPIKKIFPDEPSFERAVKRFHNLYPKWKENRYGVIAIKFKLLGEGR

SEQ ID NO: 16 - protein, 283 aa, Thermococcus kodakaraensis KOD1
  misc_feature (414542)..(414542): n is a or c or g or t.
  misc_feature (786890)..(786890): n is a or c or g or t.
  misc_feature (786907)..(786907): n is a or c or g or t.
  misc_feature (786944)..(786946): n is a or c or g or t.
  misc_feature (839139)..(839139): n is a or c or g or t.
  misc_feature (1128488)..(1128488): n is a or c or g or t.
  misc_feature (1128499)..(1128499): n is a or c or g or t.
  misc_feature (1128505)..(1128506): n is a or c or g or t.
  misc_feature (1128517)..(1128518): n is a or c or g or t.
  misc_feature (1128539)..(1128540): n is a or c or g or t.
  misc_feature (1561400)..(1561400): n is a or c or g or t.
  misc_feature (1561477)..(1561477): n is a or c or g or t.
  misc_feature (1561545)..(1561545): n is a or c or g or t.
  misc_feature (1767941)..(1767941): n is a or c or g or t.
MGRTARFLHLISNPLNSLKVNKLWVMAVITLTTDFGLRGPYVGEMNVAMLRINPNATIVDITHGITRHSIIEGSFVMEQVVKYSPKGTVHVGVIDPGVGTSRRAVIIQGEQWLVVPDNGLATLPLKHIRPRKAWAIEVEELRRFTGWEVSSTFHGRDVFGPAGALIDKGVSPEEFAVEVPLEDLVKLDVKPKNAGNEWLLKVIYVDDFGNVILNLEDYRRPREVELPDFGLRIPYLDTYGQVKPGELLALPGSHGYLEIAVNQGSAAERLGLKVGDEVRARLV

SEQ ID NO: 17 - protein, 197 aa, Thermococcus kodakaraensis KOD1
  misc_feature (414542)..(414542): n is a or c or g or t.
  misc_feature (786890)..(786890): n is a or c or g or t.
  misc_feature (786907)..(786907): n is a or c or g or t.
  misc_feature (786944)..(786946): n is a or c or g or t.
  misc_feature (839139)..(839139): n is a or c or g or t.
  misc_feature (1128488)..(1128488): n is a or c or g or t.
  misc_feature (1128499)..(1128499): n is a or c or g or t.
  misc_feature (1128505)..(1128506): n is a or c or g or t.
  misc_feature (1128517)..(1128518): n is a or c or g or t.
  misc_feature (1128539)..(1128540): n is a or c or g or t.
  misc_feature (1561400)..(1561400): n is a or c or g or t.
  misc_feature (1561477)..(1561477): n is a or c or g or t.
  misc_feature (1561545)..(1561545): n is a or c or g or t.
  misc_feature (1767941)..(1767941): n is a or c or g or t.
VVWAMEVIQMVKRGLFVGRFQPVHNGHIKALEFVFSQVDEVIIGIGSAQASHTLKNPFTTSERMEMLIRALEEAELTEKRYYLIPLPDINFNAIWATYVVSMVPRFDVVFTGNSLVAQLFREKGYEVIVQPMFRKDILSATEIRRRMVEGEPWEELVPRSVAEFIREIKGVERIKMLATNLESSEKELQAPIRIPEF

SEQ ID NO: 18 - protein, 282 aa, Thermococcus kodakaraensis KOD1
  misc_feature (414542)..(414542): n is a or c or g or t.
  misc_feature (786890)..(786890): n is a or c or g or t.
  misc_feature (786907)..(786907): n is a or c or g or t.
  misc_feature (786944)..(786946): n is a or c or g or t.
  misc_feature (839139)..(839139): n is a or c or g or t.
  misc_feature (1128488)..(1128488): n is a or c or g or t.
  misc_feature (1128499)..(1128499): n is a or c or g or t.
  misc_feature (1128505)..(1128506): n is a or c or g or t.
  misc_feature (1128517)..(1128518): n is a or c or g or t.
  misc_feature (1128539)..(1128540): n is a or c or g or t.
  misc_feature (1561400)..(1561400): n is a or c or g or t.
  misc_feature (1561477)..(1561477): n is a or c or g or t.
  misc_feature (1561545)..(1561545): n is a or c or g or t.
  misc_feature (1767941)..(1767941): n is a or c or g or t.
VFTPMRTQVIKPRIREILSKELPPELVSLLPKHWVQIGDVLILPLRPELEPYKRRIAEVYAQVIGAKAVLRKGHIHGETRKPDYELLYGNDTITVHVENGVKYKLDVARIMFSPANVKERVRMAEVAKPGELVVDMFAGIGHLSLPMTVHKGARVIAIEKDPYTFRFLVENIWLNGVQDLMTPYNMDNRDFPAENIADRILMGYVVTTHEFIPKALSIAKDEAIIHYHNTVPERLRPEEPFATFKRIAREHGYEAEKLKELVIKRYAPGVWHVVVDIGVYKR

SEQ ID NO: 19 - protein, 297 aa, Thermococcus kodakaraensis KOD1
  misc_feature (414542)..(414542): n is a or c or g or t.
  misc_feature (786890)..(786890): n is a or c or g or t.
  misc_feature (786907)..(786907): n is a or c or g or t.
  misc_feature (786944)..(786946): n is a or c or g or t.
  misc_feature (839139)..(839139): n is a or c or g or t.
  misc_feature (1128488)..(1128488): n is a or c or g or t.
  misc_feature (1128499)..(1128499): n is a or c or g or t.
  misc_feature (1128505)..(1128506): n is a or c or g or t.
  misc_feature (1128517)..(1128518): n is a or c or g or t.
  misc_feature (1128539)..(1128540): n is a or c or g or t.
  misc_feature (1561400)..(1561400): n is a or c or g or t.
  misc_feature (1561477)..(1561477): n is a or c or g or t.
  misc_feature (1561545)..(1561545): n is a or c or g or t.
  misc_feature (1767941)..(1767941): n is a or c or g or t.
MKLCSAKFLWWARGDSNPGPPPCEGSLNDCWDTYKGQFAEWLSHRIARTTMKDYISALERFFGRHTIRDIKGLKVSLQQENYNEKIVKGLRNFVNFLLDEGLINEGTAALFKKPLTFKRGTPRQVFISNEELREAYIELTKHYGKEAEVLFKLLAFTGLRLKHIVKMLNTYDPQKLVIVNEKVARYPMAEHGKGTKRAFWAYMPADFARSLERMSITYFQAQPRTTYKRVSASTVRKWFSTFLAQRKVSMEVIDFIQGRAPRSVLERHYLNLTVLADEAYAKVVDDLRKVLEGQTHD

SEQ ID NO: 20 - protein, 524 aa, Thermococcus kodakaraensis KOD1
  misc_feature (414542)..(414542): n is a or c or g or t.
  misc_feature (786890)..(786890): n is a or c or g or t.
  misc_feature (786907)..(786907): n is a or c or g or t.
  misc_feature (786944)..(786946): n is a or c or g or t.
  misc_feature (839139)..(839139): n is a or c or g or t.
  misc_feature (1128488)..(1128488): n is a or c or g or t.
  misc_feature (1128499)..(1128499): n is a or c or g or t.
  misc_feature (1128505)..(1128506): n is a or c or g or t.
  misc_feature (1128517)..(1128518): n is a or c or g or t.
  misc_feature (1128539)..(1128540): n is a or c or g or t.
  misc_feature (1561400)..(1561400): n is a or c or g or t.
  misc_feature (1561477)..(1561477): n is a or c or g or t.
  misc_feature (1561545)..(1561545): n is a or c or g or t.
  misc_feature (1767941)..(1767941): n is a or c or g or t.
MRALPVISIIFIMLLSTLSVAVADSSSNETISTPALEMPSLTISDYVNKALIAFKAWRFDSKGLIKTNTGIYVDERFWDWLSGSIQESANLTDAALKWAQVFHQKVQNDEPIQWIFITWTKPNDRLKEALEALGAEVLYVDDDINAISLKARPSLIKNLVYSQAFDFDYRFYIREVWPDLYVETGPTILENETTFTPANVTITPEQVSGAIWNIKLVKADLAWSKEGITGKGVTVAVLDTGVDCDHVMLQGACVGFENFVTDEPAKDLNGHGTHVAGIIAGRPTKVTWEGKEVYVSGVAPEANILAVKVLGQDGGGTMTQIIQGLDYVVEWKKKHPGEPIVISMSLGSPFGSPRDPMVQKVEQIIREEHIPVVIAAGNEFAVIDSPGIATGAITVAAVDRNMKVASFSGKGPGLNIYDIKPDIAAPGVKILSAKAGTRNEFIAMSGTSMATPHVSGVVALILQKHGDLTPETIKLILEKTAYPLDGIDALPTWSGAGVVDAYAAVKAEPSESGGLIDFLRRLLG

SEQ ID NO: 21 - protein, 70 aa, Thermococcus kodakaraensis KOD1
  misc_feature (414542)..(414542): n is a or c or g or t.
  misc_feature (786890)..(786890): n is a or c or g or t.
  misc_feature (786907)..(786907): n is a or c or g or t.
  misc_feature (786944)..(786946): n is a or c or g or t.
  misc_feature (839139)..(839139): n is a or c or g or t.
  misc_feature (1128488)..(1128488): n is a or c or g or t.
  misc_feature (1128499)..(1128499): n is a or c or g or t.
  misc_feature (1128505)..(1128506): n is a or c or g or t.
  misc_feature (1128517)..(1128518): n is a or c or g or t.
  misc_feature (1128539)..(1128540): n is a or c or g or t.
  misc_feature (1561400)..(1561400): n is a or c or g or t.
  misc_feature (1561477)..(1561477): n is a or c or g or t.
  misc_feature (1561545)..(1561545): n is a or c or g or t.
  misc_feature (1767941)..(1767941): n is a or c or g or t.
MIGDWLGIRLWTALFLFLTTLGGYVFGNWGKAIVFLVLALIILYALGLLGPIASGDLSAIKDAVQVGGGK

SEQ ID NO: 22 - protein, 202 aa, Thermococcus kodakaraensis KOD1
  misc_feature (414542)..(414542): n is a or c or g or t.
  misc_feature (786890)..(786890): n is a or c or g or t.
  misc_feature (786907)..(786907): n is a or c or g or t.
  misc_feature (786944)..(786946): n is a or c or g or t.
  misc_feature (839139)..(839139): n is a or c or g or t.
  misc_feature (1128488)..(1128488): n is a or c or g or t.
  misc_feature (1128499)..(1128499): n is a or c or g or t.
  misc_feature (1128505)..(1128506): n is a or c or g or t.
  misc_feature (1128517)..(1128518): n is a or c or g or t.
  misc_feature (1128539)..(1128540): n is a or c or g or t.
  misc_feature (1561400)..(1561400): n is a or c or g or t.
  misc_feature (1561477)..(1561477): n is a or c or g or t.
  misc_feature (1561545)..(1561545): n is a or c or g or t.
  misc_feature (1767941)..(1767941): n is a or c or g or t.
VIEVRKKVVAVAVLFLVVMAGPVGAWSLKDLLKSTADKALGLFKREVMPVDGYKGLKPGEGFWIEGEHFWNPDYYVQLNESKVYWSYLIPTDVDVKVRVWKVYFGIFAFPVENDQYADIWWKKAPVGDGWIGAFFVRGFSWRPGRGWRDAEKAYIAYNLPSAQDMSVENTTALQNTTIQLPIKVENVTFRHLIGGLYLVKRG

SEQ ID NO: 23 - protein, 435 aa, Thermococcus kodakaraensis KOD1
  misc_feature (414542)..(414542): n is a or c or g or t.
  misc_feature (786890)..(786890): n is a or c or g or t.
  misc_feature (786907)..(786907): n is a or c or g or t.
  misc_feature (786944)..(786946): n is a or c or g or t.
  misc_feature (839139)..(839139): n is a or c or g or t.
  misc_feature (1128488)..(1128488): n is a or c or g or t.
  misc_feature (1128499)..(1128499): n is a or c or g or t.
  misc_feature (1128505)..(1128506): n is a or c or g or t.
  misc_feature (1128517)..(1128518): n is a or c or g or t.
  misc_feature (1128539)..(1128540): n is a or c or g or t.
  misc_feature (1561400)..(1561400): n is a or c or g or t.
  misc_feature (1561477)..(1561477): n is a or c or g or t.
  misc_feature (1561545)..(1561545): n is a or c or g or t.
  misc_feature (1767941)..(1767941): n is a or c or g or t.
MRANLEEIWPRDVLEEDLQRYEEKTSYSENPLLTFGLTKRGKLAYPLSGPSHRLIMGQTGAGKTTLAQTLMEIDFLRGRKVFEIEPALEAKSERAFMNLPNNDSRMRRVLLEKFGIDIEDLNEWPFRAVVYSPATPRFINFLQKYENHPGIEFFKPLTFTEADLIDIIARTLPTGSIEGLIVADAYDQYVNTVKKRKKRNIEEFKNYVKEIGEGTNVNIDNTLMKINRFYHVLKGLEVENGVTLNEMMKNPKEISVFTTHFIERPEDRYIWTFAILVTVYSNWIGNLKRDYLMSFFVADANLLAPSSPRDIIEKLSYFQTLMRQELQIYVKISRGKNMAWTLDTQRHDDLSPSIVSECKEWFVKRMYAREFAQKLGVEPRLLRTLSIEKAIYVGPLTKYKVLLRPPISRKAAAGEYAPIHFLDAYEGWENEEANF

SEQ ID NO: 24 - protein, 65 aa, Thermococcus kodakaraensis KOD1
  misc_feature (414542)..(414542): n is a or c or g or t.
  misc_feature (786890)..(786890): n is a or c or g or t.
  misc_feature (786907)..(786907): n is a or c or g or t.
  misc_feature (786944)..(786946): n is a or c or g or t.
  misc_feature (839139)..(839139): n is a or c or g or t.
  misc_feature (1128488)..(1128488): n is a or c or g or t.
  misc_feature (1128499)..(1128499): n is a or c or g or t.
  misc_feature (1128505)..(1128506): n is a or c or g or t.
  misc_feature (1128517)..(1128518): n is a or c or g or t.
  misc_feature (1128539)..(1128540): n is a or c or g or t.
  misc_feature (1561400)..(1561400): n is a or c or g or t.
  misc_feature (1561477)..(1561477): n is a or c or g or t.
  misc_feature (1561545)..(1561545): n is a or c or g or t.
  misc_feature (1767941)..(1767941): n is a or c or g or t.
MTKILVFTRYPHEKVWVYSGDCFDASEVDKVCEILRNVVKEGKLHVKIETWPDKEVRDLCRRGRS

SEQ ID NO: 25 - protein, 119 aa, Thermococcus kodakaraensis KOD1
  misc_feature (414542)..(414542): n is a or c or g or t.
  misc_feature (786890)..(786890): n is a or c or g or t.
  misc_feature (786907)..(786907): n is a or c or g or t.
  misc_feature (786944)..(786946): n is a or c or g or t.
  misc_feature (839139)..(839139): n is a or c or g or t.
  misc_feature (1128488)..(1128488): n is a or c or g or t.
  misc_feature (1128499)..(1128499): n is a or c or g or t.
  misc_feature (1128505)..(1128506): n is a or c or g or t.
  misc_feature (1128517)..(1128518): n is a or c or g or t.
  misc_feature (1128539)..(1128540): n is a or c or g or t.
  misc_feature (1561400)..(1561400): n is a or c or g or t.
  misc_feature (1561477)..(1561477): n is a or c or g or t.
  misc_feature (1561545)..(1561545): n is a or c or g or t.
  misc_feature (1767941)..(1767941): n is a or c or g or t.
MNSREVWVKLGEGGLHAHKTNVYAVVRKLKRGGYSFRIVERGFNGYTVSTKTERYESLEALFAEVSPRDLYRALQNHPEPDAKEVWAEELELLKKLLEKPAEKKTITPTRQATLAEVLS

SEQ ID NO: 26 - protein, 150 aa, Thermococcus kodakaraensis KOD1
  misc_feature (414542)..(414542): n is a or c or g or t.
  misc_feature (786890)..(786890): n is a or c or g or t.
  misc_feature (786907)..(786907): n is a or c or g or t.
  misc_feature (786944)..(786946): n is a or c or g or t.
  misc_feature (839139)..(839139): n is a or c or g or t.
  misc_feature (1128488)..(1128488): n is a or c or g or t.
  misc_feature (1128499)..(1128499): n is a or c or g or t.
  misc_feature (1128505)..(1128506): n is a or c or g or t.
  misc_feature (1128517)..(1128518): n is a or c or g or t.
  misc_feature (1128539)..(1128540): n is a or c or g or t.
  misc_feature (1561400)..(1561400): n is a or c or g or t.
  misc_feature (1561477)..(1561477): n is a or c or g or t.
  misc_feature (1561545)..(1561545): n is a or c or g or t.
  misc_feature (1767941)..(1767941): n is a or c or g or t.
VVDVEVTKREEEYLETMYILHKNKGVIRVKDIAKALNVRPPSVVDALKKLAEKGLIEYEKYDRILLTEKGREIAENTYSKHVFLTKFFTDILGIPPEIAEQDACQFEHYVSEITVKRMREFAEFIQEQCPYVLKQFLKEKLEEAEPEEGA

SEQ ID NO: 27 - protein, 62 aa, Thermococcus kodakaraensis KOD1
  misc_feature (414542)..(414542): n is a or c or g or t.
  misc_feature (786890)..(786890): n is a or c or g or t.
  misc_feature (786907)..(786907): n is a or c or g or t.
  misc_feature (786944)..(786946): n is a or c or g or t.
  misc_feature (839139)..(839139): n is a or c or g or t.
  misc_feature (1128488)..(1128488): n is a or c or g or t.
  misc_feature (1128499)..(1128499): n is a or c or g or t.
  misc_feature (1128505)..(1128506): n is a or c or g or t.
  misc_feature (1128517)..(1128518): n is a or c or g or t.
  misc_feature (1128539)..(1128540): n is a or c or g or t.
  misc_feature (1561400)..(1561400): n is a or c or g or t.
  misc_feature (1561477)..(1561477): n is a or c or g or t.
  misc_feature (1561545)..(1561545): n is a or c or g or t.
  misc_feature (1767941)..(1767941): n is a or c or g or t.
VFAVEMKFEVPVCTSCGKEITPREHATHFVCPNCGEAIIWRCESCRVLSVPYKCPKCGWEGP

SEQ ID NO: 28 - protein, 538 aa, Thermococcus kodakaraensis KOD1
  misc_feature (414542)..(414542): n is a or c or g or t.
  misc_feature (786890)..(786890): n is a or c or g or t.
  misc_feature (786907)..(786907): n is a or c or g or t.
  misc_feature (786944)..(786946): n is a or c or g or t.
  misc_feature (839139)..(839139): n is a or c or g or t.
  misc_feature (1128488)..(1128488): n is a or c or g or t.
  misc_feature (1128499)..(1128499): n is a or c or g or t.
  misc_feature (1128505)..(1128506): n is a or c or g or t.
  misc_feature (1128517)..(1128518): n is a or c or g or t.
  misc_feature (1128539)..(1128540): n is a or c or g or t.
  misc_feature (1561400)..(1561400): n is a or c or g or t.
  misc_feature (1561477)..(1561477): n is a or c or g or t.
  misc_feature (1561545)..(1561545): n is a or c or g or t.
  misc_feature (1767941)..(1767941): n is a or c or g or t.
MNAGVLFGFLIYLALLAYIGWWANRYTKTEDQYFVGGRKVHVLAATLSDKASDFSGWLMLGYPGSAFKAGLGAFWAGIGCLFGTLADYVLIGPRLRIYAGKFRAITVPDYLEARLKDDTKLIRILSALIIIIFMTAYVAAQFAAGGKTFAEGFDVSVNTGIIITVIILTAYVITGGFFAVVWTDVVQALFMLLTLVIVPFLALAKIGGLDKATEIIASADPNKLHPFGGATGWAAIIFAIGYASWIVGYLGQPHIVTRYMSVEDPRKLRRPGIFISGIWTTIVLWGAFFAGFLGFALYQAGMLNVSDPERVVPAMAVELMPSWIAGFVIAGIISAVMSTADSQLLVASSAIARDFYHKVLGKELGKKQMVNISRVVVAVVALVGLWFAITGPKVIYQMVATAWGGLAVGFGPILTLSLWWKRVTKEGGIVGMAYGLVSEVIFEAKIYGWAFNPDAPGFFGTLGSWFNGVPVFFINFFITLFVIIIVSLLTKPPGDIVKLHEELFRKVPVEGGKRTVMETRAKSQVENVADFLIEKGLA

SEQ ID NO: 29 - protein, 386 aa, Thermococcus kodakaraensis KOD1
  misc_feature (414542)..(414542): n is a or c or g or t.
  misc_feature (786890)..(786890): n is a or c or g or t.
  misc_feature (786907)..(786907): n is a or c or g or t.
  misc_feature (786944)..(786946): n is a or c or g or t.
  misc_feature (839139)..(839139): n is a or c or g or t.
  misc_feature (1128488)..(1128488): n is a or c or g or t.
  misc_feature (1128499)..(1128499): n is a or c or g or t.
  misc_feature (1128505)..(1128506): n is a or c or g or t.
  misc_feature (1128517)..(1128518): n is a or c or g or t.
  misc_feature (1128539)..(1128540): n is a or c or g or t.
  misc_feature (1561400)..(1561400): n is a or c or g or t.
  misc_feature (1561477)..(1561477): n is a or c or g or t.
  misc_feature (1561545)..(1561545): n is a or c or g or t.
  misc_feature (1767941)..(1767941): n is a or c or g or t.
MPTRELPEKSEITIIGGGIVGVTIAHELAKRGEEVTVIEKRFIGSGSTFRCGTGIRQQFNDEANVQVMKRSVELWKKYSEEYGFPFQQTGYLFLLYDDEEVETFKRNIAIQNKFGVPTRLITPEEAKEIVPLLDISEVVAASWNPTDGKASPFHSTAKFALHAEEFGAKLVEYTEVKDFIIENGEIKGLKTSRGTIKTGIVVNATNAWAKLINAMAGIRTKIPIEPYKHQAVITQPIKKGSVKPMVISFRYGHAYLTQTSHGGIIGGVGYEEGPTYDLNPTYEFLREVSYYFTKIIPALRELLILRTWAGYYAKTPDSNPAIGKIEELSDYYIAAGFSGHGFMMAPAVAEMVADLITKGKTDLPAWWYDPYRFERGELRGKALQMG

SEQ ID NO: 30 - protein, 567 aa, Thermococcus kodakaraensis KOD1
  misc_feature (414542)..(414542): n is a or c or g or t.
  misc_feature (786890)..(786890): n is a or c or g or t.
  misc_feature (786907)..(786907): n is a or c or g or t.
  misc_feature (786944)..(786946): n is a or c or g or t.
  misc_feature (839139)..(839139): n is a or c or g or t.
  misc_feature (1128488)..(1128488): n is a or c or g or t.
  misc_feature (1128499)..(1128499): n is a or c or g or t.
  misc_feature (1128505)..(1128506): n is a or c or g or t.
  misc_feature (1128517)..(1128518): n is a or c or g or t.
  misc_feature (1128539)..(1128540): n is a or c or g or t.
  misc_feature (1561400)..(1561400): n is a or c or g or t.
  misc_feature (1561477)..(1561477): n is a or c or g or t.
  misc_feature (1561545)..(1561545): n is a or c or g or t.
  misc_feature (1767941)..(1767941): n is a or c or g or t.
MYLKKRHIEILREMKNTESQAEIEAKLPEDFQIRAIELYILGFAELEGGKIKLTDAGRKLLEITDKLSLEELPDVIADTEIIKMMELLEETGKIPESWMEKLRERKLADENGLTPFGKALLEVYRETHPVVYLTPEIASFLRGMPKIGTLDELVTYKNSKLYGDNIVNALQAMRLLLISPPTEKGRAFATTPAAKLALKALNMIPVFARAIVLRKEDFEMLKAGKRNAELESMGLADEKGTTEFGKAIMDTYEAMGRVEEKVLPMYLLEDELSVLKAIQEIEKKYETNPDILPTEKEIERRVDVKDLGAILHLLESKELIERRLVKEKDTYWLTEWGKEAINFGTVSPDAMKAVTYAESGDVPIAEWVLKAQEENVVKAGVTDKGRFYLRLSREIKRKPFITRYDAAILAKTPRKKYIHRDELVALVQDYVGGDEKEIIRAIGEAEAKGFVVELQNGMVKLTELGDKVKTAIENAKLQEIVKVKFSVTPTLYNVLKVIYDNIETFNRIWKEKGEARDYKMEEVDAIRKHLSLSDDEIKKALTMLRELGFLGTKSLTEAGKVLVEAYL

SEQ ID NO: 31 - protein, 189 aa, Thermococcus kodakaraensis KOD1
  misc_feature (414542)..(414542): n is a or c or g or t.
  misc_feature (786890)..(786890): n is a or c or g or t.
  misc_feature (786907)..(786907): n is a or c or g or t.
  misc_feature (786944)..(786946): n is a or c or g or t.
  misc_feature (839139)..(839139): n is a or c or g or t.
  misc_feature (1128488)..(1128488): n is a or c or g or t.
  misc_feature (1128499)..(1128499): n is a or c or g or t.
  misc_feature (1128505)..(1128506): n is a or c or g or t.
  misc_feature (1128517)..(1128518): n is a or c or g or t.
  misc_feature (1128539)..(1128540): n is a or c or g or t.
  misc_feature (1561400)..(1561400): n is a or c or g or t.
  misc_feature (1561477)..(1561477): n is a or c or g or t.
  misc_feature (1561545)..(1561545): n is a or c or g or t.
  misc_feature (1767941)..(1767941): n is a or c or g or t.
VDMSNVKLRIENIVASVDLFTDLNLEKVIEICPSSKYNPEEFPGIICRFDDPKVALLIFSSGKLVVTGAKSVDDIKRAVYKLIEMLKKIGAKFTREPQIDIQNMVFSGDIGMEFNLDAVALILPNCEYEPEQFPGVIYRVKEPRAVILLFSSGKIVCSGAKSEQDAWEAVKKLLRELEKYGLIEEEEEW

SEQ ID NO: 32 - protein, 206 aa, Thermococcus kodakaraensis KOD1
  misc_feature (414542)..(414542): n is a or c or g or t.
  misc_feature (786890)..(786890): n is a or c or g or t.
  misc_feature (786907)..(786907): n is a or c or g or t.
  misc_feature (786944)..(786946): n is a or c or g or t.
  misc_feature (839139)..(839139): n is a or c or g or t.
  misc_feature (1128488)..(1128488): n is a or c or g or t.
  misc_feature (1128499)..(1128499): n is a or c or g or t.
  misc_feature (1128505)..(1128506): n is a or c or g or t.
  misc_feature (1128517)..(1128518): n is a or c or g or t.
  misc_feature (1128539)..(1128540): n is a or c or g or t.
  misc_feature (1561400)..(1561400): n is a or c or g or t.
  misc_feature (1561477)..(1561477): n is a or c or g or t.
  misc_feature (1561545)..(1561545): n is a or c or g or t.
  misc_feature (1767941)..(1767941): n is a or c or g or t.
MFPRWYLMNTQVLEWLRAGNDDAEDIVDLPWNVRQVGENHYVAEHPKIPFLLNVIFMDGFVRLAVPSGIETIAMRLEEKVKVYHTLLILNERMNLLKFTLSGMNDEVTLRVDLDEKSLGKDEFNDALTALLVGMNVLMDSLGLTQEFQEIVFERLALMVFERMQNGASEREIIEFLTKKVGMSKEDAEALLAELKKAVREDERGYI

SEQ ID NO: 33 - protein, 78 aa, Thermococcus kodakaraensis KOD1
  misc_feature (414542)..(414542): n is a or c or g or t.
  misc_feature (786890)..(786890): n is a or c or g or t.
  misc_feature (786907)..(786907): n is a or c or g or t.
  misc_feature (786944)..(786946): n is a or c or g or t.
  misc_feature (839139)..(839139): n is a or c or g or t.
  misc_feature (1128488)..(1128488): n is a or c or g or t.
  misc_feature (1128499)..(1128499): n is a or c or g or t.
  misc_feature (1128505)..(1128506): n is a or c or g or t.
  misc_feature (1128517)..(1128518): n is a or c or g or t.
  misc_feature (1128539)..(1128540): n is a or c or g or t.
  misc_feature (1561400)..(1561400): n is a or c or g or t.
  misc_feature (1561477)..(1561477): n is a or c or g or t.
  misc_feature (1561545)..(1561545): n is a or c or g or t.
  misc_feature (1767941)..(1767941): n is a or c or g or t.
VSDMRTLGYIFIFLGLLLLLKEFQPAVLEPLRVYAPYIKNAFWGVTLLALGLYMLTRKTLRKAVLVLYIIYLILYLVV

SEQ ID NO: 34 - protein, 308 aa, Thermococcus kodakaraensis KOD1
  misc_feature (414542)..(414542): n is a or c or g or t.
  misc_feature (786890)..(786890): n is a or c or g or t.
  misc_feature (786907)..(786907): n is a or c or g or t.
  misc_feature (786944)..(786946): n is a or c or g or t.
  misc_feature (839139)..(839139): n is a or c or g or t.
  misc_feature (1128488)..(1128488): n is a or c or g or t.
  misc_feature (1128499)..(1128499): n is a or c or g or t.
  misc_feature (1128505)..(1128506): n is a or c or g or t.
  misc_feature (1128517)..(1128518): n is a or c or g or t.
  misc_feature (1128539)..(1128540): n is a or c or g or t.
  misc_feature (1561400)..(1561400): n is a or c or g or t.
  misc_feature (1561477)..(1561477): n is a or c or g or t.
  misc_feature (1561545)..(1561545): n is a or c or g or t.
  misc_feature (1767941)..(1767941): n is a or c or g or t.
MERWNIVRAFLLGPLLEAALPKPGNVNRYRDFSDLTLYNFIFANTAVVSVYHEAVRTAELVRRGELFPSEAGIGSLIKRAVIASKEVQDANPNFGVLVLGIPLAMGSSLSKNPLEAGEKARELIRASTVRDTMELYRAIRTANPKGIPGGVKYDVYSDDSFEELFRDGINLWKLAEISCERELVFCEWLTGYELTYSTAERLFQLIKEYPLEDAAVRAFLELLASREDTLIVRKAGKEEAELVLEKAREVLEGRLSVDEFDAFLREKGDLRNPGSLADIMAASLSVLALAGLKIKVVDGKAWGIMGQP

SEQ ID NO: 35 - protein, 381 aa, Thermococcus kodakaraensis KOD1
  misc_feature (414542)..(414542): n is a or c or g or t.
  misc_feature (786890)..(786890): n is a or c or g or t.
  misc_feature (786907)..(786907): n is a or c or g or t.
  misc_feature (786944)..(786946): n is a or c or g or t.
  misc_feature (839139)..(839139): n is a or c or g or t.
  misc_feature (1128488)..(1128488): n is a or c or g or t.
  misc_feature (1128499)..(1128499): n is a or c or g or t.
  misc_feature (1128505)..(1128506): n is a or c or g or t.
  misc_feature (1128517)..(1128518): n is a or c or g or t.
  misc_feature (1128539)..(1128540): n is a or c or g or t.
  misc_feature (1561400)..(1561400): n is a or c or g or t.
  misc_feature (1561477)..(1561477): n is a or c or g or t.
  misc_feature (1561545)..(1561545): n is a or c or g or t.
  misc_feature (1767941)..(1767941): n is a or c or g or t.
MTASAFGLMPITRFFGFISVDWARLLRSGGLLIPVTPMKAPDLGIRIGLHEPGKRNSIADLGVKVGHTTLIEGDDVRTGVTVVLPPVKNPFRERLFASTFVMNGFSKPIGFVQVDELGYIETPVALTNTLSVYTVASAVVRHMIDLNPDLKSVSPVVMECNDSYLNNIRKMAVKEDHYFEAVKNASLDFEEGAVGAGTGMSAFEFKGGIGSSSRVVEIGGEEYKVASLVLANFGRREDLTIAGVPVGELLKDYPGRGTSGKGSISMVVATDAPLTARQLKRLAKRAVVGLARTGGYAYHGSGDIVLAFSTAQTVPIGKEPELVSFLPDNALSYLFRATAEATEEAIINALLQAKTVEGNGHVRYALPVERVLETLKKNRAS

SEQ ID NO: 36 - protein, 413 aa, Thermococcus kodakaraensis KOD1
  misc_feature (414542)..(414542): n is a or c or g or t.
  misc_feature (786890)..(786890): n is a or c or g or t.
  misc_feature (786907)..(786907): n is a or c or g or t.
  misc_feature (786944)..(786946): n is a or c or g or t.
  misc_feature (839139)..(839139): n is a or c or g or t.
  misc_feature (1128488)..(1128488): n is a or c or g or t.
  misc_feature (1128499)..(1128499): n is a or c or g or t.
  misc_feature (1128505)..(1128506): n is a or c or g or t.
  misc_feature (1128517)..(1128518): n is a or c or g or t.
  misc_feature (1128539)..(1128540): n is a or c or g or t.
  misc_feature (1561400)..(1561400): n is a or c or g or t.
  misc_feature (1561477)..(1561477): n is a or c or g or t.
  misc_feature (1561545)..(1561545): n is a or c or g or t.
  misc_feature (1767941)..(1767941): n is a or c or g or t.
MIKKAVIPIGGDATRLRPLTIETSKGLVRLLNKPILEHSILSLAKDGIEEVYLGVRGYVNYTTLFDYFREGYWLQKKYGLEKEIRIRYMPRYESTTNGDAVWYTMEYYGIKEPVVVIQGDNIYQLNIQDMYKWHRKKNAFMTIALQPVEDVTGFGVAKIDDDYRIEYFVEKPRPEQAPSNLANTGIYILSENFWEFLNEGWAKEMKETRRLDFGGDIIPALIEHGYEVYGYPMEGYWFDVGTPERYLNAAMYLLRHLSPEDMEAVEITHDVYMQGKSEMSEDLRRKFREMIKTGKLIVEGKVLLGRHISIGKGTALEDAVIDNYTIVGRNCEILHSVVMDRVKLGDNVRIVNSIIGRHVEIGNNVRIVNSVIGDNAVIEDNVRMYNVKIWPHEFVERGATLEHYTVRTGVPRR

SEQ ID NO: 37 - protein, 137 aa, Thermococcus kodakaraensis KOD1
  misc_feature (414542)..(414542): n is a or c or g or t.
  misc_feature (786890)..(786890): n is a or c or g or t.
  misc_feature (786907)..(786907): n is a or c or g or t.
  misc_feature (786944)..(786946): n is a or c or g or t.
  misc_feature (839139)..(839139): n is a or c or g or t.
  misc_feature (1128488)..(1128488): n is a or c or g or t.
  misc_feature (1128499)..(1128499): n is a or c or g or t.
  misc_feature (1128505)..(1128506): n is a or c or g or t.
  misc_feature (1128517)..(1128518): n is a or c or g or t.
  misc_feature (1128539)..(1128540): n is a or c or g or t.
  misc_feature (1561400)..(1561400): n is a or c or g or t.
  misc_feature (1561477)..(1561477): n is a or c or g or t.
  misc_feature (1561545)..(1561545): n is a or c or g or t.
  misc_feature (1767941)..(1767941): n is a or c or g or t.
MHYEEVEVLLQRSEDYMELADSAFDEEKYDAAIFLTEQAIQFYLKALLIKYADVRLRTHSVRELLAALGKALEAEEKVADFIRSHRSLLRELEDAYIGARYEPRRYYREDAEELMEFVREVRDFVEGLADEFERKSH

SEQ ID NO: 38 - protein, 148 aa, Thermococcus kodakaraensis KOD1
  misc_feature (414542)..(414542): n is a or c or g or t.
  misc_feature (786890)..(786890): n is a or c or g or t.
  misc_feature (786907)..(786907): n is a or c or g or t.
  misc_feature (786944)..(786946): n is a or c or g or t.
  misc_feature (839139)..(839139): n is a or c or g or t.
  misc_feature (1128488)..(1128488): n is a or c or g or t.
  misc_feature (1128499)..(1128499): n is a or c or g or t.
  misc_feature (1128505)..(1128506): n is a or c or g or t.
  misc_feature (1128517)..(1128518): n is a or c or g or t.
  misc_feature (1128539)..(1128540): n is a or c or g or t.
  misc_feature (1561400)..(1561400): n is a or c or g or t.
  misc_feature (1561477)..(1561477): n is a or c or g or t.
  misc_feature (1561545)..(1561545): n is a or c or g or t.
  misc_feature (1767941)..(1767941): n is a or c or g or t.
MPDEDLAREVQELREALETLRKSFEIVSQMAQSYLRLLNLYAEYGGLSIDVVIPEIKHDPIAREIVKILFDLRRANVSQIARELKGRRGKASRNTVRAKLEELEELGVVREVSSEDNRGRIYTLSRDVVRKWLELIGMPIRFEHANDY

SEQ ID NO: 39 - protein, 102 aa, Thermococcus kodakaraensis KOD1
  misc_feature (414542)..(414542): n is a or c or g or t.
  misc_feature (786890)..(786890): n is a or c or g or t.
  misc_feature (786907)..(786907): n is a or c or g or t.
  misc_feature (786944)..(786946): n is a or c or g or t.
  misc_feature (839139)..(839139): n is a or c or g or t.
  misc_feature (1128488)..(1128488): n is a or c or g or t.
  misc_feature (1128499)..(1128499): n is a or c or g or t.
  misc_feature (1128505)..(1128506): n is a or c or g or t.
  misc_feature (1128517)..(1128518): n is a or c or g or t.
  misc_feature (1128539)..(1128540): n is a or c or g or t.
  misc_feature (1561400)..(1561400): n is a or c or g or t.
  misc_feature (1561477)..(1561477): n is a or c or g or t.
  misc_feature (1561545)..(1561545): n is a or c or g or t.
  misc_feature (1767941)..(1767941): n is a or c or g or t.
VTTNVGLEAESLAKTVAIINRGRIIAKGNPEELKGETYKHKLIFTDDVQIKGAIKFGDKKILYFNEFDEIHEILRKLNSYSIQPTDLEDVFIAFLEGERNES

SEQ ID NO: 40 - protein, 223 aa, Thermococcus kodakaraensis KOD1
  misc_feature (414542)..(414542): n is a or c or g or t.
  misc_feature (786890)..(786890): n is a or c or g or t.
  misc_feature (786907)..(786907): n is a or c or g or t.
  misc_feature (786944)..(786946): n is a or c or g or t.
  misc_feature (839139)..(839139): n is a or c or g or t.
  misc_feature (1128488)..(1128488): n is a or c or g or t.
  misc_feature (1128499)..(1128499): n is a or c or g or t.
  misc_feature (1128505)..(1128506): n is a or c or g or t.
  misc_feature (1128517)..(1128518): n is a or c or g or t.
  misc_feature (1128539)..(1128540): n is a or c or g or t.
  misc_feature (1561400)..(1561400): n is a or c or g or t.
  misc_feature (1561477)..(1561477): n is a or c or g or t.
  misc_feature (1561545)..(1561545): n is a or c or g or t.
  misc_feature (1767941)..(1767941): n is a or c or g or t.
MRVALIPMQVEDGNFGANWREFKRRFNEALEHRPDFIVFPEYCLTGFREWDFSGAELYDEITARVSELARKNNVYVVFGLLEPYKNCVYNSALLIGRNGEVLLKHRKFQEPYKFCTGNTVRTARTEFGKVAIIICGDLYNRRIAKWVRRKRPDFLFVPMEYSPEYGEPNEEDIAAMSERVGLLGVKTFIVNSFPPGGAWVFDGDGTLIGESRGEELLLWEGQP

SEQ ID NO: 41 - protein, 203 aa, Thermococcus kodakaraensis KOD1
  misc_feature (414542)..(414542): n is a or c or g or t.
  misc_feature (786890)..(786890): n is a or c or g or t.
  misc_feature (786907)..(786907): n is a or c or g or t.
  misc_feature (786944)..(786946): n is a or c or g or t.
  misc_feature (839139)..(839139): n is a or c or g or t.
  misc_feature (1128488)..(1128488): n is a or c or g or t.
  misc_feature (1128499)..(1128499): n is a or c or g or t.
  misc_feature (1128505)..(1128506): n is a or c or g or t.
  misc_feature (1128517)..(1128518): n is a or c or g or t.
  misc_feature (1128539)..(1128540): n is a or c or g or t.
  misc_feature (1561400)..(1561400): n is a or c or g or t.
  misc_feature (1561477)..(1561477): n is a or c or g or t.
  misc_feature (1561545)..(1561545): n is a or c or g or t.
  misc_feature (1767941)..(1767941): n is a or c or g or t.
MRFVLPKGRLLKPSIEFLRKAGVELELPNGRELVSADGRVLLARAFDVPVYVEHGVEVGIAGSDVVLERGSDVFIPLELPFGKCRISVAVPGERKRYPEDMDCFRIATKYPRIASSYFDSIGVDVEVMKLHGSVELSVRTGIADAIVDIVETGQTLRENGLVEVAKVMDVSALLLVNRIAQKVLFDEINELVMKLRGVLDEGA

SEQ ID NO: 42 - protein, 336 aa, Thermococcus kodakaraensis KOD1
  misc_feature (414542)..(414542): n is a or c or g or t.
  misc_feature (786890)..(786890): n is a or c or g or t.
  misc_feature (786907)..(786907): n is a or c or g or t.
  misc_feature (786944)..(786946): n is a or c or g or t.
  misc_feature (839139)..(839139): n is a or c or g or t.
  misc_feature (1128488)..(1128488): n is a or c or g or t.
  misc_feature (1128499)..(1128499): n is a or c or g or t.
  misc_feature (1128505)..(1128506): n is a or c or g or t.
  misc_feature (1128517)..(1128518): n is a or c or g or t.
  misc_feature (1128539)..(1128540): n is a or c or g or t.
  misc_feature (1561400)..(1561400): n is a or c or g or t.
  misc_feature (1561477)..(1561477): n is a or c or g or t.
  misc_feature (1561545)..(1561545): n is a or c or g or t.
  misc_feature (1767941)..(1767941): n is a or c or g or t.
MIRNEVKAFKPYRVIEGNYRIWLDKNESPYDLPEELKEEIFEELKSVPFNRYPHITSMPAREAIGEFYGLPAENVAVGKGGDELIGYLVRLFEGDYIVTTPPTFGMYSFYARLNGIPVIEVPLREDFTIDGDTIAEKAKKASAVFIASPNNPTGNLQPVEEVLKVLETGKAVVVDEAYVEFAGKDLLGLLDEYPNLVLLRTFSKAFSLAGARVGYALASEEIIEALYRIKSPFSVDIFAQAVVKVVLRHPGLFRERIREIVRERERVRRSLGELAYPSDANFLLVKADAHSFLLERGIVVRKLSGRLKGHIRVTIGRRENDAFLKAMEEWKDVAGL

SEQ ID NO: 43 - protein, 433 aa, Thermococcus kodakaraensis KOD1
  misc_feature (414542)..(414542): n is a or c or g or t.
  misc_feature (786890)..(786890): n is a or c or g or t.
  misc_feature (786907)..(786907): n is a or c or g or t.
  misc_feature (786944)..(786946): n is a or c or g or t.
  misc_feature (839139)..(839139): n is a or c or g or t.
  misc_feature (1128488)..(1128488): n is a or c or g or t.
  misc_feature (1128499)..(1128499): n is a or c or g or t.
  misc_feature (1128505)..(1128506): n is a or c or g or t.
  misc_feature (1128517)..(1128518): n is a or c or g or t.
  misc_feature (1128539)..(1128540): n is a or c or g or t.
  misc_feature (1561400)..(1561400): n is a or c or g or t.
  misc_feature (1561477)..(1561477): n is a or c or g or t.
  misc_feature (1561545)..(1561545): n is a or c or g or t.
  misc_feature (1767941)..(1767941): n is a or c or g or t.
MPLKKLKPVDPLKLYSALRDFGMPFMLRSAEKDSRKARFTYISAEPEFVVEVGEGTEIDGERVSDERNPLRALKGLMGERVEGRRFMGGFVGYVSYDSVHSIIGGKIEEPSVFGYYPWTFIYDHSTGALSFFYLREAPFDPEALVERARREESRLEDGGSEVISTDAGMEEFVEIVRAGKEYIYSGDVFQVVLSREYRVRTDLDALEIYKRLVELNPSPYTFILEFEKTVVGASPETMGSVEGRTFKINPIAGTAPRGRTGEEDRELEKALLSDEKERAEHVMLVDLARNDVRRVSKPGSVRLTRFFDVLKYSHVQHIESEVVGELDEGKNAFDAMEAAFPAGTLTGAPKIRAMEIIDELERSRRKVYGGAVGYFSLTGDADMAIAIRMAEIEGRKASVRAGAGIVADSVPEKEFFETENKMRAVLKALGVRE

SEQ ID NO: 44 - protein, 208 aa, Thermococcus kodakaraensis KOD1
  misc_feature (414542)..(414542): n is a or c or g or t.
  misc_feature (786890)..(786890): n is a or c or g or t.
  misc_feature (786907)..(786907): n is a or c or g or t.
  misc_feature (786944)..(786946): n is a or c or g or t.
  misc_feature (839139)..(839139): n is a or c or g or t.
  misc_feature (1128488)..(1128488): n is a or c or g or t.
  misc_feature (1128499)..(1128499): n is a or c or g or t.
  misc_feature (1128505)..(1128506): n is a or c or g or t.
  misc_feature (1128517)..(1128518): n is a or c or g or t.
  misc_feature (1128539)..(1128540): n is a or c or g or t.
  misc_feature (1561400)..(1561400): n is a or c or g or t.
  misc_feature (1561477)..(1561477): n is a or c or g or t.
  misc_feature (1561545)..(1561545): n is a or c or g or t.
  misc_feature (1767941)..(1767941): n is a or c or g or t.
MVEFVKICGVKTMDELRLVERYADATGVVVNSRSKRKVPLKTAAELIEMAEIPIYLVSTMKTFPEWANAVEKTGAEYIQVHSDMHPKAVNRLKDEYGVSVMKAFMVPRESDDPAEDAERLLELIGQYEVDKILLDTGVGSGRRHDYRVSAIIAKEYPIVLAGGLTPENVGEAIRWVKPAGVDVSSGVERNGVKDRVLIEAFMAVVRNG

SEQ ID NO: 45 - protein, 154 aa, Thermococcus kodakaraensis KOD1
  misc_feature (414542)..(414542): n is a or c or g or t.
  misc_feature (786890)..(786890): n is a or c or g or t.
  misc_feature (786907)..(786907): n is a or c or g or t.
  misc_feature (786944)..(786946): n is a or c or g or t.
  misc_feature (839139)..(839139): n is a or c or g or t.
  misc_feature (1128488)..(1128488): n is a or c or g or t.
  misc_feature (1128499)..(1128499): n is a or c or g or t.
  misc_feature (1128505)..(1128506): n is a or c or g or t.
  misc_feature (1128517)..(1128518): n is a or c or g or t.
  misc_feature (1128539)..(1128540): n is a or c or g or t.
  misc_feature (1561400)..(1561400): n is a or c or g or t.
  misc_feature (1561477)..(1561477): n is a or c or g or t.
  misc_feature (1561545)..(1561545): n is a or c or g or t.
  misc_feature (1767941)..(1767941): n is a or c or g or t.
MKFIADMMLGRLARWLRLYGYDTLYGIVEDEVIIRKALEDDRIILTRDSGLAERARTAGARVFLLSSNSLEGQVEELKKLGVEFRELFPANARCPKCNGLIVRIPKEEVKGKVPESVYERYEEFYVCKNCGQIYWPGRQWREMLRIDRKLRGLK

SEQ ID NO: 46 - protein, 34 aa, Thermococcus kodakaraensis KOD1
  misc_feature (414542)..(414542): n is a or c or g or t.
  misc_feature (786890)..(786890): n is a or c or g or t.
  misc_feature (786907)..(786907): n is a or c or g or t.
  misc_feature (786944)..(786946): n is a or c or g or t.
  misc_feature (839139)..(839139): n is a or c or g or t.
  misc_feature (1128488)..(1128488): n is a or c or g or t.
  misc_feature (1128499)..(1128499): n is a or c or g or t.
  misc_feature (1128505)..(1128506): n is a or c or g or t.
  misc_feature (1128517)..(1128518): n is a or c or g or t.
  misc_feature (1128539)..(1128540): n is a or c or g or t.
  misc_feature (1561400)..(1561400): n is a or c or g or t.
  misc_feature (1561477)..(1561477): n is a or c or g or t.
  misc_feature (1561545)..(1561545): n is a or c or g or t.
  misc_feature (1767941)..(1767941): n is a or c or g or t.
MHTSVHGDHMKRKLLIALSYAAPILVVIGILLIA

SEQ ID NO: 47 - protein, 67 aa, Thermococcus kodakaraensis KOD1
  misc_feature (414542)..(414542): n is a or c or g or t.
  misc_feature (786890)..(786890): n is a or c or g or t.
  misc_feature (786907)..(786907): n is a or c or g or t.
  misc_feature (786944)..(786946): n is a or c or g or t.
  misc_feature (839139)..(839139): n is a or c or g or t.
  misc_feature (1128488)..(1128488): n is a or c or g or t.
  misc_feature (1128499)..(1128499): n is a or c or g or t.
  misc_feature (1128505)..(1128506): n is a or c or g or t.
  misc_feature (1128517)..(1128518): n is a or c or g or t.
  misc_feature (1128539)..(1128540): n is a or c or g or t.
  misc_feature (1561400)..(1561400): n is a or c or g or t.
  misc_feature (1561477)..(1561477): n is a or c or g or t.
  misc_feature (1561545)..(1561545): n is a or c or g or t.
  misc_feature (1767941)..(1767941): n is a or c or g or t.
MPFLRGKLLGNGFSPKAKEELQWLLDQLEKYYSHVAASGRVEERHLRAIKSFYRDIVVVLSVERAEF

SEQ ID NO: 48 - protein, 84 aa, Thermococcus kodakaraensis KOD1
  misc_feature (414542)..(414542): n is a or c or g or t.
  misc_feature (786890)..(786890): n is a or c or g or t.
  misc_feature (786907)..(786907): n is a or c or g or t.
  misc_feature (786944)..(786946): n is a or c or g or t.
  misc_feature (839139)..(839139): n is a or c or g or t.
  misc_feature (1128488)..(1128488): n is a or c or g or t.
  misc_feature (1128499)..(1128499): n is a or c or g or t.
  misc_feature (1128505)..(1128506): n is a or c or g or t.
  misc_feature (1128517)..(1128518): n is a or c or g or t.
  misc_feature (1128539)..(1128540): n is a or c or g or t.
  misc_feature (1561400)..(1561400): n is a or c or g or t.
  misc_feature (1561477)..(1561477): n is a or c or g or t.
  misc_feature (1561545)..(1561545): n is a or c or g or t.
  misc_feature (1767941)..(1767941): n is a or c or g or t.
VAPMRKGSVKEVLAKIKYDPREKEEDYYVVIEHRGAYGGEKKIPVELIELGHGYFFVGEAQIPYHRILRVVRKDGKVIWETKKL

SEQ ID NO: 49 - protein, 356 aa, Thermococcus kodakaraensis KOD1
  misc_feature (414542)..(414542): n is a or c or g or t.
  misc_feature (786890)..(786890): n is a or c or g or t.
  misc_feature (786907)..(786907): n is a or c or g or t.
  misc_feature (786944)..(786946): n is a or c or g or t.
  misc_feature (839139)..(839139): n is a or c or g or t.
  misc_feature (1128488)..(1128488): n is a or c or g or t.
  misc_feature (1128499)..(1128499): n is a or c or g or t.
  misc_feature (1128505)..(1128506): n is a or c or g or t.
  misc_feature (1128517)..(1128518): n is a or c or g or t.
  misc_feature (1128539)..(1128540): n is a or c or g or t.
  misc_feature (1561400)..(1561400): n is a or c or g or t.
  misc_feature (1561477)..(1561477): n is a or c or g or t.
  misc_feature (1561545)..(1561545): n is a or c or g or t.
  misc_feature (1767941)..(1767941): n is a or c or g or t.
VKRDFLAFPLVLILTLPAVSAAPYWTKPGVYIEYAAMRYEPYIQYRLSQGDRPEWIQTSLMVYNYSGVLYILRTFNDTIVEFRLKKERDYIRSNVQVTLYNVSISTTLPKDISPPVFWNESEVIETEVENSHDLGFEDWKWYRFHVKKVVISGEYLIRVKDYHVIKGNMDYGHTMLFDDPANPLNKGNSFSLYPISIKIQDARIDNERVLKGRYTKFYPPTKTVVTGAYALNITQPFGKGYNILSILMGTLIYTFDASDGKLIATYNDGPDLWAVGILDAQFTDEYGQYKMEVEHEESYASGLVLRSFKIARENVKGEVSFNKPIAKAAYLFYASLVLLGLGLVLNIKASDKRGGD

SEQ ID NO: 50 - protein, 255 aa, Thermococcus kodakaraensis KOD1
  misc_feature (414542)..(414542): n is a or c or g or t.
  misc_feature (786890)..(786890): n is a or c or g or t.
  misc_feature (786907)..(786907): n is a or c or g or t.
  misc_feature (786944)..(786946): n is a or c or g or t.
  misc_feature (839139)..(839139): n is a or c or g or t.
  misc_feature (1128488)..(1128488): n is a or c or g or t.
  misc_feature (1128499)..(1128499): n is a or c or g or t.
  misc_feature (1128505)..(1128506): n is a or c or g or t.
  misc_feature (1128517)..(1128518): n is a or c or g or t.
  misc_feature (1128539)..(1128540): n is a or c or g or t.
  misc_feature (1561400)..(1561400): n is a or c or g or t.
  misc_feature (1561477)..(1561477): n is a or c or g or t.
  misc_feature (1561545)..(1561545): n is a or c or g or t.
  misc_feature (1767941)..(1767941): n is a or c or g or t.
MGRLYTLFRWEMNDLIKVVLLFFGILLVGMSMKQELMGVSNSMGFISGTDLQLFGASQASGVSTSIQGMLSLEDVWTLAGFLILLLGALTFRYDRDSGVAKSVYSLPYSNDEIFGIKLISLLIYGSLMLLLPFAYVAITTYASIAGYLPEITSRFLSDALLLVAFLVLYLIAVATLVSLAFPNAFLAFMAGFAVIYAPKILGNSSMPPALFINALHLCGSTDFNVFKAAYLEWGIVVPIVIFLLSWVLIRRRDVV

SEQ ID NO: 51 - protein, 322 aa, Thermococcus kodakaraensis KOD1
  misc_feature (414542)..(414542): n is a or c or g or t.
  misc_feature (786890)..(786890): n is a or c or g or t.
  misc_feature (786907)..(786907): n is a or c or g or t.
  misc_feature (786944)..(786946): n is a or c or g or t.
  misc_feature (839139)..(839139): n is a or c or g or t.
  misc_feature (1128488)..(1128488): n is a or c or g or t.
  misc_feature (1128499)..(1128499): n is a or c or g or t.
  misc_feature (1128505)..(1128506): n is a or c or g or t.
  misc_feature (1128517)..(1128518): n is a or c or g or t.
  misc_feature (1128539)..(1128540): n is a or c or g or t.
  misc_feature (1561400)..(1561400): n is a or c or g or t.
  misc_feature (1561477)..(1561477): n is a or c or g or t.
  misc_feature (1561545)..(1561545): n is a or c or g or t.
  misc_feature (1767941)..(1767941): n is a or c or g or t.
VVKMIDGLIERMLKGDKRAAARLITLVENDEEKAREIVSKIYPYTGKAYIVGITGPPGAGKSTLLDKLIRVAREEGKVVGVIAIDPTSPFTGGALLGDRIRMQRHSTDPGVFIRSMATRGSLGGLAKATNDAIKVLDAYGCDVIFVETVGVGQIEVDIVKTADTVVLVTVPGLGDDIQAIKAGLMEIADIFVINKADKEGADATYFELNLMLDLEKERWEKRGWRPPIVETVATTMRGIRDLWKAINDHKAFLEKSGELEKKRRFRAEEEIKTIVSDRIARTVGKKLSEDEISTLIERVVKREIDPYSAADQVIEKALGVKV

SEQ ID NO: 52 - protein, 178 aa, Thermococcus kodakaraensis KOD1
  misc_feature (414542)..(414542): n is a or c or g or t.
  misc_feature (786890)..(786890): n is a or c or g or t.
  misc_feature (786907)..(786907): n is a or c or g or t.
  misc_feature (786944)..(786946): n is a or c or g or t.
  misc_feature (839139)..(839139): n is a or c or g or t.
  misc_feature (1128488)..(1128488): n is a or c or g or t.
  misc_feature (1128499)..(1128499): n is a or c or g or t.
  misc_feature (1128505)..(1128506): n is a or c or g or t.
  misc_feature (1128517)..(1128518): n is a or c or g or t.
  misc_feature (1128539)..(1128540): n is a or c or g or t.
  misc_feature (1561400)..(1561400): n is a or c or g or t.
  misc_feature (1561477)..(1561477): n is a or c or g or t.
  misc_feature (1561545)..(1561545): n is a or c or g or t.
  misc_feature (1767941)..(1767941): n is a or c or g or t.
MDDEKEGRKKAVIDSAFFIQGADVEGLTTPGVVEEVKDPESRLFLEGLISAGKVKVVLPSRESIEAVREAAKKTGELGELSEADIEVLALAYEVDGVLLTDDYNLQNIARTLRIEFRTLKRGIKKVIRWNYVCIGCGKKFEEMPPGEVCPDCGSPVRLIPKRKRKRRPQRRRYGRTSS

SEQ ID NO: 53 - protein, 105 aa, Thermococcus kodakaraensis KOD1
  misc_feature (414542)..(414542): n is a or c or g or t.
  misc_feature (786890)..(786890): n is a or c or g or t.
  misc_feature (786907)..(786907): n is a or c or g or t.
  misc_feature (786944)..(786946): n is a or c or g or t.
  misc_feature (839139)..(839139): n is a or c or g or t.
  misc_feature (1128488)..(1128488): n is a or c or g or t.
  misc_feature (1128499)..(1128499): n is a or c or g or t.
  misc_feature (1128505)..(1128506): n is a or c or g or t.
  misc_feature (1128517)..(1128518): n is a or c or g or t.
  misc_feature (1128539)..(1128540): n is a or c or g or t.
  misc_feature (1561400)..(1561400): n is a or c or g or t.
  misc_feature (1561477)..(1561477): n is a or c or g or t.
  misc_feature (1561545)..(1561545): n is a or c or g or t.
  misc_feature (1767941)..(1767941): n is a or c or g or t.
VAAARAGEPDKEGLQSNLRREEVMAAAVLYVLLVILLILVIVLTMLYLSAKNNPYYVVYDEETKTALKRRVLNLKEELEGELEQFDVEDWEKALEESIDEEVKNL

SEQ ID NO: 54 - protein, 708 aa, Thermococcus kodakaraensis KOD1
  misc_feature (414542)..(414542): n is a or c or g or t.
  misc_feature (786890)..(786890): n is a or c or g or t.
  misc_feature (786907)..(786907): n is a or c or g or t.
  misc_feature (786944)..(786946): n is a or c or g or t.
  misc_feature (839139)..(839139): n is a or c or g or t.
  misc_feature (1128488)..(1128488): n is a or c or g or t.
  misc_feature (1128499)..(1128499): n is a or c or g or t.
  misc_feature (1128505)..(1128506): n is a or c or g or t.
  misc_feature (1128517)..(1128518): n is a or c or g or t.
  misc_feature (1128539)..(1128540): n is a or c or g or t.
  misc_feature (1561400)..(1561400): n is a or c or g or t.
  misc_feature (1561477)..(1561477): n is a or c or g or t.
  misc_feature (1561545)..(1561545): n is a or c or g or t.
  misc_feature (1767941)..(1767941): n is a or c or g or t.
MRKAFLLLLSMLLLLPLASAQPYVTVFEGRIAPEHAITVGDYTVTVVKSAVGTPYLMLKKGAEILELMPFDFGREIERDGIRVVMGSYTPQGGFVVVSVKPKLVASLKPKVGERVSFNGTTVEVTSVGAETVDVSVNGVTKTLEVNGSAVVDLVALEYNGKEIRVYVADPASEIVNLEYAVFYPYRKVRASGPVDVPITITSSSDVELNLKLGILSLPSGWKANFIYGGVEVGEISVPPKGTVSLTLHIEPTGSGVVKFTVGNFTGSLEVESAGIEVSIPYLSLEAEAGTSLSVPVAFAGTGRVEFTPGSVPQGWGVYLTDGRYRLRSFDVDGSFTAELVVEIPRNATLGDHRIEFEVNGQSYALNVYVYKTYLGEPAKLTVILTDESGNPIRGWVSVGGENVTVSPAGSANFELKPGEYTVLAGAEGCSPVEEDVKLSDGEERTLTIKLRRAEYYFKASLERDVLTVTSGSGGSVAITIKNLGSKDDDYRVTVEGLPEGWSYILSQDPKGTVPIASIKVPSGESGSAYLVILPPFNVESGDLNATVVVSGSNSRVELPLKIHVENPASLRVNVDNPTLTVKAGGSTATALWLDAMGTVTNVKFTVQAPSGWDVEVVPSTIPRVGMGGRGGVYWSTGPAQAELRIRVPKSAPAGTYTITVTAAGDQAKAETVVTVRVAQSSSGTWIGILLLVVAFGVVIWLMRRVGRR

SEQ ID NO: 55 - protein, 222 aa, Thermococcus kodakaraensis KOD1
  misc_feature (414542)..(414542): n is a or c or g or t.
  misc_feature (786890)..(786890): n is a or c or g or t.
  misc_feature (786907)..(786907): n is a or c or g or t.
  misc_feature (786944)..(786946): n is a or c or g or t.
  misc_feature (839139)..(839139): n is a or c or g or t.
  misc_feature (1128488)..(1128488): n is a or c or g or t.
  misc_feature (1128499)..(1128499): n is a or c or g or t.
  misc_feature (1128505)..(1128506): n is a or c or g or t.
  misc_feature (1128517)..(1128518): n is a or c or g or t.
  misc_feature (1128539)..(1128540): n is a or c or g or t.
  misc_feature (1561400)..(1561400): n is a or c or g or t.
  misc_feature (1561477)..(1561477): n is a or c or g or t.
  misc_feature (1561545)..(1561545): n is a or c or g or t.
  misc_feature (1767941)..(1767941): n is a or c or g or t.
MMLGGMRISVVIPAYNEEKRLPKVLERIPEFVDEVIVVDDGSSDNTYSSALSFSEKDPRVKAFRLEKNCGKGCAMREGIKHTTGDIVVFMDADGQHLPEEIGKLVRPIVEGRADLVIGARKVEVQGKRPLHRRLSNIITTRLIRLKLGTYVYDTQSGFRAYRRGFLPEIESDRYEVETEMLIKAAKMGAKIVEVPVSMIYGVETGHFRAEDVFRFLLALLRG

SEQ ID NO: 56 - protein, 88 aa, Thermococcus kodakaraensis KOD1
  misc_feature (414542)..(414542): n is a or c or g or t.
  misc_feature (786890)..(786890): n is a or c or g or t.
  misc_feature (786907)..(786907): n is a or c or g or t.
  misc_feature (786944)..(786946): n is a or c or g or t.
  misc_feature (839139)..(839139): n is a or c or g or t.
  misc_feature (1128488)..(1128488): n is a or c or g or t.
  misc_feature (1128499)..(1128499): n is a or c or g or t.
  misc_feature (1128505)..(1128506): n is a or c or g or t.
  misc_feature (1128517)..(1128518): n is a or c or g or t.
  misc_feature (1128539)..(1128540): n is a or c or g or t.
  misc_feature (1561400)..(1561400): n is a or c or g or t.
  misc_feature (1561477)..(1561477): n is a or c or g or t.
  misc_feature (1561545)..(1561545): n is a or c or g or t.
  misc_feature (1767941)..(1767941): n is a or c or g or t.
MFVLQIFPWVNYVGSVVSVRVPPDVKREMDELKGEINWSEEIREFIKKKIKEYRKKKALQEVVSYIQTLPEAPKGTAQKLVRDDRDSH

SEQ ID NO: 57 - protein, 229 aa, Thermococcus kodakaraensis KOD1
  misc_feature (414542)..(414542): n is a or c or g or t.
  misc_feature (786890)..(786890): n is a or c or g or t.
  misc_feature (786907)..(786907): n is a or c or g or t.
  misc_feature (786944)..(786946): n is a or c or g or t.
  misc_feature (839139)..(839139): n is a or c or g or t.
  misc_feature (1128488)..(1128488): n is a or c or g or t.
  misc_feature (1128499)..(1128499): n is a or c or g or t.
  misc_feature (1128505)..(1128506): n is a or c or g or t.
  misc_feature (1128517)..(1128518): n is a or c or g or t.
  misc_feature (1128539)..(1128540): n is a or c or g or t.
  misc_feature (1561400)..(1561400): n is a or c or g or t.
  misc_feature (1561477)..(1561477): n is a or c or g or t.
  misc_feature (1561545)..(1561545): n is a or c or g or t.
  misc_feature (1767941)..(1767941): n is a or c or g or t.
VIRTLEDLEKALRAEGYKRNVSKALRRLAKYLVERDIIDSNSYEKIKNIAKLKATGVREVFITNEDVRTAYNEVQKRGKPAETLFLLLVFSGIRLKQAVELLRTYDPTKLYLIDDKAARYPIFSTSKGKKKAFWAYGPRDFFERLEPLEVKYNTAKDLVAFGKVSANSIRKWHYTFLIQKGMPSEIADFIQGRVSGSVGATHYLNKAVLADEWYSAVVDDLKRVLEGGE

SEQ ID NO: 58 - protein, 62 aa, Thermococcus kodakaraensis KOD1
  misc_feature (414542)..(414542): n is a or c or g or t.
  misc_feature (786890)..(786890): n is a or c or g or t.
  misc_feature (786907)..(786907): n is a or c or g or t.
  misc_feature (786944)..(786946): n is a or c or g or t.
  misc_feature (839139)..(839139): n is a or c or g or t.
  misc_feature (1128488)..(1128488): n is a or c or g or t.
  misc_feature (1128499)..(1128499): n is a or c or g or t.
  misc_feature (1128505)..(1128506): n is a or c or g or t.
  misc_feature (1128517)..(1128518): n is a or c or g or t.
  misc_feature (1128539)..(1128540): n is a or c or g or t.
  misc_feature (1561400)..(1561400): n is a or c or g or t.
  misc_feature (1561477)..(1561477): n is a or c or g or t.
  misc_feature (1561545)..(1561545): n is a or c or g or t.
  misc_feature (1767941)..(1767941): n is a or c or g or t.
VSGGMAQSKFVRGIYIDSEVEKRAKALAKAKGTSINQVFREAVLKLYRLELGNTRPEEILEG

SEQ ID NO: 59 - protein, 117 aa, Thermococcus kodakaraensis KOD1
  misc_feature (414542)..(414542): n is a or c or g or t.
  misc_feature (786890)..(786890): n is a or c or g or t.
  misc_feature (786907)..(786907): n is a or c or g or t.
  misc_feature (786944)..(786946): n is a or c or g or t.
  misc_feature (839139)..(839139): n is a or c or g or t.
  misc_feature (1128488)..(1128488): n is a or c or g or t.
  misc_feature (1128499)..(1128499): n is a or c or g or t.
  misc_feature (1128505)..(1128506): n is a or c or g or t.
  misc_feature (1128517)..(1128518): n is a or c or g or t.
  misc_feature (1128539)..(1128540): n is a or c or g or t.
  misc_feature (1561400)..(1561400): n is a or c or g or t.
  misc_feature (1561477)..(1561477): n is a or c or g or t.
  misc_feature (1561545)..(1561545): n is a or c or g or t.
  misc_feature (1767941)..(1767941): n is a or c or g or t.
MKTKSLIQLIIFFVLAGAWYYIAWPMMTKEALAVGAVGGVLMHWALTNKGNKALVIIEPFTSSWRVLLYDMMLLSFLAALWQANGAALLDALKDSVENLALLLALLGGIGVDYGVEG

SEQ ID NO: 60 - protein, 89 aa, Thermococcus kodakaraensis KOD1
  misc_feature (414542)..(414542): n is a or c or g or t.
  misc_feature (786890)..(786890): n is a or c or g or t.
  misc_feature (786907)..(786907): n is a or c or g or t.
  misc_feature (786944)..(786946): n is a or c or g or t.
  misc_feature (839139)..(839139): n is a or c or g or t.
  misc_feature (1128488)..(1128488): n is a or c or g or t.
  misc_feature (1128499)..(1128499): n is a or c or g or t.
  misc_feature (1128505)..(1128506): n is a or c or g or t.
  misc_feature (1128517)..(1128518): n is a or c or g or t.
  misc_feature (1128539)..(1128540): n is a or c or g or t.
  misc_feature (1561400)..(1561400): n is a or c or g or t.
  misc_feature (1561477)..(1561477): n is a or c or g or t.
  misc_feature (1561545)..(1561545): n is a or c or g or t.
  misc_feature (1767941)..(1767941): n is a or c or g or t.
MVTAGNLLGLSGFWALFIPSALIGLAVYRISDLDSWGLWDAAAFLILGGIFMLAITGDPTATALEFIKGVTGFGLAGVLAGLAAKNRRD

SEQ ID NO: 61 - protein, 160 aa, Thermococcus kodakaraensis KOD1
  misc_feature (414542)..(414542): n is a or c or g or t.
  misc_feature (786890)..(786890): n is a or c or g or t.
  misc_feature (786907)..(786907): n is a or c or g or t.
  misc_feature (786944)..(786946): n is a or c or g or t.
  misc_feature (839139)..(839139): n is a or c or g or t.
  misc_feature (1128488)..(1128488): n is a or c or g or t.
  misc_feature (1128499)..(1128499): n is a or c or g or t.
  misc_feature (1128505)..(1128506): n is a or c or g or t.
  misc_feature (1128517)..(1128518): n is a or c or g or t.
  misc_feature (1128539)..(1128540): n is a or c or g or t.
  misc_feature (1561400)..(1561400): n is a or c or g or t.
  misc_feature (1561477)..(1561477): n is a or c or g or t.
  misc_feature (1561545)..(1561545): n is a or c or g or t.
  misc_feature (1767941)..(1767941): n is a or c or g or t.
MYAHHSSPSFSKVVLRLFAVVSLIFLAYFSYSTFAEHDPLKERLYKLGYPTEGFIFSNNTIRWADGHLTIVQGAYVEDYPITAEQAYEIARQYLASYNKKLEKYNYKLYPDKKTLTEKEKNGQKYWVFELKLDTGGSKLFAGFIWVNRKTGAVSVKGLLG

SEQ ID NO: 62 - protein, 266 aa, Thermococcus kodakaraensis KOD1
  misc_feature (414542)..(414542): n is a or c or g or t.
  misc_feature (786890)..(786890): n is a or c or g or t.
  misc_feature (786907)..(786907): n is a or c or g or t.
  misc_feature (786944)..(786946): n is a or c or g or t.
  misc_feature (839139)..(839139): n is a or c or g or t.
  misc_feature (1128488)..(1128488): n is a or c or g or t.
  misc_feature (1128499)..(1128499): n is a or c or g or t.
  misc_feature (1128505)..(1128506): n is a or c or g or t.
  misc_feature (1128517)..(1128518): n is a or c or g or t.
  misc_feature (1128539)..(1128540): n is a or c or g or t.
  misc_feature (1561400)..(1561400): n is a or c or g or t.
  misc_feature (1561477)..(1561477): n is a or c or g or t.
  misc_feature (1561545)..(1561545): n is a or c or g or t.
  misc_feature (1767941)..(1767941): n is a or c or g or t.
MKRLVFAFILFLLTASLASAGTLYDWSGSLEVGQAVYVNDLTLFVDQHAKTNEIVLVVKQARQILKVLHNGENYTAEGLEVIFTTFNDRAYIQVQGSDPFSVSFNGPDKAAELRKENIELREKLANLTVQNNKLAKENEQLKQQVSELQSKLKNQPNTAELNAKILNLTRENRELKAQLANLTNQYNTVKARADFLEQQNDEYRKMIQTLLEGASQKSEQSYIEKAKKEKLIGSVLLKTLLFGGIIVGLVGYGLYRAKRRHDFAGL

SEQ ID NO: 63 - protein, 95 aa, Thermococcus kodakaraensis KOD1
  misc_feature (414542)..(414542): n is a or c or g or t.
  misc_feature (786890)..(786890): n is a or c or g or t.
  misc_feature (786907)..(786907): n is a or c or g or t.
  misc_feature (786944)..(786946): n is a or c or g or t.
  misc_feature (839139)..(839139): n is a or c or g or t.
  misc_feature (1128488)..(1128488): n is a or c or g or t.
  misc_feature (1128499)..(1128499): n is a or c or g or t.
  misc_feature (1128505)..(1128506): n is a or c or g or t.
  misc_feature (1128517)..(1128518): n is a or c or g or t.
  misc_feature (1128539)..(1128540): n is a or c or g or t.
  misc_feature (1561400)..(1561400): n is a or c or g or t.
  misc_feature (1561477)..(1561477): n is a or c or g or t.
  misc_feature (1561545)..(1561545): n is a or c or g or t.
  misc_feature (1767941)..(1767941): n is a or c or g or t.
MMEVVEDVGIPEDILKDLASKDIAEEPQAKPKQKKEEKSSAWGLKKKKELNEEILKEIQKKLAEAWELMGTEYGRKLIEDVAVEVKKLCIINDLP

SEQ ID NO: 64 - protein, 198 aa, Thermococcus kodakaraensis KOD1
  misc_feature (414542)..(414542): n is a or c or g or t.
  misc_feature (786890)..(786890): n is a or c or g or t.
  misc_feature (786907)..(786907): n is a or c or g or t.
  misc_feature (786944)..(786946): n is a or c or g or t.
  misc_feature (839139)..(839139): n is a or c or g or t.
  misc_feature (1128488)..(1128488): n is a or c or g or t.
  misc_feature (1128499)..(1128499): n is a or c or g or t.
  misc_feature (1128505)..(1128506): n is a or c or g or t.
  misc_feature (1128517)..(1128518): n is a or c or g or t.
  misc_feature (1128539)..(1128540): n is a or c or g or t.
  misc_feature (1561400)..(1561400): n is a or c or g or t.
  misc_feature (1561477)..(1561477): n is a or c or g or t.
  misc_feature (1561545)..(1561545): n is a or c or g or t.
  misc_feature (1767941)..(1767941): n is a or c or g or t.
MVTRMSYESFAEKIKFRSGEFDKELFKRIVEYIIEKELVTPKSIEVYRSGVEVKIRAIAEMMLVDEFDLDIVQAVDYLSIASFVISMTILSKIEGNEPSDELEKYIIEKLYTPQIKEMFLTRKFMTNPILEEFEVIKFVKDTPEGPLESYGVRILIDKSGDRDFDEVFLETTKGTLQEIVNYISEVISDDARKNSEKE

SEQ ID NO: 65 - protein, 71 aa, Thermococcus kodakaraensis KOD1
  misc_feature (414542)..(414542): n is a or c or g or t.
  misc_feature (786890)..(786890): n is a or c or g or t.
  misc_feature (786907)..(786907): n is a or c or g or t.
  misc_feature (786944)..(786946): n is a or c or g or t.
  misc_feature (839139)..(839139): n is a or c or g or t.
  misc_feature (1128488)..(1128488): n is a or c or g or t.
  misc_feature (1128499)..(1128499): n is a or c or g or t.
  misc_feature (1128505)..(1128506): n is a or c or g or t.
  misc_feature (1128517)..(1128518): n is a or c or g or t.
  misc_feature (1128539)..(1128540): n is a or c or g or t.
  misc_feature (1561400)..(1561400): n is a or c or g or t.
  misc_feature (1561477)..(1561477): n is a or c or g or t.
  misc_feature (1561545)..(1561545): n is a or c or g or t.
  misc_feature (1767941)..(1767941): n is a or c or g or t.
VDGEVLRGMFIARLVDKGNITIPKGLRSEMKIDQNSIIEVIVVRAYRLKDLLGDKAKFIRQLALKKYKILT

SEQ ID NO: 66 - protein, 354 aa, Thermococcus kodakaraensis KOD1
  misc_feature (414542)..(414542): n is a or c or g or t.
  misc_feature (786890)..(786890): n is a or c or g or t.
  misc_feature (786907)..(786907): n is a or c or g or t.
  misc_feature (786944)..(786946): n is a or c or g or t.
  misc_feature (839139)..(839139): n is a or c or g or t.
  misc_feature (1128488)..(1128488): n is a or c or g or t.
  misc_feature (1128499)..(1128499): n is a or c or g or t.
  misc_feature (1128505)..(1128506): n is a or c or g or t.
  misc_feature (1128517)..(1128518): n is a or c or g or t.
  misc_feature (1128539)..(1128540): n is a or c or g or t.
  misc_feature (1561400)..(1561400): n is a or c or g or t.
  misc_feature (1561477)..(1561477): n is a or c or g or t.
  misc_feature (1561545)..(1561545): n is a or c or g or t.
  misc_feature (1767941)..(1767941): n is a or c or g or t.
VGSIQSYEKVNLMRIPARGPGRPRKWKSPLIQWRSDVPLEDFEFAEEKRTELGLSRAEFFHALLHHTNWSVVELHAENKKKDELLEEKDRYIEELVKLLEKERQARERAEKEAEAWKQKYYELKGEKPAHTYNEGKLLRQLAENAKEDVSWADLCAEVLDLRDEKKMRRLMSLAFNIEKSDKNNYKSIFYPKRTAPEFKGWVLKRPERDGPVLLVDYVLYKEDTLKAAKGLAVGEAAAEKVPEVKPLKTGKAAERWLEMFFEVVHRNYMDLINQKRGKDAVKYLEEAVPEKLEQVLQDIDPADWRRAVLAVLDELEARAEGDERYEVFVSNLRRVVLRALNEFYAKPAEVKADV

SEQ ID NO: 67 - protein, 62 aa, Thermococcus kodakaraensis KOD1
  misc_feature (414542)..(414542): n is a or c or g or t.
  misc_feature (786890)..(786890): n is a or c or g or t.
  misc_feature (786907)..(786907): n is a or c or g or t.
  misc_feature (786944)..(786946): n is a or c or g or t.
  misc_feature (839139)..(839139): n is a or c or g or t.
  misc_feature (1128488)..(1128488): n is a or c or g or t.
  misc_feature (1128499)..(1128499): n is a or c or g or t.
  misc_feature (1128505)..(1128506): n is a or c or g or t.
  misc_feature (1128517)..(1128518): n is a or c or g or t.
  misc_feature (1128539)..(1128540): n is a or c or g or t.
  misc_feature (1561400)..(1561400): n is a or c or g or t.
  misc_feature (1561477)..(1561477): n is a or c or g or t.
  misc_feature (1561545)..(1561545): n is a or c or g or t.
  misc_feature (1767941)..(1767941): n is a or c or g or t.
MREYSFVFVKIDGEWIDEDDAIEEYGMSYVDMVEDSFELKVEAENWKDAEEKIRIAAEALRR

SEQ ID NO: 68 - protein, 60 aa, Thermococcus kodakaraensis KOD1
  misc_feature (414542)..(414542): n is a or c or g or t.
  misc_feature (786890)..(786890): n is a or c or g or t.
  misc_feature (786907)..(786907): n is a or c or g or t.
  misc_feature (786944)..(786946): n is a or c or g or t.
  misc_feature (839139)..(839139): n is a or c or g or t.
  misc_feature (1128488)..(1128488): n is a or c or g or t.
  misc_feature (1128499)..(1128499): n is a or c or g or t.
  misc_feature (1128505)..(1128506): n is a or c or g or t.
  misc_feature (1128517)..(1128518): n is a or c or g or t.
  misc_feature (1128539)..(1128540): n is a or c or g or t.
  misc_feature (1561400)..(1561400): n is a or c or g or t.
  misc_feature (1561477)..(1561477): n is a or c or g or t.
  misc_feature (1561545)..(1561545): n is a or c or g or t.
  misc_feature (1767941)..(1767941): n is a or c or g or t.
MVLERLDDLARAEIEAHYEKYFSIAQEDENGCVWVPLDEVYAAVMRARDEVKENAGLEEY

SEQ ID NO: 69 - protein, 117 aa, Thermococcus kodakaraensis KOD1
  misc_feature (414542)..(414542): n is a or c or g or t.
  misc_feature (786890)..(786890): n is a or c or g or t.
  misc_feature (786907)..(786907): n is a or c or g or t.
  misc_feature (786944)..(786946): n is a or c or g or t.
  misc_feature (839139)..(839139): n is a or c or g or t.
  misc_feature (1128488)..(1128488): n is a or c or g or t.
  misc_feature (1128499)..(1128499): n is a or c or g or t.
  misc_feature (1128505)..(1128506): n is a or c or g or t.
  misc_feature (1128517)..(1128518): n is a or c or g or t.
  misc_feature (1128539)..(1128540): n is a or c or g or t.
  misc_feature (1561400)..(1561400): n is a or c or g or t.
  misc_feature (1561477)..(1561477): n is a or c or g or t.
  misc_feature (1561545)..(1561545): n is a or c or g or t.
  misc_feature (1767941)..(1767941): n is a or c or g or t.
MPRRRKLPDYVALKIPTYEPADNPLELIFDGRSLEVALKVLEYIKEHGRLYPDDYKELFPEKTDQVLYFRVIKKMLALKMLRVSSDKSYILSDGFSNRMETIAKLWKFQIGDLKDLW

SEQ ID NO: 70 - protein, 187 aa, Thermococcus kodakaraensis KOD1
  misc_feature (414542)..(414542): n is a or c or g or t.
  misc_feature (786890)..(786890): n is a or c or g or t.
  misc_feature (786907)..(786907): n is a or c or g or t.
  misc_feature (786944)..(786946): n is a or c or g or t.
  misc_feature (839139)..(839139): n is a or c or g or t.
  misc_feature (1128488)..(1128488): n is a or c or g or t.
  misc_feature (1128499)..(1128499): n is a or c or g or t.
  misc_feature (1128505)..(1128506): n is a or c or g or t.
  misc_feature (1128517)..(1128518): n is a or c or g or t.
  misc_feature (1128539)..(1128540): n is a or c or g or t.
  misc_feature (1561400)..(1561400): n is a or c or g or t.
  misc_feature (1561477)..(1561477): n is a or c or g or t.
  misc_feature (1561545)..(1561545): n is a or c or g or t.
  misc_feature (1767941)..(1767941): n is a or c or g or t.
VVSMFTGIVEGTGKARYSAGKLYVELPFEVKEGDSVAVNGACLTVVSFDGKTAVFDVGEETLARTNLREAKVVNLERALPANGRFDGHIVTGHVDGTIRFIAKRKSGNTTWMAFEMPREKWGIAEKGSIALNGVSLTVAKVEATRFWIQVIPYTLEKTNLGLLRPGEKVNYEIDVLARYMKMILDKS

SEQ ID NO: 71 - protein, 59 aa, Thermococcus kodakaraensis KOD1
  misc_feature (414542)..(414542): n is a or c or g or t.
  misc_feature (786890)..(786890): n is a or c or g or t.
  misc_feature (786907)..(786907): n is a or c or g or t.
  misc_feature (786944)..(786946): n is a or c or g or t.
  misc_feature (839139)..(839139): n is a or c or g or t.
  misc_feature (1128488)..(1128488): n is a or c or g or t.
  misc_feature (1128499)..(1128499): n is a or c or g or t.
  misc_feature (1128505)..(1128506): n is a or c or g or t.
  misc_feature (1128517)..(1128518): n is a or c or g or t.
  misc_feature (1128539)..(1128540): n is a or c or g or t.
  misc_feature (1561400)..(1561400): n is a or c or g or t.
  misc_feature (1561477)..(1561477): n is a or c or g or t.
  misc_feature (1561545)..(1561545): n is a or c or g or t.
  misc_feature (1767941)..(1767941): n is a or c or g or t.
VWVVFNGLLEGSSDRVEVNDHSRAVFGVFGNMSVYNGEGEGPLAVDSAGYITLDITTEP

SEQ ID NO: 72 - protein, 159 aa, Thermococcus kodakaraensis KOD1
  misc_feature (414542)..(414542): n is a or c or g or t.
  misc_feature (786890)..(786890): n is a or c or g or t.
  misc_feature (786907)..(786907): n is a or c or g or t.
  misc_feature (786944)..(786946): n is a or c or g or t.
  misc_feature (839139)..(839139): n is a or c or g or t.
  misc_feature (1128488)..(1128488): n is a or c or g or t.
  misc_feature (1128499)..(1128499): n is a or c or g or t.
  misc_feature (1128505)..(1128506): n is a or c or g or t.
  misc_feature (1128517)..(1128518): n is a or c or g or t.
  misc_feature (1128539)..(1128540): n is a or c or g or t.
  misc_feature (1561400)..(1561400): n is a or c or g or t.
  misc_feature (1561477)..(1561477): n is a or c or g or t.
  misc_feature (1561545)..(1561545): n is a or c or g or t.
  misc_feature (1767941)..(1767941): n is a or c or g or t.
VNGMEVRVIEGEFKGEGVKIGVVVARFNDLLTNELLSGALDCFERHSVEEVDVVKVPGSFEIPLVAKKLAESGKYDAVLALGAVVRGETKHFDLVANEVAKGVAKVSLDSGVPVIFGVITVEDELQGFNRAGVKSNKGFEYAMAALEMANLMKKLREKE

SEQ ID NO: 73 - protein, 254 aa, Thermococcus kodakaraensis KOD1
  misc_feature (414542)..(414542): n is a or c or g or t.
  misc_feature (786890)..(786890): n is a or c or g or t.
  misc_feature (786907)..(786907): n is a or c or g or t.
  misc_feature (786944)..(786946): n is a or c or g or t.
  misc_feature (839139)..(839139): n is a or c or g or t.
  misc_feature (1128488)..(1128488): n is a or c or g or t.
  misc_feature (1128499)..(1128499): n is a or c or g or t.
  misc_feature (1128505)..(1128506): n is a or c or g or t.
  misc_feature (1128517)..(1128518): n is a or c or g or t.
  misc_feature (1128539)..(1128540): n is a or c or g or t.
  misc_feature (1561400)..(1561400): n is a or c or g or t.
  misc_feature (1561477)..(1561477): n is a or c or g or t.
  misc_feature (1561545)..(1561545): n is a or c or g or t.
  misc_feature (1767941)..(1767941): n is a or c or g or t.
VVGMREIEISRAIVEAYFNDLLQNLQLDIAIVGAGPSGMVAGYYLAKGGAKVAIFEKKLSVGGGIWGGAMGFNRVVVQESAREILDEFGVDYSQVGNGLYVLDSIELASTLASKAVKAGAKIFNMVEVEDLVVKDGRVSGLVINWTPVMMTGLHVDPLTVEAKFVVDSTGHGAQISQHLLKRGLIKAIPGEGPMWAEKGEELTVEHTREVFPGLYATGMAANALAGAPRMGPIFGGMLLSGRKAALEILQKLGK

SEQ ID NO: 74 - protein, 20 aa, Thermococcus kodakaraensis KOD1
  misc_feature (414542)..(414542): n is a or c or g or t.
  misc_feature (786890)..(786890): n is a or c or g or t.
  misc_feature (786907)..(786907): n is a or c or g or t.
  misc_feature (786944)..(786946): n is a or c or g or t.
  misc_feature (839139)..(839139): n is a or c or g or t.
  misc_feature (1128488)..(1128488): n is a or c or g or t.
  misc_feature (1128499)..(1128499): n is a or c or g or t.
  misc_feature (1128505)..(1128506): n is a or c or g or t.
  misc_feature (1128517)..(1128518): n is a or c or g or t.
  misc_feature (1128539)..(1128540): n is a or c or g or t.
  misc_feature (1561400)..(1561400): n is a or c or g or t.
  misc_feature (1561477)..(1561477): n is a or c or g or t.
  misc_feature (1561545)..(1561545): n is a or c or g or t.
  misc_feature (1767941)..(1767941): n is a or c or g or t.
MANTPQFRQLDDLNVIGPKI

SEQ ID NO: 75 - protein, 30 aa, Thermococcus kodakaraensis KOD1
  misc_feature (414542)..(414542): n is a or c or g or t.
  misc_feature (786890)..(786890): n is a or c or g or t.
  misc_feature (786907)..(786907): n is a or c or g or t.
  misc_feature (786944)..(786946): n is a or c or g or t.
  misc_feature (839139)..(839139): n is a or c or g or t.
  misc_feature (1128488)..(1128488): n is a or c or g or t.
  misc_feature (1128499)..(1128499): n is a or c or g or t.
  misc_feature (1128505)..(1128506): n is a or c or g or t.
  misc_feature (1128517)..(1128518): n is a or c or g or t.
  misc_feature (1128539)..(1128540): n is a or c or g or t.
  misc_feature (1561400)..(1561400): n is a or c or g or t.
  misc_feature (1561477)..(1561477): n is a or c or g or t.
  misc_feature (1561545)..(1561545): n is a or c or g or t.
  misc_feature (1767941)..(1767941): n is a or c or g or t.
VEHSYSLPEASNKRFKDDVLRGTHVKLHGS

SEQ ID NO: 76 - protein, 1071 aa, Thermococcus kodakaraensis KOD1
  misc_feature (414542)..(414542): n is a or c or g or t.
  misc_feature (786890)..(786890): n is a or c or g or t.
  misc_feature (786907)..(786907): n is a or c or g or t.
  misc_feature (786944)..(786946): n is a or c or g or t.
  misc_feature (839139)..(839139): n is a or c or g or t.
  misc_feature (1128488)..(1128488): n is a or c or g or t.
  misc_feature (1128499)..(1128499): n is a or c or g or t.
  misc_feature (1128505)..(1128506): n is a or c or g or t.
  misc_feature (1128517)..(1128518): n is a or c or g or t.
  misc_feature (1128539)..(1128540): n is a or c or g or t.
  misc_feature (1561400)..(1561400): n is a or c or g or t.
  misc_feature (1561477)..(1561477): n is a or c or g or t.
  misc_feature (1561545)..(1561545): n is a or c or g or t.
  misc_feature (1767941)..(1767941): n is a or c or g or t.
VATMTTRKRASVLLVMMLFLAIVPYKASAGNSIQGYFTTIKSTVKTFFGGDYNGWNPQLKIVPGSEVRISRDEIRVGADFFKEEYSGVKGGKGYYLIAYGTVKSYLDSIATNWPGDDRSPLWHMNIQTYDSDYSTDLFSEILAIEILRTLLPEYNGVDLKAVANGRFEDINSKYSTLGKSDVMKWIQKISNPQVMQVIARRMNDFAGGIPNRNLSTIPDIYGAPYRTAVLVALVEEVDPQLSEEVPFDIPGEILELARVYVGQNRGWDYLNRATMALPILPIKHLSITILGTNYTIGNGIDVLMIDTTNREYLLGLWNGTDYSVILKIKYLNATNLAITPVKYAERAGAILHAGEYPVTLTPSSIGRTIKTPLAGFPWELSEVVMYWTGNPTSYLNYNIKKEGNSYVYEGDPGGLRITPLAEGSFLVTFTNRDGFTFIFGNAAINVTGDMKGKTYLVYPREGAIIQWNSIQMPTTALISANSFDNWHVVGNAYVDPTINAIVLTPDQGYKAGATWYLIPVDLTMTFQARAKFYSGRCGGGDGIWVGFQNAGTNVVGGTGSGVGISGIWPAVGFRIWEIGRSVDLYLNGNFQEITSGVCFADEKEHDMLFYWDPDTETLGIKIDNTYEYTKNIDLISELGQTAYFGFTGGTGGARNLHYVKPIFVGVSLEDLKDLIESTREFLQNVSSLGVDVSDLMTTLSSAEESLQGVDPSDTRTISKISKEVAGIQTEAITRLANKVADLYYKVSLARSVGLSDISLDVNFESGKNSMISGDLTNALKYLNDAFNEANSMAKESLDEIEQNITSLMSEAIKYGVAIGDLKDRQKIIEASKSQGDYVSAYVEAMKIYKQLSKKVEIAKQKTTEQTTTTQSNNKTLEQKTEETTTTQRTSESSPESATTEYPLKVGDWAKYKLKFEASGDNEKISGSIEYKVVVINVDDQGFTIRFEDVKGDLDKYKKLWGDEGKIKEGDTLTIPWDVEPGDNNIYADPKKLPEDGKVKNMIETWEYDTRTGLLKSYKGSVDLFGVKISEEIHLESSNAVKGGSSGSGGICGPAMFITLALVPLILRKKRF

SEQ ID NO: 77 - protein, 251 aa, Thermococcus kodakaraensis KOD1
  misc_feature (414542)..(414542): n is a or c or g or t.
  misc_feature (786890)..(786890): n is a or c or g or t.
  misc_feature (786907)..(786907): n is a or c or g or t.
  misc_feature (786944)..(786946): n is a or c or g or t.
  misc_feature (839139)..(839139): n is a or c or g or t.
  misc_feature (1128488)..(1128488): n is a or c or g or t.
  misc_feature (1128499)..(1128499): n is a or c or g or t.
  misc_feature (1128505)..(1128506): n is a or c or g or t.
  misc_feature (1128517)..(1128518): n is a or c or g or t.
  misc_feature (1128539)..(1128540): n is a or c or g or t.
  misc_feature (1561400)..(1561400): n is a or c or g or t.
  misc_feature (1561477)..(1561477): n is a or c or g or t.
  misc_feature (1561545)..(1561545): n is a or c or g or t.
  misc_feature (1767941)..(1767941): n is a or c or g or t.
VRVAMFSFTHIFAGIGSNGSRIVNGIETDSVVKVSLNPARYILRPKEYRERIVNFFSNVPENSFVWLVFDDTKTNREIMEIILEALPSDSIRLAYVLTPKVELINQKPEWADKFETVFYDSLWDFLKEDVPLGKAFEEASKNISDMFSKLYRYLESEMLVNIDYADLFSMIRGGNVGIMRLLREVDFSWHWGIWERGLVGILVGEDFPLSGAHRILSKFQEILSEKDIIWGVITDKNVKGSEVLALLVKRW

SEQ ID NO: 78 - protein, 62 aa, Thermococcus kodakaraensis KOD1
  misc_feature (414542)..(414542): n is a or c or g or t.
  misc_feature (786890)..(786890): n is a or c or g or t.
  misc_feature (786907)..(786907): n is a or c or g or t.
  misc_feature (786944)..(786946): n is a or c or g or t.
  misc_feature (839139)..(839139): n is a or c or g or t.
  misc_feature (1128488)..(1128488): n is a or c or g or t.
  misc_feature (1128499)..(1128499): n is a or c or g or t.
  misc_feature (1128505)..(1128506): n is a or c or g or t.
  misc_feature (1128517)..(1128518): n is a or c or g or t.
  misc_feature (1128539)..(1128540): n is a or c or g or t.
  misc_feature (1561400)..(1561400): n is a or c or g or t.
  misc_feature (1561477)..(1561477): n is a or c or g or t.
  misc_feature (1561545)..(1561545): n is a or c or g or t.
  misc_feature (1767941)..(1767941): n is a or c or g or t.
MKKVFEGEGTFVEYEEKKVKLENGHELTHRRENPTELWWKLKEAIKGRKVKIVAYELEESED

SEQ ID NO: 79 - protein, 108 aa, Thermococcus kodakaraensis KOD1
  misc_feature (414542)..(414542): n is a or c or g or t.
  misc_feature (786890)..(786890): n is a or c or g or t.
  misc_feature (786907)..(786907): n is a or c or g or t.
  misc_feature (786944)..(786946): n is a or c or g or t.
  misc_feature (839139)..(839139): n is a or c or g or t.
  misc_feature (1128488)..(1128488): n is a or c or g or t.
  misc_feature (1128499)..(1128499): n is a or c or g or t.
  misc_feature (1128505)..(1128506): n is a or c or g or t.
  misc_feature (1128517)..(1128518): n is a or c or g or t.
  misc_feature (1128539)..(1128540): n is a or c or g or t.
  misc_feature (1561400)..(1561400): n is a or c or g or t.
  misc_feature (1561477)..(1561477): n is a or c or g or t.
  misc_feature (1561545)..(1561545): n is a or c or g or t.
  misc_feature (1767941)..(1767941): n is a or c or g or t.
VNGQEKRLPKVFKNEKEPREFLDEVLKRALQEEEYYTEFRGQSFVKLRVNLDKLGVHIDGIDAVEFQFSYNQAKGAYQLITAYPSKGKNVLGYVWDREKQSGKWIRMG

SEQ ID NO: 80 - protein, 110 aa, Thermococcus kodakaraensis KOD1
  misc_feature (414542)..(414542): n is a or c or g or t.
  misc_feature (786890)..(786890): n is a or c or g or t.
  misc_feature (786907)..(786907): n is a or c or g or t.
  misc_feature (786944)..(786946): n is a or c or g or t.
  misc_feature (839139)..(839139): n is a or c or g or t.
  misc_feature (1128488)..(1128488): n is a or c or g or t.
  misc_feature (1128499)..(1128499): n is a or c or g or t.
  misc_feature (1128505)..(1128506): n is a or c or g or t.
  misc_feature (1128517)..(1128518): n is a or c or g or t.
  misc_feature (1128539)..(1128540): n is a or c or g or t.
  misc_feature (1561400)..(1561400): n is a or c or g or t.
  misc_feature (1561477)..(1561477): n is a or c or g or t.
  misc_feature (1561545)..(1561545): n is a or c or g or t.
  misc_feature (1767941)..(1767941): n is a or c or g or t.
MGQKIIVNGQEKQLPRVFRDEGELMEFLKEVVERALKDPDYQKEFFNRLGAPKSSFGIPVDLKKLGMRVDGVDVVRLEFRFEDGKFVLETAYPVDGWAVETFIPGRGGWQ

SEQ ID NO: 81 - protein, 53 aa, Thermococcus kodakaraensis KOD1
  misc_feature (414542)..(414542): n is a or c or g or t.
  misc_feature (786890)..(786890): n is a or c or g or t.
  misc_feature (786907)..(786907): n is a or c or g or t.
  misc_feature (786944)..(786946): n is a or c or g or t.
  misc_feature (839139)..(839139): n is a or c or g or t.
  misc_feature (1128488)..(1128488): n is a or c or g or t.
  misc_feature (1128499)..(1128499): n is a or c or g or t.
  misc_feature (1128505)..(1128506): n is a or c or g or t.
  misc_feature (1128517)..(1128518): n is a or c or g or t.
  misc_feature (1128539)..(1128540): n is a or c or g or t.
  misc_feature (1561400)..(1561400): n is a or c or g or t.
  misc_feature (1561477)..(1561477): n is a or c or g or t.
  misc_feature (1561545)..(1561545): n is a or c or g or t.
  misc_feature (1767941)..(1767941): n is a or c or g or t.
VEDVLKISREYLEKYASIIEKIRLEHGEEPDDYDSLRGLYREVERLYRESGFR

SEQ ID NO: 82 - protein, 179 aa, Thermococcus kodakaraensis KOD1
  misc_feature (414542)..(414542): n is a or c or g or t.
  misc_feature (786890)..(786890): n is a or c or g or t.
  misc_feature (786907)..(786907): n is a or c or g or t.
  misc_feature (786944)..(786946): n is a or c or g or t.
  misc_feature (839139)..(839139): n is a or c or g or t.
  misc_feature (1128488)..(1128488): n is a or c or g or t.
  misc_feature (1128499)..(1128499): n is a or c or g or t.
  misc_feature (1128505)..(1128506): n is a or c or g or t.
  misc_feature (1128517)..(1128518): n is a or c or g or t.
  misc_feature (1128539)..(1128540): n is a or c or g or t.
  misc_feature (1561400)..(1561400): n is a or c or g or t.
  misc_feature (1561477)..(1561477): n is a or c or g or t.
  misc_feature (1561545)..(1561545): n is a or c or g or t.
  misc_feature (1767941)..(1767941): n is a or c or g or t.
VVVGKTYVPIKSRHDAWAIRLDGEGEPEWGLRFPGMEAVDIAVSPSGDLVVAMEDFELAGIGSTGEPLWGERLKLKMDGGLRTVLADEHVLVGGGALWGIGEAFIASIQPEGEPPAVLDWNPEVKESECTVFRAYANGEACFKATPVGRFTEVRLKPVEFKPDVFSSFEEFAESSYVRR

SEQ ID NO: 83 - protein, 54 aa, Thermococcus kodakaraensis KOD1
  misc_feature (414542)..(414542): n is a or c or g or t.
  misc_feature (786890)..(786890): n is a or c or g or t.
  misc_feature (786907)..(786907): n is a or c or g or t.
  misc_feature (786944)..(786946): n is a or c or g or t.
  misc_feature (839139)..(839139): n is a or c or g or t.
  misc_feature (1128488)..(1128488): n is a or c or g or t.
  misc_feature (1128499)..(1128499): n is a or c or g or t.
  misc_feature (1128505)..(1128506): n is a or c or g or t.
  misc_feature (1128517)..(1128518): n is a or c or g or t.
  misc_feature (1128539)..(1128540): n is a or c or g or t.
  misc_feature (1561400)..(1561400): n is a or c or g or t.
  misc_feature (1561477)..(1561477): n is a or c or g or t.
  misc_feature (1561545)..(1561545): n is a or c or g or t.
  misc_feature (1767941)..(1767941): n is a or c or g or t.
VTSMIIILGPLSLRTFIITLGPIKIGGIILSILALGLISVPFYRVFKNQNTGDS

SEQ ID NO: 84 - protein, 113 aa, Thermococcus kodakaraensis KOD1
  misc_feature (414542)..(414542): n is a or c or g or t.
  misc_feature (786890)..(786890): n is a or c or g or t.
  misc_feature (786907)..(786907): n is a or c or g or t.
  misc_feature (786944)..(786946): n is a or c or g or t.
  misc_feature (839139)..(839139): n is a or c or g or t.
  misc_feature (1128488)..(1128488): n is a or c or g or t.
  misc_feature (1128499)..(1128499): n is a or c or g or t.
  misc_feature (1128505)..(1128506): n is a or c or g or t.
  misc_feature (1128517)..(1128518): n is a or c or g or t.
  misc_feature (1128539)..(1128540): n is a or c or g or t.
  misc_feature (1561400)..(1561400): n is a or c or g or t.
  misc_feature (1561477)..(1561477): n is a or c or g or t.
  misc_feature (1561545)..(1561545): n is a or c or g or t.
  misc_feature (1767941)..(1767941): n is a or c or g or t.
MKAEIKNLIDRGTYRKLPLFEGELPEGSYAQIVEVKPKQTVKKHYHERQYELFYIISGEARLGIGDTEYQAKPGDIFLVKPKTVHWVVNEKDEPFRLFVVKLNYHGDDSVWLE

SEQ ID NO: 85 - protein, 232 aa, Thermococcus kodakaraensis KOD1
  misc_feature (414542)..(414542): n is a or c or g or t.
  misc_feature (786890)..(786890): n is a or c or g or t.
  misc_feature (786907)..(786907): n is a or c or g or t.
  misc_feature (786944)..(786946): n is a or c or g or t.
  misc_feature (839139)..(839139): n is a or c or g or t.
  misc_feature (1128488)..(1128488): n is a or c or g or t.
  misc_feature (1128499)..(1128499): n is a or c or g or t.
  misc_feature (1128505)..(1128506): n is a or c or g or t.
  misc_feature (1128517)..(1128518): n is a or c or g or t.
  misc_feature (1128539)..(1128540): n is a or c or g or t.
  misc_feature (1561400)..(1561400): n is a or c or g or t.
  misc_feature (1561477)..(1561477): n is a or c or g or t.
  misc_feature (1561545)..(1561545): n is a or c or g or t.
  misc_feature (1767941)..(1767941): n is a or c or g or t.
MPERVIGILGGMGPLATADLFRRIVERTPARRDQDHPRIIIYNNPKIPDRTAFILGNGPDPRPELIASAKKLESWGADFIIMPCNTAHFFAETIQRAINIPLVSMIEETAKKIESMGLRKVGLLATDGTIKGMVYHRALLKRGIHIAVPNKKDQGLVMKAIYEGVKAGNLELGRELLLKVAKKLERRSEGIIAGCTEVSVVLKSEDLNVPLIDPMDVIAERAVKLALGAEDF

SEQ ID NO: 86 - protein, 401 aa, Thermococcus kodakaraensis KOD1
  misc_feature (414542)..(414542): n is a or c or g or t.
  misc_feature (786890)..(786890): n is a or c or g or t.
  misc_feature (786907)..(786907): n is a or c or g or t.
  misc_feature (786944)..(786946): n is a or c or g or t.
  misc_feature (839139)..(839139): n is a or c or g or t.
  misc_feature (1128488)..(1128488): n is a or c or g or t.
  misc_feature (1128499)..(1128499): n is a or c or g or t.
  misc_feature (1128505)..(1128506): n is a or c or g or t.
  misc_feature (1128517)..(1128518): n is a or c or g or t.
  misc_feature (1128539)..(1128540): n is a or c or g or t.
  misc_feature (1561400)..(1561400): n is a or c or g or t.
  misc_feature (1561477)..(1561477): n is a or c or g or t.
  misc_feature (1561545)..(1561545): n is a or c or g or t.
  misc_feature (1767941)..(1767941): n is a or c or g or t.
VVENMEIGLVGKPNVGKSTFFSAATLVDVDIANYPFTTIDANVGVTYAIAEHPCKELGCTPNPQNYEYKDGKALIPIKMIDVAGLVPGAHEGRGLGNKFLDDLRMASALIHVVDATGKTDAEGQPTDYHDPVEDIEFLEREIDYWILGILKKGWEKFAKRIKLQHMKLEGAIADHLSGISVSEEDVWEAIHRLGLSDDPTKWTDEDLFNFVRELRKVNKPIIIAANKADAASDEQLERLKKEGEKRGYIVIPTSAAAELTLRKAAKAGFIDYVPGSSDFKVLKKLSPKQEKALELIREKVLQRFGSTGVQEVINRATFELLKLIPVYPVQDENKLTDQFGNVLPHVYLLPKGSTPKDLAYKVHTDLGKTFLYAVNARTKRRVGDDYELQFNDIIKIVATAK

SEQ ID NO: 87 - protein, 288 aa, Thermococcus kodakaraensis KOD1
  misc_feature (414542)..(414542): n is a or c or g or t.
  misc_feature (786890)..(786890): n is a or c or g or t.
  misc_feature (786907)..(786907): n is a or c or g or t.
  misc_feature (786944)..(786946): n is a or c or g or t.
  misc_feature (839139)..(839139): n is a or c or g or t.
  misc_feature (1128488)..(1128488): n is a or c or g or t.
  misc_feature (1128499)..(1128499): n is a or c or g or t.
  misc_feature (1128505)..(1128506): n is a or c or g or t.
  misc_feature (1128517)..(1128518): n is a or c or g or t.
  misc_feature (1128539)..(1128540): n is a or c or g or t.
  misc_feature (1561400)..(1561400): n is a or c or g or t.
  misc_feature (1561477)..(1561477): n is a or c or g or t.
  misc_feature (1561545)..(1561545): n is a or c or g or t.
  misc_feature (1767941)..(1767941): n is a or c or g or t.
MGSKLDEFARFVDVHKALEYVEKRRHEDGGYCFVSVLNDTNVNDTYYAVKMYDLLGLGVPEKEKTIEFLERAIQPQTAVVAIAMALEGLAILGAKDIAREHVGIVYTKYNPLEDKFAVGLGGSEEFGTATPLEATYWVVKAFKAIGQPISEKEREKIRAFVMRFRMRNGFGVKQPTTTMTYQALYTLYALGYHPPRSPHFRNCELCGDWGGFTEVPYSLPPYLEPTFYATRGLELQGETLTCPRRHIWFIRQLQNSNGGFRRSLELGISNFQNTYRALAVVDAMMRYL

SEQ ID NO: 88 - protein, 123 aa, Thermococcus kodakaraensis KOD1
  misc_feature (414542)..(414542): n is a or c or g or t.
  misc_feature (786890)..(786890): n is a or c or g or t.
  misc_feature (786907)..(786907): n is a or c or g or t.
  misc_feature (786944)..(786946): n is a or c or g or t.
  misc_feature (839139)..(839139): n is a or c or g or t.
  misc_feature (1128488)..(1128488): n is a or c or g or t.
  misc_feature (1128499)..(1128499): n is a or c or g or t.
  misc_feature (1128505)..(1128506): n is a or c or g or t.
  misc_feature (1128517)..(1128518): n is a or c or g or t.
  misc_feature (1128539)..(1128540): n is a or c or g or t.
  misc_feature (1561400)..(1561400): n is a or c or g or t.
  misc_feature (1561477)..(1561477): n is a or c or g or t.
  misc_feature (1561545)..(1561545): n is a or c or g or t.
  misc_feature (1767941)..(1767941): n is a or c or g or t.
MNLRIAMAIALGGAFGAVARFYISGLLPVYRDFPVGTLMVNSIASLILGYLYGLLFWGFDVPPDWRAFFGTGFCGALSTFSTFSYETFSLLREREYLIATLNILANVIITIALVFAGFMLARR

SEQ ID NO: 89 - protein, 153 aa, Thermococcus kodakaraensis KOD1
  misc_feature (414542)..(414542): n is a or c or g or t.
  misc_feature (786890)..(786890): n is a or c or g or t.
  misc_feature (786907)..(786907): n is a or c or g or t.
  misc_feature (786944)..(786946): n is a or c or g or t.
  misc_feature (839139)..(839139): n is a or c or g or t.
  misc_feature (1128488)..(1128488): n is a or c or g or t.
  misc_feature (1128499)..(1128499): n is a or c or g or t.
  misc_feature (1128505)..(1128506): n is a or c or g or t.
  misc_feature (1128517)..(1128518): n is a or c or g or t.
  misc_feature (1128539)..(1128540): n is a or c or g or t.
  misc_feature (1561400)..(1561400): n is a or c or g or t.
  misc_feature (1561477)..(1561477): n is a or c or g or t.
  misc_feature (1561545)..(1561545): n is a or c or g or t.
  misc_feature (1767941)..(1767941): n is a or c or g or t.
VCKMKVEIPNYGEVQIDSVIFDLNGTLGESGRVDEEVKHLLERLADKYTVVVISSDTFGTLEEELGGLPVRIARASNASEKVEIARGYAPYAAVGNGNNDVAMLEGAELTFCVIGKEGATVDALLASDVVVTDVRDAIAMLLDEKKLIATLRG

SEQ ID NO: 90 - protein, 171 aa, Thermococcus kodakaraensis KOD1
  misc_feature (414542)..(414542): n is a or c or g or t.
  misc_feature (786890)..(786890): n is a or c or g or t.
  misc_feature (786907)..(786907): n is a or c or g or t.
  misc_feature (786944)..(786946): n is a or c or g or t.
  misc_feature (839139)..(839139): n is a or c or g or t.
  misc_feature (1128488)..(1128488): n is a or c or g or t.
  misc_feature (1128499)..(1128499): n is a or c or g or t.
  misc_feature (1128505)..(1128506): n is a or c or g or t.
  misc_feature (1128517)..(1128518): n is a or c or g or t.
  misc_feature (1128539)..(1128540): n is a or c or g or t.
  misc_feature (1561400)..(1561400): n is a or c or g or t.
  misc_feature (1561477)..(1561477): n is a or c or g or t.
  misc_feature (1561545)..(1561545): n is a or c or g or t.
  misc_feature (1767941)..(1767941): n is a or c or g or t.
MVVKREMTRKFLEDAFAGESMAHMRYLIFAEQAEREGLHNIAKLFRAIAHAEFVHAKNHFIALGKLGKTPENLQMGIEGETFEVEEMYPVYKNSAEFQEEKDAVRTTHYALEAEKIHAELYKKAKEKAEKGEDIEIKRVYICPVCGYTAVDEAPEYCPVCGAPRDKFVVFE

SEQ ID NO: 91 - protein, 117 aa, Thermococcus kodakaraensis KOD1
  misc_feature (414542)..(414542): n is a or c or g or t.
  misc_feature (786890)..(786890): n is a or c or g or t.
  misc_feature (786907)..(786907): n is a or c or g or t.
  misc_feature (786944)..(786946): n is a or c or g or t.
  misc_feature (839139)..(839139): n is a or c or g or t.
  misc_feature (1128488)..(1128488): n is a or c or g or t.
  misc_feature (1128499)..(1128499): n is a or c or g or t.
  misc_feature (1128505)..(1128506): n is a or c or g or t.
  misc_feature (1128517)..(1128518): n is a or c or g or t.
  misc_feature (1128539)..(1128540): n is a or c or g or t.
  misc_feature (1561400)..(1561400): n is a or c or g or t.
  misc_feature (1561477)..(1561477): n is a or c or g or t.
  misc_feature (1561545)..(1561545): n is a or c or g or t.
  misc_feature (1767941)..(1767941): n is a or c or g or t.
MKVYMPDREWPEHYRAVLEELAKITDPITGGDILDSGVVAGLEVTEDTLKVWLNFESHAEYNITGESAIAYSKIIGDIMERFALVKFENVYVYDLKNNPVGVFENRGRYRAEDLEGD

SEQ ID NO: 92 - protein, 54 aa, Thermococcus kodakaraensis KOD1
  misc_feature (414542)..(414542): n is a or c or g or t.
  misc_feature (786890)..(786890): n is a or c or g or t.
  misc_feature (786907)..(786907): n is a or c or g or t.
  misc_feature (786944)..(786946): n is a or c or g or t.
  misc_feature (839139)..(839139): n is a or c or g or t.
  misc_feature (1128488)..(1128488): n is a or c or g or t.
  misc_feature (1128499)..(1128499): n is a or c or g or t.
  misc_feature (1128505)..(1128506): n is a or c or g or t.
  misc_feature (1128517)..(1128518): n is a or c or g or t.
  misc_feature (1128539)..(1128540): n is a or c or g or t.
  misc_feature (1561400)..(1561400): n is a or c or g or t.
  misc_feature (1561477)..(1561477): n is a or c or g or t.
  misc_feature (1561545)..(1561545): n is a or c or g or t.
  misc_feature (1767941)..(1767941): n is a or c or g or t.
MSPMKWPLVFIVVFLLLSGVFYVELCKNREITENNAACTAGTAVMDLEKEAYKV

SEQ ID NO: 93 - protein, 249 aa, Thermococcus kodakaraensis KOD1
  misc_feature (414542)..(414542): n is a or c or g or t.
  misc_feature (786890)..(786890): n is a or c or g or t.
  misc_feature (786907)..(786907): n is a or c or g or t.
  misc_feature (786944)..(786946): n is a or c or g or t.
  misc_feature (839139)..(839139): n is a or c or g or t.
  misc_feature (1128488)..(1128488): n is a or c or g or t.
  misc_feature (1128499)..(1128499): n is a or c or g or t.
  misc_feature (1128505)..(1128506): n is a or c or g or t.
  misc_feature (1128517)..(1128518): n is a or c or g or t.
  misc_feature (1128539)..(1128540): n is a or c or g or t.
  misc_feature (1561400)..(1561400): n is a or c or g or t.
  misc_feature (1561477)..(1561477): n is a or c or g or t.
  misc_feature (1561545)..(1561545): n is a or c or g or t.
  misc_feature (1767941)..(1767941): n is a or c or g or t.
MPFEVVFDGAKEFADLIATASNLIDEAAFKFTEEGISMRAMDPSRVVLIDLNLPESIFSKYEVEEPETIGINMDQFKKILKRGKAKDTLILRKGDENFLEITFEGTAKRTFRLPLIDVEELELELPELPFTAKVVLLGEVLKEGIKDASLVSDAIKFIAKENEFTMKAEGETNEVEIRLTLEDEGLLDLEVEEETKSAYGIRYLSDMVKGIGKADEVILRFGNEMPLQMEYMIRDEGRLTFLLAPRVEE

SEQ ID NO: 94 - protein, 188 aa, Thermococcus kodakaraensis KOD1
  misc_feature (414542)..(414542): n is a or c or g or t.
  misc_feature (786890)..(786890): n is a or c or g or t.
  misc_feature (786907)..(786907): n is a or c or g or t.
  misc_feature (786944)..(786946): n is a or c or g or t.
  misc_feature (839139)..(839139): n is a or c or g or t.
  misc_feature (1128488)..(1128488): n is a or c or g or t.
  misc_feature (1128499)..(1128499): n is a or c or g or t.
  misc_feature (1128505)..(1128506): n is a or c or g or t.
  misc_feature (1128517)..(1128518): n is a or c or g or t.
  misc_feature (1128539)..(1128540): n is a or c or g or t.
  misc_feature (1561400)..(1561400): n is a or c or g or t.
  misc_feature (1561477)..(1561477): n is a or c or g or t.
  misc_feature (1561545)..(1561545): n is a or c or g or t.
  misc_feature (1767941)..(1767941): n is a or c or g or t.
VDIVKLRELLEAELSSTDLNELDEDFYVEFDSLIKALKLSAESSRERGEDVEERLYLAQLKIAESLMKEIIKLRLHKIVDLAVEGKIAEMTAEEKRLFNVIRAFIEREELPEISEEVQPQEESEAEAEYRSKEVPKEAYIIQIDLPAVLGPDMKEYGPFMAGDMAIIPTVIGRALVEREAARRVRIFL

SEQ ID NO: 95 - protein, 216 aa, Thermococcus kodakaraensis KOD1
  misc_feature (414542)..(414542): n is a or c or g or t.
  misc_feature (786890)..(786890): n is a or c or g or t.
  misc_feature (786907)..(786907): n is a or c or g or t.
  misc_feature (786944)..(786946): n is a or c or g or t.
  misc_feature (839139)..(839139): n is a or c or g or t.
  misc_feature (1128488)..(1128488): n is a or c or g or t.
  misc_feature (1128499)..(1128499): n is a or c or g or t.
  misc_feature (1128505)..(1128506): n is a or c or g or t.
  misc_feature (1128517)..(1128518): n is a or c or g or t.
  misc_feature (1128539)..(1128540): n is a or c or g or t.
  misc_feature (1561400)..(1561400): n is a or c or g or t.
  misc_feature (1561477)..(1561477): n is a or c or g or t.
  misc_feature (1561545)..(1561545): n is a or c or g or t.
  misc_feature (1767941)..(1767941): n is a or c or g or t.
MVVIGEKFPEVEVKTTHGVIKLPDYFAEQGKWFVLFSHPADFTPVCTTEFYAMQKRVDQFRELGVEPIGLSVDQVFSHIKWMEWIKENLGEEITFPVIADDRGELADKLGMIPSGATITARAVFIVDDKGIIRAIVYYPAEVGRDWDEILRLVKALKVSDEKGVALPHKWPNNELIGDKAIVPPASTVDEVKQREEAKAKGEIECYDWWFCYKKLE

SEQ ID NO: 96 - protein, 318 aa, Thermococcus kodakaraensis KOD1
  misc_feature (414542)..(414542): n is a or c or g or t.
  misc_feature (786890)..(786890): n is a or c or g or t.
  misc_feature (786907)..(786907): n is a or c or g or t.
  misc_feature (786944)..(786946): n is a or c or g or t.
  misc_feature (839139)..(839139): n is a or c or g or t.
  misc_feature (1128488)..(1128488): n is a or c or g or t.
  misc_feature (1128499)..(1128499): n is a or c or g or t.
  misc_feature (1128505)..(1128506): n is a or c or g or t.
  misc_feature (1128517)..(1128518): n is a or c or g or t.
  misc_feature (1128539)..(1128540): n is a or c or g or t.
  misc_feature (1561400)..(1561400): n is a or c or g or t.
  misc_feature (1561477)..(1561477): n is a or c or g or t.
  misc_feature (1561545)..(1561545): n is a or c or g or t.
  misc_feature (1767941)..(1767941): n is a or c or g or t.
MERERLIKTVEAILRGAGYRVARLDLKGSCFDLVASRLFLLLFIKATVNIDTITEEQAEDLKRLAKFFKASPLIVGLRSKSGELEEGVVYERFGIYALRPETLYDALLNNELPAVFAERGGLYVRINGELLRELREKHGYSVNELAQLLGVSRKSLLNYERGEQAVSLDVAIQLEEIFDEALAEPIDILRAKVEADLNVKPETPLEREVFERLKKLGLGLVKVKKAPFNAISTEDDIRLLTGIDERKTRSTIKRAEMVAEVGRIVNSGGVFILEKTKAEVVSEVPLIPKESLEEVKDADELIELIDKLKKEIKEKLFS

SEQ ID NO: 97 - protein, 218 aa, Thermococcus kodakaraensis KOD1
  misc_feature (414542)..(414542): n is a or c or g or t.
  misc_feature (786890)..(786890): n is a or c or g or t.
  misc_feature (786907)..(786907): n is a or c or g or t.
  misc_feature (786944)..(786946): n is a or c or g or t.
  misc_feature (839139)..(839139): n is a or c or g or t.
  misc_feature (1128488)..(1128488): n is a or c or g or t.
  misc_feature (1128499)..(1128499): n is a or c or g or t.
  misc_feature (1128505)..(1128506): n is a or c or g or t.
  misc_feature (1128517)..(1128518): n is a or c or g or t.
  misc_feature (1128539)..(1128540): n is a or c or g or t.
  misc_feature (1561400)..(1561400): n is a or c or g or t.
  misc_feature (1561477)..(1561477): n is a or c or g or t.
  misc_feature (1561545)..(1561545): n is a or c or g or t.
  misc_feature (1767941)..(1767941): n is a or c or g or t.
MRIVAVTDIHGKLEKVKRLAGVLEEERPDLILIAGDITNFSGAEVARTVLEPLMALDVPILAVHGNCDGRDVPELLEELGISLHNKRKEVNGTGFVGVGGSNITPFNTIWELTEDEIMEILRKNYRPGDIILSHAPPKDTKADRVHSGLHVGSTALREFIEKNQPPLVVTGHIHEARSVDELGETIIVNPGPLFRGYYAVIDFDEKEKVVKNIELREL

SEQ ID NO: 98 - protein, 446 aa, Thermococcus kodakaraensis KOD1
  misc_feature (414542)..(414542): n is a or c or g or t.
  misc_feature (786890)..(786890): n is a or c or g or t.
  misc_feature (786907)..(786907): n is a or c or g or t.
  misc_feature (786944)..(786946): n is a or c or g or t.
  misc_feature (839139)..(839139): n is a or c or g or t.
  misc_feature (1128488)..(1128488): n is a or c or g or t.
  misc_feature (1128499)..(1128499): n is a or c or g or t.
  misc_feature (1128505)..(1128506): n is a or c or g or t.
  misc_feature (1128517)..(1128518): n is a or c or g or t.
  misc_feature (1128539)..(1128540): n is a or c or g or t.
  misc_feature (1561400)..(1561400): n is a or c or g or t.
  misc_feature (1561477)..(1561477): n is a or c or g or t.
  misc_feature (1561545)..(1561545): n is a or c or g or t.
  misc_feature (1767941)..(1767941): n is a or c or g or t.
VVTNFKTHRKRLIFKLPHYPPPMIIHIGIDDTDSPNGMCTTYLGAILYRELSRLAEPLDLPRLIRLNPNIPYKTRGNGAVAMTFEASEDIIPEIKDTVLFYVSQLADFEHENTNPGVVFLEGDVPNELRKFSLRALREHVTIGEAEEVARKVGAEYFKFKLGRGVIGSLAAIGYPLERFTYELLAYREREYWGTPRRVNEESVFLADKWAYPFSYDNVDPYKRVVLITPHGKDPVLVGIRGIDKGKVLQVFEMVEFEEPVAFYQLYKTNQNTDDHLTPKRIGELKLYDSAVVRGWVASPYWERGRHVFFELEDETGKIRVAAFEPTKKFRNWVRKLLPGDEIIAAGGVKEHEGILTLNLEKFYPVELVPKVEYRKPKCPVCGGTMKSKGDYLKCKRCGYKMPKRLIPVEVPRDLERKIYEVPPDARKHLSRPLVLPGGEERLMELL

SEQ ID NO: 99 - protein, 202 aa, Thermococcus kodakaraensis KOD1
  misc_feature (414542)..(414542): n is a or c or g or t.
  misc_feature (786890)..(786890): n is a or c or g or t.
  misc_feature (786907)..(786907): n is a or c or g or t.
  misc_feature (786944)..(786946): n is a or c or g or t.
  misc_feature (839139)..(839139): n is a or c or g or t.
  misc_feature (1128488)..(1128488): n is a or c or g or t.
  misc_feature (1128499)..(1128499): n is a or c or g or t.
  misc_feature (1128505)..(1128506): n is a or c or g or t.
  misc_feature (1128517)..(1128518): n is a or c or g or t.
  misc_feature (1128539)..(1128540): n is a or c or g or t.
  misc_feature (1561400)..(1561400): n is a or c or g or t.
  misc_feature (1561477)..(1561477): n is a or c or g or t.
  misc_feature (1561545)..(1561545): n is a or c or g or t.
  misc_feature (1767941)..(1767941): n is a or c or g or t.
VVGKMRTFILKANTAVTSPDFSLKDLPGTGGRIDLLCRFLNSAFLLSHGIRKDVRVFMTLYGRPNPPKTIHFEGPKLKVRLNPDERSTALILKKALKIGEDLREPTKEVEVFPGVYVSNMTFEDVVRRVMKDSTLYYLVEDGKPITEIEFPQNPAFVLGDHLGLSKEDERFLEGIAKKVRIGRRSYLASHVVAFVNIWLDGM

SEQ ID NO: 100 - protein, 454 aa, Thermococcus kodakaraensis KOD1
  misc_feature (414542)..(414542): n is a or c or g or t.
  misc_feature (786890)..(786890): n is a or c or g or t.
  misc_feature (786907)..(786907): n is a or c or g or t.
  misc_feature (786944)..(786946): n is a or c or g or t.
  misc_feature (839139)..(839139): n is a or c or g or t.
  misc_feature (1128488)..(1128488): n is a or c or g or t.
  misc_feature (1128499)..(1128499): n is a or c or g or t.
  misc_feature (1128505)..(1128506): n is a or c or g or t.
  misc_feature (1128517)..(1128518): n is a or c or g or t.
  misc_feature (1128539)..(1128540): n is a or c or g or t.
  misc_feature (1561400)..(1561400): n is a or c or g or t.
  misc_feature (1561477)..(1561477): n is a or c or g or t.
  misc_feature (1561545)..(1561545): n is a or c or g or t.
  misc_feature (1767941)..(1767941): n is a or c or g or t.
MAVHPIDYRYGSEEMRRIWDEENKLQKLLDVEAALARAHAKVGNIPEESARVISERANTKWVKLERVKEIEAEIHHDIMAVVKALSEVCGEHGKYVHLGATSNDIIDTANALLIKESLAIVERDLKELRSVLKRLAMEHKYTVCIGRTHGQHAVPTTYGMKFAIWLDEVQRHIDRINQLKERVLVGQMSGAVGTMASFGERGLEIQRLVMEGLGLKPARITNQIIQRDVYAELMMVLALIASTLDKIALEIRNLQRTEILEVSEPFGKKQVGSSTMPHKRNPIRSEKVSGLARVLYSNVIPALLNNPLWHERDLTNSSVERVILPESFVLLDEMLKTTIKVLSGLEFFPENIKRNLYLTNNLIMAEPLMLKLTEKGMGRQEAHELVRQLAMKAFHEKRDLLEVVRESEEAMKYLTEEDLESLKPENYIGLAPQIVDNVIAFIGEKEREEAFMGR

SEQ ID NO: 101 - protein, 154 aa, Thermococcus kodakaraensis KOD1
  misc_feature (414542)..(414542): n is a or c or g or t.
  misc_feature (786890)..(786890): n is a or c or g or t.
  misc_feature (786907)..(786907): n is a or c or g or t.
  misc_feature (786944)..(786946): n is a or c or g or t.
  misc_feature (839139)..(839139): n is a or c or g or t.
  misc_feature (1128488)..(1128488): n is a or c or g or t.
  misc_feature (1128499)..(1128499): n is a or c or g or t.
  misc_feature (1128505)..(1128506): n is a or c or g or t.
  misc_feature (1128517)..(1128518): n is a or c or g or t.
  misc_feature (1128539)..(1128540): n is a or c or g or t.
  misc_feature (1561400)..(1561400): n is a or c or g or t.
  misc_feature (1561477)..(1561477): n is a or c or g or t.
  misc_feature (1561545)..(1561545): n is a or c or g or t.
  misc_feature (1767941)..(1767941): n is a or c or g or t.
MSGNFRVVERKISWNKDFDSSHFLALPYESKCLRIHGHTYHVDVEIWGELNESGMIFDFNHLSNLVKLLDHRILVSENWVKERRDGAVIIEKNDKRLELPESEAVILNKPNVTAEYIAEWFAERVAEKAGDNVRKIRVRIWEDPRSYAEVTLER

SEQ ID NO: 102 - protein, 366 aa, Thermococcus kodakaraensis KOD1
  misc_feature (414542)..(414542): n is a or c or g or t.
  misc_feature (786890)..(786890): n is a or c or g or t.
  misc_feature (786907)..(786907): n is a or c or g or t.
  misc_feature (786944)..(786946): n is a or c or g or t.
  misc_feature (839139)..(839139): n is a or c or g or t.
  misc_feature (1128488)..(1128488): n is a or c or g or t.
  misc_feature (1128499)..(1128499): n is a or c or g or t.
  misc_feature (1128505)..(1128506): n is a or c or g or t.
  misc_feature (1128517)..(1128518): n is a or c or g or t.
  misc_feature (1128539)..(1128540): n is a or c or g or t.
  misc_feature (1561400)..(1561400): n is a or c or g or t.
  misc_feature (1561477)..(1561477): n is a or c or g or t.
  misc_feature (1561545)..(1561545): n is a or c or g or t.
  misc_feature (1767941)..(1767941): n is a or c or g or t.
MIKSNGDTMKKAAIILAAVVLLSVFGVVGMPKVSAAGEVVIAVDLAHGENPKGLTDVTYENETLTEGMLKVLTDYTFVYFGDSKYEADLGIKNIGDKITYEALKENNVTILIIGQPRSPFYPEEVEAIKKWLEEGGHALWIAGDSDYGTSGVNTINFVDSVLNQLNMTNLRLDQASVEDPVSNAGAPYRVVAYADPWGDTPKRDIIVQGFEHDGAVLAHGPGVVAWVDGVDGSGDWHKLTPEEKPENTYVLIRSTGDSVIKENEDPAANAYTAGEQGEFPIAAAQIIELEGKNPSVIIVSGETPIGGYEPMWTSVYYQKPLDGPKVVSNIFKWSVEITKGESGKSTCGPAFLVGLAVVPLLLRRRK

SEQ ID NO: 103 - protein, 615 aa, Thermococcus kodakaraensis KOD1
  misc_feature (414542)..(414542): n is a or c or g or t.
  misc_feature (786890)..(786890): n is a or c or g or t.
  misc_feature (786907)..(786907): n is a or c or g or t.
  misc_feature (786944)..(786946): n is a or c or g or t.
  misc_feature (839139)..(839139): n is a or c or g or t.
  misc_feature (1128488)..(1128488): n is a or c or g or t.
  misc_feature (1128499)..(1128499): n is a or c or g or t.
  misc_feature (1128505)..(1128506): n is a or c or g or t.
  misc_feature (1128517)..(1128518): n is a or c or g or t.
  misc_feature (1128539)..(1128540): n is a or c or g or t.
  misc_feature (1561400)..(1561400): n is a or c or g or t.
  misc_feature (1561477)..(1561477): n is a or c or g or t.
  misc_feature (1561545)..(1561545): n is a or c or g or t.
  misc_feature (1767941)..(1767941): n is a or c or g or t.
MKVNKWSERLFGTPLPDGVVITSFLFPLLYLVAFLIIPTFVMLATAFEYNGHISAHWFSSIFRSAYYFNPLHPDGYLVKTLTYGGKEVYHFYGWDFGVVINSILVSIAVMILTTILGTVFAFIMARYDFPGKNIMRVLLFIPLLVTPFVNVVVVKKMFLPDGIINWIFYEHLHIFPKPIWIDGLVGVIIAQTITYYPIVYLNAYASFINIDPSLEEQAENLGSKGFHLFRTVTFPLALPGIMSGAILVGIFSLEDLAAPIVFQGSPIAKKLMSYQIYSSFVSGFAIGNPQMAALALVMLVLAVIMFLAVRWYVGLRQYAMLSKGGRWNPRVAKPKWWQALLIAFVAVPVLLITVFPQIGVLLLAFSKSWYGTWPSGFTLDNMKAIITQPDIERVIINSLMYSTAAVFIIILLSLTSAYASNRFKKARLAPIIDSLATIPIAVPGIVIAMSYFFFFSTVPPFKGSSLDPTNLLEFFPGAALILAYSIRRLPFAARSISAGLQQVHVSLEEAAMNLGAGRWKALTSVIIPMIYLNLFGGAMLSFVYCMSETSVGITLGSINSTWYPITAKMKELIIGAVGSANLAAALGVFLMAVQITAIVIANLITKQRYSFIGLT

SEQ ID NO: 104 - protein, 211 aa, Thermococcus kodakaraensis KOD1
  misc_feature (414542)..(414542): n is a or c or g or t.
  misc_feature (786890)..(786890): n is a or c or g or t.
  misc_feature (786907)..(786907): n is a or c or g or t.
  misc_feature (786944)..(786946): n is a or c or g or t.
  misc_feature (839139)..(839139): n is a or c or g or t.
  misc_feature (1128488)..(1128488): n is a or c or g or t.
  misc_feature (1128499)..(1128499): n is a or c or g or t.
  misc_feature (1128505)..(1128506): n is a or c or g or t.
  misc_feature (1128517)..(1128518): n is a or c or g or t.
  misc_feature (1128539)..(1128540): n is a or c or g or t.
  misc_feature (1561400)..(1561400): n is a or c or g or t.
  misc_feature (1561477)..(1561477): n is a or c or g or t.
  misc_feature (1561545)..(1561545): n is a or c or g or t.
  misc_feature (1767941)..(1767941): n is a or c or g or t.
VIAMMLITTSHRPTRRTRSFGHDLEKVFPNSLYLTRGKKTIQDLLMEAYDRGYERLLIINVWKGNPLKMTFIKVDPEDWGYIGYLYLHGIKLQREIGFRNIPPIREEMPFVVTTAKRVGIDHTAFAQVFAELTGGKFVPRGNKSLQTIADKNNTDVIGVIENYPRGMAVNFYRFDITRERPVGPLILVKIWIMEDGRRWDYKEALGIKPKE

SEQ ID NO: 105 - protein, 201 aa, Thermococcus kodakaraensis KOD1
  misc_feature (414542)..(414542): n is a or c or g or t.
  misc_feature (786890)..(786890): n is a or c or g or t.
  misc_feature (786907)..(786907): n is a or c or g or t.
  misc_feature (786944)..(786946): n is a or c or g or t.
  misc_feature (839139)..(839139): n is a or c or g or t.
  misc_feature (1128488)..(1128488): n is a or c or g or t.
  misc_feature (1128499)..(1128499): n is a or c or g or t.
  misc_feature (1128505)..(1128506): n is a or c or g or t.
  misc_feature (1128517)..(1128518): n is a or c or g or t.
  misc_feature (1128539)..(1128540): n is a or c or g or t.
  misc_feature (1561400)..(1561400): n is a or c or g or t.
  misc_feature (1561477)..(1561477): n is a or c or g or t.
  misc_feature (1561545)..(1561545): n is a or c or g or t.
  misc_feature (1767941)..(1767941): n is a or c or g or t.
MSRMHFYLRQRLEEVRKRVLYESYEAQKLPAWERAGITWLALFAFWIIISGKFSPSHVITGALVTLLIAIITRDFLTDDIRRTGHLLSKAAYIFLFLVPQYLFIMAFRLLESNLRVVKNVILMDINPGIVKVKADLHSDTGLTVLANSITLTPGTLTLDVTKKLGEAYLYVHWIDVETLDGEKAGMKIKGELEEWLKKIFW

SEQ ID NO: 106 - protein, 135 aa, Thermococcus kodakaraensis KOD1
  misc_feature (414542)..(414542): n is a or c or g or t.
  misc_feature (786890)..(786890): n is a or c or g or t.
  misc_feature (786907)..(786907): n is a or c or g or t.
  misc_feature (786944)..(786946): n is a or c or g or t.
  misc_feature (839139)..(839139): n is a or c or g or t.
  misc_feature (1128488)..(1128488): n is a or c or g or t.
  misc_feature (1128499)..(1128499): n is a or c or g or t.
  misc_feature (1128505)..(1128506): n is a or c or g or t.
  misc_feature (1128517)..(1128518): n is a or c or g or t.
  misc_feature (1128539)..(1128540): n is a or c or g or t.
  misc_feature (1561400)..(1561400): n is a or c or g or t.
  misc_feature (1561477)..(1561477): n is a or c or g or t.
  misc_feature (1561545)..(1561545): n is a or c or g or t.
  misc_feature (1767941)..(1767941): n is a or c or g or t.
VKMSLVVRTTTKLVAPFLVTYGAYLTIYGYESPGGGFQAGVIFAVSVILLMTAYGYRRTRKHFPLRTVQLVESSAALFIVGTAIAGLAFGAFFFNFLRPYIPGGTVMTFNIGVALKVGTSFVLVFYILSRWVDRD

SEQ ID NO: 107 - protein, 495 aa, Thermococcus kodakaraensis KOD1
  misc_feature (414542)..(414542): n is a or c or g or t.
  misc_feature (786890)..(786890): n is a or c or g or t.
  misc_feature (786907)..(786907): n is a or c or g or t.
  misc_feature (786944)..(786946): n is a or c or g or t.
  misc_feature (839139)..(839139): n is a or c or g or t.
  misc_feature (1128488)..(1128488): n is a or c or g or t.
  misc_feature (1128499)..(1128499): n is a or c or g or t.
  misc_feature (1128505)..(1128506): n is a or c or g or t.
  misc_feature (1128517)..(1128518): n is a or c or g or t.
  misc_feature (1128539)..(1128540): n is a or c or g or t.
  misc_feature (1561400)..(1561400): n is a or c or g or t.
  misc_feature (1561477)..(1561477): n is a or c or g or t.
  misc_feature (1561545)..(1561545): n is a or c or g or t.
  misc_feature (1767941)..(1767941): n is a or c or g or t.
VDLIAVLVALPLLFAFLTALTIPLRTEKYARYFFLAGALFPWLVYLLVGERSEVVGGWPRMGGIEVALDTYNSLLVLGELILFSAVALYSIDYFKKDVKPLVLLLLVHAGLLGAFISRDLFNFYIFMEIASVSAFALVGFSGRKDALKAAYKYLMLSLLASYFFVFSIGIIYLKTGYLNLELISKSPLSPEVEAAVAVAFTSLLLKAGIFPLHLWLPDAHANAPSPVSALLSGAVVKAPAYGMVLLSLHFPFSGVLRTVLLGTAFASMLFGVALALMQKDIKRLLAYHTVSQMGYVLLGIATLNPLGAVYYAFAHMLFKGGLFLSAGAMVDKAGTRELDKLSYRGDPLLMTSVLMLSLAIGGIWPFVGSPAKAALLKGLPYGRELFYAAGLGTLTSFTKLNYYLMKGKGGQHGFTVLPSFMMALTAFFAGISLGGSPKAMDAYLLLGGVALFMLLKKSGLLGVKLPRTEITPKEINVGAVIFAIFLLLLLHLSQG

SEQ ID NO: 108 - protein, 379 aa, Thermococcus kodakaraensis KOD1
  misc_feature (414542)..(414542): n is a or c or g or t.
  misc_feature (786890)..(786890): n is a or c or g or t.
  misc_feature (786907)..(786907): n is a or c or g or t.
  misc_feature (786944)..(786946): n is a or c or g or t.
  misc_feature (839139)..(839139): n is a or c or g or t.
  misc_feature (1128488)..(1128488): n is a or c or g or t.
  misc_feature (1128499)..(1128499): n is a or c or g or t.
  misc_feature (1128505)..(1128506): n is a or c or g or t.
  misc_feature (1128517)..(1128518): n is a or c or g or t.
  misc_feature (1128539)..(1128540): n is a or c or g or t.
  misc_feature (1561400)..(1561400): n is a or c or g or t.
  misc_feature (1561477)..(1561477): n is a or c or g or t.
  misc_feature (1561545)..(1561545): n is a or c or g or t.
  misc_feature (1767941)..(1767941): n is a or c or g or t.
VAFDVIGYVFIIIAVARIFAEVFERIGYPGFLGEITAGLMLGVFLHDLPREDLTLMAEFGVFFLMMYAGLELTPEEVRIGGKKSLPIYVITLVVMFFLTLPFTGYRIGTDNFIVASILAVASAPIVIRLTRFFGQEFLHIALSYAVISEVGTLVILYILINFELHHLSYFELFLELLKDAVFLTIVLGLNYVIGIKQRLRIIRALRRLQSDEAVFGMVMILATSLALISEELGLHFSIGAFLVGLMLHSDLLGTKQYERVHTIISGVTYGIFAPIFFAWRGINFETEFSLEVVYFFLVIYLVRILLTTVLVWEKDLKVSLTRAAGISSFGVLGLLVGEVGYSYGVLSEHMYALASLASVLGIFVSASIGLILSKLSSSG

SEQ ID NO: 109 - protein, 282 aa, Thermococcus kodakaraensis KOD1
  misc_feature (414542)..(414542): n is a or c or g or t.
  misc_feature (786890)..(786890): n is a or c or g or t.
  misc_feature (786907)..(786907): n is a or c or g or t.
  misc_feature (786944)..(786946): n is a or c or g or t.
  misc_feature (839139)..(839139): n is a or c or g or t.
  misc_feature (1128488)..(1128488): n is a or c or g or t.
  misc_feature (1128499)..(1128499): n is a or c or g or t.
  misc_feature (1128505)..(1128506): n is a or c or g or t.
  misc_feature (1128517)..(1128518): n is a or c or g or t.
  misc_feature (1128539)..(1128540): n is a or c or g or t.
  misc_feature (1561400)..(1561400): n is a or c or g or t.
  misc_feature (1561477)..(1561477): n is a or c or g or t.
  misc_feature (1561545)..(1561545): n is a or c or g or t.
  misc_feature (1767941)..(1767941): n is a or c or g or t.
VVCVNEIKDRGYQLIKQELFRYLNADSNAYKDSYLLRRIRARMRKLGITDFMEYYRIIKKNKQELDDLLLTVAINVTEFFRDPVVWKTLERKVLPELIEYKRKHYDTTIRIWSAACSTGQEPYSIAMLFSEFLGDDLKRYRLKILATDIDREALNTAIRGAYPKEIVEKSVPKPLIKKYFLPMGDHYRISPQIRRYVEFRHFNLLSDRYPTGFDMIFIRNVLIYMTKEAQEEVFKKLYNSLEDHGYLVLGKTETILGSAARLFKLYDLVARIYVKRKNVEVK

SEQ ID NO: 110 - protein, 120 aa, Thermococcus kodakaraensis KOD1
  misc_feature (414542)..(414542): n is a or c or g or t.
  misc_feature (786890)..(786890): n is a or c or g or t.
  misc_feature (786907)..(786907): n is a or c or g or t.
  misc_feature (786944)..(786946): n is a or c or g or t.
  misc_feature (839139)..(839139): n is a or c or g or t.
  misc_feature (1128488)..(1128488): n is a or c or g or t.
  misc_feature (1128499)..(1128499): n is a or c or g or t.
  misc_feature (1128505)..(1128506): n is a or c or g or t.
  misc_feature (1128517)..(1128518): n is a or c or g or t.
  misc_feature (1128539)..(1128540): n is a or c or g or t.
  misc_feature (1561400)..(1561400): n is a or c or g or t.
  misc_feature (1561477)..(1561477): n is a or c or g or t.
  misc_feature (1561545)..(1561545): n is a or c or g or t.
  misc_feature (1767941)..(1767941): n is a or c or g or t.
MARVLVVDDAAFMRMLVKKILTQAGHQVVGEASNGKEAVEKYKQLKPDLVTMDIVMPEMDGITAVKEIMKIDPNAKIIMITAVGQEAKVMEALKSGAKGYIVKPFQAPKVIEEVNRVLSS

SEQ ID NO: 111 - protein, 165 aa, Thermococcus kodakaraensis KOD1
  misc_feature (414542)..(414542): n is a or c or g or t.
  misc_feature (786890)..(786890): n is a or c or g or t.
  misc_feature (786907)..(786907): n is a or c or g or t.
  misc_feature (786944)..(786946): n is a or c or g or t.
  misc_feature (839139)..(839139): n is a or c or g or t.
  misc_feature (1128488)..(1128488): n is a or c or g or t.
  misc_feature (1128499)..(1128499): n is a or c or g or t.
  misc_feature (1128505)..(1128506): n is a or c or g or t.
  misc_feature (1128517)..(1128518): n is a or c or g or t.
  misc_feature (1128539)..(1128540): n is a or c or g or t.
  misc_feature (1561400)..(1561400): n is a or c or g or t.
  misc_feature (1561477)..(1561477): n is a or c or g or t.
  misc_feature (1561545)..(1561545): n is a or c or g or t.
  misc_feature (1767941)..(1767941): n is a or c or g or t.
VVTRVEVKVGIGDYAVAKKTGIISTYGLGSCVGITLYDRLNRVGGLLHALLPESARYGGRGNPAKYVDTGLELLIKDMMKLGASPRRLEAKLFGGAHMFTNVSNENLMVGKKNVEVAKRELKKRGIRLVAEDTGGKGGRTIYLDVSTGKVRMRKVSNGKVIEAVF

SEQ ID NO: 112 - protein, 111 aa, Thermococcus kodakaraensis KOD1
  misc_feature (414542)..(414542): n is a or c or g or t.
  misc_feature (786890)..(786890): n is a or c or g or t.
  misc_feature (786907)..(786907): n is a or c or g or t.
  misc_feature (786944)..(786946): n is a or c or g or t.
  misc_feature (839139)..(839139): n is a or c or g or t.
  misc_feature (1128488)..(1128488): n is a or c or g or t.
  misc_feature (1128499)..(1128499): n is a or c or g or t.
  misc_feature (1128505)..(1128506): n is a or c or g or t.
  misc_feature (1128517)..(1128518): n is a or c or g or t.
  misc_feature (1128539)..(1128540): n is a or c or g or t.
  misc_feature (1561400)..(1561400): n is a or c or g or t.
  misc_feature (1561477)..(1561477): n is a or c or g or t.
  misc_feature (1561545)..(1561545): n is a or c or g or t.
  misc_feature (1767941)..(1767941): n is a or c or g or t.
VMTMESEGRRVVHIGLPELTEEQIIEVGELAQRVVIKHVFDALNRSDVKDIEVTTRINRGETLDLELEVYLEVPVFVKVDVERLIDEAVEKAYAAVEKKLREIANEGQDKA

SEQ ID NO: 113 - protein, 310 aa, Thermococcus kodakaraensis KOD1
  misc_feature (414542)..(414542): n is a or c or g or t.
  misc_feature (786890)..(786890): n is a or c or g or t.
  misc_feature (786907)..(786907): n is a or c or g or t.
  misc_feature (786944)..(786946): n is a or c or g or t.
  misc_feature (839139)..(839139): n is a or c or g or t.
  misc_feature (1128488)..(1128488): n is a or c or g or t.
  misc_feature (1128499)..(1128499): n is a or c or g or t.
  misc_feature (1128505)..(1128506): n is a or c or g or t.
  misc_feature (1128517)..(1128518): n is a or c or g or t.
  misc_feature (1128539)..(1128540): n is a or c or g or t.
  misc_feature (1561400)..(1561400): n is a or c or g or t.
  misc_feature (1561477)..(1561477): n is a or c or g or t.
  misc_feature (1561545)..(1561545): n is a or c or g or t.
  misc_feature (1767941)..(1767941): n is a or c or g or t.
VVPEGEGMNETMIISLVLGSLSAMVPIALVSIGATISERAGVVNIGYEGILMFSAFFGTMIAEWAGNGWVGLLGGALVGLLLGALHGFLTVYLKGDHVIPGIGLNLLGYGSVAFGIMAYWGTAGQHQVPDTVKVEPLWRDAFGNSLSPMVVITIAIAIVSWWVLFKTPFGLRIRSVGENPEAADALGINVELYRFTAVLIASALAGVGGAYLSVDWLGTVTKSIAAGRGFIGLANMVFSNWNPLVALGGAFLFGFFDNLSFYIQNNPWLAGTIPWQFIATLPYVVTLLVVAGIIGKAKPPKADGKPYKRE

SEQ ID NO: 114 - protein, 472 aa, Thermococcus kodakaraensis KOD1
  misc_feature (414542)..(414542): n is a or c or g or t.
  misc_feature (786890)..(786890): n is a or c or g or t.
  misc_feature (786907)..(786907): n is a or c or g or t.
  misc_feature (786944)..(786946): n is a or c or g or t.
  misc_feature (839139)..(839139): n is a or c or g or t.
  misc_feature (1128488)..(1128488): n is a or c or g or t.
  misc_feature (1128499)..(1128499): n is a or c or g or t.
  misc_feature (1128505)..(1128506): n is a or c or g or t.
  misc_feature (1128517)..(1128518): n is a or c or g or t.
  misc_feature (1128539)..(1128540): n is a or c or g or t.
  misc_feature (1561400)..(1561400): n is a or c or g or t.
  misc_feature (1561477)..(1561477): n is a or c or g or t.
  misc_feature (1561545)..(1561545): n is a or c or g or t.
  misc_feature (1767941)..(1767941): n is a or c or g or t.
MSSEVIKMADPKIEALFRPKSVAVIGASGKPGKIGYAIMKNLVDYGYEGKIYAVNVKGGEIEISGRKFPVYKSILDVPDEVDMAVIVVPAKFVPQVVEECGQKGVKVLPIISSGFGELGEEGKKVEQQLVETAHKYGMRILGPNIFGVVYTPEKLNATFGPTDVLPGPLALISQSGALGIALMGWTILEKVGLSAVVSVGNKSDIDDADLLEYFKEDENTRAILIYMEGVKDGRRFMEVAKDVSMVKPIVVIKAGRSERGAKAAASHTGSLAGSDKVFDAAFKQSGVIRAYTIGEAFDYARTLSNLPEPEGENLVILTNGGGIGVMATDAAEEAGLHLYDNLEDLKVFANHMPPFGSYKNPVDLTGMAGAESYEGAIRDALANPNMHSIAVLYCQTAVLDPRDLADIVIREYNESGRKKPLVVAIVGGIEAKEAIDRLNEEGIPAYPEPERAIKALAALYRWSRWKKKQKKE

SEQ ID NO: 115 - protein, 19 aa, Thermococcus kodakaraensis KOD1
  misc_feature (414542)..(414542): n is a or c or g or t.
  misc_feature (786890)..(786890): n is a or c or g or t.
  misc_feature (786907)..(786907): n is a or c or g or t.
  misc_feature (786944)..(786946): n is a or c or g or t.
  misc_feature (839139)..(839139): n is a or c or g or t.
  misc_feature (1128488)..(1128488): n is a or c or g or t.
  misc_feature (1128499)..(1128499): n is a or c or g or t.
  misc_feature (1128505)..(1128506): n is a or c or g or t.
  misc_feature (1128517)..(1128518): n is a or c or g or t.
  misc_feature (1128539)..(1128540): n is a or c or g or t.
  misc_feature (1561400)..(1561400): n is a or c or g or t.
  misc_feature (1561477)..(1561477): n is a or c or g or t.
  misc_feature (1561545)..(1561545): n is a or c or g or t.
  misc_feature (1767941)..(1767941): n is a or c or g or t.
VFSIIPLWMFVYGLINAPL

SEQ ID NO: 116 - protein, 271 aa, Thermococcus kodakaraensis KOD1
  misc_feature (414542)..(414542): n is a or c or g or t.
  misc_feature (786890)..(786890): n is a or c or g or t.
  misc_feature (786907)..(786907): n is a or c or g or t.
  misc_feature (786944)..(786946): n is a or c or g or t.
  misc_feature (839139)..(839139): n is a or c or g or t.
  misc_feature (1128488)..(1128488): n is a or c or g or t.
  misc_feature (1128499)..(1128499): n is a or c or g or t.
  misc_feature (1128505)..(1128506): n is a or c or g or t.
  misc_feature (1128517)..(1128518): n is a or c or g or t.
  misc_feature (1128539)..(1128540): n is a or c or g or t.
  misc_feature (1561400)..(1561400): n is a or c or g or t.
  misc_feature (1561477)..(1561477): n is a or c or g or t.
  misc_feature (1561545)..(1561545): n is a or c or g or t.
  misc_feature (1767941)..(1767941): n is a or c or g or t.
VISMSVEIDLRGMRVIVTASSRGIGFNVARELLKRNARVVISSRNSEHLKMAEKELAEFGEVQTVKANLYDQRELENLVKTSWELLDGIDALIWNAGNVRCEPCFLHEATYMDWLEAAALHSVAPGYLTTLLVQTWLEKKMKGTLVYLNSVSVKEPMPPLVLADVTRAGLIQLAKSVSRTYGKYGIRAYSVLLGSFDTPGARENLRKLAEERGEPFEETWEREVLSRTPLHRTGRWEELGSLVAFLLSEEAEYMLGSTVVIDGAMTRAVDI

SEQ ID NO: 117 - protein, 193 aa, Thermococcus kodakaraensis KOD1
  misc_feature (414542)..(414542): n is a or c or g or t.
  misc_feature (786890)..(786890): n is a or c or g or t.
  misc_feature (786907)..(786907): n is a or c or g or t.
  misc_feature (786944)..(786946): n is a or c or g or t.
  misc_feature (839139)..(839139): n is a or c or g or t.
  misc_feature (1128488)..(1128488): n is a or c or g or t.
  misc_feature (1128499)..(1128499): n is a or c or g or t.
  misc_feature (1128505)..(1128506): n is a or c or g or t.
  misc_feature (1128517)..(1128518): n is a or c or g or t.
  misc_feature (1128539)..(1128540): n is a or c or g or t.
  misc_feature (1561400)..(1561400): n is a or c or g or t.
  misc_feature (1561477)..(1561477): n is a or c or g or t.
  misc_feature (1561545)..(1561545): n is a or c or g or t.
  misc_feature (1767941)..(1767941): n is a or c or g or t.
MRRKPVQIRKFMLIDSAYKSRILRGDKVTTIRYGDYEAKPGSEVYLVITPSDTAVAKVRITKVEKKKVRELTNEDAKLDGFSDVKELLRELSKIYGELHGDDEVTIIGFEVVKRFEDGIPLKWLKGLNYREPEEIARLYLENQEKLNLNRETDFILRRIYNEGLGRAVRTFGPKRVQGALLKAYHQLYAEGLI

SEQ ID NO: 118 - protein, 105 aa, Thermococcus kodakaraensis KOD1
  misc_feature (414542)..(414542): n is a or c or g or t.
  misc_feature (786890)..(786890): n is a or c or g or t.
  misc_feature (786907)..(786907): n is a or c or g or t.
  misc_feature (786944)..(786946): n is a or c or g or t.
  misc_feature (839139)..(839139): n is a or c or g or t.
  misc_feature (1128488)..(1128488): n is a or c or g or t.
  misc_feature (1128499)..(1128499): n is a or c or g or t.
  misc_feature (1128505)..(1128506): n is a or c or g or t.
  misc_feature (1128517)..(1128518): n is a or c or g or t.
  misc_feature (1128539)..(1128540): n is a or c or g or t.
  misc_feature (1561400)..(1561400): n is a or c or g or t.
  misc_feature (1561477)..(1561477): n is a or c or g or t.
  misc_feature (1561545)..(1561545): n is a or c or g or t.
  misc_feature (1767941)..(1767941): n is a or c or g or t.
MRCRQVVKMEIREFQGMIRDIYFHKDSKRGIERTFLWFVEEVGELSEAIRKRDKEAMEEEFADVLAWLASLANLLGIDLEEAAKKKYPGVCPYCGKNPCECEEKF

SEQ ID NO: 119 - protein, 547 aa, Thermococcus kodakaraensis KOD1
  misc_feature (414542)..(414542): n is a or c or g or t.
  misc_feature (786890)..(786890): n is a or c or g or t.
  misc_feature (786907)..(786907): n is a or c or g or t.
  misc_feature (786944)..(786946): n is a or c or g or t.
  misc_feature (839139)..(839139): n is a or c or g or t.
  misc_feature (1128488)..(1128488): n is a or c or g or t.
  misc_feature (1128499)..(1128499): n is a or c or g or t.
  misc_feature (1128505)..(1128506): n is a or c or g or t.
  misc_feature (1128517)..(1128518): n is a or c or g or t.
  misc_feature (1128539)..(1128540): n is a or c or g or t.
  misc_feature (1561400)..(1561400): n is a or c or g or t.
  misc_feature (1561477)..(1561477): n is a or c or g or t.
  misc_feature (1561545)..(1561545): n is a or c or g or t.
  misc_feature (1767941)..(1767941): n is a or c or g or t.
VAVMKRAVSVLILSLLLFGVMASGCIGTKTTSNTSTTSSGATATSPTASSQLSTSTASSNVVPLTLVGPDGSVKTLTLSDLKSLPQTVGKGGLKTKKGSIKRIGTYKGVSLKDLLSKFGWLSKNYRYVITAADGYSITADYGFIFGKGLDTYDEKGNPINGSVIPILAYEYNGEPIEFTLDGKVYPLKLVLVGDETIVTPGNRWVKAVVKIEVVKAETPGESENTGYGEVKDFANRTVKVKSPPARIVSLYGLVTQMIYFLGVEDGKKVVGSTPLAINDAFIGLLDPGVKNRMVFVGNPRNANVETVKSLNPDVVFTAYWGSEKINEEIESLGIPVIALNLETVDGYLKGLLTVGKVLGKEEKAEKAISYYRSAVDFVTNRTSKLKERPRVLLVQYSMKDKAFKAPGKEYFQNRLIEMAGGESVSSNLPGGWNVVNVEQVAKWNPDVIIVVSYSPKKPSAKVKEEILNDPAWKGIKAVKEGRVYAMPNDGESWDYPAPKWVLGLYWLAKVLHPELFGDLDVRAKADDFYQKWYGIDPNKVEITGDMP

SEQ ID NO: 120 - protein, 253 aa, Thermococcus kodakaraensis KOD1
  misc_feature (414542)..(414542): n is a or c or g or t.
  misc_feature (786890)..(786890): n is a or c or g or t.
  misc_feature (786907)..(786907): n is a or c or g or t.
  misc_feature (786944)..(786946): n is a or c or g or t.
  misc_feature (839139)..(839139): n is a or c or g or t.
  misc_feature (1128488)..(1128488): n is a or c or g or t.
  misc_feature (1128499)..(1128499): n is a or c or g or t.
  misc_feature (1128505)..(1128506): n is a or c or g or t.
  misc_feature (1128517)..(1128518): n is a or c or g or t.
  misc_feature (1128539)..(1128540): n is a or c or g or t.
  misc_feature (1561400)..(1561400): n is a or c or g or t.
  misc_feature (1561477)..(1561477): n is a or c or g or t.
  misc_feature (1561545)..(1561545): n is a or c or g or t.
  misc_feature (1767941)..(1767941): n is a or c or g or t.
MLRVEGLGFSYGSREVLRNVTFELKKGVGCLLGPNGAGKSTLLKCIAGILNGNGRITLNGTELSRLRLRERTRLVSYSPQEFSLTFPYTVFQTVLMGRNPHIDPLSGPGKVDEEMAMKALRTLGLENLAERPFGELSGGQKRLVMIARTLAQGGELFLFDEPTSFLDFRNQHLVLSVIRKLSKERTVLVSLHDPNQALTFCDTVFLLKDGGIIASGEPAEVLNEENLMELYRMKVKRFKADGGFFIYPLEVVG

SEQ ID NO: 121 - protein, 245 aa, Thermococcus kodakaraensis KOD1
  misc_feature (414542)..(414542): n is a or c or g or t.
  misc_feature (786890)..(786890): n is a or c or g or t.
  misc_feature (786907)..(786907): n is a or c or g or t.
  misc_feature (786944)..(786946): n is a or c or g or t.
  misc_feature (839139)..(839139): n is a or c or g or t.
  misc_feature (1128488)..(1128488): n is a or c or g or t.
  misc_feature (1128499)..(1128499): n is a or c or g or t.
  misc_feature (1128505)..(1128506): n is a or c or g or t.
  misc_feature (1128517)..(1128518): n is a or c or g or t.
  misc_feature (1128539)..(1128540): n is a or c or g or t.
  misc_feature (1561400)..(1561400): n is a or c or g or t.
  misc_feature (1561477)..(1561477): n is a or c or g or t.
  misc_feature (1561545)..(1561545): n is a or c or g or t.
  misc_feature (1767941)..(1767941): n is a or c or g or t.
MLLSEIKKKALNLANGLELLDFGFALPYTWVLIEGPEGKSLGVAMTLPEEVQRYTNSISEPSIEAFIERIDSLNVIERTLGIAAVNAVSQYHLDVSDLPDVDVVELVEGFSEVAVIGNMPPVVRALREKGVKTLVFERNPKLWDRETLSDALEYILLPEVEAVIVSGSALVNGTLEMILDRAKKAELVILTGPTAQIHQELVKGTGITHLAAMKVIDLERALLGLKLGSFRGFEKGNRKYVVEVP

SEQ ID NO: 122 - protein, 160 aa, Thermococcus kodakaraensis KOD1
  misc_feature (414542)..(414542): n is a or c or g or t.
  misc_feature (786890)..(786890): n is a or c or g or t.
  misc_feature (786907)..(786907): n is a or c or g or t.
  misc_feature (786944)..(786946): n is a or c or g or t.
  misc_feature (839139)..(839139): n is a or c or g or t.
  misc_feature (1128488)..(1128488): n is a or c or g or t.
  misc_feature (1128499)..(1128499): n is a or c or g or t.
  misc_feature (1128505)..(1128506): n is a or c or g or t.
  misc_feature (1128517)..(1128518): n is a or c or g or t.
  misc_feature (1128539)..(1128540): n is a or c or g or t.
  misc_feature (1561400)..(1561400): n is a or c or g or t.
  misc_feature (1561477)..(1561477): n is a or c or g or t.
  misc_feature (1561545)..(1561545): n is a or c or g or t.
  misc_feature (1767941)..(1767941): n is a or c or g or t.
MSRSEVFVDSSVLVGLNLGDEKAKKLVKSLIEEGHALVINPIVFSETAYKVMFTLAIRDGLKGVYDLKKHLDEYTWVYEKVRDSIEKLVKSGFLRVLEIDWQISRLSAELGEKYGLLTNDAMIVATCKSYGIEKIATFDSDFEKVDFLEVISPLISEQDG

SEQ ID NO: 123 - protein, 273 aa, Thermococcus kodakaraensis KOD1
  misc_feature (414542)..(414542): n is a or c or g or t.
  misc_feature (786890)..(786890): n is a or c or g or t.
  misc_feature (786907)..(786907): n is a or c or g or t.
  misc_feature (786944)..(786946): n is a or c or g or t.
  misc_feature (839139)..(839139): n is a or c or g or t.
  misc_feature (1128488)..(1128488): n is a or c or g or t.
  misc_feature (1128499)..(1128499): n is a or c or g or t.
  misc_feature (1128505)..(1128506): n is a or c or g or t.
  misc_feature (1128517)..(1128518): n is a or c or g or t.
  misc_feature (1128539)..(1128540): n is a or c or g or t.
  misc_feature (1561400)..(1561400): n is a or c or g or t.
  misc_feature (1561477)..(1561477): n is a or c or g or t.
  misc_feature (1561545)..(1561545): n is a or c or g or t.
  misc_feature (1767941)..(1767941): n is a or c or g or t.
VSSMKVTILFENHAGWRKGLIGYHGFSALVEHNGHRVLVDTGTDGRVLLNNIRELGVELDSIDALFITHGHYDHTGGIAELLKARSEPLDVYAHPGIFARRIALKPRRREIGIPFTRKELESLGAVFHLSEKPFEFLPGFISSGKIERKTWDRAVGYLVEDGKEVKDPVKDDIALILDLGDSVAVITGCGHSGILNIARHAIDLTRKPIKALIGGFHLRGAPEHLLDDAVEGLRELGVGTLYAGHCTGIDEYAYLKEHFGLAEPLFVGKEIRV

SEQ ID NO: 124 - protein, 266 aa, Thermococcus kodakaraensis KOD1
  misc_feature (414542)..(414542): n is a or c or g or t.
  misc_feature (786890)..(786890): n is a or c or g or t.
  misc_feature (786907)..(786907): n is a or c or g or t.
  misc_feature (786944)..(786946): n is a or c or g or t.
  misc_feature (839139)..(839139): n is a or c or g or t.
  misc_feature (1128488)..(1128488): n is a or c or g or t.
  misc_feature (1128499)..(1128499): n is a or c or g or t.
  misc_feature (1128505)..(1128506): n is a or c or g or t.
  misc_feature (1128517)..(1128518): n is a or c or g or t.
  misc_feature (1128539)..(1128540): n is a or c or g or t.
  misc_feature (1561400)..(1561400): n is a or c or g or t.
  misc_feature (1561477)..(1561477): n is a or c or g or t.
  misc_feature (1561545)..(1561545): n is a or c or g or t.
  misc_feature (1767941)..(1767941): n is a or c or g or t.
VMWMLGIDLSGKLAFTTASSKGIGFGVARVLAKAGADVVLLSRSEENLKRAKEKIRAASDVEVSYIVADLTRREDLERTVKELKDIGEPDIFFFSTGGPKPGYFMEMDMEDWEGAVKLLLYPAVYLTRALVPAMERKGFGRIVYSTSVAIKEPIPNIALSNVVRISMAGLVRTLAKELGPKGITVNGIMPGIIKTDRMIRLAKDRAQREGKTVEEALQEYAKPIPLGRLGEPEEIGYLVAFLASDLGGYINGSMIPVDGGRLNSVF

SEQ ID NO: 125 - protein, 32 aa, Thermococcus kodakaraensis KOD1
  misc_feature (414542)..(414542): n is a or c or g or t.
  misc_feature (786890)..(786890): n is a or c or g or t.
  misc_feature (786907)..(786907): n is a or c or g or t.
  misc_feature (786944)..(786946): n is a or c or g or t.
  misc_feature (839139)..(839139): n is a or c or g or t.
  misc_feature (1128488)..(1128488): n is a or c or g or t.
  misc_feature (1128499)..(1128499): n is a or c or g or t.
  misc_feature (1128505)..(1128506): n is a or c or g or t.
  misc_feature (1128517)..(1128518): n is a or c or g or t.
  misc_feature (1128539)..(1128540): n is a or c or g or t.
  misc_feature (1561400)..(1561400): n is a or c or g or t.
  misc_feature (1561477)..(1561477): n is a or c or g or t.
  misc_feature (1561545)..(1561545): n is a or c or g or t.
  misc_feature (1767941)..(1767941): n is a or c or g or t.
MTLSKAPPEWVGSLGDHSIPIDGLVRPLLGKG

SEQ ID NO: 126 - protein, 166 aa, Thermococcus kodakaraensis KOD1
  misc_feature (414542)..(414542): n is a or c or g or t.
  misc_feature (786890)..(786890): n is a or c or g or t.
  misc_feature (786907)..(786907): n is a or c or g or t.
  misc_feature (786944)..(786946): n is a or c or g or t.
  misc_feature (839139)..(839139): n is a or c or g or t.
  misc_feature (1128488)..(1128488): n is a or c or g or t.
  misc_feature (1128499)..(1128499): n is a or c or g or t.
  misc_feature (1128505)..(1128506): n is a or c or g or t.
  misc_feature (1128517)..(1128518): n is a or c or g or t.
  misc_feature (1128539)..(1128540): n is a or c or g or t.
  misc_feature (1561400)..(1561400): n is a or c or g or t.
  misc_feature (1561477)..(1561477): n is a or c or g or t.
  misc_feature (1561545)..(1561545): n is a or c or g or t.
  misc_feature (1767941)..(1767941): n is a or c or g or t.
MKERFFKILKRESEKKEEETPKKTIGLIIDGPNILRKEFGIKLEDILEALKRIGNVRVAKVILNQYAPQGLIEAVVNQGLEPVIVAGDTDVRVAIEAMELIYNSDVDVIALASRDADFLPIIIEAKRRGKETVVIGVDPGFSVALQNAADYVIKMEGRKTPENKEG

SEQ ID NO: 127 - protein, 362 aa, Thermococcus kodakaraensis KOD1
  misc_feature (414542)..(414542): n is a or c or g or t.
  misc_feature (786890)..(786890): n is a or c or g or t.
  misc_feature (786907)..(786907): n is a or c or g or t.
  misc_feature (786944)..(786946): n is a or c or g or t.
  misc_feature (839139)..(839139): n is a or c or g or t.
  misc_feature (1128488)..(1128488): n is a or c or g or t.
  misc_feature (1128499)..(1128499): n is a or c or g or t.
  misc_feature (1128505)..(1128506): n is a or c or g or t.
  misc_feature (1128517)..(1128518): n is a or c or g or t.
  misc_feature (1128539)..(1128540): n is a or c or g or t.
  misc_feature (1561400)..(1561400): n is a or c or g or t.
  misc_feature (1561477)..(1561477): n is a or c or g or t.
  misc_feature (1561545)..(1561545): n is a or c or g or t.
  misc_feature (1767941)..(1767941): n is a or c or g or t.
MCSWLHHFSPPVKTSLKYFTVIKLSGGSMKVKVGINGYGTIGKRVAYAVSKQDDMELIGVTKTKPDFEAYLARERGIPVYAASEEFLPRFEKAGFEVAGTLSDLLENVDVIVDATPGGMGAKNKALYEKAGVKAIFQGGEKAEVAQVSFVAQANYEKALGKDYVRVVSCNTTGLTRTLSALQEYIDYVYAVMIRRAADPNDSKRGPVNAITPSVTVPSHHGPDVQTVIPINIETMAFVVPTTLMHVHSVMIELKKPITREDVIDIFENTTRVLLFEKERGFESTAQLIEFARDLHREWNNLYEIAVWKESISVKGNRLFYIQAVHQESDVVPENVDAIRAMFEMADKWESIRKTNKSLGILK

SEQ ID NO: 128 - protein, 17 aa, Thermococcus kodakaraensis KOD1
  misc_feature (414542)..(414542): n is a or c or g or t.
  misc_feature (786890)..(786890): n is a or c or g or t.
  misc_feature (786907)..(786907): n is a or c or g or t.
  misc_feature (786944)..(786946): n is a or c or g or t.
  misc_feature (839139)..(839139): n is a or c or g or t.
  misc_feature (1128488)..(1128488): n is a or c or g or t.
  misc_feature (1128499)..(1128499): n is a or c or g or t.
  misc_feature (1128505)..(1128506): n is a or c or g or t.
  misc_feature (1128517)..(1128518): n is a or c or g or t.
  misc_feature (1128539)..(1128540): n is a or c or g or t.
  misc_feature (1561400)..(1561400): n is a or c or g or t.
  misc_feature (1561477)..(1561477): n is a or c or g or t.
  misc_feature (1561545)..(1561545): n is a or c or g or t.
  misc_feature (1767941)..(1767941): n is a or c or g or t.
MFKGGFKIIKTIFVPMQ

SEQ ID NO: 129 - protein, 664 aa, Thermococcus kodakaraensis KOD1
  misc_feature (414542)..(414542): n is a or c or g or t.
  misc_feature (786890)..(786890): n is a or c or g or t.
  misc_feature (786907)..(786907): n is a or c or g or t.
  misc_feature (786944)..(786946): n is a or c or g or t.
  misc_feature (839139)..(839139): n is a or c or g or t.
  misc_feature (1128488)..(1128488): n is a or c or g or t.
  misc_feature (1128499)..(1128499): n is a or c or g or t.
  misc_feature (1128505)..(1128506): n is a or c or g or t.
  misc_feature (1128517)..(1128518): n is a or c or g or t.
  misc_feature (1128539)..(1128540): n is a or c or g or t.
  misc_feature (1561400)..(1561400): n is a or c or g or t.
  misc_feature (1561477)..(1561477): n is a or c or g or t.
  misc_feature (1561545)..(1561545): n is a or c or g or t.
  misc_feature (1767941)..(1767941): n is a or c or g or t.
MYSAIFPHRSSMPITAKVKTGRLKPFPMSEYFPYENLRPNQREFIELIGEAVKNGENAIVEAPTGFGKTISVLAGVLPFAKEYGYKVLYLARTHRQMDRVIEELKAIHRKKPVSGVELRSRKELCLHTYLKQFTTDAYNAMVVCKNLKKLGKCPFYENEKKKKAEFEEVIRFFLTEPSHPAEILNYAETLELCPYDLTKRIAEKADVIVASYLYALSPSIRESLISSLGVDYSDLIVIFDEAHNLPDQAISALSDRLSIHTINRAIKEADEYREHEIANFLSILGKGLEKLYSEKLAERDVEEAPVQPELVFTHVIEILGINERWLVKTLNEMVSVGDAIREDRIEKGKPPRSYVGRVGEFLLLWLSLIGRDDYLFLMTREKGMSLELVALDPSRALSFIKDVQSAIFMSGTLTPLEAFRDVMGIENARMKKFPRMVKRENAQVLVAKDVSTRGDERSLQAYRKMVDYIVEAVKLIPKNVGVFTASYEVLQGLLSANLDVKLEETGRAVFIEQQGVSSRENDLMIAQFKAHAKGNGAVLLGVMGGRNSEGQDYSGDEMNGVVLVGIPYARPTPRVQAQIRYFEKKFPGKGRYYGYYLPAHRKLVQAAGRVHRSAEEKGSIVILDYRVLWRSIRKDLPDWMKETMKPVTLPTMRLYLKRFWSNGR

SEQ ID NO: 130 - protein, 351 aa, Thermococcus kodakaraensis KOD1
  misc_feature (414542)..(414542): n is a or c or g or t.
  misc_feature (786890)..(786890): n is a or c or g or t.
  misc_feature (786907)..(786907): n is a or c or g or t.
  misc_feature (786944)..(786946): n is a or c or g or t.
  misc_feature (839139)..(839139): n is a or c or g or t.
  misc_feature (1128488)..(1128488): n is a or c or g or t.
  misc_feature (1128499)..(1128499): n is a or c or g or t.
  misc_feature (1128505)..(1128506): n is a or c or g or t.
  misc_feature (1128517)..(1128518): n is a or c or g or t.
  misc_feature (1128539)..(1128540): n is a or c or g or t.
  misc_feature (1561400)..(1561400): n is a or c or g or t.
  misc_feature (1561477)..(1561477): n is a or c or g or t.
  misc_feature (1561545)..(1561545): n is a or c or g or t.
  misc_feature (1767941)..(1767941): n is a or c or g or t.
MERRIHLMQLPREVLLGENLTGEVVSVAKRIGLTGKALVIYGPKTKEIAGRDVEDAIKSAYEVSSLTIRKGATMEEVERTIEKIKDEGIGWVIAVGGGSIIDVAKLSSFKTGVPFISFPTTASHDGIASANASIKDLGSKTSVKAVPPVAVIADVKVIKTAPYRYLAAGVGDTISNLTAVRDWQLAHRIKGEYYSEYAASLSLMSAKMVMRNADIIRLGNEESVRKVIKALISTGVAMSIAGSSRPASGAEHLFSHALDMLLDKPALHGEQTGLGTIIMAYLHGMKWERVRETLKRVGAPTNAYELGIDPEVIIEALTIAHTIRPERYTILGKDGLTREAAEKAAKITGVI

SEQ ID NO: 131 - protein, 193 aa, Thermococcus kodakaraensis KOD1
  misc_feature (414542)..(414542): n is a or c or g or t.
  misc_feature (786890)..(786890): n is a or c or g or t.
  misc_feature (786907)..(786907): n is a or c or g or t.
  misc_feature (786944)..(786946): n is a or c or g or t.
  misc_feature (839139)..(839139): n is a or c or g or t.
  misc_feature (1128488)..(1128488): n is a or c or g or t.
  misc_feature (1128499)..(1128499): n is a or c or g or t.
  misc_feature (1128505)..(1128506): n is a or c or g or t.
  misc_feature (1128517)..(1128518): n is a or c or g or t.
  misc_feature (1128539)..(1128540): n is a or c or g or t.
  misc_feature (1561400)..(1561400): n is a or c or g or t.
  misc_feature (1561477)..(1561477): n is a or c or g or t.
  misc_feature (1561545)..(1561545): n is a or c or g or t.
  misc_feature (1767941)..(1767941): n is a or c or g or t.
VIQTSLAGSIDVEPTVKGLIEKLVMEANESLGRVYGVTFIIEDVSIEQELPKDHESLQDQPKLVLDVPLELEGPFRRIGKGLVISLREWGIAAASIVLGVDPSGLNRVSLVVKLREPMGREEKASLVKALREKLAGYIKLLIKKPMQTSVKIIDPSDKVVAKVMKKTKLMEKEVENIIGNEDVRAIMKALGKL

SEQ ID NO: 132 - protein, 171 aa, Thermococcus kodakaraensis KOD1
  misc_feature (414542)..(414542): n is a or c or g or t.
  misc_feature (786890)..(786890): n is a or c or g or t.
  misc_feature (786907)..(786907): n is a or c or g or t.
  misc_feature (786944)..(786946): n is a or c or g or t.
  misc_feature (839139)..(839139): n is a or c or g or t.
  misc_feature (1128488)..(1128488): n is a or c or g or t.
  misc_feature (1128499)..(1128499): n is a or c or g or t.
  misc_feature (1128505)..(1128506): n is a or c or g or t.
  misc_feature (1128517)..(1128518): n is a or c or g or t.
  misc_feature (1128539)..(1128540): n is a or c or g or t.
  misc_feature (1561400)..(1561400): n is a or c or g or t.
  misc_feature (1561477)..(1561477): n is a or c or g or t.
  misc_feature (1561545)..(1561545): n is a or c or g or t.
  misc_feature (1767941)..(1767941): n is a or c or g or t.
VGKVLYNAFAKFLGVSALASDEKKRIGINEVRAMAIRSEIGAARVYEALAELTENEEMKKLFLTLAREEWGHKEVVERLINEKTLSPVVELPEEIVTEFAVLYENAERLLSPETTAKDVVDVALRAELASEKFYAHLIDYAKDEKARSALQMLANMERDHYSRLMTWRLLL

SEQ ID NO: 133 - protein, 181 aa, Thermococcus kodakaraensis KOD1
  misc_feature (414542)..(414542): n is a or c or g or t.
  misc_feature (786890)..(786890): n is a or c or g or t.
  misc_feature (786907)..(786907): n is a or c or g or t.
  misc_feature (786944)..(786946): n is a or c or g or t.
  misc_feature (839139)..(839139): n is a or c or g or t.
  misc_feature (1128488)..(1128488): n is a or c or g or t.
  misc_feature (1128499)..(1128499): n is a or c or g or t.
  misc_feature (1128505)..(1128506): n is a or c or g or t.
  misc_feature (1128517)..(1128518): n is a or c or g or t.
  misc_feature (1128539)..(1128540): n is a or c or g or t.
  misc_feature (1561400)..(1561400): n is a or c or g or t.
  misc_feature (1561477)..(1561477): n is a or c or g or t.
  misc_feature (1561545)..(1561545): n is a or c or g or t.
  misc_feature (1767941)..(1767941): n is a or c or g or t.
MDVLKVLKWSGLTGGIVYWLFVAWSISRNGWFSFFHNALSDLGDPSKASSPWIYNYGLIATSIFVLAFAIYLILSAKNKLQTVGGAYISISAIFLALIGIFHGGTRPHVFVSTYFFVQFFLGALVYGAGSEKREVKYGSILIFLLALFGTFVHWPSLALEETYEIALVMAFTLLVALKSGS

SEQ ID NO: 134 - protein, 381 aa, Thermococcus kodakaraensis KOD1
  misc_feature (414542)..(414542): n is a or c or g or t.
  misc_feature (786890)..(786890): n is a or c or g or t.
  misc_feature (786907)..(786907): n is a or c or g or t.
  misc_feature (786944)..(786946): n is a or c or g or t.
  misc_feature (839139)..(839139): n is a or c or g or t.
  misc_feature (1128488)..(1128488): n is a or c or g or t.
  misc_feature (1128499)..(1128499): n is a or c or g or t.
  misc_feature (1128505)..(1128506): n is a or c or g or t.
  misc_feature (1128517)..(1128518): n is a or c or g or t.
  misc_feature (1128539)..(1128540): n is a or c or g or t.
  misc_feature (1561400)..(1561400): n is a or c or g or t.
  misc_feature (1561477)..(1561477): n is a or c or g or t.
  misc_feature (1561545)..(1561545): n is a or c or g or t.
  misc_feature (1767941)..(1767941): n is a or c or g or t.
MRDGFRIGILGGGQLAKMSAQEARRMGFDVLVLDPTPGCPASMVAEQIVGSFQDGEMVIELAERADVVTYDIESVNVEALKKVAKEKPVIPEPHVLEVIRDKYVQKKVLRRAGVPVPWFRELKSLDELENLIPVVQKARSGGYDGRGVVVIRDEKDLQKALNVPSYVEELVPIEKELSVIVVRNDDETLAYPTTEMVFNNEGNILDFLVAPGRVEKDVEKEAEEIAIRAVEALDGRGVFGVEMFLARDGRVLVNEIAPRPHNSGHWTIEAAVSSQFEQHVRVVADLPLGSTEVVLNAAMVNLLGEKGYYGKPVYDGVSEALRIPGVFVHVYGKREVFPFRKMGHVTAVDRTLPGAIEKALRAKALIRVRGEVNAQSGNNNG

SEQ ID NO: 135 - protein, 236 aa, Thermococcus kodakaraensis KOD1
  misc_feature (414542)..(414542): n is a or c or g or t.
  misc_feature (786890)..(786890): n is a or c or g or t.
  misc_feature (786907)..(786907): n is a or c or g or t.
  misc_feature (786944)..(786946): n is a or c or g or t.
  misc_feature (839139)..(839139): n is a or c or g or t.
  misc_feature (1128488)..(1128488): n is a or c or g or t.
  misc_feature (1128499)..(1128499): n is a or c or g or t.
  misc_feature (1128505)..(1128506): n is a or c or g or t.
  misc_feature (1128517)..(1128518): n is a or c or g or t.
  misc_feature (1128539)..(1128540): n is a or c or g or t.
  misc_feature (1561400)..(1561400): n is a or c or g or t.
  misc_feature (1561477)..(1561477): n is a or c or g or t.
  misc_feature (1561545)..(1561545): n is a or c or g or t.
  misc_feature (1767941)..(1767941): n is a or c or g or t.
MEEEMMGRGQLWKLSFGQNGWGHSESATMNGSFINNDRFTPNMRHFIRPFNEPMFSLSNAPHNGGLFKANGFFFMMVHKNYSGDYKADCLKFEQENGLNNFVGFMTAANIEKVLAVSRSGSVTAYITAGVTNPAIAGEVPPPWKPGTINMALVIEDGLTVGAMANAIMTATEAKTYTLLRLGYNATGTTSDGIGVFAFEGEKEWAGTATELGINIGRAVRKALEESLGKWKSSRKG

SEQ ID NO: 136 - protein, 230 aa, Thermococcus kodakaraensis KOD1
  misc_feature (414542)..(414542): n is a or c or g or t.
  misc_feature (786890)..(786890): n is a or c or g or t.
  misc_feature (786907)..(786907): n is a or c or g or t.
  misc_feature (786944)..(786946): n is a or c or g or t.
  misc_feature (839139)..(839139): n is a or c or g or t.
  misc_feature (1128488)..(1128488): n is a or c or g or t.
  misc_feature (1128499)..(1128499): n is a or c or g or t.
  misc_feature (1128505)..(1128506): n is a or c or g or t.
  misc_feature (1128517)..(1128518): n is a or c or g or t.
  misc_feature (1128539)..(1128540): n is a or c or g or t.
  misc_feature (1561400)..(1561400): n is a or c or g or t.
  misc_feature (1561477)..(1561477): n is a or c or g or t.
  misc_feature (1561545)..(1561545): n is a or c or g or t.
  misc_feature (1767941)..(1767941): n is a or c or g or t.
VNNLMAVYVENGESFLVNGRPLKSIDFYWQKRIAEYQSKLNKSGAKKSKKLSRMHQKAKLQAKHYINTMVRQTVEKLYHLGVSRIIVGYPKGIARNSDRGRKQNYLLSHVWRFNTVIKRLKEVAEEYGIQVLVVNEAFTSKTCPVCGKPHDGARFVRGLFKCPATGLIFNADLVGAFNILRKAVKTITPSLSALSGGRGNWPETRPEGSKTRFKLGLNETPQTSPPMVRG

SEQ ID NO: 137 - protein, 485 aa, Thermococcus kodakaraensis KOD1
  misc_feature (414542)..(414542): n is a or c or g or t.
  misc_feature (786890)..(786890): n is a or c or g or t.
  misc_feature (786907)..(786907): n is a or c or g or t.
  misc_feature (786944)..(786946): n is a or c or g or t.
  misc_feature (839139)..(839139): n is a or c or g or t.
  misc_feature (1128488)..(1128488): n is a or c or g or t.
  misc_feature (1128499)..(1128499): n is a or c or g or t.
  misc_feature (1128505)..(1128506): n is a or c or g or t.
  misc_feature (1128517)..(1128518): n is a or c or g or t.
  misc_feature (1128539)..(1128540): n is a or c or g or t.
  misc_feature (1561400)..(1561400): n is a or c or g or t.
  misc_feature (1561477)..(1561477): n is a or c or g or t.
  misc_feature (1561545)..(1561545): n is a or c or g or t.
  misc_feature (1767941)..(1767941): n is a or c or g or t.
VKMGKALMVQGTMSGAGKSLLVAALCRIFTNLGYDVVPFKSQNMSLNSAPSIEGGEISRAQYLQALACRKKPSVKFNPILLKPEGNMRSQVVFMGRPIGSVSARDYMLSKKAELFEKAIEVLKELMREHDLVIIEGAGSPVEINLKDYDIANMRVAKAVNAPVILVADIDRGGSFAQIVGTMELLSEEERELVMGFIFNKFRGDASLLKPGFEFLEKRCGKPVLGVVPYIEHRLPEEDSLAEFPKVRGDLHIQIIKLPHISNFTDFEPLHWANGVDYVTRAEEIKGDLIIVPGSKNTVEDLLWMRENGIEDAIIEAHREGSFVVGICGGFQMLGKEIIDEVESKRGRVEGIGLLPAKTVFTGEKRTNHLKAEVLWEPARGMWVEGYEIRMGRSTSEKPFSVITSINGARAFEPEGAIGKRAFGTYLHGIFHNFAFTERFLNMLRAEKGLEPVKVEEWSIEEEIEKFTRVVRESVDVEYIIQRLGL

SEQ ID NO: 138 - protein, 337 aa, Thermococcus kodakaraensis KOD1
  misc_feature (414542)..(414542): n is a or c or g or t.
  misc_feature (786890)..(786890): n is a or c or g or t.
  misc_feature (786907)..(786907): n is a or c or g or t.
  misc_feature (786944)..(786946): n is a or c or g or t.
  misc_feature (839139)..(839139): n is a or c or g or t.
  misc_feature (1128488)..(1128488): n is a or c or g or t.
  misc_feature (1128499)..(1128499): n is a or c or g or t.
  misc_feature (1128505)..(1128506): n is a or c or g or t.
  misc_feature (1128517)..(1128518): n is a or c or g or t.
  misc_feature (1128539)..(1128540): n is a or c or g or t.
  misc_feature (1561400)..(1561400): n is a or c or g or t.
  misc_feature (1561477)..(1561477): n is a or c or g or t.
  misc_feature (1561545)..(1561545): n is a or c or g or t.
  misc_feature (1767941)..(1767941): n is a or c or g or t.
VGYSCGITARNGGMSMLKPVEFSAYHGGARRKEEGLIDFSASLNPYPPEWLDEMFERAREISGHYPYYEELEEGLAELVGEPITVTAGITEALYLLGILALRGRRVIVPAHTYGEYERVARIFGARVVKGPNDPEELSQLVERDSVVFFCNPNNPDGRFYGKKELGPLLDAVEDRNALLVLDEAFIDFVESPESPSGENIVKLRTFTKSYGLPGIRVGYVAGFPEAFRSVRMPWAIGSVGVAFLEFLLEDRFQHLKGTMPLIWREKRRIEKALGVKSDANFFIKYVRDAKKTVEELKRKGMLVRDCTSFGLPQYVRFSVRKPEENDALVRALLEISP

SEQ ID NO: 139 - protein, 354 aa, Thermococcus kodakaraensis KOD1
  misc_feature (414542)..(414542): n is a or c or g or t.
  misc_feature (786890)..(786890): n is a or c or g or t.
  misc_feature (786907)..(786907): n is a or c or g or t.
  misc_feature (786944)..(786946): n is a or c or g or t.
  misc_feature (839139)..(839139): n is a or c or g or t.
  misc_feature (1128488)..(1128488): n is a or c or g or t.
  misc_feature (1128499)..(1128499): n is a or c or g or t.
  misc_feature (1128505)..(1128506): n is a or c or g or t.
  misc_feature (1128517)..(1128518): n is a or c or g or t.
  misc_feature (1128539)..(1128540): n is a or c or g or t.
  misc_feature (1561400)..(1561400): n is a or c or g or t.
  misc_feature (1561477)..(1561477): n is a or c or g or t.
  misc_feature (1561545)..(1561545): n is a or c or g or t.
  misc_feature (1767941)..(1767941): n is a or c or g or t.
VIKMKKTKLFGALLLVAIVFVSGCIGGSGSSTTPSQTQSTSTPSATLSTTPSSTQTPTETATKSCECPKAKPYYPLTITDFAGRNVTIEKEPKRIVSLAPSITETLYFLGALDRVIGVTKFDDYPPGVQEGRKIIGGFSDPNIEVIASLEPDLIIGTSMHLQYLDQLEKIAPVIILDPKNMDEVYEAVELLGKVLNQSERAEGVVEFMKAEVADVQFRVSNKTRPKVLFISWWNPLYVPGNGTFQDSLIELAGGENVFHDATSWAQVSLEEAVARNPEIIILSAHAGATIDDICNSPLADTDAVKNGRIYFVSDDNAISRPGPRLVEALEELSYFIHPEAYGYNFQPVTCPVEG

SEQ ID NO: 140 - protein, 318 aa, Thermococcus kodakaraensis KOD1
  misc_feature (414542)..(414542): n is a or c or g or t.
  misc_feature (786890)..(786890): n is a or c or g or t.
  misc_feature (786907)..(786907): n is a or c or g or t.
  misc_feature (786944)..(786946): n is a or c or g or t.
  misc_feature (839139)..(839139): n is a or c or g or t.
  misc_feature (1128488)..(1128488): n is a or c or g or t.
  misc_feature (1128499)..(1128499): n is a or c or g or t.
  misc_feature (1128505)..(1128506): n is a or c or g or t.
  misc_feature (1128517)..(1128518): n is a or c or g or t.
  misc_feature (1128539)..(1128540): n is a or c or g or t.
  misc_feature (1561400)..(1561400): n is a or c or g or t.
  misc_feature (1561477)..(1561477): n is a or c or g or t.
  misc_feature (1561545)..(1561545): n is a or c or g or t.
  misc_feature (1767941)..(1767941): n is a or c or g or t.
VMHMVVSLAGRDVLCLQDFTREELETILKTAEMMKIWNKIGKPHRVLEGKTLAMIFQKPSTRTRISFEVGIYQLGGYGLYLNAQDLQLRRGETIADTARVLSRYVDGIMARVFDHKDVEDLAKYASVPVINGLSDFSHPCQALADYQTILEKKGRIQGLKIVYVGDGNNVAHSLMIAGTKLGANVVVATPEGYEPDPKVIKWAEQNAAESGGSFELLHDPVQAVKDADVIYTDVWASMGQEAEAEERRKIFMPFQVNKELVKHAKPDYIFMHCLPAHRGEEVTDDVIDSPNSVVFDQAENRLHAQKAVMALVMGGIKV

SEQ ID NO: 141 - protein, 220 aa, Thermococcus kodakaraensis KOD1
  misc_feature (414542)..(414542): n is a or c or g or t.
  misc_feature (786890)..(786890): n is a or c or g or t.
  misc_feature (786907)..(786907): n is a or c or g or t.
  misc_feature (786944)..(786946): n is a or c or g or t.
  misc_feature (839139)..(839139): n is a or c or g or t.
  misc_feature (1128488)..(1128488): n is a or c or g or t.
  misc_feature (1128499)..(1128499): n is a or c or g or t.
  misc_feature (1128505)..(1128506): n is a or c or g or t.
  misc_feature (1128517)..(1128518): n is a or c or g or t.
  misc_feature (1128539)..(1128540): n is a or c or g or t.
  misc_feature (1561400)..(1561400): n is a or c or g or t.
  misc_feature (1561477)..(1561477): n is a or c or g or t.
  misc_feature (1561545)..(1561545): n is a or c or g or t.
  misc_feature (1767941)..(1767941): n is a or c or g or t.
MLHLIIAEAELELVPESIRDHPAVVNYARRRKKRPEEAILDSTYHHAALKKLPDGDRRGRPDIVHICLLNALESIANKEGFLRVYVHTRNDEVIHIKPETRLPRNYNRFLGLMESLFKKGAVPEGLELLRIEKKPLESLIEDINPDTVFIMHEEGELIRPRSFGEILASHQNPVVVVGGFPHGDFMRPIEGTKVSLYREPLMAWTVVSEVIVNFEAALGL

SEQ ID NO: 142 - protein, 136 aa, Thermococcus kodakaraensis KOD1
  misc_feature (414542)..(414542): n is a or c or g or t.
  misc_feature (786890)..(786890): n is a or c or g or t.
  misc_feature (786907)..(786907): n is a or c or g or t.
  misc_feature (786944)..(786946): n is a or c or g or t.
  misc_feature (839139)..(839139): n is a or c or g or t.
  misc_feature (1128488)..(1128488): n is a or c or g or t.
  misc_feature (1128499)..(1128499): n is a or c or g or t.
  misc_feature (1128505)..(1128506): n is a or c or g or t.
  misc_feature (1128517)..(1128518): n is a or c or g or t.
  misc_feature (1128539)..(1128540): n is a or c or g or t.
  misc_feature (1561400)..(1561400): n is a or c or g or t.
  misc_feature (1561477)..(1561477): n is a or c or g or t.
  misc_feature (1561545)..(1561545): n is a or c or g or t.
  misc_feature (1767941)..(1767941): n is a or c or g or t.
MGDKTKVQVSKLKPGRYIIIDGEPCRIVNVTVSSPGKHGSAKARIEAVGIFDGKVRSIVKPTSAEVDVPIIDKRVGQIIAITPDTVQLMDMETYETFDVPIEGGVDDEVKGQLTEGITVEYWETLGRIQIKKIRGE

SEQ ID NO: 143 - protein, 181 aa, Thermococcus kodakaraensis KOD1
  misc_feature (414542)..(414542): n is a or c or g or t.
  misc_feature (786890)..(786890): n is a or c or g or t.
  misc_feature (786907)..(786907): n is a or c or g or t.
  misc_feature (786944)..(786946): n is a or c or g or t.
  misc_feature (839139)..(839139): n is a or c or g or t.
  misc_feature (1128488)..(1128488): n is a or c or g or t.
  misc_feature (1128499)..(1128499): n is a or c or g or t.
  misc_feature (1128505)..(1128506): n is a or c or g or t.
  misc_feature (1128517)..(1128518): n is a or c or g or t.
  misc_feature (1128539)..(1128540): n is a or c or g or t.
  misc_feature (1561400)..(1561400): n is a or c or g or t.
  misc_feature (1561477)..(1561477): n is a or c or g or t.
  misc_feature (1561545)..(1561545): n is a or c or g or t.
  misc_feature (1767941)..(1767941): n is a or c or g or t.
MGWLHDVILRKFNNIAGTRYEEILKAYENFFLTEEELVIPEINSILLVFDRFSEKVPEEVHETLSAFEEAAVRIVYVIDEGVLKMIRETLGEEAAEEFRKKEMAFAETFLKEVEEKLGDLNIKFSRKIAFGDKAEYVEGIAKKYDLLVISRHYGSETTRTHRVSPVVFRIVQHVEKPVVLY

SEQ ID NO: 144 - protein, 167 aa, Thermococcus kodakaraensis KOD1
  misc_feature (414542)..(414542): n is a or c or g or t.
  misc_feature (786890)..(786890): n is a or c or g or t.
  misc_feature (786907)..(786907): n is a or c or g or t.
  misc_feature (786944)..(786946): n is a or c or g or t.
  misc_feature (839139)..(839139): n is a or c or g or t.
  misc_feature (1128488)..(1128488): n is a or c or g or t.
  misc_feature (1128499)..(1128499): n is a or c or g or t.
  misc_feature (1128505)..(1128506): n is a or c or g or t.
  misc_feature (1128517)..(1128518): n is a or c or g or t.
  misc_feature (1128539)..(1128540): n is a or c or g or t.
  misc_feature (1561400)..(1561400): n is a or c or g or t.
  misc_feature (1561477)..(1561477): n is a or c or g or t.
  misc_feature (1561545)..(1561545): n is a or c or g or t.
  misc_feature (1767941)..(1767941): n is a or c or g or t.
VKHMDVEAALEKFHSLKVSEIMPRLDTMPIVTADSDLLNVLKLLRTRHHVWVVKDRESMKLVGVIRYMDVIDILLPPESHRFKLGMTSRSMRSLLGGATKAEDVADRHPLTIEEEATVLDALIKMRRYKAQVLAVVEGERLVGEISLRILIDEFLRLLRVGGAQWKG

SEQ ID NO: 145 - protein, 573 aa, Thermococcus kodakaraensis KOD1
  misc_feature (414542)..(414542): n is a or c or g or t.
  misc_feature (786890)..(786890): n is a or c or g or t.
  misc_feature (786907)..(786907): n is a or c or g or t.
  misc_feature (786944)..(786946): n is a or c or g or t.
  misc_feature (839139)..(839139): n is a or c or g or t.
  misc_feature (1128488)..(1128488): n is a or c or g or t.
  misc_feature (1128499)..(1128499): n is a or c or g or t.
  misc_feature (1128505)..(1128506): n is a or c or g or t.
  misc_feature (1128517)..(1128518): n is a or c or g or t.
  misc_feature (1128539)..(1128540): n is a or c or g or t.
  misc_feature (1561400)..(1561400): n is a or c or g or t.
  misc_feature (1561477)..(1561477): n is a or c or g or t.
  misc_feature (1561545)..(1561545): n is a or c or g or t.
  misc_feature (1767941)..(1767941): n is a or c or g or t.
MATSNGRYIKKWATVLGFSLMAGVVGGLGAVLFRVLIAWTHDFFFGKILPVVSYQVGELNLGYALLPALGALIVAFIIVEFPDIRGNGIPEVIEAVIFKGGNIPGRFAVAKIVATAITIGSGGSVGREGPIGFIGAALTSILARWFNLSKEMKKLLVTCGLAAGIAGTFNTPLAGAMFALEVVYMGAFSVNLVPIFISSVTGNAITLAILKRAFEVEIPGNLGHTLLELPFFFLLGIILGVLAAFYARFIYRVFNAFEDLRINPLLKPVIGGLGVGFLGMFFPTYGIFGIGYEGMELAFYGKLTLGLLLTLGVVKMLATALTVGSGNSGGVFAPSLYIGTMFGVAFGILVGMAFPSLAPNLTVYALAGMAAFFSGMTQAPITQILMVTELTRSYAVLPAVMTSATMGFLTARFFLNGESIYTLKLLRKGYRVRTGRPVVLETISVGEIMSRDPVYVTKDMTLFDVEHLIGETAHDCFPVVDENLNVVGIIGIKDILKKPSSVKRLKVERFLNRAYAVTYPTETAEAAFEKLMAYDQNLLPVVESPTNRRLVGVVTKRDIYRAYYRGLEGMYID

SEQ ID NO: 146 - protein, 83 aa, Thermococcus kodakaraensis KOD1
  misc_feature (414542)..(414542): n is a or c or g or t.
  misc_feature (786890)..(786890): n is a or c or g or t.
  misc_feature (786907)..(786907): n is a or c or g or t.
  misc_feature (786944)..(786946): n is a or c or g or t.
  misc_feature (839139)..(839139): n is a or c or g or t.
  misc_feature (1128488)..(1128488): n is a or c or g or t.
  misc_feature (1128499)..(1128499): n is a or c or g or t.
  misc_feature (1128505)..(1128506): n is a or c or g or t.
  misc_feature (1128517)..(1128518): n is a or c or g or t.
  misc_feature (1128539)..(1128540): n is a or c or g or t.
  misc_feature (1561400)..(1561400): n is a or c or g or t.
  misc_feature (1561477)..(1561477): n is a or c or g or t.
  misc_feature (1561545)..(1561545): n is a or c or g or t.
  misc_feature (1767941)..(1767941): n is a or c or g or t.
VILMEVVKVSSKGQIVIPKSLREKLGIKEGEYLLIFSRGDVIVMKKLNIDVEEILKEGEEAAKSLGVSEEDVAKAVRKVRYGE

SEQ ID NO: 147 - protein, 259 aa, Thermococcus kodakaraensis KOD1
  misc_feature (414542)..(414542): n is a or c or g or t.
  misc_feature (786890)..(786890): n is a or c or g or t.
  misc_feature (786907)..(786907): n is a or c or g or t.
  misc_feature (786944)..(786946): n is a or c or g or t.
  misc_feature (839139)..(839139): n is a or c or g or t.
  misc_feature (1128488)..(1128488): n is a or c or g or t.
  misc_feature (1128499)..(1128499): n is a or c or g or t.
  misc_feature (1128505)..(1128506): n is a or c or g or t.
  misc_feature (1128517)..(1128518): n is a or c or g or t.
  misc_feature (1128539)..(1128540): n is a or c or g or t.
  misc_feature (1561400)..(1561400): n is a or c or g or t.
  misc_feature (1561477)..(1561477): n is a or c or g or t.
  misc_feature (1561545)..(1561545): n is a or c or g or t.
  misc_feature (1767941)..(1767941): n is a or c or g or t.
VSRRLLAALVLIILIAAPLGYLGYGYSNYESSIHPSKSAPAKTYLVFKLPDGRYLSLTPKEYVNLTLQGFKLPAGAKGYAVNVTGYVTGIPEVDVNVTLRAPYEKFTIIIGDTNVKLCSSSPEEFVGSCVERTAAVSEISALTSTLFKRYYYWKGLQEGMDNASAKAYAYEETLKRHDIRYLTFFTKSLIGLGRIGNRKHLAVVLLGPNEGATTNRITVPREGLIVLEGKSDSALRAEVALIEHIIGFKWPEGNQTSTG

SEQ ID NO: 148 - protein, 21 aa, Thermococcus kodakaraensis KOD1
  misc_feature (414542)..(414542): n is a or c or g or t.
  misc_feature (786890)..(786890): n is a or c or g or t.
  misc_feature (786907)..(786907): n is a or c or g or t.
  misc_feature (786944)..(786946): n is a or c or g or t.
  misc_feature (839139)..(839139): n is a or c or g or t.
  misc_feature (1128488)..(1128488): n is a or c or g or t.
  misc_feature (1128499)..(1128499): n is a or c or g or t.
  misc_feature (1128505)..(1128506): n is a or c or g or t.
  misc_feature (1128517)..(1128518): n is a or c or g or t.
  misc_feature (1128539)..(1128540): n is a or c or g or t.
  misc_feature (1561400)..(1561400): n is a or c or g or t.
  misc_feature (1561477)..(1561477): n is a or c or g or t.
  misc_feature (1561545)..(1561545): n is a or c or g or t.
  misc_feature (1767941)..(1767941): n is a or c or g or t.
VPSQFAYEISKAQEIVSLWNT

SEQ ID NO: 149 - protein, 56 aa, Thermococcus kodakaraensis KOD1
  misc_feature (414542)..(414542): n is a or c or g or t.
  misc_feature (786890)..(786890): n is a or c or g or t.
  misc_feature (786907)..(786907): n is a or c or g or t.
  misc_feature (786944)..(786946): n is a or c or g or t.
  misc_feature (839139)..(839139): n is a or c or g or t.
  misc_feature (1128488)..(1128488): n is a or c or g or t.
  misc_feature (1128499)..(1128499): n is a or c or g or t.
  misc_feature (1128505)..(1128506): n is a or c or g or t.
  misc_feature (1128517)..(1128518): n is a or c or g or t.
  misc_feature (1128539)..(1128540): n is a or c or g or t.
  misc_feature (1561400)..(1561400): n is a or c or g or t.
  misc_feature (1561477)..(1561477): n is a or c or g or t.
  misc_feature (1561545)..(1561545): n is a or c or g or t.
  misc_feature (1767941)..(1767941): n is a or c or g or t.
VFKPLEKVELPEGIEVEVVIRKAGPILKKYSGVLKKSEYDWEAEYYEYIEERARGD

SEQ ID NO: 150 - protein, 629 aa, Thermococcus kodakaraensis KOD1
  misc_feature (414542)..(414542): n is a or c or g or t.
  misc_feature (786890)..(786890): n is a or c or g or t.
  misc_feature (786907)..(786907): n is a or c or g or t.
  misc_feature (786944)..(786946): n is a or c or g or t.
  misc_feature (839139)..(839139): n is a or c or g or t.
  misc_feature (1128488)..(1128488): n is a or c or g or t.
  misc_feature (1128499)..(1128499): n is a or c or g or t.
  misc_feature (1128505)..(1128506): n is a or c or g or t.
  misc_feature (1128517)..(1128518): n is a or c or g or t.
  misc_feature (1128539)..(1128540): n is a or c or g or t.
  misc_feature (1561400)..(1561400): n is a or c or g or t.
  misc_feature (1561477)..(1561477): n is a or c or g or t.
  misc_feature (1561545)..(1561545): n is a or c or g or t.
  misc_feature (1767941)..(1767941): n is a or c or g or t.
MTDKFNYEELGLKVGLEIHRQLDTKKLFSPVPSELSDEVDFTFERRLRPTMSELGEIDPAALEEFKKGRKYIYEGNYRLTDLVYMDEEPPRGPDREALEVALQIGYLLNAKPVDEVHFMRKIVIDGSNVSGFQRTAIVAVNGKVDTPWGSVGIPTVCLEEDACRIVERKEKEVIYRIDRLGIPLVEISTTPDIHHPEQAKVVAKYIGDALRATRKVKRGLGTIRQDLNVSIRGGARVEIKGVQELDMIPLIIEREVERQLNLLRIRDELKRRGVKPEDIKEEFYDVTEIFQNTGSKIIARAIKSGGKVLAVKLPKFRGLIGKEIQPGRRLGTEMADRAKKYVRGIFHIDELPNYGITELEVNAVIEKLGLGEEDAFVLVAAEEETAKNALREVIKRAREAIEGVPEETRRALPDGNTQYMRPLPGKARMYPETDIPSIFLPPEEKERIRANLPELPQERVERYVKEYKIDRSLAETLVNDERDELFEELVEKGVKPSLAASILVVVLKGLKKEVPVENITDGHIMEAFQLYLEGKIAKEAFEEIFKELALHPEKTAKQVAEEKGLTLLSEEEVEKIIDEVIQQNIEVIKAKGMGAMGMIMGRAMAKLRGRADGKLVSSLVRKKIQEIAG

SEQ ID NO: 151 - protein, 73 aa, Thermococcus kodakaraensis KOD1
  misc_feature (414542)..(414542): n is a or c or g or t.
  misc_feature (786890)..(786890): n is a or c or g or t.
  misc_feature (786907)..(786907): n is a or c or g or t.
  misc_feature (786944)..(786946): n is a or c or g or t.
  misc_feature (839139)..(839139): n is a or c or g or t.
  misc_feature (1128488)..(1128488): n is a or c or g or t.
  misc_feature (1128499)..(1128499): n is a or c or g or t.
  misc_feature (1128505)..(1128506): n is a or c or g or t.
  misc_feature (1128517)..(1128518): n is a or c or g or t.
  misc_feature (1128539)..(1128540): n is a or c or g or t.
  misc_feature (1561400)..(1561400): n is a or c or g or t.
  misc_feature (1561477)..(1561477): n is a or c or g or t.
  misc_feature (1561545)..(1561545): n is a or c or g or t.
  misc_feature (1767941)..(1767941): n is a or c or g or t.
VMAVPKIVVQIPEGVRKEFVELQVKRAIEAERARIEFIEDIARRLGIDEKDIEAIEKARDEAWQEFKKELGLE

SEQ ID NO: 152 - protein, 337 aa, Thermococcus kodakaraensis KOD1
  misc_feature (414542)..(414542): n is a or c or g or t.
  misc_feature (786890)..(786890): n is a or c or g or t.
  misc_feature (786907)..(786907): n is a or c or g or t.
  misc_feature (786944)..(786946): n is a or c or g or t.
  misc_feature (839139)..(839139): n is a or c or g or t.
  misc_feature (1128488)..(1128488): n is a or c or g or t.
  misc_feature (1128499)..(1128499): n is a or c or g or t.
  misc_feature (1128505)..(1128506): n is a or c or g or t.
  misc_feature (1128517)..(1128518): n is a or c or g or t.
  misc_feature (1128539)..(1128540): n is a or c or g or t.
  misc_feature (1561400)..(1561400): n is a or c or g or t.
  misc_feature (1561477)..(1561477): n is a or c or g or t.
  misc_feature (1561545)..(1561545): n is a or c or g or t.
  misc_feature (1767941)..(1767941): n is a or c or g or t.
MENEVKKMKMKALGLVALLVFALVASGCIGSGGNGSKTSEEITIYTGGTSGVYFPLGSKYAEILNKNGIKAKAVTSGASVTNAKAIGEGKAQAAILQNDIAYYAYNGLYMFEGQPVKNIRGVAALYPETVQFVVRADSDIKSLQDLKGKKVAIGAAGSGTAVAAEQILKAAGVWDSIQKVNQKFSEAAQSLKVGQIDAAVIVSGAPTPAVNQIAVQTPVRILPIPDDILNKLHDQGYIFYVRQVLPKDTYNGMTEDTPTVAVKAILAVSADLSEDTVYQMTKILFDPANLEELHKVHAKTKYISLDTALDGMSIPLHPGAIKFYEEKGITVPDKLKP

SEQ ID NO: 153 - protein, 153 aa, Thermococcus kodakaraensis KOD1
  misc_feature (414542)..(414542): n is a or c or g or t.
  misc_feature (786890)..(786890): n is a or c or g or t.
  misc_feature (786907)..(786907): n is a or c or g or t.
  misc_feature (786944)..(786946): n is a or c or g or t.
  misc_feature (839139)..(839139): n is a or c or g or t.
  misc_feature (1128488)..(1128488): n is a or c or g or t.
  misc_feature (1128499)..(1128499): n is a or c or g or t.
  misc_feature (1128505)..(1128506): n is a or c or g or t.
  misc_feature (1128517)..(1128518): n is a or c or g or t.
  misc_feature (1128539)..(1128540): n is a or c or g or t.
  misc_feature (1561400)..(1561400): n is a or c or g or t.
  misc_feature (1561477)..(1561477): n is a or c or g or t.
  misc_feature (1561545)..(1561545): n is a or c or g or t.
  misc_feature (1767941)..(1767941): n is a or c or g or t.
VRYLRKSFLFLAFFLILLVSSVAERGVLVITDGKEEMVYPLGEHEITIEYIHSVERSEVVETLKVNSSGIYAIGMKWKDFGAGLPEDFQEWNGSWYEKRINIYLGKSLDYWFIPLNRANITVDGLPAFAPRSDTLIEFRVESCPLLLIKIGRC

SEQ ID NO: 154 - protein, 324 aa, Thermococcus kodakaraensis KOD1
  misc_feature (414542)..(414542): n is a or c or g or t.
  misc_feature (786890)..(786890): n is a or c or g or t.
  misc_feature (786907)..(786907): n is a or c or g or t.
  misc_feature (786944)..(786946): n is a or c or g or t.
  misc_feature (839139)..(839139): n is a or c or g or t.
  misc_feature (1128488)..(1128488): n is a or c or g or t.
  misc_feature (1128499)..(1128499): n is a or c or g or t.
  misc_feature (1128505)..(1128506): n is a or c or g or t.
  misc_feature (1128517)..(1128518): n is a or c or g or t.
  misc_feature (1128539)..(1128540): n is a or c or g or t.
  misc_feature (1561400)..(1561400): n is a or c or g or t.
  misc_feature (1561477)..(1561477): n is a or c or g or t.
  misc_feature (1561545)..(1561545): n is a or c or g or t.
  misc_feature (1767941)..(1767941): n is a or c or g or t.
VIVRTPRRLHLGLIDPTGSLGRRFGSIGVAIDGGYEVRVLPSEKMEIKAQGEDIETIEKTLGRMNAAFGTGVNYLVEVRRGIPRHVGLGSTTQLSLAVGTAVARLNGIHVSIGELARALGRGKNSGAGIYTFAYGGFVLDGGVRNSVPPLVLREDFPEEWAFLLVIPELKRGPDEEEEKPAMESSFGDVEAAREISHRILLGLLPTLKERNIKAFGEHLSAIQKLVGRHFAGFQGGEFREDISLIVKFLNEKTYGAGQSSWGPTVYGLILKSEFQSASSEVFDYLKDQGIKAKIELGIPRNTGAEIVEENAFLIRIIKSVAGGQ

SEQ ID NO: 155 - protein, 281 aa, Thermococcus kodakaraensis KOD1
  misc_feature (414542)..(414542): n is a or c or g or t.
  misc_feature (786890)..(786890): n is a or c or g or t.
  misc_feature (786907)..(786907): n is a or c or g or t.
  misc_feature (786944)..(786946): n is a or c or g or t.
  misc_feature (839139)..(839139): n is a or c or g or t.
  misc_feature (1128488)..(1128488): n is a or c or g or t.
  misc_feature (1128499)..(1128499): n is a or c or g or t.
  misc_feature (1128505)..(1128506): n is a or c or g or t.
  misc_feature (1128517)..(1128518): n is a or c or g or t.
  misc_feature (1128539)..(1128540): n is a or c or g or t.
  misc_feature (1561400)..(1561400): n is a or c or g or t.
  misc_feature (1561477)..(1561477): n is a or c or g or t.
  misc_feature (1561545)..(1561545): n is a or c or g or t.
  misc_feature (1767941)..(1767941): n is a or c or g or t.
MHWGLKLEFIKSMRTKKVWVLLGIMMLLYVPGFYLEKMNGNTPQTVGEAVNMLVSNIEDLAGFFLGILALLLGATAINSDLENGTIRVALSKPVRRIGYLGGKFLAHVVVLLAALLLMTVIGIIGLAWMGAPFGQKLVTESMLLNFLLLLAMIQLVALGYILSTMIKSSGTALGAALALFFILFMLIPSIVSFMAIKDYVFDENVNYDEVAERVDEYTTKYLFYSPLSQMGVILGDVYEDGNYVGIAHAIGKNPVNFGLIVGMTIVYFGGAFLRFARMDLR

SEQ ID NO: 156 - protein, 306 aa, Thermococcus kodakaraensis KOD1
  misc_feature (414542)..(414542): n is a or c or g or t.
  misc_feature (786890)..(786890): n is a or c or g or t.
  misc_feature (786907)..(786907): n is a or c or g or t.
  misc_feature (786944)..(786946): n is a or c or g or t.
  misc_feature (839139)..(839139): n is a or c or g or t.
  misc_feature (1128488)..(1128488): n is a or c or g or t.
  misc_feature (1128499)..(1128499): n is a or c or g or t.
  misc_feature (1128505)..(1128506): n is a or c or g or t.
  misc_feature (1128517)..(1128518): n is a or c or g or t.
  misc_feature (1128539)..(1128540): n is a or c or g or t.
  misc_feature (1561400)..(1561400): n is a or c or g or t.
  misc_feature (1561477)..(1561477): n is a or c or g or t.
  misc_feature (1561545)..(1561545): n is a or c or g or t.
  misc_feature (1767941)..(1767941): n is a or c or g or t.
VMRVENLVKFYKDVKALNGLNLEVKPGQIYGFLGPNGAGKSTTILSTLGLIFPQQGRIQLFDLEVFRDGKFDENKLVQAKKRIGYMPEHATLWDFLTPVQTLDIIADAFKIPKTEKEKRIKELLDLVGLSEAKNRKVGKFSKGMRQRLLLAQALINDPDLLILDEPMSGLDPKGIAEFKDIIREQRKAGKTVFFSSHILAHVEEICDTVGVIVKGKLIREGSLEEIKREFLEKAGYTIILETSKPVDWSSAPWRASPLGENKYRIVAERDIREELHDYVAKQGAKILTLQIKEPTLEEIFLKMVKE

SEQ ID NO: 157 - protein, 605 aa, Thermococcus kodakaraensis KOD1
  misc_feature (414542)..(414542): n is a or c or g or t.
  misc_feature (786890)..(786890): n is a or c or g or t.
  misc_feature (786907)..(786907): n is a or c or g or t.
  misc_feature (786944)..(786946): n is a or c or g or t.
  misc_feature (839139)..(839139): n is a or c or g or t.
  misc_feature (1128488)..(1128488): n is a or c or g or t.
  misc_feature (1128499)..(1128499): n is a or c or g or t.
  misc_feature (1128505)..(1128506): n is a or c or g or t.
  misc_feature (1128517)..(1128518): n is a or c or g or t.
  misc_feature (1128539)..(1128540): n is a or c or g or t.
  misc_feature (1561400)..(1561400): n is a or c or g or t.
  misc_feature (1561477)..(1561477): n is a or c or g or t.
  misc_feature (1561545)..(1561545): n is a or c or g or t.
  misc_feature (1767941)..(1767941): n is a or c or g or t.
VRKMRVLVPDTSVIVDGRLTQFLSTLGEKVKVVVPEAVVAEIEHQANEGKAIGHVGLEELKKLREMADRGEILLEFYGERPDLWQIRRAKAGEIDNMVREVAQTLSATLVTGDQVQRDIAIAKGIDVIYLTTKKEVRHRLEDFFDDTTMSVHLKAGIRPLAKKGRPGEWRLVPVRDEPLTDVELEEIADDIVERAKRDPESFIELDEPGATVVQLRNYRIVIAKPPFSDRIEITAVRPITKLSIEDYELSERLLERLRDKAAGILIAGAPGEGKTTFAQALAEWYASMGKIVKTMEKPRDLQVSEEITQYTALKGSMELTGDILLLVRPDYTIFDEMRKTSDFKIYSDLRLAGVGMIGVVHATKPIDAIQRFIGRVELGMIPQIVDTVIFIKAGRVAKVLTLEYLVKVPSGMKEEDLARPVIEVRDFETGELEYEIYTYGEEVSVVPVKKEEKAPALRLAEKRLKQEIKKFLPDVNAEVEIVSPHKAVIYADEFDIPAIIGKKGKRITELEKRIGISIDVKSFAEREELKPKERIPVEVEEKKKTIVLRVSPEYAKKPLKFYGGEQYVFTATPSRKGLVKVSKSTPIGKELKRLLDAGIPIWAST

SEQ ID NO: 158 - protein, 124 aa, Thermococcus kodakaraensis KOD1
  misc_feature (414542)..(414542): n is a or c or g or t.
  misc_feature (786890)..(786890): n is a or c or g or t.
  misc_feature (786907)..(786907): n is a or c or g or t.
  misc_feature (786944)..(786946): n is a or c or g or t.
  misc_feature (839139)..(839139): n is a or c or g or t.
  misc_feature (1128488)..(1128488): n is a or c or g or t.
  misc_feature (1128499)..(1128499): n is a or c or g or t.
  misc_feature (1128505)..(1128506): n is a or c or g or t.
  misc_feature (1128517)..(1128518): n is a or c or g or t.
  misc_feature (1128539)..(1128540): n is a or c or g or t.
  misc_feature (1561400)..(1561400): n is a or c or g or t.
  misc_feature (1561477)..(1561477): n is a or c or g or t.
  misc_feature (1561545)..(1561545): n is a or c or g or t.
  misc_feature (1767941)..(1767941): n is a or c or g or t.
VLVMEEAPTGAPQKRTSLGLDENIEGLLAYLLGFVTGIILLLLEKESDFVRFHAMQSTIIFLPLWIAIKIFSYIPILGWIIADLLGLIGLVVWIVGMVKAYQGERYKFPIAGDLAEQWLGKVNV

SEQ ID NO: 159 - protein, 117 aa, Thermococcus kodakaraensis KOD1
  misc_feature (414542)..(414542): n is a or c or g or t.
  misc_feature (786890)..(786890): n is a or c or g or t.
  misc_feature (786907)..(786907): n is a or c or g or t.
  misc_feature (786944)..(786946): n is a or c or g or t.
  misc_feature (839139)..(839139): n is a or c or g or t.
  misc_feature (1128488)..(1128488): n is a or c or g or t.
  misc_feature (1128499)..(1128499): n is a or c or g or t.
  misc_feature (1128505)..(1128506): n is a or c or g or t.
  misc_feature (1128517)..(1128518): n is a or c or g or t.
  misc_feature (1128539)..(1128540): n is a or c or g or t.
  misc_feature (1561400)..(1561400): n is a or c or g or t.
  misc_feature (1561477)..(1561477): n is a or c or g or t.
  misc_feature (1561545)..(1561545): n is a or c or g or t.
  misc_feature (1767941)..(1767941): n is a or c or g or t.
MERAKNDRIKSSNMRDIIRKAIVETAEELGVEVKEIILFGSRARGDFRKDSDWDVLVVTKERIPRHVELELYKLVHRKLLFNGIKADILIISKDELEKVKDNKAYVYYYALKEGIKV

SEQ ID NO: 160 - protein, 220 aa, Thermococcus kodakaraensis KOD1
  misc_feature (414542)..(414542): n is a or c or g or t.
  misc_feature (786890)..(786890): n is a or c or g or t.
  misc_feature (786907)..(786907): n is a or c or g or t.
  misc_feature (786944)..(786946): n is a or c or g or t.
  misc_feature (839139)..(839139): n is a or c or g or t.
  misc_feature (1128488)..(1128488): n is a or c or g or t.
  misc_feature (1128499)..(1128499): n is a or c or g or t.
  misc_feature (1128505)..(1128506): n is a or c or g or t.
  misc_feature (1128517)..(1128518): n is a or c or g or t.
  misc_feature (1128539)..(1128540): n is a or c or g or t.
  misc_feature (1561400)..(1561400): n is a or c or g or t.
  misc_feature (1561477)..(1561477): n is a or c or g or t.
  misc_feature (1561545)..(1561545): n is a or c or g or t.
  misc_feature (1767941)..(1767941): n is a or c or g or t.
VSGVTVYLFDFDGTLVDSTGAVEKALRIAIEKTIPAVIESDLYDEYYKALFLFIKGKLTYQHLGVIHELVAQGTIHEYYRQMPKYIKDFPHARRVIRTLRKRGRTVISFSGEHTYPGGKVIFLKRTKWYDEFDEVITFKSTKDMLTKFETLRELYPDEPFVWVDDSPSRFTYILDENTLLVQKASPHKSDVALLFERQNFLKIKSLIEVLEIDDGLSEFL

SEQ ID NO: 161 - protein, 86 aa, Thermococcus kodakaraensis KOD1
  misc_feature (414542)..(414542): n is a or c or g or t.
  misc_feature (786890)..(786890): n is a or c or g or t.
  misc_feature (786907)..(786907): n is a or c or g or t.
  misc_feature (786944)..(786946): n is a or c or g or t.
  misc_feature (839139)..(839139): n is a or c or g or t.
  misc_feature (1128488)..(1128488): n is a or c or g or t.
  misc_feature (1128499)..(1128499): n is a or c or g or t.
  misc_feature (1128505)..(1128506): n is a or c or g or t.
  misc_feature (1128517)..(1128518): n is a or c or g or t.
  misc_feature (1128539)..(1128540): n is a or c or g or t.
  misc_feature (1561400)..(1561400): n is a or c or g or t.
  misc_feature (1561477)..(1561477): n is a or c or g or t.
  misc_feature (1561545)..(1561545): n is a or c or g or t.
  misc_feature (1767941)..(1767941): n is a or c or g or t.
VGFNRGSLWVWNDGTVYFKTKLDSLGIKSMEFLGGIPSEDIYAVSVYATDRVYEEKDSPLGRVSLALSFIAVVLSLAALLRSRKKG

SEQ ID NO: 162 - protein, 305 aa, Thermococcus kodakaraensis KOD1
  misc_feature (414542)..(414542): n is a or c or g or t.
  misc_feature (786890)..(786890): n is a or c or g or t.
  misc_feature (786907)..(786907): n is a or c or g or t.
  misc_feature (786944)..(786946): n is a or c or g or t.
  misc_feature (839139)..(839139): n is a or c or g or t.
  misc_feature (1128488)..(1128488): n is a or c or g or t.
  misc_feature (1128499)..(1128499): n is a or c or g or t.
  misc_feature (1128505)..(1128506): n is a or c or g or t.
  misc_feature (1128517)..(1128518): n is a or c or g or t.
  misc_feature (1128539)..(1128540): n is a or c or g or t.
  misc_feature (1561400)..(1561400): n is a or c or g or t.
  misc_feature (1561477)..(1561477): n is a or c or g or t.
  misc_feature (1561545)..(1561545): n is a or c or g or t.
  misc_feature (1767941)..(1767941): n is a or c or g or t.
MSRSFQVLSSGGKSTGETMENLKSSLCISLLVISMDAYQSVGIRRRLKRFFRRDGRALIFAMDHGFEHGPTDFEPVWEHVNPRIIIRKVVRAGVDGVMMLPGIVRMAGDELKPDTGLMIKLTSKTELRPKEEQLLQSQLGYVEDAIKLGADAIAATVYWGSPQEDVMMRQFAEIASYAHDLGFPVVQFAYPRGPYINEKYGKKEDYRVVMYGARAAAETGADMIKTYWTGSKETFAKVVDAAAGVPVLLSGGAKTDNPVDFLKVVWDVIEAGGAGAVVGRNIFQRENPEPMIKALIRVIHRNEDP

SEQ ID NO: 163 - protein, 592 aa, Thermococcus kodakaraensis KOD1
  misc_feature (414542)..(414542): n is a or c or g or t.
  misc_feature (786890)..(786890): n is a or c or g or t.
  misc_feature (786907)..(786907): n is a or c or g or t.
  misc_feature (786944)..(786946): n is a or c or g or t.
  misc_feature (839139)..(839139): n is a or c or g or t.
  misc_feature (1128488)..(1128488): n is a or c or g or t.
  misc_feature (1128499)..(1128499): n is a or c or g or t.
  misc_feature (1128505)..(1128506): n is a or c or g or t.
  misc_feature (1128517)..(1128518): n is a or c or g or t.
  misc_feature (1128539)..(1128540): n is a or c or g or t.
  misc_feature (1561400)..(1561400): n is a or c or g or t.
  misc_feature (1561477)..(1561477): n is a or c or g or t.
  misc_feature (1561545)..(1561545): n is a or c or g or t.
  misc_feature (1767941)..(1767941): n is a or c or g or t.
VYIEVQNLNGGAGMNSAVIVLVAAAIYVAMYFTYGKSLQNKVVKADPNRPTPAHKLYDGVDYVPAHPLVLYGHHFASIAGAGPIVGPAVAMAWGWLPGLIWVWFGNVFIGAVHDYLALMSSVRYDGKSVQWIAGKLMSKRTGVAFELYIWFTLLLVVAAFVAVTAKLLTITPEAATATLLFLLVAVILGWLLYKMKMNFTVATIIGLVLLAISVWIGLNHPLVFVNGQTDTTSAAYTTAYHYWNIILLVYIIVAASLPVWILLQPRDYLNAYILWFGLLFGGIAFVLLAKDFTAPAYTSWSAYVIKGTEAVPSPFWPTVPLVIACGALSGFHSLVGSGTSSKQLDNEIHGLLVGYGGMFTEGFLSTIVITAIAVYGVQLTGLEPAKWATEYITKGGLGTFIGGYAKGVSEFYGVSETFGKTFATLWVSAFTLTSLDTATRLGRFAWQELFGMIADTSQGIWKTITNKWVASIIIAGLGTWLAWGASYKVLWPAFAGMNQLLASIAMMTAALWAAKVQRAGKWSWAVLLPALFLWITVTAALIWYIAVVPLSGSTLIAVKGSLLIGLLLNFLLAWDFYIAWKRPEEEYAAAAA

SEQ ID NO: 164 - protein, 102 aa, Thermococcus kodakaraensis KOD1
  misc_feature (414542)..(414542): n is a or c or g or t.
  misc_feature (786890)..(786890): n is a or c or g or t.
  misc_feature (786907)..(786907): n is a or c or g or t.
  misc_feature (786944)..(786946): n is a or c or g or t.
  misc_feature (839139)..(839139): n is a or c or g or t.
  misc_feature (1128488)..(1128488): n is a or c or g or t.
  misc_feature (1128499)..(1128499): n is a or c or g or t.
  misc_feature (1128505)..(1128506): n is a or c or g or t.
  misc_feature (1128517)..(1128518): n is a or c or g or t.
  misc_feature (1128539)..(1128540): n is a or c or g or t.
  misc_feature (1561400)..(1561400): n is a or c or g or t.
  misc_feature (1561477)..(1561477): n is a or c or g or t.
  misc_feature (1561545)..(1561545): n is a or c or g or t.
  misc_feature (1767941)..(1767941): n is a or c or g or t.
MDRRLRGIKMPKRALEDIKAFLKGFAESFKHNSTEYLEFELRELENVFALTLMGEFVGIPSPPTTLVIRLLPHMTRELYVMQRRAVEMDDILGELAGMFEIT

SEQ ID NO: 165 - protein, 277 aa, Thermococcus kodakaraensis KOD1
  misc_feature (414542)..(414542): n is a or c or g or t.
  misc_feature (786890)..(786890): n is a or c or g or t.
  misc_feature (786907)..(786907): n is a or c or g or t.
  misc_feature (786944)..(786946): n is a or c or g or t.
  misc_feature (839139)..(839139): n is a or c or g or t.
  misc_feature (1128488)..(1128488): n is a or c or g or t.
  misc_feature (1128499)..(1128499): n is a or c or g or t.
  misc_feature (1128505)..(1128506): n is a or c or g or t.
  misc_feature (1128517)..(1128518): n is a or c or g or t.
  misc_feature (1128539)..(1128540): n is a or c or g or t.
  misc_feature (1561400)..(1561400): n is a or c or g or t.
  misc_feature (1561477)..(1561477): n is a or c or g or t.
  misc_feature (1561545)..(1561545): n is a or c or g or t.
  misc_feature (1767941)..(1767941): n is a or c or g or t.
MVLKFTSGSPREYGTRSRTPSAGRSDGELLGMWLRPLMMCQNLKYSKPEILRDTIRRRIEMDNQLLFTIIFVLAGISVIQYYRGRKMNLILMEHYIRMIKDVVKPEDENYTWLGGYIGFRAEYKVNRDNIREFEYTLTLLPRHSILYFPISLVTSRHDKLFIVIKPFAQIKREAHLIQKGYYRLRPDIENAELLQREEIEIAGKKYEALFEKKRDVEKLKSLVESLPKPENIKHVALTPKTNVFYVQMKPEPDTIRKDVEKIVRFVNEKLKESPFSS

SEQ ID NO: 166 - protein, 94 aa, Thermococcus kodakaraensis KOD1
  misc_feature (414542)..(414542): n is a or c or g or t.
  misc_feature (786890)..(786890): n is a or c or g or t.
  misc_feature (786907)..(786907): n is a or c or g or t.
  misc_feature (786944)..(786946): n is a or c or g or t.
  misc_feature (839139)..(839139): n is a or c or g or t.
  misc_feature (1128488)..(1128488): n is a or c or g or t.
  misc_feature (1128499)..(1128499): n is a or c or g or t.
  misc_feature (1128505)..(1128506): n is a or c or g or t.
  misc_feature (1128517)..(1128518): n is a or c or g or t.
  misc_feature (1128539)..(1128540): n is a or c or g or t.
  misc_feature (1561400)..(1561400): n is a or c or g or t.
  misc_feature (1561477)..(1561477): n is a or c or g or t.
  misc_feature (1561545)..(1561545): n is a or c or g or t.
  misc_feature (1767941)..(1767941): n is a or c or g or t.
VIPVVSIRLKVGPKGQIVIPKVFREAYGIKEGGEVIVEPREDALVIRRVPDTEELLKKLREYHKKRKGAKPAKLGELKGVSLEDEFDEVWGIEE

SEQ ID NO: 167 - protein, 429 aa, Thermococcus kodakaraensis KOD1
  misc_feature (414542)..(414542): n is a or c or g or t.
  misc_feature (786890)..(786890): n is a or c or g or t.
  misc_feature (786907)..(786907): n is a or c or g or t.
  misc_feature (786944)..(786946): n is a or c or g or t.
  misc_feature (839139)..(839139): n is a or c or g or t.
  misc_feature (1128488)..(1128488): n is a or c or g or t.
  misc_feature (1128499)..(1128499): n is a or c or g or t.
  misc_feature (1128505)..(1128506): n is a or c or g or t.
  misc_feature (1128517)..(1128518): n is a or c or g or t.
  misc_feature (1128539)..(1128540): n is a or c or g or t.
  misc_feature (1561400)..(1561400): n is a or c or g or t.
  misc_feature (1561477)..(1561477): n is a or c or g or t.
  misc_feature (1561545)..(1561545): n is a or c or g or t.
  misc_feature (1767941)..(1767941): n is a or c or g or t.
MKGRPVKRQKTTLKTLEKRRQMRYRPDPGRWFYSFIPFKVATGGAAPLIPLLTMNVGGGPADVGIVNAVGSTFSMLGGLFWGKLSDRLNRRKAFLLLGFLGTAIMTMSFALARTVHQVIAINAAYTFFIATTIPIPILIITKAFRLEDWDYAIGKFNEIGGWAWVLGLIVGLLLTPLFGIRGTFIALGVIGLLSFPWGKKTIREVPLHIDRKILGVYAGYVVEKFRYLPNMITHLPRFSTKGFGRLYFSSFLFWVGAMLYFTQFPVLLKSRGFGATHLYLMSIGNSTISAFMYTRVGLKLKKSGGYLALIRGLSVRAFAFSLLAVSTLIEGQVFALLAFVSYFLAGYTWAYIGISTTSIISRFAPPKKRGALIGTYNMISSLGAIAGNFLSGFLTEGLGFTVNFTVATALLLVSILPLLGENVKSRKSN

SEQ ID NO: 168 - protein, 70 aa, Thermococcus kodakaraensis KOD1
  misc_feature (414542)..(414542): n is a or c or g or t.
  misc_feature (786890)..(786890): n is a or c or g or t.
  misc_feature (786907)..(786907): n is a or c or g or t.
  misc_feature (786944)..(786946): n is a or c or g or t.
  misc_feature (839139)..(839139): n is a or c or g or t.
  misc_feature (1128488)..(1128488): n is a or c or g or t.
  misc_feature (1128499)..(1128499): n is a or c or g or t.
  misc_feature (1128505)..(1128506): n is a or c or g or t.
  misc_feature (1128517)..(1128518): n is a or c or g or t.
  misc_feature (1128539)..(1128540): n is a or c or g or t.
  misc_feature (1561400)..(1561400): n is a or c or g or t.
  misc_feature (1561477)..(1561477): n is a or c or g or t.
  misc_feature (1561545)..(1561545): n is a or c or g or t.
  misc_feature (1767941)..(1767941): n is a or c or g or t.
VWRMEKIVRGVYRSGEIILLDETELHEGEIIKVKLVGRKELVDKLAGVLGKGKPEDLERYLEEMYYEGSP

SEQ ID NO: 169 - protein, 804 aa, Thermococcus kodakaraensis KOD1
  misc_feature (414542)..(414542): n is a or c or g or t.
  misc_feature (786890)..(786890): n is a or c or g or t.
  misc_feature (786907)..(786907): n is a or c or g or t.
  misc_feature (786944)..(786946): n is a or c or g or t.
  misc_feature (839139)..(839139): n is a or c or g or t.
  misc_feature (1128488)..(1128488): n is a or c or g or t.
  misc_feature (1128499)..(1128499): n is a or c or g or t.
  misc_feature (1128505)..(1128506): n is a or c or g or t.
  misc_feature (1128517)..(1128518): n is a or c or g or t.
  misc_feature (1128539)..(1128540): n is a or c or g or t.
  misc_feature (1561400)..(1561400): n is a or c or g or t.
  misc_feature (1561477)..(1561477): n is a or c or g or t.
  misc_feature (1561545)..(1561545): n is a or c or g or t.
  misc_feature (1767941)..(1767941): n is a or c or g or t.
MQYLRRDLIEPRVYQEVIYARCKEANCLVVLPTGLGKTLIAMLIADYRLSKYGGKVLMLAPTKPLAVQHAESFKKLFNIPPEKINVLTGELSPKQRAEVWKNSVVITATPQTVENDILTGRISLEDVVLLVFDEAHRAVGNYSYVFIAKEYLKTAKHPLVLGLTASPGSDEEKIREIVRNLGIERIEIRTESSPDVKPYVQKIAFEWVKVDLPGIYKEVRSILREMLKESLKPLAQFKLVSTYSPDISKKEVLQAGSKINQEVARGNYELGRLRMHQAKAVKLLHALELLETQGLTALRAYLKKLKEDKRTKSSKELMEDPRMRKVIYLLVQAKESGLDHPKMEKLKELVKEQLGKKPSSKIIVFTNYRDTGKKIVEELRSMGITAERFIGQASRKDDRGMSQREQKEVLDRFSRGEFNVLVATSVGEEGLDVPEVDLVVFYEPVPSAIRSIQRRGRTGRHRPGRVVILMAKGTRDEAYYWASRRKEKGMFDAIKKIARELEKLQRARIKAQGEEGKIHAGVEKSKGSVDVSKGKIAPLDAFLKPKKVENTEIRESKAVGKAAPQASEEKSAEKPKETTEELPIKPIFVRKPKGIVVYVDSRELRSGVPKHLRELGAEVEVRTLDVADYVVSEEVGIERKSANDFIQSIIDGRLFDQVERLKRAYEKPVIIIEGELYGIRNVHPNAIRGAIAAVTLDWGVPILFSSGPEETAQFIYLMAKREQEERKKEVRLRSEKKALTLAERQRLIVEGLPNVSATLAKRLLKHFGNVERVFTATEEELKEVEGIGPKKAREIRRVITGTLR

SEQ ID NO: 170 - protein, 330 aa, Thermococcus kodakaraensis KOD1
  misc_feature (414542)..(414542): n is a or c or g or t.
  misc_feature (786890)..(786890): n is a or c or g or t.
  misc_feature (786907)..(786907): n is a or c or g or t.
  misc_feature (786944)..(786946): n is a or c or g or t.
  misc_feature (839139)..(839139): n is a or c or g or t.
  misc_feature (1128488)..(1128488): n is a or c or g or t.
  misc_feature (1128499)..(1128499): n is a or c or g or t.
  misc_feature (1128505)..(1128506): n is a or c or g or t.
  misc_feature (1128517)..(1128518): n is a or c or g or t.
  misc_feature (1128539)..(1128540): n is a or c or g or t.
  misc_feature (1561400)..(1561400): n is a or c or g or t.
  misc_feature (1561477)..(1561477): n is a or c or g or t.
  misc_feature (1561545)..(1561545): n is a or c or g or t.
  misc_feature (1767941)..(1767941): n is a or c or g or t.
MLPPGKLPPEALERLFTKLGASDPRVLLGPGKGIDFGAVDFGEKALVASTDPITGAVEDIGFYAVHVNANDVAVAGARPKWFLITILLPEGSDERLPERIMDEIDREAKKLGVAIIGGHTEVTPGLDRPIVIGTMLGEVEREKLVRPDGAKPGDAIVMTKWAGLEGTSIIAREKREELIGVFGKDLVERAASLIDYISVVPEAILAADFGVNAMHDPTEGGIANGLYEMADSAGLGFRVFPDKIPIRDETKAICRYYSLNPLALVGSGSLLIAVSRDRAKALVEILLSRGINAAIIGEFLAEEKRVAVVNGEERPFQRPETDELWRIFDE

SEQ ID NO: 171 - protein, 271 aa, Thermococcus kodakaraensis KOD1
  misc_feature (414542)..(414542): n is a or c or g or t.
  misc_feature (786890)..(786890): n is a or c or g or t.
  misc_feature (786907)..(786907): n is a or c or g or t.
  misc_feature (786944)..(786946): n is a or c or g or t.
  misc_feature (839139)..(839139): n is a or c or g or t.
  misc_feature (1128488)..(1128488): n is a or c or g or t.
  misc_feature (1128499)..(1128499): n is a or c or g or t.
  misc_feature (1128505)..(1128506): n is a or c or g or t.
  misc_feature (1128517)..(1128518): n is a or c or g or t.
  misc_feature (1128539)..(1128540): n is a or c or g or t.
  misc_feature (1561400)..(1561400): n is a or c or g or t.
  misc_feature (1561477)..(1561477): n is a or c or g or t.
  misc_feature (1561545)..(1561545): n is a or c or g or t.
  misc_feature (1767941)..(1767941): n is a or c or g or t.
VSENMCRILFARGIGQEVAPLFDALIKSAQNDPYREKRNKKTQHPDGWGYVLLREENVTHYRSVLPIFNDPNAENLLNSLTEEDSQVVLMAHARAASQGGKTLFNVQPFQFSTRHGFSFWFMHNGDLDKEALIWKAGFKGEELVNASDSYVFAAYLSKTIDNITPEEISRRFVLGLETTRTTLNTGTLFLLPDGSWSAFITAYMVNKYTNSLDDWNYARLIELKANDLYAVASSTLELYHEARWRTLNNGTAISISGDKIERFSLGDACGP

SEQ ID NO: 172 - protein, 503 aa, Thermococcus kodakaraensis KOD1
  misc_feature (414542)..(414542): n is a or c or g or t.
  misc_feature (786890)..(786890): n is a or c or g or t.
  misc_feature (786907)..(786907): n is a or c or g or t.
  misc_feature (786944)..(786946): n is a or c or g or t.
  misc_feature (839139)..(839139): n is a or c or g or t.
  misc_feature (1128488)..(1128488): n is a or c or g or t.
  misc_feature (1128499)..(1128499): n is a or c or g or t.
  misc_feature (1128505)..(1128506): n is a or c or g or t.
  misc_feature (1128517)..(1128518): n is a or c or g or t.
  misc_feature (1128539)..(1128540): n is a or c or g or t.
  misc_feature (1561400)..(1561400): n is a or c or g or t.
  misc_feature (1561477)..(1561477): n is a or c or g or t.
  misc_feature (1561545)..(1561545): n is a or c or g or t.
  misc_feature (1767941)..(1767941): n is a or c or g or t.
VMGMIRIAHISDTHITNEGAFKGYAFDLIVEEINRGNFDFVIHTGDITNQGLREEYEQAAYQLKKIQKPLVVLPGNHDVRNVGYKLFEDFIGPLNGVYEFRDGVVIWVDSTIPDLSDGRIGGHKFRWLKERLEEYSDRRFKIVAAHHHLVPLPDTGRERNVLFNAGDVLDLLLRHGVTLYTCGHKHVPNVYRVEDLIIDNAGCTSCKKTRKGDVNSYNIIELYDDGRVRVTIRRVTGDEITKEHKPVKPKIFVPSGRRLFRIVQMSESNVSDRVYFRRKTLENVVRMINERLRPDLVVHNGDMVDAGIERYYERAYEYYKLVKPQKILVPGHNDITYLGHELFQEYFGEPEVLELGDIVIIPVLSAQYETPIGVVGRMGQKKLRNTLREYEGKFRIVVMHHNVIPVPKSREIGFLEDAGDVLKVLTDEGTELVLTGHGGNAFGVKIENTPIVNAGSVSWELHRNPFGNSFNLVDIYTDMVVVWEVQSTWGSRKLLGIWKRKKH

SEQ ID NO: 173 - protein, 62 aa, Thermococcus kodakaraensis KOD1
  misc_feature (414542)..(414542): n is a or c or g or t.
  misc_feature (786890)..(786890): n is a or c or g or t.
  misc_feature (786907)..(786907): n is a or c or g or t.
  misc_feature (786944)..(786946): n is a or c or g or t.
  misc_feature (839139)..(839139): n is a or c or g or t.
  misc_feature (1128488)..(1128488): n is a or c or g or t.
  misc_feature (1128499)..(1128499): n is a or c or g or t.
  misc_feature (1128505)..(1128506): n is a or c or g or t.
  misc_feature (1128517)..(1128518): n is a or c or g or t.
  misc_feature (1128539)..(1128540): n is a or c or g or t.
  misc_feature (1561400)..(1561400): n is a or c or g or t.
  misc_feature (1561477)..(1561477): n is a or c or g or t.
  misc_feature (1561545)..(1561545): n is a or c or g or t.
  misc_feature (1767941)..(1767941): n is a or c or g or t.
VLAMAEMLVKSKVKEFVKSVDPEMRVSPEFYDALEAEVKALVEKAIKRAQAEGRKTLYARHV

SEQ ID NO: 174 - protein, 436 aa, Thermococcus kodakaraensis KOD1
  misc_feature (414542)..(414542): n is a or c or g or t.
  misc_feature (786890)..(786890): n is a or c or g or t.
  misc_feature (786907)..(786907): n is a or c or g or t.
  misc_feature (786944)..(786946): n is a or c or g or t.
  misc_feature (839139)..(839139): n is a or c or g or t.
  misc_feature (1128488)..(1128488): n is a or c or g or t.
  misc_feature (1128499)..(1128499): n is a or c or g or t.
  misc_feature (1128505)..(1128506): n is a or c or g or t.
  misc_feature (1128517)..(1128518): n is a or c or g or t.
  misc_feature (1128539)..(1128540): n is a or c or g or t.
  misc_feature (1561400)..(1561400): n is a or c or g or t.
  misc_feature (1561477)..(1561477): n is a or c or g or t.
  misc_feature (1561545)..(1561545): n is a or c or g or t.
  misc_feature (1767941)..(1767941): n is a or c or g or t.
MMYGFGFGEERSLRFRIAEYMKALAALLIIVWLFKGPLKLEAYNDYMVYAIIALIFAFELLSVGKWFGVTISGIVFALAKGAFWTSVFLFFGKWLGLSETFTGENATITAGTMFAYAVVLTIAGLLLSKFDERRIDWKVEKKAYEFNGASFGEVKLNGSGKAYPVKFGRKLVGWVIDGDLTVEAETPIGKVTRKLLSPVAVWTSEKIAVKKTSPDPGFVKRANELINPEGLYRDKNKASVVDLGVVKVYEGNGFEYVKVPFVEVISTPAGEEVKIGPMRLRDGRVWKPRGEMLTIRELTNGFQLTRVGERLTIQTEEYTIEVSGDRVTYRSGDEVLSLGETVSLRSGDISVTVGRGRAKLRIEDVVISARDGTVRIRVGGKTHTIESREACNLVLRKAKEIVEEQGVEMVEGLGIDRAKLNARVKELIDELMRYLG

SEQ ID NO: 175 - protein, 158 aa, Thermococcus kodakaraensis KOD1
  misc_feature (414542)..(414542): n is a or c or g or t.
  misc_feature (786890)..(786890): n is a or c or g or t.
  misc_feature (786907)..(786907): n is a or c or g or t.
  misc_feature (786944)..(786946): n is a or c or g or t.
  misc_feature (839139)..(839139): n is a or c or g or t.
  misc_feature (1128488)..(1128488): n is a or c or g or t.
  misc_feature (1128499)..(1128499): n is a or c or g or t.
  misc_feature (1128505)..(1128506): n is a or c or g or t.
  misc_feature (1128517)..(1128518): n is a or c or g or t.
  misc_feature (1128539)..(1128540): n is a or c or g or t.
  misc_feature (1561400)..(1561400): n is a or c or g or t.
  misc_feature (1561477)..(1561477): n is a or c or g or t.
  misc_feature (1561545)..(1561545): n is a or c or g or t.
  misc_feature (1767941)..(1767941): n is a or c or g or t.
MNELEALALALEVEKNELKFYLKLARKTTDERARKMFLFLAKEEAEHWDLFEEKFVERLIEKCELPPVDKELAQKLIVEEPETLSEVEAVKIGMEQEKLTWEFYEKAAKEAEHESVRRLFEELAKVEKGHYELLKAQYDSVMQTGIWMDYQDFSLEVD

SEQ ID NO: 176 - protein, 271 aa, Thermococcus kodakaraensis KOD1
  misc_feature (414542)..(414542): n is a or c or g or t.
  misc_feature (786890)..(786890): n is a or c or g or t.
  misc_feature (786907)..(786907): n is a or c or g or t.
  misc_feature (786944)..(786946): n is a or c or g or t.
  misc_feature (839139)..(839139): n is a or c or g or t.
  misc_feature (1128488)..(1128488): n is a or c or g or t.
  misc_feature (1128499)..(1128499): n is a or c or g or t.
  misc_feature (1128505)..(1128506): n is a or c or g or t.
  misc_feature (1128517)..(1128518): n is a or c or g or t.
  misc_feature (1128539)..(1128540): n is a or c or g or t.
  misc_feature (1561400)..(1561400): n is a or c or g or t.
  misc_feature (1561477)..(1561477): n is a or c or g or t.
  misc_feature (1561545)..(1561545): n is a or c or g or t.
  misc_feature (1767941)..(1767941): n is a or c or g or t.
VMFDLDKPLPYVGVKPVQVITAIAVLIVGYIVAKIVVSMFKKGLKKTKLPALVVEFLARFLSALLYVAVILLAVRALGIEVGSVVIGLSAVIGLILGFGMQDTLTNLAAGVWIAALRPIDMGEVVEVAGKVGKVNAVGIMSTELLTPDNVLITIPNKLVWGNVITNYTRMPTRRVDVNVGVAYGTDLDKAIKIAMDLMQNHPKVLKDPAPTVVITELADSSINLQLRAWAKTEDYWTVKGDLTKGIYEAYMKEGIEIPFPQMDVHIKEMPK

SEQ ID NO: 177 - protein, 239 aa, Thermococcus kodakaraensis KOD1
  misc_feature (414542)..(414542): n is a or c or g or t.
  misc_feature (786890)..(786890): n is a or c or g or t.
  misc_feature (786907)..(786907): n is a or c or g or t.
  misc_feature (786944)..(786946): n is a or c or g or t.
  misc_feature (839139)..(839139): n is a or c or g or t.
  misc_feature (1128488)..(1128488): n is a or c or g or t.
  misc_feature (1128499)..(1128499): n is a or c or g or t.
  misc_feature (1128505)..(1128506): n is a or c or g or t.
  misc_feature (1128517)..(1128518): n is a or c or g or t.
  misc_feature (1128539)..(1128540): n is a or c or g or t.
  misc_feature (1561400)..(1561400): n is a or c or g or t.
  misc_feature (1561477)..(1561477): n is a or c or g or t.
  misc_feature (1561545)..(1561545): n is a or c or g or t.
  misc_feature (1767941)..(1767941): n is a or c or g or t.
VLAMSEPDIFYILGNKVRRDLLSHLTCTECYFSFLSNKMSVSSTAVAKHLKIMEREGILKSYEKEGPFLGPARKYYNIDIAKTYVATITPNIFWYRGLDLGDERSGEVEINLDLLKENPESLLEMVELFMRVTKELEKVLEALRAIESRRDELMKTIKDTYLNEIGDMTQLAILHYVLLNGRATVDELSDRLNLKEREVLQKAEELDRFVPLRIKDGVIEIDEERLKAKLGGETDAGED

SEQ ID NO: 178 - protein, 395 aa, Thermococcus kodakaraensis KOD1
  misc_feature (414542)..(414542): n is a or c or g or t.
  misc_feature (786890)..(786890): n is a or c or g or t.
  misc_feature (786907)..(786907): n is a or c or g or t.
  misc_feature (786944)..(786946): n is a or c or g or t.
  misc_feature (839139)..(839139): n is a or c or g or t.
  misc_feature (1128488)..(1128488): n is a or c or g or t.
  misc_feature (1128499)..(1128499): n is a or c or g or t.
  misc_feature (1128505)..(1128506): n is a or c or g or t.
  misc_feature (1128517)..(1128518): n is a or c or g or t.
  misc_feature (1128539)..(1128540): n is a or c or g or t.
  misc_feature (1561400)..(1561400): n is a or c or g or t.
  misc_feature (1561477)..(1561477): n is a or c or g or t.
  misc_feature (1561545)..(1561545): n is a or c or g or t.
  misc_feature (1767941)..(1767941): n is a or c or g or t.
MTWKYDVVVVGSGIAGPIVARNVAKAGFSVLLIDKKWAIGTPKQCAEAISIKVFDKYDIPYDKRFINREIYGAKLYSPSGYELEMRYKEVSGVILERKVFDKMLAYYAAKAGADVLARTEALDVIRKDGKIVGIKAKHEDEPVEIYADIIVAADGVESTIARKAGINTYAPPHEFDSGYEYEMLIEGFDPDLIHLWFGNEVAPRGYVWVFPKDEDRANVGIGINSDNPKTAKYYLDKWLEENNIPAKKLLEINVGLIPVGGFVKELAKDNVVVVGDAARQVNPMHGGGMAEAMEAGTIASKWIVKALEEENLSLLQNYTKEWWETDGKRLEKVLKVRRVTEKLTDEDLDLFIQILSGADAEKIASGDYAEVIKALLKHPKVLMSKRRLSLLKELL

SEQ ID NO: 179 - protein, 219 aa, Thermococcus kodakaraensis KOD1
  misc_feature (414542)..(414542): n is a or c or g or t.
  misc_feature (786890)..(786890): n is a or c or g or t.
  misc_feature (786907)..(786907): n is a or c or g or t.
  misc_feature (786944)..(786946): n is a or c or g or t.
  misc_feature (839139)..(839139): n is a or c or g or t.
  misc_feature (1128488)..(1128488): n is a or c or g or t.
  misc_feature (1128499)..(1128499): n is a or c or g or t.
  misc_feature (1128505)..(1128506): n is a or c or g or t.
  misc_feature (1128517)..(1128518): n is a or c or g or t.
  misc_feature (1128539)..(1128540): n is a or c or g or t.
  misc_feature (1561400)..(1561400): n is a or c or g or t.
  misc_feature (1561477)..(1561477): n is a or c or g or t.
  misc_feature (1561545)..(1561545): n is a or c or g or t.
  misc_feature (1767941)..(1767941): n is a or c or g or t.
VAPRFFPRIRGSNDSRKFGAGSGGENLRFLYLVLGSLVLGLLVGHFFSPDFGNAYEVMLDLLILLIGVDLGMSLNAEELKKLGKKSLLLPTETLLGSLLGGAVGALVLGIDLKWGLAIGAGCGWYSITGPLIAQYSAIYGAIGFLGNLLREILTIILYPVVIKWVSPEKAVVMGGATTMDTTLPIITKFGGRETALVAFVHGFILTAVVPFVVSFILSL

SEQ ID NO: 180 - protein, 278 aa, Thermococcus kodakaraensis KOD1
  misc_feature (414542)..(414542): n is a or c or g or t.
  misc_feature (786890)..(786890): n is a or c or g or t.
  misc_feature (786907)..(786907): n is a or c or g or t.
  misc_feature (786944)..(786946): n is a or c or g or t.
  misc_feature (839139)..(839139): n is a or c or g or t.
  misc_feature (1128488)..(1128488): n is a or c or g or t.
  misc_feature (1128499)..(1128499): n is a or c or g or t.
  misc_feature (1128505)..(1128506): n is a or c or g or t.
  misc_feature (1128517)..(1128518): n is a or c or g or t.
  misc_feature (1128539)..(1128540): n is a or c or g or t.
  misc_feature (1561400)..(1561400): n is a or c or g or t.
  misc_feature (1561477)..(1561477): n is a or c or g or t.
  misc_feature (1561545)..(1561545): n is a or c or g or t.
  misc_feature (1767941)..(1767941): n is a or c or g or t.
VIEMPRKAKEYPEEGEFVVATVKNIHPYGAFLTLDEYPGKEGFMHISEVAPTWVKNIRDYLKEGQKIVAKVIRVDPEKGHIDLSLKRVNQQQRKAKLQEYKRAQKAENLLKMAAEKLGKDFETAWREVWVPLEEEYGEVYAAFEDAAQNGMDVLKGLISDEWIEALKPIIEAYVEIPTVTIDAEFEITVPKPNGIEIIKEALIKARDRANQEKDIEVKFSYQGAPRYRIDITAPDYYKAEEVLEDIAEEILRVIKEAGGEATLIRKEKRIKKVKKRGS

SEQ ID NO: 181 - protein, 207 aa, Thermococcus kodakaraensis KOD1
  misc_feature (414542)..(414542): n is a or c or g or t.
  misc_feature (786890)..(786890): n is a or c or g or t.
  misc_feature (786907)..(786907): n is a or c or g or t.
  misc_feature (786944)..(786946): n is a or c or g or t.
  misc_feature (839139)..(839139): n is a or c or g or t.
  misc_feature (1128488)..(1128488): n is a or c or g or t.
  misc_feature (1128499)..(1128499): n is a or c or g or t.
  misc_feature (1128505)..(1128506): n is a or c or g or t.
  misc_feature (1128517)..(1128518): n is a or c or g or t.
  misc_feature (1128539)..(1128540): n is a or c or g or t.
  misc_feature (1561400)..(1561400): n is a or c or g or t.
  misc_feature (1561477)..(1561477): n is a or c or g or t.
  misc_feature (1561545)..(1561545): n is a or c or g or t.
  misc_feature (1767941)..(1767941): n is a or c or g or t.
VSQLHIPDGLLSTPVIVVTYAITILAVAYSSRKLKEVPEEKIPLLGLFAAGIFAAQMVNFPIIGGVSGHLLGATLVAVLLGSYAAVIVMTSVLLIQTLLFGDGGITAIGANILNMGLIGAFIGYWVYSRLKSIHEGFAMGLAAWLSVVLGAALASVEIGLSHSLPFTKVLSLMVGYHALIGIGEAVLTVLIVYSIKARLPEIEGVPA

SEQ ID NO: 182 - protein, 222 aa, Thermococcus kodakaraensis KOD1
  misc_feature (414542)..(414542): n is a or c or g or t.
  misc_feature (786890)..(786890): n is a or c or g or t.
  misc_feature (786907)..(786907): n is a or c or g or t.
  misc_feature (786944)..(786946): n is a or c or g or t.
  misc_feature (839139)..(839139): n is a or c or g or t.
  misc_feature (1128488)..(1128488): n is a or c or g or t.
  misc_feature (1128499)..(1128499): n is a or c or g or t.
  misc_feature (1128505)..(1128506): n is a or c or g or t.
  misc_feature (1128517)..(1128518): n is a or c or g or t.
  misc_feature (1128539)..(1128540): n is a or c or g or t.
  misc_feature (1561400)..(1561400): n is a or c or g or t.
  misc_feature (1561477)..(1561477): n is a or c or g or t.
  misc_feature (1561545)..(1561545): n is a or c or g or t.
  misc_feature (1767941)..(1767941): n is a or c or g or t.
VSEVYLPFIFLYAFGVVTRKSLGELVYFFLLFAAVVVAFRPEKSTLKKLTFLLGFEGFLFLLALFNPGETILSTPFGDVTREGLNSFFLLLGKAFLSAGTALIVVESVGFTRILAEMEALRVPRVLILTLAFTYRYLDLFVEETTRMKRALDSRAFGVGRAEYYRKLASLFGEVFVRAYLRSGRVYRAMLARGFGEFPVFEEPRPTPGTVVLMALAAGGLIL

SEQ ID NO: 183 - protein, 445 aa, Thermococcus kodakaraensis KOD1
  misc_feature (414542)..(414542): n is a or c or g or t.
  misc_feature (786890)..(786890): n is a or c or g or t.
  misc_feature (786907)..(786907): n is a or c or g or t.
  misc_feature (786944)..(786946): n is a or c or g or t.
  misc_feature (839139)..(839139): n is a or c or g or t.
  misc_feature (1128488)..(1128488): n is a or c or g or t.
  misc_feature (1128499)..(1128499): n is a or c or g or t.
  misc_feature (1128505)..(1128506): n is a or c or g or t.
  misc_feature (1128517)..(1128518): n is a or c or g or t.
  misc_feature (1128539)..(1128540): n is a or c or g or t.
  misc_feature (1561400)..(1561400): n is a or c or g or t.
  misc_feature (1561477)..(1561477): n is a or c or g or t.
  misc_feature (1561545)..(1561545): n is a or c or g or t.
  misc_feature (1767941)..(1767941): n is a or c or g or t.
MRRILKMLSILILTALLIGTGVSAEWMPPDGGIRVVLTDENGKMLRGFSGDYEIQVQIDVATPSGIKTLGHYRIKRSGFWKFDTTRSVLKVEDIRKFLSSISEEKRYGIRVSVWVIDRENGQLYRGIGSDFLSAEDLRGATKRVSVELLEKEPLPKPARERWYYYEWRPADDSWEAEEYVKVPILIIDNRNGKGELQGSVSLEASYKTEFSATIAYGIDLEKKFRSGDPVNVLSSSVDIYGKRWVPVEGNYYFGDIVDVPKGRMGYIYIWAKPYYRHEKEYLCEGAKCSETGRERIDVGIYDVKASKGVHGYIIDGGASIGSPGFDWTFFKFTKEGILHPLEENKGITLKYLLKGTSGDCGVKFGIGIPVGAIAVAFGAPAPVAGLTASLQYENAGSISIDGTIKENGPTITINATKSSQKYKFKTGWFSSCSAEIPMGFYIKSG

SEQ ID NO: 184 - protein, 21 aa, Thermococcus kodakaraensis KOD1
  misc_feature (414542)..(414542): n is a or c or g or t.
  misc_feature (786890)..(786890): n is a or c or g or t.
  misc_feature (786907)..(786907): n is a or c or g or t.
  misc_feature (786944)..(786946): n is a or c or g or t.
  misc_feature (839139)..(839139): n is a or c or g or t.
  misc_feature (1128488)..(1128488): n is a or c or g or t.
  misc_feature (1128499)..(1128499): n is a or c or g or t.
  misc_feature (1128505)..(1128506): n is a or c or g or t.
  misc_feature (1128517)..(1128518): n is a or c or g or t.
  misc_feature (1128539)..(1128540): n is a or c or g or t.
  misc_feature (1561400)..(1561400): n is a or c or g or t.
  misc_feature (1561477)..(1561477): n is a or c or g or t.
  misc_feature (1561545)..(1561545): n is a or c or g or t.
  misc_feature (1767941)..(1767941): n is a or c or g or t.
MGLIWSMVRAAKKLKNPPWLI

SEQ ID NO: 185 - protein, 154 aa, Thermococcus kodakaraensis KOD1
  misc_feature (414542)..(414542): n is a or c or g or t.
  misc_feature (786890)..(786890): n is a or c or g or t.
  misc_feature (786907)..(786907): n is a or c or g or t.
  misc_feature (786944)..(786946): n is a or c or g or t.
  misc_feature (839139)..(839139): n is a or c or g or t.
  misc_feature (1128488)..(1128488): n is a or c or g or t.
  misc_feature (1128499)..(1128499): n is a or c or g or t.
  misc_feature (1128505)..(1128506): n is a or c or g or t.
  misc_feature (1128517)..(1128518): n is a or c or g or t.
  misc_feature (1128539)..(1128540): n is a or c or g or t.
  misc_feature (1561400)..(1561400): n is a or c or g or t.
  misc_feature (1561477)..(1561477): n is a or c or g or t.
  misc_feature (1561545)..(1561545): n is a or c or g or t.
  misc_feature (1767941)..(1767941): n is a or c or g or t.
MSIVPRQKKELTPLENTALKWMNFAFDLVVIVLALLTMAYVLYAIYDLAEIMLQGFDIEETLHEFLLVIILLELFELLTLYIKEHHVSMRRVAELGVVALVRKLVITIDYKALGWELLIGMAALIFVLGWIYVQERRRISEEEKFIIERGLNTQ

SEQ ID NO: 186 - protein, 170 aa, Thermococcus kodakaraensis KOD1
  misc_feature (414542)..(414542): n is a or c or g or t.
  misc_feature (786890)..(786890): n is a or c or g or t.
  misc_feature (786907)..(786907): n is a or c or g or t.
  misc_feature (786944)..(786946): n is a or c or g or t.
  misc_feature (839139)..(839139): n is a or c or g or t.
  misc_feature (1128488)..(1128488): n is a or c or g or t.
  misc_feature (1128499)..(1128499): n is a or c or g or t.
  misc_feature (1128505)..(1128506): n is a or c or g or t.
  misc_feature (1128517)..(1128518): n is a or c or g or t.
  misc_feature (1128539)..(1128540): n is a or c or g or t.
  misc_feature (1561400)..(1561400): n is a or c or g or t.
  misc_feature (1561477)..(1561477): n is a or c or g or t.
  misc_feature (1561545)..(1561545): n is a or c or g or t.
  misc_feature (1767941)..(1767941): n is a or c or g or t.
VRKRRGVRKMVWRRDRYWDPFDIMREIQEEIDAIFRDFMRGPRLWSYREPGERIEVSETWREPFADIFDRGDRFVITVELPGVRKEDIKLRVTEDTVYIEAQMRREKELEQEGAIRIERYYSGYRRVIRLPEEVIPEKAKARYNNGVLEIEIPKKKPTKPEKEGVEVKIE

SEQ ID NO: 187 - protein, 799 aa, Thermococcus kodakaraensis KOD1
  misc_feature (414542)..(414542): n is a or c or g or t.
  misc_feature (786890)..(786890): n is a or c or g or t.
  misc_feature (786907)..(786907): n is a or c or g or t.
  misc_feature (786944)..(786946): n is a or c or g or t.
  misc_feature (839139)..(839139): n is a or c or g or t.
  misc_feature (1128488)..(1128488): n is a or c or g or t.
  misc_feature (1128499)..(1128499): n is a or c or g or t.
  misc_feature (1128505)..(1128506): n is a or c or g or t.
  misc_feature (1128517)..(1128518): n is a or c or g or t.
  misc_feature (1128539)..(1128540): n is a or c or g or t.
  misc_feature (1561400)..(1561400): n is a or c or g or t.
  misc_feature (1561477)..(1561477): n is a or c or g or t.
  misc_feature (1561545)..(1561545): n is a or c or g or t.
  misc_feature (1767941)..(1767941): n is a or c or g or t.
VMLMSERREVKLKVASAYQRDVGRGIVRIDRKAMRELGVQSGDIVEIIGTKNTAAVVWPAYPEDEGLGIIRMDGTIRKNAGVGLGDEVTVRKADVKEAKKVIVAPTEPIRFGADFVEWLHSRLVGRPVVRGDYIKIGILGQELTFVVTATTPAGIVQITEFTDFQVSEKPVKEVSKATALGVTYEDIGGLKDVIQKVREMIELPLKHPELFEKLGIEPPKGVLLYGPPGTGKTLLAKAVANEANAHFIAINGPEIMSKYYGESEERLREVFKEAEENAPAIIFIDEIDSIAPKREETHGEVEKRVVSQLLTLMDGLKSRGKVIVIGATNRPDAIDPALRRPGRFDREIEVGVPDKQGRKEILQIHTRGMPIEPEFRRDKVIEILEELEKNDTYREAAERAIMKVKKAKDEEEIRRILRETDEKLYEEVRAKLIDALLDELAEVTHGFVGADLAALAREAAMAALRRLINEGKIDFEAEYIPKEVLDELKVTRRDFYEALKMVEPSALREVLLEVPNVRWDDIGGLEDVKQELREAVEWPLKYPEAFMGLGITPPKGILLYGPPGTGKTLLAKAVANESEANFIAIKGPEVLSKWVGESEKNIREIFRKARQAAPTVIFIDEIDAIAPRRGTDVNRVTDRLINQLLTEMDGIQENSGVVVIGATNRPDIIDPALLRPGRFDRLILVPAPDEKARLEIFKVHTRRVPLAGDVDLRELAKKTEGYTGADIAAVVREAAMLAMRRALQEGIIRPGMKADEIRGKVKVTMKDFEEALKKIGPSVSKETMEYYRKIQEQFKQARG

SEQ ID NO: 188 - protein, 1126 aa, Thermococcus kodakaraensis KOD1
  misc_feature (414542)..(414542): n is a or c or g or t.
  misc_feature (786890)..(786890): n is a or c or g or t.
  misc_feature (786907)..(786907): n is a or c or g or t.
  misc_feature (786944)..(786946): n is a or c or g or t.
  misc_feature (839139)..(839139): n is a or c or g or t.
  misc_feature (1128488)..(1128488): n is a or c or g or t.
  misc_feature (1128499)..(1128499): n is a or c or g or t.
  misc_feature (1128505)..(1128506): n is a or c or g or t.
  misc_feature (1128517)..(1128518): n is a or c or g or t.
  misc_feature (1128539)..(1128540): n is a or c or g or t.
  misc_feature (1561400)..(1561400): n is a or c or g or t.
  misc_feature (1561477)..(1561477): n is a or c or g or t.
  misc_feature (1561545)..(1561545): n is a or c or g or t.
  misc_feature (1767941)..(1767941): n is a or c or g or t.
VVLLENLEQVYERIKLAAKQASNEEELRHNVSKVLDEIAREFGVSGRLEKSTQLLESKKVFRGRIDALYGGVIIEYKSPGKLKEKQAFNSALDQVINYIKSEAKSEEFYPYYLGVLFDGSTIAFVRYWGGSFKVNGPLPFTFEAFEHLVDALRGLTRKPLDAEMLLRDFGPKSRITEEVLRAFYSALESPKSDRTEMLFEDWRRIFSQVCSYTPEKLKKLAEFYGFKEADPERLTFALHTYYTLLMKLIVSEIVSVLSEGLTGSVLARLNESYLSDVESFRFVLTELEDGGLFRQLGIRNFLEADYFAWYLEEWSGEVARAVYEITKALMDYEPATVEQTPERVEDLFKRLYQNLVPREIRHSLGEYFTPDWLAELTLDEAGYDGNPEKRVLDPACGSGTFLVLAIKRAKEWGLRHWGTSADAQLRLLESITSNIVGIDLNPLAVLAARGNYLIALGKLIRYRVDDITIPVYLADSITVSTKTSARGGKRIALKTVAGEFEVPKEVIDSKLMDKVFQAIEDGLRRNMKKGQFIVYLHMKLGGKRLSDDTIDAISVLYEKLWKLEQEGKDRIWTRVLRNAFAPLTIGNFDFVIGNPPWINWESLPENYRELTKPLWEYYGLEKGSGKGMGRVKRDMSMLFVARTFDRYLKPGGRLAFLVPFTLFKTQAGAGFRRFLTYGRRREPRIPVKLLKVHDLVTLYPFEGATTRTGLLVIEKTEKTEFPVPLIVWNWPDTRGADVEATLEEVKEKAAIHQLVFMPIEEGKPESPWMMTTVKAYEGLKKALGSSEYRAYAGVFTGLDGAYWVEIIREVAPGRVLIQNVGKTMKKSIKRVQKVVETDLIFPVLRGKNAKKWYCNPEGWILLPIDKNGDIIPPSELKLKYPLTYDFFTALLDELISRNAEPFKTKLRIYKEKPIEIAERSGMPFYAVLNSQVSIAPYKVGWKHISGAISGKAQLDVFVIPTLQDKPMIPTHGIMHIPTSSEDEAHYIASILNSTIARFIVASYGLEVHITTDVPKRIYIPTFDPSNQLHLELAELSKKAHEIAKEKYELLDRIKSLKKSLKGTRGEERKRIKDEIRELEEELAEVEKKLGEVEKEIDEKVAELYGITWEELEEIERLYTVLMNAEP

SEQ ID NO: 189 - protein, 633 aa, Thermococcus kodakaraensis KOD1
  misc_feature (414542)..(414542): n is a or c or g or t.
  misc_feature (786890)..(786890): n is a or c or g or t.
  misc_feature (786907)..(786907): n is a or c or g or t.
  misc_feature (786944)..(786946): n is a or c or g or t.
  misc_feature (839139)..(839139): n is a or c or g or t.
  misc_feature (1128488)..(1128488): n is a or c or g or t.
  misc_feature (1128499)..(1128499): n is a or c or g or t.
  misc_feature (1128505)..(1128506): n is a or c or g or t.
  misc_feature (1128517)..(1128518): n is a or c or g or t.
  misc_feature (1128539)..(1128540): n is a or c or g or t.
  misc_feature (1561400)..(1561400): n is a or c or g or t.
  misc_feature (1561477)..(1561477): n is a or c or g or t.
  misc_feature (1561545)..(1561545): n is a or c or g or t.
  misc_feature (1767941)..(1767941): n is a or c or g or t.
MSWWWLRMRMLLIHSDYLEYEVKDKALKNPEPISDEQKTGRLDEVLAVFISVEKVDETNPDEVVEKAVKEIEDVASQIKAERIFVYPFAHLSSELAKPDVALEVLRKIEEKLREKGYEVKRAPFGYYKAFKLSCKGHPLAELSRTIVPEKAVSKEERNIALEKEEKELKSYWYILTPEGELIDVDKFDFTGHENLKKFVNYEIAKNRVADREPPHVRLMLEQELVDYEPGSDAGNLRYYPKGRLIKSLLEQYVTEKVIEYGAMEVETPIMYDFEHPALEKYLNRFPARQYVVKSGDKKFFLRFAACFGQFLIKKDATISYRNLPLRMYELTRYSFRREKSGELSGLRRLRAFTMPDMHTVARDLKQAMDEFKKQYKLSMEVLKGVGLTPEDYEVAIRFTRDFWEQNRDFIVELAKIIGKPVLIEMWDQRFFYFILKFEFNFVDNLDKAAALSTVQIDVENAERFGIKYYDEEGKERTPLILHCSPSGAIERVMYAILEKQAKLQEKGIKPMYPLWLSPIQVRVIPVSDEVMDYALYVAGKLEGAKIRVDVDDTGDRLNKKIRKAEKEWIPYIIVVGRNEKEQNTVTVRRRSDGRQVEMQLEDLIREIKGQTEGFPYKPRPLPLLLSRRPKFRG

SEQ ID NO: 190 - protein, 128 aa, Thermococcus kodakaraensis KOD1
  misc_feature (414542)..(414542): n is a or c or g or t.
  misc_feature (786890)..(786890): n is a or c or g or t.
  misc_feature (786907)..(786907): n is a or c or g or t.
  misc_feature (786944)..(786946): n is a or c or g or t.
  misc_feature (839139)..(839139): n is a or c or g or t.
  misc_feature (1128488)..(1128488): n is a or c or g or t.
  misc_feature (1128499)..(1128499): n is a or c or g or t.
  misc_feature (1128505)..(1128506): n is a or c or g or t.
  misc_feature (1128517)..(1128518): n is a or c or g or t.
  misc_feature (1128539)..(1128540): n is a or c or g or t.
  misc_feature (1561400)..(1561400): n is a or c or g or t.
  misc_feature (1561477)..(1561477): n is a or c or g or t.
  misc_feature (1561545)..(1561545): n is a or c or g or t.
  misc_feature (1767941)..(1767941): n is a or c or g or t.
MRYRRGASAERELVKLLESKGFAVLRSAGSHKIDLVAGNGKEYLCIEVKSTRSRKLYLPIEDVEKLVEFAGRFGGRPVLAVKFVNVGWRFYGPNRLEHGEKSYKIDLETPFMTLDGLLGKQRTLEGVL

SEQ ID NO: 191 - protein, 510 aa, Thermococcus kodakaraensis KOD1
  misc_feature (414542)..(414542): n is a or c or g or t.
  misc_feature (786890)..(786890): n is a or c or g or t.
  misc_feature (786907)..(786907): n is a or c or g or t.
  misc_feature (786944)..(786946): n is a or c or g or t.
  misc_feature (839139)..(839139): n is a or c or g or t.
  misc_feature (1128488)..(1128488): n is a or c or g or t.
  misc_feature (1128499)..(1128499): n is a or c or g or t.
  misc_feature (1128505)..(1128506): n is a or c or g or t.
  misc_feature (1128517)..(1128518): n is a or c or g or t.
  misc_feature (1128539)..(1128540): n is a or c or g or t.
  misc_feature (1561400)..(1561400): n is a or c or g or t.
  misc_feature (1561477)..(1561477): n is a or c or g or t.
  misc_feature (1561545)..(1561545): n is a or c or g or t.
  misc_feature (1767941)..(1767941): n is a or c or g or t.
MGIKPVSSEGNVGGISLSITVLNNEFTALPGDTLVIPFSIKNTGNTTITNMTVYITGPTTGFQYSGKAIRIPLLPNDTYNDTLILKVLNQEPGQYLLRIIARVGDQYFEAPVIVTVKALIDYDLTITAQDRYIYGRSVEIYLTLTSKSNTVISGRIGYYLVGNRTIINQTTITYVKPDSPWEKKLEFKTLPLGNYTVVLWANMSGVYKEVSKNFEVYRRALNYSISFEHGAIRIFVYDRSGRGVPDITVTVNGVELKTDPNGAVTYSVSTPGVYRVTLNLDGKIVSKELVVKSLHISSIQEGERLIVQVTDGKKEVPNVTVTVEGPKGKDFGITNSTGFALFNLSKVGYGTLIVKAESASYLPAETIITTVSPPSPTKTSTTTPKTSNTMTTIPTTTTTQYPPTSSEPSKKSGISTETALILVISGILLAATSYFALAMPTVHEETLDRYYFVKVRAPRLRPLKDYKLERPVKAVEVRVTKGKATLNDDGITWELDLEPGEEAYLQAILG

SEQ ID NO: 192 - protein, 346 aa, Thermococcus kodakaraensis KOD1
  misc_feature (414542)..(414542): n is a or c or g or t.
  misc_feature (786890)..(786890): n is a or c or g or t.
  misc_feature (786907)..(786907): n is a or c or g or t.
  misc_feature (786944)..(786946): n is a or c or g or t.
  misc_feature (839139)..(839139): n is a or c or g or t.
  misc_feature (1128488)..(1128488): n is a or c or g or t.
  misc_feature (1128499)..(1128499): n is a or c or g or t.
  misc_feature (1128505)..(1128506): n is a or c or g or t.
  misc_feature (1128517)..(1128518): n is a or c or g or t.
  misc_feature (1128539)..(1128540): n is a or c or g or t.
  misc_feature (1561400)..(1561400): n is a or c or g or t.
  misc_feature (1561477)..(1561477): n is a or c or g or t.
  misc_feature (1561545)..(1561545): n is a or c or g or t.
  misc_feature (1767941)..(1767941): n is a or c or g or t.
MVDIELLKRVVEAPGVSGFEFLGIRDVVIEALKDYVDEIKVDKLGNVIAHKKGNGPKVMVAAHMDKIGLMVNHIDNEGYLHVVPIGGVDPRTLVAQRIRFFTDKGERYGVVGHIPPHLQKPEDRKKAADWDTIVVDVGADSKEEAEEMGFRVGTVGEFAPAFTKLTENRIATPYLDDRVCLYAMIEAARALENHEADIYFVASVQEEVGLRGARVASYAIDPEIGIAMDVTFAKQVGDKGKIVPKLGGGPVMDEVGPNIHPKVRRFADEVAKKYDIPLQVEASPRPTGTDANIMQINREGVATAVLSIPIRYMHSQVETADLRDIDLTIKFAKHFLEELRPMDLTP

SEQ ID NO: 193 - protein, 186 aa, Thermococcus kodakaraensis KOD1
  misc_feature (414542)..(414542): n is a or c or g or t.
  misc_feature (786890)..(786890): n is a or c or g or t.
  misc_feature (786907)..(786907): n is a or c or g or t.
  misc_feature (786944)..(786946): n is a or c or g or t.
  misc_feature (839139)..(839139): n is a or c or g or t.
  misc_feature (1128488)..(1128488): n is a or c or g or t.
  misc_feature (1128499)..(1128499): n is a or c or g or t.
  misc_feature (1128505)..(1128506): n is a or c or g or t.
  misc_feature (1128517)..(1128518): n is a or c or g or t.
  misc_feature (1128539)..(1128540): n is a or c or g or t.
  misc_feature (1561400)..(1561400): n is a or c or g or t.
  misc_feature (1561477)..(1561477): n is a or c or g or t.
  misc_feature (1561545)..(1561545): n is a or c or g or t.
  misc_feature (1767941)..(1767941): n is a or c or g or t.
VRVILIVPIGYIPEWLIKDVAEFVDSYYSRRGVSVKAGDSLSESLFLSAYHPFRRQFLGGAFLPTLSEIGRRAGALATVGITKVDLYEKGMNFVFGVASEKLRSAVVSIHRLRPEFYGRPSNDELLIERTVKEVMHELGHVFGLSHCPNVRCVMHFSNSVDDTDIKLPYYCPNCERKLLRNLEVVL

SEQ ID NO: 194 - protein, 277 aa, Thermococcus kodakaraensis KOD1
  misc_feature (414542)..(414542): n is a or c or g or t.
  misc_feature (786890)..(786890): n is a or c or g or t.
  misc_feature (786907)..(786907): n is a or c or g or t.
  misc_feature (786944)..(786946): n is a or c or g or t.
  misc_feature (839139)..(839139): n is a or c or g or t.
  misc_feature (1128488)..(1128488): n is a or c or g or t.
  misc_feature (1128499)..(1128499): n is a or c or g or t.
  misc_feature (1128505)..(1128506): n is a or c or g or t.
  misc_feature (1128517)..(1128518): n is a or c or g or t.
  misc_feature (1128539)..(1128540): n is a or c or g or t.
  misc_feature (1561400)..(1561400): n is a or c or g or t.
  misc_feature (1561477)..(1561477): n is a or c or g or t.
  misc_feature (1561545)..(1561545): n is a or c or g or t.
  misc_feature (1767941)..(1767941): n is a or c or g or t.
MGKLDEFFGSFIGGRPDTEVLTEIEDRLLVDDIPGAIALLEELKKEQNLVIAVRLILRKITQMLEKGDGQSFRALPLIKQLLPHINGIKNERYRALLLGEISIGFYLAGSELEGDFTLKTAINLALQHPDILRDILFSLIKAGLLQKAAYAMKFVKDPEKLDVVLSYLAEVFYERGDIEKALAIISHITSNFHRAVALMHLAQLEENRDRGKALQFIESAIKIAERIEDPETRFELMLKLHDLKHEIMGEPLSVGELLSAETPLEKEAAEGQDGGRV

SEQ ID NO: 195 - protein, 358 aa, Thermococcus kodakaraensis KOD1
  misc_feature (414542)..(414542): n is a or c or g or t.
  misc_feature (786890)..(786890): n is a or c or g or t.
  misc_feature (786907)..(786907): n is a or c or g or t.
  misc_feature (786944)..(786946): n is a or c or g or t.
  misc_feature (839139)..(839139): n is a or c or g or t.
  misc_feature (1128488)..(1128488): n is a or c or g or t.
  misc_feature (1128499)..(1128499): n is a or c or g or t.
  misc_feature (1128505)..(1128506): n is a or c or g or t.
  misc_feature (1128517)..(1128518): n is a or c or g or t.
  misc_feature (1128539)..(1128540): n is a or c or g or t.
  misc_feature (1561400)..(1561400): n is a or c or g or t.
  misc_feature (1561477)..(1561477): n is a or c or g or t.
  misc_feature (1561545)..(1561545): n is a or c or g or t.
  misc_feature (1767941)..(1767941): n is a or c or g or t.
MKNPFEKMPTVLTADELIDKAFRRAEKAASAFTPQGGKVAKARQREELRVRTVSNVVRDNLRKILDRTPGVSTLPKFYRELVDTLVDRDQFHRSLARVNWAIKTIRNLEQRYVEKIRYERDPIEIAKLRRQFYGRVADILKDIGDDLEYLNRARDVLKELPVVDLELPTVVIAGHPNVGKSTLLRALTNAKPEVASYPFTTKGINVGQFEEHYLKYQVIDTPGLLDRPLSERNEVEKQAILALKHLGDVIVYIFDPSEYCGFPIEEQMHLFEEIYSEFGEFPFIVVLNKADIADEEKMKTIEEFVKSKGLEPLRISALTGEGLDELKKRVIEIVKPKAEEFARKIMEKELRKFREEAF

SEQ ID NO: 196 - protein, 471 aa, Thermococcus kodakaraensis KOD1
  misc_feature (414542)..(414542): n is a or c or g or t.
  misc_feature (786890)..(786890): n is a or c or g or t.
  misc_feature (786907)..(786907): n is a or c or g or t.
  misc_feature (786944)..(786946): n is a or c or g or t.
  misc_feature (839139)..(839139): n is a or c or g or t.
  misc_feature (1128488)..(1128488): n is a or c or g or t.
  misc_feature (1128499)..(1128499): n is a or c or g or t.
  misc_feature (1128505)..(1128506): n is a or c or g or t.
  misc_feature (1128517)..(1128518): n is a or c or g or t.
  misc_feature (1128539)..(1128540): n is a or c or g or t.
  misc_feature (1561400)..(1561400): n is a or c or g or t.
  misc_feature (1561477)..(1561477): n is a or c or g or t.
  misc_feature (1561545)..(1561545): n is a or c or g or t.
  misc_feature (1767941)..(1767941): n is a or c or g or t.
MPGIDGLSLRQIFKPPSFSNLRYSKGAGGEKMPVIEEVATKSFERIGMHSHIRGLGLDENGKAKFMADGMVGQIKAREAAGIAVELIKRGKLAGKGILLVGPTGSGKTAIAMGIARELGEDVPFVQIAGSEIYSAEVNKTEFLKQAMRRAIGVRISEERKVYEGEVKSIEVRKTRHPFNPYVEIPESVIITLRTKDDEKTIRAGREIAYQLMEMGVEEGDVIQIDAETGRISKVGTTKEEEGLFFKKKVNLPSGPVLKIKEFTYTVTLHDLDVANARGNIFGLLFSTGAEISDEVRQRVDETVKKWIEEGRATLVPGVLFIDEVHMLDIEAFSFLARAMESELAPILILATNRGRTKIRGTDIEAPHGIPIDMLDRLLIINTEPYKKEEIREIVKIRAKEEKIEVSEEAIEYLAELGEKTSLRYAVQLLAPASVLAKGGRVEKEHVERAKEYFADIKRSIQFVEKLEGMLQ

SEQ ID NO: 197 - protein, 242 aa, Thermococcus kodakaraensis KOD1
  misc_feature (414542)..(414542): n is a or c or g or t.
  misc_feature (786890)..(786890): n is a or c or g or t.
  misc_feature (786907)..(786907): n is a or c or g or t.
  misc_feature (786944)..(786946): n is a or c or g or t.
  misc_feature (839139)..(839139): n is a or c or g or t.
  misc_feature (1128488)..(1128488): n is a or c or g or t.
  misc_feature (1128499)..(1128499): n is a or c or g or t.
  misc_feature (1128505)..(1128506): n is a or c or g or t.
  misc_feature (1128517)..(1128518): n is a or c or g or t.
  misc_feature (1128539)..(1128540): n is a or c or g or t.
  misc_feature (1561400)..(1561400): n is a or c or g or t.
  misc_feature (1561477)..(1561477): n is a or c or g or t.
  misc_feature (1561545)..(1561545): n is a or c or g or t.
  misc_feature (1767941)..(1767941): n is a or c or g or t.
MRGEIKLLSVILVLSFGISALALYLLGIPWFIPQFYALSMSDSINPCTFVIYTMLLIALSVRKVEKKQLYIVGSAFILAVYISYYLLGVGLLYLGQYIPLWFAGFLAIAFGVYTIVTGIMEKSRIADKKGIRKKMFSTEATFMSSFFLGVVVSTTLLPCSAGSYLVYATIISHGSRALAFLLLALYNVIFVLPLVLILLTMGSISESKRFSQALVRHSRELSVVAGILLIGIGVWVLMGGSV

SEQ ID NO: 198 - protein, 447 aa, Thermococcus kodakaraensis KOD1
  misc_feature (414542)..(414542): n is a or c or g or t.
  misc_feature (786890)..(786890): n is a or c or g or t.
  misc_feature (786907)..(786907): n is a or c or g or t.
  misc_feature (786944)..(786946): n is a or c or g or t.
  misc_feature (839139)..(839139): n is a or c or g or t.
  misc_feature (1128488)..(1128488): n is a or c or g or t.
  misc_feature (1128499)..(1128499): n is a or c or g or t.
  misc_feature (1128505)..(1128506): n is a or c or g or t.
  misc_feature (1128517)..(1128518): n is a or c or g or t.
  misc_feature (1128539)..(1128540): n is a or c or g or t.
  misc_feature (1561400)..(1561400): n is a or c or g or t.
  misc_feature (1561477)..(1561477): n is a or c or g or t.
  misc_feature (1561545)..(1561545): n is a or c or g or t.
  misc_feature (1767941)..(1767941): n is a or c or g or t.
VRTGMTPEEVVERYSQVISRASHVTYVPIVPSRAENALVWDIEGRAYIDFLADAAVQNVGHNNPRVVEAVKKTADRLLHFTFIYGFPVEPLLLAEKLREIAPLEGAKVAFGLSGSDANDGAIKFARAYTGRRSIIGYLRSYYGSTYGAMSVTGLDFEVRSKVGQLSDVHFIPFPNCYRCPFGKEPGKCRMECVSFLKEKFEGEVHAEGTAALIAEAIQGDAGMVVPPENYFKKLKRILDEHGILLVVDEVQSGLGRTGKWFAIEHFGVEPEIITLAKPLGGGLPISAIVGRGEIMDSLPPLGHAFTMSGNPVASAAALAVIEEIEEKELLKRAQILGERAKRRLEKMKKKHELIGDVRGLGLMLGVDLVKDRETKERAYDEAKKVVWRAYELGLIVAFLQGNVLRIEPPLTIEEEVLDEGLDKLEEAIEDVEEGRVPDEVIEKVQGW

SEQ ID NO: 199 - protein, 16 aa, Thermococcus kodakaraensis KOD1
  misc_feature (414542)..(414542): n is a or c or g or t.
  misc_feature (786890)..(786890): n is a or c or g or t.
  misc_feature (786907)..(786907): n is a or c or g or t.
  misc_feature (786944)..(786946): n is a or c or g or t.
  misc_feature (839139)..(839139): n is a or c or g or t.
  misc_feature (1128488)..(1128488): n is a or c or g or t.
  misc_feature (1128499)..(1128499): n is a or c or g or t.
  misc_feature (1128505)..(1128506): n is a or c or g or t.
  misc_feature (1128517)..(1128518): n is a or c or g or t.
  misc_feature (1128539)..(1128540): n is a or c or g or t.
  misc_feature (1561400)..(1561400): n is a or c or g or t.
  misc_feature (1561477)..(1561477): n is a or c or g or t.
  misc_feature (1561545)..(1561545): n is a or c or g or t.
  misc_feature (1767941)..(1767941): n is a or c or g or t.
MTLDNIRVAFHEVRYR

SEQ ID NO: 200 - protein, 154 aa, Thermococcus kodakaraensis KOD1
  misc_feature (414542)..(414542): n is a or c or g or t.
  misc_feature (786890)..(786890): n is a or c or g or t.
  misc_feature (786907)..(786907): n is a or c or g or t.
  misc_feature (786944)..(786946): n is a or c or g or t.
  misc_feature (839139)..(839139): n is a or c or g or t.
  misc_feature (1128488)..(1128488): n is a or c or g or t.
  misc_feature (1128499)..(1128499): n is a or c or g or t.
  misc_feature (1128505)..(1128506): n is a or c or g or t.
  misc_feature (1128517)..(1128518): n is a or c or g or t.
  misc_feature (1128539)..(1128540): n is a or c or g or t.
  misc_feature (1561400)..(1561400): n is a or c or g or t.
  misc_feature (1561477)..(1561477): n is a or c or g or t.
  misc_feature (1561545)..(1561545): n is a or c or g or t.
  misc_feature (1767941)..(1767941): n is a or c or g or t.
VYDMARIHARKRGKSGSKRPPRTAPPAWVEYTAEEVEALVVKLRKEGYSTAMIGTILRDQYGIPSVKLITGKKITKILEENGLAPEIPEDLMFLIRRAVNLRKHLEQHPKDKHSRRGLQLIESKIRRLVKYYRRTGKLPAKWRYDPEQAKLLVR

SEQ ID NO: 201 - protein, 477 aa, Thermococcus kodakaraensis KOD1
  misc_feature (414542)..(414542): n is a or c or g or t.
  misc_feature (786890)..(786890): n is a or c or g or t.
  misc_feature (786907)..(786907): n is a or c or g or t.
  misc_feature (786944)..(786946): n is a or c or g or t.
  misc_feature (839139)..(839139): n is a or c or g or t.
  misc_feature (1128488)..(1128488): n is a or c or g or t.
  misc_feature (1128499)..(1128499): n is a or c or g or t.
  misc_feature (1128505)..(1128506): n is a or c or g or t.
  misc_feature (1128517)..(1128518): n is a or c or g or t.
  misc_feature (1128539)..(1128540): n is a or c or g or t.
  misc_feature (1561400)..(1561400): n is a or c or g or t.
  misc_feature (1561477)..(1561477): n is a or c or g or t.
  misc_feature (1561545)..(1561545): n is a or c or g or t.
  misc_feature (1767941)..(1767941): n is a or c or g or t.
VDKEAFLERVREGAELIKMHIELGHTIRLISHRDADGITAGAILAKAVAREGGTFQLSIVKQVSEELIDQLAREKREIYVFSDLGSGSIELIEEKLNFATVVVADHHPPEKDSFSTDSHVLVNPVPFGANSVRDLSGSGVAYFVAREMNRKNRDMAYVAIVGAVGDMQEIDGTFHGLNLEIIEDGKELGILEVRKELRLFGRESRPLYQMLAYATNPEIPEITGDERKAIEWLRAKGFDPEMKYWQLREEEKRKLHEALLVHMIKHGAPKEAIDRLIGDVVISPLYPEGDVRHEAREFATLLNATGRLNAGTLGVAICLGDEEAYKVARKMLDDYKKEQIEARKFIIQNWNMVEEGEHAYVFYAGKNIRDTLVGIAANMAINAGLADPEKPVVVLADSDEDENLVKGSARTTEKALEKGYHLGEALKEVAEKLGGEGGGHAIAAGIRFPKNRIDEFIKLFNEALGRQVKGGGSEGEG

SEQ ID NO: 202 - protein, 146 aa, Thermococcus kodakaraensis KOD1
  misc_feature (414542)..(414542): n is a or c or g or t.
  misc_feature (786890)..(786890): n is a or c or g or t.
  misc_feature (786907)..(786907): n is a or c or g or t.
  misc_feature (786944)..(786946): n is a or c or g or t.
  misc_feature (839139)..(839139): n is a or c or g or t.
  misc_feature (1128488)..(1128488): n is a or c or g or t.
  misc_feature (1128499)..(1128499): n is a or c or g or t.
  misc_feature (1128505)..(1128506): n is a or c or g or t.
  misc_feature (1128517)..(1128518): n is a or c or g or t.
  misc_feature (1128539)..(1128540): n is a or c or g or t.
  misc_feature (1561400)..(1561400): n is a or c or g or t.
  misc_feature (1561477)..(1561477): n is a or c or g or t.
  misc_feature (1561545)..(1561545): n is a or c or g or t.
  misc_feature (1767941)..(1767941): n is a or c or g or t.
VGAYRMKRPVPEVIYLDTSALIALFNRNDKNHERAVSYLREALESGNLFLLSRPVLMEYLNGLSKRYGKEIAKENYDALTSSSFVYIENETEADWRKAWEFFFKYRDQRGIDLFDSLSFAIMERLGLKTAFTFDSDFEVHGFRTVP

SEQ ID NO: 203 - protein, 345 aa, Thermococcus kodakaraensis KOD1
  misc_feature (414542)..(414542): n is a or c or g or t.
  misc_feature (786890)..(786890): n is a or c or g or t.
  misc_feature (786907)..(786907): n is a or c or g or t.
  misc_feature (786944)..(786946): n is a or c or g or t.
  misc_feature (839139)..(839139): n is a or c or g or t.
  misc_feature (1128488)..(1128488): n is a or c or g or t.
  misc_feature (1128499)..(1128499): n is a or c or g or t.
  misc_feature (1128505)..(1128506): n is a or c or g or t.
  misc_feature (1128517)..(1128518): n is a or c or g or t.
  misc_feature (1128539)..(1128540): n is a or c or g or t.
  misc_feature (1561400)..(1561400): n is a or c or g or t.
  misc_feature (1561477)..(1561477): n is a or c or g or t.
  misc_feature (1561545)..(1561545): n is a or c or g or t.
  misc_feature (1767941)..(1767941): n is a or c or g or t.
MESVAGNYIREALPNAEVWASPMGYSGLVIVETNDENAEEKILEIPEVERVIPVLVETNAELKEIEKAADEIASLISKDETFAVKTKRRGKHDFSSIDVNRVLGARIKEITDADVNLSWPDKVVQVEIIGDRAYISVLPGEEYRKYTPDKFDARKLFSKVTLVQMPYWGDYKACRKFGEKIGRAAQAFEVKELIIAPKEKMDAYELMEFLRGIKIGQESRYQIQREAYPWKVEKVPVSVWDLYQVVRDKRRNKRLLIITDPKGPTLAEVKEKLAKDMHYAKEVVIFIGSREGIPRGLFRFADYVVDLAPYMTFATEHGIPATLVSLWEVYEEFLRKSEEKAEDSS

SEQ ID NO: 204 - protein, 220 aa, Thermococcus kodakaraensis KOD1
  misc_feature (414542)..(414542): n is a or c or g or t.
  misc_feature (786890)..(786890): n is a or c or g or t.
  misc_feature (786907)..(786907): n is a or c or g or t.
  misc_feature (786944)..(786946): n is a or c or g or t.
  misc_feature (839139)..(839139): n is a or c or g or t.
  misc_feature (1128488)..(1128488): n is a or c or g or t.
  misc_feature (1128499)..(1128499): n is a or c or g or t.
  misc_feature (1128505)..(1128506): n is a or c or g or t.
  misc_feature (1128517)..(1128518): n is a or c or g or t.
  misc_feature (1128539)..(1128540): n is a or c or g or t.
  misc_feature (1561400)..(1561400): n is a or c or g or t.
  misc_feature (1561477)..(1561477): n is a or c or g or t.
  misc_feature (1561545)..(1561545): n is a or c or g or t.
  misc_feature (1767941)..(1767941): n is a or c or g or t.
VERGEMMKVYHLYSGGKDSSLAAWILAKLGYEVRLVTVTFGTLDNWKYAEETARRLGFEHEILKLSGEILERAAEMAVEDGRPGRAIQFIHEKALEALASKPDVERVSDGTRRDDRVPYLDLPKARSLEDRFGVAYIRPLLGLGYRTINELVGRLFEVEIRESEELEKSDYEVELRHLLRKRGIDPLSIFPKMHYQSRVLGWKEEKLTSSPSRTARVPKN

SEQ ID NO: 205 - protein, 391 aa, Thermococcus kodakaraensis KOD1
  misc_feature (414542)..(414542): n is a or c or g or t.
  misc_feature (786890)..(786890): n is a or c or g or t.
  misc_feature (786907)..(786907): n is a or c or g or t.
  misc_feature (786944)..(786946): n is a or c or g or t.
  misc_feature (839139)..(839139): n is a or c or g or t.
  misc_feature (1128488)..(1128488): n is a or c or g or t.
  misc_feature (1128499)..(1128499): n is a or c or g or t.
  misc_feature (1128505)..(1128506): n is a or c or g or t.
  misc_feature (1128517)..(1128518): n is a or c or g or t.
  misc_feature (1128539)..(1128540): n is a or c or g or t.
  misc_feature (1561400)..(1561400): n is a or c or g or t.
  misc_feature (1561477)..(1561477): n is a or c or g or t.
  misc_feature (1561545)..(1561545): n is a or c or g or t.
  misc_feature (1767941)..(1767941): n is a or c or g or t.
VTGMPTNVTAEYLAAEEEYRNAKTIPEKIRALEKMYATVPKHKGTEKLRLQIKRKLAELRKELEKQRQMRKGGGGPSMAVRKEGAAQIVLAGLPNVGKSSLMRALTNVDADVADYAFTTVEPIPGMMHHKDVQIQLVEVPGLVEGAALGKGMGPQLLSVIRNADAIAIVVDLSQDPVKQMEILLREFERAGIKVNKRKPKVEIKRTASGGIVINGQENIKGDIQEVMKMLREERIHSAEITVKEPVTLEEFADALDESLVWRRAIIIANKGDAPGSKENYEKLVKAYGDRFKIVPVSARRKINLDKLKDELYELAGIIRVFTKSPGEEPAYPPVALKKGSTVMDLAERIHKDFAKNFRYARVWGKSVKFPGQRVGADHVLEDGDIVEIHAR

SEQ ID NO: 206 - protein, 355 aa, Thermococcus kodakaraensis KOD1
  misc_feature (414542)..(414542): n is a or c or g or t.
  misc_feature (786890)..(786890): n is a or c or g or t.
  misc_feature (786907)..(786907): n is a or c or g or t.
  misc_feature (786944)..(786946): n is a or c or g or t.
  misc_feature (839139)..(839139): n is a or c or g or t.
  misc_feature (1128488)..(1128488): n is a or c or g or t.
  misc_feature (1128499)..(1128499): n is a or c or g or t.
  misc_feature (1128505)..(1128506): n is a or c or g or t.
  misc_feature (1128517)..(1128518): n is a or c or g or t.
  misc_feature (1128539)..(1128540): n is a or c or g or t.
  misc_feature (1561400)..(1561400): n is a or c or g or t.
  misc_feature (1561477)..(1561477): n is a or c or g or t.
  misc_feature (1561545)..(1561545): n is a or c or g or t.
  misc_feature (1767941)..(1767941): n is a or c or g or t.
MRVIGVDPGTKSFDVIGLEDGRIKLDLSYPSEVVAEDPGRIVKAIEEFNADIIIGPSGYGVPLKHISELTDRDRFEMTLVREEEMKEIPVLIGLQEMVSQMAEKGMNVWFIPGVIHLPTVPEWRKYNKIDMGTADKMAITVLGIHDQAKRLGIDYADVSFVLLEVGFGYNYAGAVKGGKIVDGIGGTIFPGPAYVNSGALDGEVAYLMGSIKKWHLFWGGASVIAAEKILPPEEFAKRLDEEPFAKAWEAMKDGFVKAVASELAVVGDAREIILSGRLMRIDELRKDVEDLFEEHFDLPVVKQRGLEGKAKEAAQGSAIIGDGLAGGQFKELVEHVEIKKSYGSVLDWVKLPLAL

SEQ ID NO: 207 - protein, 495 aa, Thermococcus kodakaraensis KOD1
  misc_feature (414542)..(414542): n is a or c or g or t.
  misc_feature (786890)..(786890): n is a or c or g or t.
  misc_feature (786907)..(786907): n is a or c or g or t.
  misc_feature (786944)..(786946): n is a or c or g or t.
  misc_feature (839139)..(839139): n is a or c or g or t.
  misc_feature (1128488)..(1128488): n is a or c or g or t.
  misc_feature (1128499)..(1128499): n is a or c or g or t.
  misc_feature (1128505)..(1128506): n is a or c or g or t.
  misc_feature (1128517)..(1128518): n is a or c or g or t.
  misc_feature (1128539)..(1128540): n is a or c or g or t.
  misc_feature (1561400)..(1561400): n is a or c or g or t.
  misc_feature (1561477)..(1561477): n is a or c or g or t.
  misc_feature (1561545)..(1561545): n is a or c or g or t.
  misc_feature (1767941)..(1767941): n is a or c or g or t.
VESFKASGVGFSVMCEYTYENGKKCRLKPLEGSKYCALHIPREEGEAVYGERLKEIKKEAFEKRLKVGQTYFEGVDLYDVAIRDFTTEKVLVFKNSRVTNLIMDASSVRGLILINSKVERVVIFESTLETILVKNSTVFGLNILRTEFSSHISIRDSEVRYLMINSTRYTPKGEVGEEKAYGETERIVGNIEISNLTGVRRIGINTRYPLLREILKEHGINVSESKERSVRARNLIIRDVSFDVSPRYKRRVRLTVAGFHGRLHLENLEVFGHIEIRKSYLVSPEFVHVKVESNLVLRGTSIHTDSTWGMTVLPNLPIELEVGGFIIVEDCRFNNPRAEELFYRLARTSWEKSGDFDRADEYYYLEMLAKRKAKLQSRKKGLKRIINTAEVWFEWLFADLTCKYGTDWKRPILLWLGAVNVIFPLLFWATKSVEGLSSSLSFLDYEYFSIVTATTLGYGDYHPFGVGRIIASVEALFGMFMWAVFLTVFARKYMR

SEQ ID NO: 208 - protein, 381 aa, Thermococcus kodakaraensis KOD1
  misc_feature (414542)..(414542): n is a or c or g or t.
  misc_feature (786890)..(786890): n is a or c or g or t.
  misc_feature (786907)..(786907): n is a or c or g or t.
  misc_feature (786944)..(786946): n is a or c or g or t.
  misc_feature (839139)..(839139): n is a or c or g or t.
  misc_feature (1128488)..(1128488): n is a or c or g or t.
  misc_feature (1128499)..(1128499): n is a or c or g or t.
  misc_feature (1128505)..(1128506): n is a or c or g or t.
  misc_feature (1128517)..(1128518): n is a or c or g or t.
  misc_feature (1128539)..(1128540): n is a or c or g or t.
  misc_feature (1561400)..(1561400): n is a or c or g or t.
  misc_feature (1561477)..(1561477): n is a or c or g or t.
  misc_feature (1561545)..(1561545): n is a or c or g or t.
  misc_feature (1767941)..(1767941): n is a or c or g or t.
MRKLRVGFIVNPIAGMGGRVALKGTDGVVDEAIRRGARPVAPEVARLFLSELKHYKEAESFEFLTGPGPLGEDYLREFGFVFDVIRHREIGYREIEGVKIPDTTSEDTKILAREMLEKVDIIVFAGGDGTARDVHSVLGKKVPILGVPTGVKMFSGVFAASPESAARVLVEFASGRARLEERDVMDLDEDAYRRDEVRPKHYGKALTPVVELLVQGAKEPQKVDESETLEAIADAVAEEILSGDGIYFLGAGSTIKRIKDRLGVNGTLLGVDVVEVKDGKARLLVKDAAEKDLLRFVDKNPRIVVTVIGGLNFLFGRGNQQFSAEVLRRIPKENIIVVATPSKVENGVIRVYTGDKEVDEKLRGYIRVRVSPWMEKMVKVI

SEQ ID NO: 209 - protein, 333 aa, Thermococcus kodakaraensis KOD1
  misc_feature (414542)..(414542): n is a or c or g or t.
  misc_feature (786890)..(786890): n is a or c or g or t.
  misc_feature (786907)..(786907): n is a or c or g or t.
  misc_feature (786944)..(786946): n is a or c or g or t.
  misc_feature (839139)..(839139): n is a or c or g or t.
  misc_feature (1128488)..(1128488): n is a or c or g or t.
  misc_feature (1128499)..(1128499): n is a or c or g or t.
  misc_feature (1128505)..(1128506): n is a or c or g or t.
  misc_feature (1128517)..(1128518): n is a or c or g or t.
  misc_feature (1128539)..(1128540): n is a or c or g or t.
  misc_feature (1561400)..(1561400): n is a or c or g or t.
  misc_feature (1561477)..(1561477): n is a or c or g or t.
  misc_feature (1561545)..(1561545): n is a or c or g or t.
  misc_feature (1767941)..(1767941): n is a or c or g or t.
VPPHREHLSCLLSMRITDVTICLEYKYVAPGKMIEVAIQSGLVFKQNLKISFITLIGDGVMVKRVSKLKRIDGITHGSHIDTVYPDPAVALNLLMEGIKDNEPRIATVELNVGKILPRKKTVNVWIYDVSFGDDVFMRSLLIEDSKKKILQFATAFPVLNSETSVEFEVNEILEWANRLEANVSGKVIGEETPYVSFFAVDYIERKADYLELDTARAKLAFLAYWAKVGPIGDKISVSPQNGEPVQINLEDAELLLPASFKGAFMDDYAITGRVLRVKPSRTLYGDGYLIRLKSLPLGEIDLFVLREHLKGENKEIKEGEMLTAVGWLQGGLV

SEQ ID NO: 210 - protein, 77 aa, Thermococcus kodakaraensis KOD1
  misc_feature (414542)..(414542): n is a or c or g or t.
  misc_feature (786890)..(786890): n is a or c or g or t.
  misc_feature (786907)..(786907): n is a or c or g or t.
  misc_feature (786944)..(786946): n is a or c or g or t.
  misc_feature (839139)..(839139): n is a or c or g or t.
  misc_feature (1128488)..(1128488): n is a or c or g or t.
  misc_feature (1128499)..(1128499): n is a or c or g or t.
  misc_feature (1128505)..(1128506): n is a or c or g or t.
  misc_feature (1128517)..(1128518): n is a or c or g or t.
  misc_feature (1128539)..(1128540): n is a or c or g or t.
  misc_feature (1561400)..(1561400): n is a or c or g or t.
  misc_feature (1561477)..(1561477): n is a or c or g or t.
  misc_feature (1561545)..(1561545): n is a or c or g or t.
  misc_feature (1767941)..(1767941): n is a or c or g or t.
MEVKVFRVKGTFERLGKKQPFTKEYRALKEEHVRELVYSDIGSKHRVPRTKIWIESIEEIKPEEAEDPVVRRLSLEL

SEQ ID NO: 211 - protein, 76 aa, Thermococcus kodakaraensis KOD1
  misc_feature (414542)..(414542): n is a or c or g or t.
  misc_feature (786890)..(786890): n is a or c or g or t.
  misc_feature (786907)..(786907): n is a or c or g or t.
  misc_feature (786944)..(786946): n is a or c or g or t.
  misc_feature (839139)..(839139): n is a or c or g or t.
  misc_feature (1128488)..(1128488): n is a or c or g or t.
  misc_feature (1128499)..(1128499): n is a or c or g or t.
  misc_feature (1128505)..(1128506): n is a or c or g or t.
  misc_feature (1128517)..(1128518): n is a or c or g or t.
  misc_feature (1128539)..(1128540): n is a or c or g or t.
  misc_feature (1561400)..(1561400): n is a or c or g or t.
  misc_feature (1561477)..(1561477): n is a or c or g or t.
  misc_feature (1561545)..(1561545): n is a or c or g or t.
  misc_feature (1767941)..(1767941): n is a or c or g or t.
MRSGLGVRMKKVAYTFAVIMAAFGMFLPLIYGAVPALQRLLGENPLLKSLGISVIFWVLAYVLFEEEEKSADFTAS

SEQ ID NO: 212 - protein, 188 aa, Thermococcus kodakaraensis KOD1
  misc_feature (414542)..(414542): n is a or c or g or t.
  misc_feature (786890)..(786890): n is a or c or g or t.
  misc_feature (786907)..(786907): n is a or c or g or t.
  misc_feature (786944)..(786946): n is a or c or g or t.
  misc_feature (839139)..(839139): n is a or c or g or t.
  misc_feature (1128488)..(1128488): n is a or c or g or t.
  misc_feature (1128499)..(1128499): n is a or c or g or t.
  misc_feature (1128505)..(1128506): n is a or c or g or t.
  misc_feature (1128517)..(1128518): n is a or c or g or t.
  misc_feature (1128539)..(1128540): n is a or c or g or t.
  misc_feature (1561400)..(1561400): n is a or c or g or t.
  misc_feature (1561477)..(1561477): n is a or c or g or t.
  misc_feature (1561545)..(1561545): n is a or c or g or t.
  misc_feature (1767941)..(1767941): n is a or c or g or t.
VGAMIVIVTGMPGSGKSKIVKEFEKRGFPSVSLGDIVREETLKRGLELTKENVAKVSIRLRQELGQNAVAKLAVEKVRALLKGSQVVVIDGVRSLDEVGTFRGAFPEENIIIVAVHTPPRQRFERLKARGRHDDPQTWEDFEERDWKELRFGIGGVIAMADYMLVNNGSREEYEAEVKKLVDEIISKL

SEQ ID NO: 213 - protein, 239 aa, Thermococcus kodakaraensis KOD1
  misc_feature (414542)..(414542): n is a or c or g or t.
  misc_feature (786890)..(786890): n is a or c or g or t.
  misc_feature (786907)..(786907): n is a or c or g or t.
  misc_feature (786944)..(786946): n is a or c or g or t.
  misc_feature (839139)..(839139): n is a or c or g or t.
  misc_feature (1128488)..(1128488): n is a or c or g or t.
  misc_feature (1128499)..(1128499): n is a or c or g or t.
  misc_feature (1128505)..(1128506): n is a or c or g or t.
  misc_feature (1128517)..(1128518): n is a or c or g or t.
  misc_feature (1128539)..(1128540): n is a or c or g or t.
  misc_feature (1561400)..(1561400): n is a or c or g or t.
  misc_feature (1561477)..(1561477): n is a or c or g or t.
  misc_feature (1561545)..(1561545): n is a or c or g or t.
  misc_feature (1767941)..(1767941): n is a or c or g or t.
MEVAKMSLITYIAFFAYAPTLAILWYFYHKDKYEPEPKRYVVATFLLGATLSVGISYILESVLTIGGIIKPILPATAFYVALVAGIVEEPAKALAIRYPFAAGQIDGIMDGLVYGVAAGLGFAATENFLYGLGWGVGVTIARAFLTPFAHATWSAIVGVGYGLVSEGKAYSTGSFLILAMFLHAIWDYFAFLSAGIPAYNLVLIFLILLNAAILRYFLMLAEMEERSKLWYYLFRRGMR

SEQ ID NO: 214 - protein, 219 aa, Thermococcus kodakaraensis KOD1
  misc_feature (414542)..(414542): n is a or c or g or t.
  misc_feature (786890)..(786890): n is a or c or g or t.
  misc_feature (786907)..(786907): n is a or c or g or t.
  misc_feature (786944)..(786946): n is a or c or g or t.
  misc_feature (839139)..(839139): n is a or c or g or t.
  misc_feature (1128488)..(1128488): n is a or c or g or t.
  misc_feature (1128499)..(1128499): n is a or c or g or t.
  misc_feature (1128505)..(1128506): n is a or c or g or t.
  misc_feature (1128517)..(1128518): n is a or c or g or t.
  misc_feature (1128539)..(1128540): n is a or c or g or t.
  misc_feature (1561400)..(1561400): n is a or c or g or t.
  misc_feature (1561477)..(1561477): n is a or c or g or t.
  misc_feature (1561545)..(1561545): n is a or c or g or t.
  misc_feature (1767941)..(1767941): n is a or c or g or t.
MKGSRAVLGALIIGLVVLGGYLYTQRASDHSPQVDTSRAQILAYLGGLDCYSYHENITTIIGDETIESSINGSRINGTYYFEGQRSGLHWYAVVINNTLKERIMTNGTTKDVNITLSKDERAMFLSVDPVKMGLQAVGVGKLVEKNKDKITYAFEITLSPSTDFKMNGTVTVLWDGGRVTKLIFNVEVWTQGRQSENRTIIAAIKENCVQPKWLKELSP

SEQ ID NO: 215 - protein, 38 aa, Thermococcus kodakaraensis KOD1
  misc_feature (414542)..(414542): n is a or c or g or t.
  misc_feature (786890)..(786890): n is a or c or g or t.
  misc_feature (786907)..(786907): n is a or c or g or t.
  misc_feature (786944)..(786946): n is a or c or g or t.
  misc_feature (839139)..(839139): n is a or c or g or t.
  misc_feature (1128488)..(1128488): n is a or c or g or t.
  misc_feature (1128499)..(1128499): n is a or c or g or t.
  misc_feature (1128505)..(1128506): n is a or c or g or t.
  misc_feature (1128517)..(1128518): n is a or c or g or t.
  misc_feature (1128539)..(1128540): n is a or c or g or t.
  misc_feature (1561400)..(1561400): n is a or c or g or t.
  misc_feature (1561477)..(1561477): n is a or c or g or t.
  misc_feature (1561545)..(1561545): n is a or c or g or t.
  misc_feature (1767941)..(1767941): n is a or c or g or t.
MPSIPRKTSITEIRANPYELPLNLDLRTIKNVRNFKNM

SEQ ID NO: 216 - protein, 457 aa, Thermococcus kodakaraensis KOD1
  misc_feature (414542)..(414542): n is a or c or g or t.
  misc_feature (786890)..(786890): n is a or c or g or t.
  misc_feature (786907)..(786907): n is a or c or g or t.
  misc_feature (786944)..(786946): n is a or c or g or t.
  misc_feature (839139)..(839139): n is a or c or g or t.
  misc_feature (1128488)..(1128488): n is a or c or g or t.
  misc_feature (1128499)..(1128499): n is a or c or g or t.
  misc_feature (1128505)..(1128506): n is a or c or g or t.
  misc_feature (1128517)..(1128518): n is a or c or g or t.
  misc_feature (1128539)..(1128540): n is a or c or g or t.
  misc_feature (1561400)..(1561400): n is a or c or g or t.
  misc_feature (1561477)..(1561477): n is a or c or g or t.
  misc_feature (1561545)..(1561545): n is a or c or g or t.
  misc_feature (1767941)..(1767941): n is a or c or g or t.
VMEVAEFKYSRIFLLGFGFFGISIIWALYNAYIPLFLQDTFHMNRTITGFIMTIDNLFAVLLLPFLGALSDMTRTRLGRRKPYILLGAPSAALMFALIPVAREHGNLALFMGTIIFMNFFMALFRSPVVAFMPDITPSEKRSQANGIINFMGGLGALLAYFGGKVLYDMSYAYPFYAGALIMLLANLLVVLFVPEPEEYRVPGKKINLRELLSETSRKSFGELKENLKDVFASHERSLLAILLAIFFWFIAFNSLETFFTSYVKYHLYGIPVGAAETEITRKIESTGAFMLGMFSLSFMIFAIPAGFLGARIGRRKTITLGLLTIIAIILAAFFIGETSKPQEVALTDPVIMKFMGLFFVGGIGWAMINVNSLPMVVDMTVDEKVGGYTGLYYFFSQAANLVAPPFAGALLDLIGYETLLPFAMAFFLLALIAMQFVRRGDVKGGAEDVYEYVPDMD

SEQ ID NO: 217 - protein, 451 aa, Thermococcus kodakaraensis KOD1
  misc_feature (414542)..(414542): n is a or c or g or t.
  misc_feature (786890)..(786890): n is a or c or g or t.
  misc_feature (786907)..(786907): n is a or c or g or t.
  misc_feature (786944)..(786946): n is a or c or g or t.
  misc_feature (839139)..(839139): n is a or c or g or t.
  misc_feature (1128488)..(1128488): n is a or c or g or t.
  misc_feature (1128499)..(1128499): n is a or c or g or t.
  misc_feature (1128505)..(1128506): n is a or c or g or t.
  misc_feature (1128517)..(1128518): n is a or c or g or t.
  misc_feature (1128539)..(1128540): n is a or c or g or t.
  misc_feature (1561400)..(1561400): n is a or c or g or t.
  misc_feature (1561477)..(1561477): n is a or c or g or t.
  misc_feature (1561545)..(1561545): n is a or c or g or t.
  misc_feature (1767941)..(1767941): n is a or c or g or t.
MGKLGGVNMESESNQGVVRKGFSWGLVLGLALLGFSRSVGWALNKGLSFPLLSSYTQSAFVKGTILALEGLIGILVPPLLGYYSDTLKSKHGRRRPFIMIGGLLAGIAAIMIYTAYAMSVPLIGFALTLAFFYLSMHLYTAQFRALMPDTVESGKRGTASGVITLLEWAGNLFLFGLAGYLIAKAVDMTGESEGIKALTQTPYLKIPFLVTAFFLIGAAVFVYLIVREPEAPDIEENESLGEYLWSIVRNRDFLKFYAAQTLWWMSFEFIAVFLYGILAFILYGSATEENIKAVTSLGLYLMALFNVAVLLGALPGGIIYDKLGRRLSIVLGGLIFAIPQIWGWFITTKAQITIALGIAGIGWGILMAASYPVIGDLLTKFEREAFTGRYYGFFEATRSLPVLLAGTIGGAIVDLAGENYRVLFPIGALLVLLALPMVWMMKNLDVEGGKE

SEQ ID NO: 218 - protein, 833 aa, Thermococcus kodakaraensis KOD1
  misc_feature (414542)..(414542): n is a or c or g or t.
  misc_feature (786890)..(786890): n is a or c or g or t.
  misc_feature (786907)..(786907): n is a or c or g or t.
  misc_feature (786944)..(786946): n is a or c or g or t.
  misc_feature (839139)..(839139): n is a or c or g or t.
  misc_feature (1128488)..(1128488): n is a or c or g or t.
  misc_feature (1128499)..(1128499): n is a or c or g or t.
  misc_feature (1128505)..(1128506): n is a or c or g or t.
  misc_feature (1128517)..(1128518): n is a or c or g or t.
  misc_feature (1128539)..(1128540): n is a or c or g or t.
  misc_feature (1561400)..(1561400): n is a or c or g or t.
  misc_feature (1561477)..(1561477): n is a or c or g or t.
  misc_feature (1561545)..(1561545): n is a or c or g or t.
  misc_feature (1767941)..(1767941): n is a or c or g or t.
VMAMVNVSNAVEDEIRKKLPYPLGDLADLAYNYWWSWNRRATKLWEYIDPEHWREYKNPVKLLLDTPEERFKELVRDDDFMNLYELVMDQFHAYMNPRSTWFSTNYPKWDKPIVYLCMEYGISKSLPIYSGGLGILAGDHVKTASDLGLPFIAIGLLYKHGYFRQEIDKDGRQVEIFPEYKPEEMPIKPVLDREGKPLRIEVPIGEGIVYARAFEVNVGRVKLYLLDTDVPENSPDDRTICDYLYNAEMDKRIKQEILLGIGGMRLLKALEIEPGVIHLNEGHPAFANLQRIAWYMEEGLTFTEALSIVRGTTVFTTHTPVPAGHDRFPIEEVKKRLAKFLEGREELLELGREGDQLNMTLLAIRTSSYVNGVSQLHAEVSKRMWKDLWPGVPLNEIPIEGITNGVHTMTWVHNEMRKLFDRYIGKVWREHTNLEGIWYAVERIPDEELWEAHLQAKREFIDLLRRKAIERNKRLGVDDPIPNIDENALIIGFARRFATYKRATLLLTDLERLKKIVNNPERPVYIVFGGKAHPRDDGGKEFLRRVYEVSKMPEFRGKIFVMENYDMGSARLMVAGVDVWLNNPRRPMEASGTSGMKAGLNGVLNVSIYDGWWVEGYNGKNGWVIGEETTEPETEADDPKDAESLYTLLEEEVIPTYYENRAKWIYMMKESIKSIAPRFSTHRMVKEYMDRFYSKAMSNYIWLTRENYSGAKEIAAWKDRVRASWDKVEIRDAKAEGNRLEVRVYLDGLKPEDVEVELYYGVRAQGYEIEKPHIVELRHPEQVGEGEWLYTYEGNALRHLGDPCWHYAVRVHPHHEKLPHRFLLGLVKWKGLD

SEQ ID NO: 219 - protein, 388 aa, Thermococcus kodakaraensis KOD1
  misc_feature (414542)..(414542): n is a or c or g or t.
  misc_feature (786890)..(786890): n is a or c or g or t.
  misc_feature (786907)..(786907): n is a or c or g or t.
  misc_feature (786944)..(786946): n is a or c or g or t.
  misc_feature (839139)..(839139): n is a or c or g or t.
  misc_feature (1128488)..(1128488): n is a or c or g or t.
  misc_feature (1128499)..(1128499): n is a or c or g or t.
  misc_feature (1128505)..(1128506): n is a or c or g or t.
  misc_feature (1128517)..(1128518): n is a or c or g or t.
  misc_feature (1128539)..(1128540): n is a or c or g or t.
  misc_feature (1561400)..(1561400): n is a or c or g or t.
  misc_feature (1561477)..(1561477): n is a or c or g or t.
  misc_feature (1561545)..(1561545): n is a or c or g or t.
  misc_feature (1767941)..(1767941): n is a or c or g or t.
MRREVILLTGPPLNGRDEYIGEALERANGESYAYYHVFDYIREVGKERGVRITRKNVLDFAISHPDMMNEIRDEAFERIRKEIDESDKRVHLVSTPSLFRWGSGSVIGFTLSNLKLLGPDRVIIILDDVLSVRRRIINDPEWFERFGENPENIKLTTLVMWREDAINHVKTLVHELKKEGINVRYVLQFGIRHPHEVFLDLIFRENEKPLVYLSYPMTGHEEEYYHRVRGFYEKLSEHFTVLDPGALDDWWVVAEYDNQVNQNPNIKRIKIKHLLDGDVVEELEREDIEQATDILRRQLVERDFNLVDVSKAIAVYHYAEGVSAGVISEMAEAYRTLAAIYLYYPFKRRPSPFMEFYGMQNPSRRTMFKDEDEMIRAMVEEKEYWTKA

SEQ ID NO: 220 - protein, 35 aa, Thermococcus kodakaraensis KOD1
  misc_feature (414542)..(414542): n is a or c or g or t.
  misc_feature (786890)..(786890): n is a or c or g or t.
  misc_feature (786907)..(786907): n is a or c or g or t.
  misc_feature (786944)..(786946): n is a or c or g or t.
  misc_feature (839139)..(839139): n is a or c or g or t.
  misc_feature (1128488)..(1128488): n is a or c or g or t.
  misc_feature (1128499)..(1128499): n is a or c or g or t.
  misc_feature (1128505)..(1128506): n is a or c or g or t.
  misc_feature (1128517)..(1128518): n is a or c or g or t.
  misc_feature (1128539)..(1128540): n is a or c or g or t.
  misc_feature (1561400)..(1561400): n is a or c or g or t.
  misc_feature (1561477)..(1561477): n is a or c or g or t.
  misc_feature (1561545)..(1561545): n is a or c or g or t.
  misc_feature (1767941)..(1767941): n is a or c or g or t.
MESWVIYMLIAWAVILGMVYWSVSKLLSAEKEAKG

SEQ ID NO: 221 - protein, 265 aa, Thermococcus kodakaraensis KOD1
  misc_feature (414542)..(414542): n is a or c or g or t.
  misc_feature (786890)..(786890): n is a or c or g or t.
  misc_feature (786907)..(786907): n is a or c or g or t.
  misc_feature (786944)..(786946): n is a or c or g or t.
  misc_feature (839139)..(839139): n is a or c or g or t.
  misc_feature (1128488)..(1128488): n is a or c or g or t.
  misc_feature (1128499)..(1128499): n is a or c or g or t.
  misc_feature (1128505)..(1128506): n is a or c or g or t.
  misc_feature (1128517)..(1128518): n is a or c or g or t.
  misc_feature (1128539)..(1128540): n is a or c or g or t.
  misc_feature (1561400)..(1561400): n is a or c or g or t.
  misc_feature (1561477)..(1561477): n is a or c or g or t.
  misc_feature (1561545)..(1561545): n is a or c or g or t.
  misc_feature (1767941)..(1767941): n is a or c or g or t.
VVEMSRLSKIAGIILAVLVVLSAVWYLKYYRIEPVPKPPLWGLSDPPVLENLTWVAEGNVEIANTTMSLASRVYGDSLKQLKLLGYSINSGNWSSTTCQWSLWTRGERAYYLAYNGTRFLSIRGGPNDVINATERQWLCGRPLDSSPINAPTPETILLRQAMYVANRLMENNISVGAGTWAGPMPDWYLSKINFRVNVGDGVDVLMLLYSSEDQVKYAEYIMKKEDRGLHFLSGDAEDYRVLIALKGRKADVKAVETALQGPPVR

SEQ ID NO: 222 - protein, 400 aa, Thermococcus kodakaraensis KOD1
  misc_feature (414542)..(414542): n is a or c or g or t.
  misc_feature (786890)..(786890): n is a or c or g or t.
  misc_feature (786907)..(786907): n is a or c or g or t.
  misc_feature (786944)..(786946): n is a or c or g or t.
  misc_feature (839139)..(839139): n is a or c or g or t.
  misc_feature (1128488)..(1128488): n is a or c or g or t.
  misc_feature (1128499)..(1128499): n is a or c or g or t.
  misc_feature (1128505)..(1128506): n is a or c or g or t.
  misc_feature (1128517)..(1128518): n is a or c or g or t.
  misc_feature (1128539)..(1128540): n is a or c or g or t.
  misc_feature (1561400)..(1561400): n is a or c or g or t.
  misc_feature (1561477)..(1561477): n is a or c or g or t.
  misc_feature (1561545)..(1561545): n is a or c or g or t.
  misc_feature (1767941)..(1767941): n is a or c or g or t.
VTAMRWLKVWLIIGLLLGSIVPAGMALADEAGTAPLPPEIQDNSTTETQVVAEHIVSALERLHNVTSTIIEKANVSENSTVFEHYQKAEEYREAAIQDYQNGNYEGAIANGILAMRHYKVILEKVKNVRNDVGERLQEELRRMQGYFMAAEKTIRKAQEEGIDVGDAPQLLNQTKEAYRQVMEDIKNKDIEKAKEDLAVARELKKGLDEKLVEIRKELAYANADKIVNAFLRRGENAMKFAQRVIEKANASGRNVTELQEMLEEFQAVYEQVKELADQGNYTEALDVITANKETIGKFHKAIELTKRKIHEVEVKEKIKNMAKLIGELNERIGKDARALAEPHRKGVDTRTAQLKLKTAAQEVRLSAELLKRGKKAEAKAHLLIALDLLEDVESFIVKHA

SEQ ID NO: 223 - protein, 1282 aa, Thermococcus kodakaraensis KOD1
  misc_feature (414542)..(414542): n is a or c or g or t.
  misc_feature (786890)..(786890): n is a or c or g or t.
  misc_feature (786907)..(786907): n is a or c or g or t.
  misc_feature (786944)..(786946): n is a or c or g or t.
  misc_feature (839139)..(839139): n is a or c or g or t.
  misc_feature (1128488)..(1128488): n is a or c or g or t.
  misc_feature (1128499)..(1128499): n is a or c or g or t.
  misc_feature (1128505)..(1128506): n is a or c or g or t.
  misc_feature (1128517)..(1128518): n is a or c or g or t.
  misc_feature (1128539)..(1128540): n is a or c or g or t.
  misc_feature (1561400)..(1561400): n is a or c or g or t.
  misc_feature (1561477)..(1561477): n is a or c or g or t.
  misc_feature (1561545)..(1561545): n is a or c or g or t.
  misc_feature (1767941)..(1767941): n is a or c or g or t.
VDEIKLLTSDLEKLVEMSSIPLDSLNEVKRELKTRDMVEYLDAIVERAKPEESLRQNFFYKGAPIMKLLGVRGSPEVRIGSGYVDLVLRDSLGRKIIVEFKRLFELRRNKLLRTDLNWKEHEEQIKKYVFSEESRFVVLTNLYEWYFFSSKTIIRKSEPFYYATFIDLVHDIEQYGSLYDLLERKEHGIQKGELDNRFFKSLREWIKTLEDVEFKTDERIKMHLILHLINKFIFIQTLDDYGVVEFNWLYKKWMGFSDRIRLAERHKEKPEVAGRHYKSFIEKFLGEINDFFYPLYDTELFSDRLIEFIKDEPENWARFYKALETVLGFAPWQETGLKMGITQYDYSQIDEDILGRAYETYLAEKRKEKGIYYTPKYVTQFIVEETLGKRLNELKEGITTAIRENDFETAERLSKELFEIKVADLASGSGSFLIKVLRGLWDTYSAVIDELKKKEEELIGKKTSDLSALVQRKDIIEGIAKMRELFPSDERILMSQMVLRHVFAVDLDENAVEVAKMNLWRELIKLNPKAFRWDNLGENEHVLPNLSLNLVSGDSLLGFADPKILEGREEVRKLMELWEKFIENPEDLEVLNEIKEIKETLRGELDERYRELLREKLGEKAEALNNRFIHHPLEFFMAFFNPDGSLRGGFDFIVGNPPYVRIQNLKKESPEYVEFLNRFYESAHKNYDLAIPFIERGYNLLREGGELGFIVTKKWMKIDYGEKLRGLLSRERAVRLIIDFGDEQVFKGATTYTMILVLRKERNDKLTYAKVEELKETVDQLRAVNEPDKWNSERLSVIKVPTKELSEKPWVFLTEEEKKIVEKIYNGSKRLGEVTDIFVGLQTSADPVYILEYVGESGNYYIVHSKITNQEHRLEKDLLHPLLKGEEIRRWMIPEYRYLILFPYKVHLVNGERKAELIPIEELASKYPRIWEYLNISEVRKKLEGRERGSLKGSPKWYSYVYEKNHEKFELPKLITGVLSSEPRFALDKNGDYYFVGGGTAGGYGVLIKDDYKDRISLQFIGALLNSSLLDWRVKQIGSEFEGGFYSYGRASIKDLPIKLPSTDEEKTLKEEIEDTVEEIIALLKKHYVVKSLWREWSKKLANKGTTLGKLIEGWKKGVGKLPPEKLFFTDVRLISNEEMEYEGFELELKDGTLRLFGREWDMLTPILELEGDEEILEHVYLSMLELLESRQRVKNLKDILNKTRVLTIGNDPEETRRIVKTVKQRAGVKHLTSFLELVRENEAYLDALVFKLYGLSTEEARIVLRNLNKTQDYIDSVVRHL

SEQ ID NO: 224 - protein, 967 aa, Thermococcus kodakaraensis KOD1
  misc_feature (414542)..(414542): n is a or c or g or t.
  misc_feature (786890)..(786890): n is a or c or g or t.
  misc_feature (786907)..(786907): n is a or c or g or t.
  misc_feature (786944)..(786946): n is a or c or g or t.
  misc_feature (839139)..(839139): n is a or c or g or t.
  misc_feature (1128488)..(1128488): n is a or c or g or t.
  misc_feature (1128499)..(1128499): n is a or c or g or t.
  misc_feature (1128505)..(1128506): n is a or c or g or t.
  misc_feature (1128517)..(1128518): n is a or c or g or t.
  misc_feature (1128539)..(1128540): n is a or c or g or t.
  misc_feature (1561400)..(1561400): n is a or c or g or t.
  misc_feature (1561477)..(1561477): n is a or c or g or t.
  misc_feature (1561545)..(1561545): n is a or c or g or t.
  misc_feature (1767941)..(1767941): n is a or c or g or t.
MAELNFKAIEEKWQKRWMEARVFEPDRKAKPKEKKFYITVAFPYLSGHLHVGHARTYTIPDVIARFKRMQGYNVLFPMGWHITGAPIVGIAERIKNRDPKTIHIYRDVYKVPEEILWKFEDPKEIVKYFMKAAKETFIRAGFSVDWTREFHTTSLFPPFSKFIEWQFWTLKDMGLVVKGAHRVRWDPVVGTPLGDHDIMEGEDVQILEYVIIKFILEENGETIYLPAATLRPETVYGVTNMWLNPEATYVKAKVRKGDREELWIVSKEAAYKLSFQDREIEVIEEFKGEKLIGKYVKNPVTGDEVIILPAEFVDPDNATGVVMSVPAHAPFDHIALEDLKKETEILLKYDIDPRVVEEISYISLISLEGYGEFPAVEEAERLGVKSQKDKEKLEQATKNIYKAEYHKGIFKIEPYAGKPVQEVKELVAKEMMEKGIAEIMYEFADKPVISRFGNQAVIKIIHDQWFIDYGNPEWKAKAREALANMTIYPESRRAQFEAVIDWLDKKACARKVGLGTPLPWDPDWVIESLSDSTIYMAYYTISRHINQLRKEGKLDAEKLDREFFDYIFREPFSEEKERKLSEKTGIPAETIHEMKEEFEYWYPLDWRCSAKDLIPNHLTFFIFNHVAIFDKKHWPKGIAVNGFGTLEGQKMSKSKGNVLNFIDAIEENGADVVRLYIMGLAEHDSDFDWRRKEVGKLRKQVERFYELVSEFATYEAKEGVELKDIDRWMLHRLNKAIEGATKALEEFRTRTAVQWAFYTVLNDLRWYLRRTEGRDDDAKRYVLRTLADVWVRLMAPFTPHISEELWEKLGGEGFVSLAPWPEPVPEWWNETVEAEEDFVKSLIEDIKEIITVAKIENPKRAYIYTAPEWKWRVVEVVAEKRDFKAAMAELMKDPEMRKHGKEVSKLIQRLIKERAFEVKRIDEEKALREAKDFIEKELGIEIIINPEEDRGGKKKQAMPLKPAVFVE

SEQ ID NO: 225 - protein, 451 aa, Thermococcus kodakaraensis KOD1
  misc_feature (414542)..(414542): n is a or c or g or t.
  misc_feature (786890)..(786890): n is a or c or g or t.
  misc_feature (786907)..(786907): n is a or c or g or t.
  misc_feature (786944)..(786946): n is a or c or g or t.
  misc_feature (839139)..(839139): n is a or c or g or t.
  misc_feature (1128488)..(1128488): n is a or c or g or t.
  misc_feature (1128499)..(1128499): n is a or c or g or t.
  misc_feature (1128505)..(1128506): n is a or c or g or t.
  misc_feature (1128517)..(1128518): n is a or c or g or t.
  misc_feature (1128539)..(1128540): n is a or c or g or t.
  misc_feature (1561400)..(1561400): n is a or c or g or t.
  misc_feature (1561477)..(1561477): n is a or c or g or t.
  misc_feature (1561545)..(1561545): n is a or c or g or t.
  misc_feature (1767941)..(1767941): n is a or c or g or t.
VRKMALEKLGQALNSALKKLARSSTVDEATIKEIVRDIQRALLQADVNVKLVLQLTKQIQKRALEEEPPAGVSKKEHIIKIVYEELTKFLGTEAKPLEIKHKPTVILTVGIQGSGKTTSVAKLARYLQKRGYKVGVVCSDTWRPGAYYQLRQLLDPFGIEVFGDPEEKDAVKLAREGVEHFREKGVDVIIVDSAGRHKEEKGLIEEMRQISEAIKPHEVILVIDGTIGQQAYNQAMAFKEATPIGSIIVTKLDGSAKGGGALSAVAATGAPIKFIGTGERIDDLEPFDPKRFVSRLLGLGDIQGLLEKIEELQKEQEFREEDMEKFLRGKFNLKDMYAQLEAMQKMGPLKQILQMIPGLGYSLPEDAVRVGEEKLKRYKVIMDSMTEEELENPEIINYSRIKRIARGSGATTAEVRELLNQYNQMKKMFKSLNKRKLAKMAKKFNFGGLGI

SEQ ID NO: 226 - protein, 237 aa, Thermococcus kodakaraensis KOD1
  misc_feature (414542)..(414542): n is a or c or g or t.
  misc_feature (786890)..(786890): n is a or c or g or t.
  misc_feature (786907)..(786907): n is a or c or g or t.
  misc_feature (786944)..(786946): n is a or c or g or t.
  misc_feature (839139)..(839139): n is a or c or g or t.
  misc_feature (1128488)..(1128488): n is a or c or g or t.
  misc_feature (1128499)..(1128499): n is a or c or g or t.
  misc_feature (1128505)..(1128506): n is a or c or g or t.
  misc_feature (1128517)..(1128518): n is a or c or g or t.
  misc_feature (1128539)..(1128540): n is a or c or g or t.
  misc_feature (1561400)..(1561400): n is a or c or g or t.
  misc_feature (1561477)..(1561477): n is a or c or g or t.
  misc_feature (1561545)..(1561545): n is a or c or g or t.
  misc_feature (1767941)..(1767941): n is a or c or g or t.
VSQLKAVQEKLRLIRILRLLKKSYTYEELSRITGLPITVLNRYVRGKVLPSSERTKELMELLAPYINIEEEVRKRIKFDERGFFDNMPALSDTALMSLIAEEVASKYMDKDIDKVLTAETDGIVLGAHIARELGADLIYAKKKKEVGVEKFYEVNYVPSASGSVMTLYLPQWALKKGETVLIVDDVIRSGETQRALVELAHQAGAKPVGMFFLISVGDEVEKLKGEYPFPVESLIKL

SEQ ID NO: 227 - protein, 109 aa, Thermococcus kodakaraensis KOD1
  misc_feature (414542)..(414542): n is a or c or g or t.
  misc_feature (786890)..(786890): n is a or c or g or t.
  misc_feature (786907)..(786907): n is a or c or g or t.
  misc_feature (786944)..(786946): n is a or c or g or t.
  misc_feature (839139)..(839139): n is a or c or g or t.
  misc_feature (1128488)..(1128488): n is a or c or g or t.
  misc_feature (1128499)..(1128499): n is a or c or g or t.
  misc_feature (1128505)..(1128506): n is a or c or g or t.
  misc_feature (1128517)..(1128518): n is a or c or g or t.
  misc_feature (1128539)..(1128540): n is a or c or g or t.
  misc_feature (1561400)..(1561400): n is a or c or g or t.
  misc_feature (1561477)..(1561477): n is a or c or g or t.
  misc_feature (1561545)..(1561545): n is a or c or g or t.
  misc_feature (1767941)..(1767941): n is a or c or g or t.
MKGFIYNAAGLSIPVEFTPGVPFRFECPEEDCGKVVVIEGVIEEVDEVEFTKVLEKTIKENPSFSKIREITSRRFVFKGKVNEREVTLPVESFQDFTERFLREVLILKG

SEQ ID NO: 228 - protein, 188 aa, Thermococcus kodakaraensis KOD1
  misc_feature (414542)..(414542): n is a or c or g or t.
  misc_feature (786890)..(786890): n is a or c or g or t.
  misc_feature (786907)..(786907): n is a or c or g or t.
  misc_feature (786944)..(786946): n is a or c or g or t.
  misc_feature (839139)..(839139): n is a or c or g or t.
  misc_feature (1128488)..(1128488): n is a or c or g or t.
  misc_feature (1128499)..(1128499): n is a or c or g or t.
  misc_feature (1128505)..(1128506): n is a or c or g or t.
  misc_feature (1128517)..(1128518): n is a or c or g or t.
  misc_feature (1128539)..(1128540): n is a or c or g or t.
  misc_feature (1561400)..(1561400): n is a or c or g or t.
  misc_feature (1561477)..(1561477): n is a or c or g or t.
  misc_feature (1561545)..(1561545): n is a or c or g or t.
  misc_feature (1767941)..(1767941): n is a or c or g or t.
VSTMEDVSGVSNTKATKAKKVHIIHSKRRLLMLQRKEELSHNIRYISKVPVSLVMDTEFLTLHPSDSLSKLVQELRGEESSAVVIDGEGKLLGFVTMKDLLNFFAPPKRYSIVGLDLLKRYSINRASRVEDIMVKKPITIHVDENLGRAIQIMLETGKHHLPVVDDENRVHGVLEVKDIIRLIRIVSY

SEQ ID NO: 229 - protein, 383 aa, Thermococcus kodakaraensis KOD1
  misc_feature (414542)..(414542): n is a or c or g or t.
  misc_feature (786890)..(786890): n is a or c or g or t.
  misc_feature (786907)..(786907): n is a or c or g or t.
  misc_feature (786944)..(786946): n is a or c or g or t.
  misc_feature (839139)..(839139): n is a or c or g or t.
  misc_feature (1128488)..(1128488): n is a or c or g or t.
  misc_feature (1128499)..(1128499): n is a or c or g or t.
  misc_feature (1128505)..(1128506): n is a or c or g or t.
  misc_feature (1128517)..(1128518): n is a or c or g or t.
  misc_feature (1128539)..(1128540): n is a or c or g or t.
  misc_feature (1561400)..(1561400): n is a or c or g or t.
  misc_feature (1561477)..(1561477): n is a or c or g or t.
  misc_feature (1561545)..(1561545): n is a or c or g or t.
  misc_feature (1767941)..(1767941): n is a or c or g or t.
MTIMDVFLELALILVVAKLFGYLTVRLGFPAALGQLIGGILIGPSILGIVSYDEAVRLIGELGVVMLLFLAGLETDIEEFKHVGIPAFIVAAMGVLVPFLLGYFGALAWGYSHVQALFLGGILTATSVGLTTSILMEMKKLRTRVGTTILAAAVVDDVLGIIALTILVGINTRGSVYAKDLLIIIGEVALFFLIGLLVGTPAVKEALKASEKITLPETVTAMAIAIMLIFAYLAEQFQIAGITGAYLAGILVATTEEARKVADKTVTIGYSLFIPVFLVSIGIESDVRILTTAGTFALVYALLAVVSKVVGCGLGALFAKFKPIEAIQVGVGMVPRMEVALIMANVALREGVFDRGVFAIPVTMVVITTIVTPFLLKWAFSRE

SEQ ID NO: 230 - protein, 92 aa, Thermococcus kodakaraensis KOD1
  misc_feature (414542)..(414542): n is a or c or g or t.
  misc_feature (786890)..(786890): n is a or c or g or t.
  misc_feature (786907)..(786907): n is a or c or g or t.
  misc_feature (786944)..(786946): n is a or c or g or t.
  misc_feature (839139)..(839139): n is a or c or g or t.
  misc_feature (1128488)..(1128488): n is a or c or g or t.
  misc_feature (1128499)..(1128499): n is a or c or g or t.
  misc_feature (1128505)..(1128506): n is a or c or g or t.
  misc_feature (1128517)..(1128518): n is a or c or g or t.
  misc_feature (1128539)..(1128540): n is a or c or g or t.
  misc_feature (1561400)..(1561400): n is a or c or g or t.
  misc_feature (1561477)..(1561477): n is a or c or g or t.
  misc_feature (1561545)..(1561545): n is a or c or g or t.
  misc_feature (1767941)..(1767941): n is a or c or g or t.
MIKRKLCREYVEEIERLERSIVELEEQINELKMQLRLKVEEANSLAIENTSLRHKLDMMKKREKYLIELLKKFGVPFVIVDEDEFEDVDISE

SEQ ID NO: 231 - protein, 920 aa, Thermococcus kodakaraensis KOD1
  misc_feature (414542)..(414542): n is a or c or g or t.
  misc_feature (786890)..(786890): n is a or c or g or t.
  misc_feature (786907)..(786907): n is a or c or g or t.
  misc_feature (786944)..(786946): n is a or c or g or t.
  misc_feature (839139)..(839139): n is a or c or g or t.
  misc_feature (1128488)..(1128488): n is a or c or g or t.
  misc_feature (1128499)..(1128499): n is a or c or g or t.
  misc_feature (1128505)..(1128506): n is a or c or g or t.
  misc_feature (1128517)..(1128518): n is a or c or g or t.
  misc_feature (1128539)..(1128540): n is a or c or g or t.
  misc_feature (1561400)..(1561400): n is a or c or g or t.
  misc_feature (1561477)..(1561477): n is a or c or g or t.
  misc_feature (1561545)..(1561545): n is a or c or g or t.
  misc_feature (1767941)..(1767941): n is a or c or g or t.
VMLMSMDMTTRMFKEEGWIRKKCPKCGKYFWTLDPDRETCGDPPCDEYQFIGKPGIPKKYTLDEMREKFLSFFEKHESYPHGRVKRYPVLPRWRDDVLLVGASIMDFQPWVISGEADPPANPLTISQPSIRFTDIDNVGITGRHFTIFEMMAHHAFNYPGKPIYWMDETVELAFEFFTKELKMKPEDITFKENPWAGGGNAGPAFEVLYRGLEVATLVFMQYKKAPADADPSQVVEIKGDYYVPMETRVVDTGYGLERLVWMSHGTPTAYDAVLGYVIEPLKKMAGVEKIDERILMENSRLAGMFDIEDMGDLRYLREQVAKRVGISVEELEKAVRPYELIYAIADHTKALTFMLADGVIPSNVKAGYLARLLIRKSIRHLRELGLEIPLAEIVAMHIKELSPTFPEFKEMEDVILDIINVEEKRYAETLRRGSDLVKREIAKLKKKGINELPLEKLILFYESHGLTPEIVAEVAEKEGIKVNIPDNFYTLVAKEAEKQAEKKEAAEYVVDFELVKDLPDTRTLYYEDPFMKEFDARVLKVIADWVVLDQTAFYPEGGGQPYDTGVLEVNGEKVKVTNVQKVGKVILHKVEKPELFKEGVTVHGRLDWDRRIQHMRHHTGTHVLMGALVRVLGKHVWQAGSQLHTDWARLDISHYKRITEEELREIERLANRVVMENRKVTWEWLPRTEAEMKYGFRLYQGGVVPGRVIRVLKIEDWDVQACGGTHLPNTGLIGPIKILRTERIQDGVERIIFAAGEAAINWMQETERLLKRTAEIFRVPPEKVPETAERFFNEWKEARKEVEKLRKELAKLLVYELQEKVEKVGNVEFIGAVVEGTIDDLREAANRLRKENRVVVLISREGHFVVAVGDGLDLKAGELAKVITSVAGGGGGGRKELAQGRIKNPLKAEEAIEEVKKMLG

SEQ ID NO: 232 - protein, 601 aa, Thermococcus kodakaraensis KOD1
  misc_feature (414542)..(414542): n is a or c or g or t.
  misc_feature (786890)..(786890): n is a or c or g or t.
  misc_feature (786907)..(786907): n is a or c or g or t.
  misc_feature (786944)..(786946): n is a or c or g or t.
  misc_feature (839139)..(839139): n is a or c or g or t.
  misc_feature (1128488)..(1128488): n is a or c or g or t.
  misc_feature (1128499)..(1128499): n is a or c or g or t.
  misc_feature (1128505)..(1128506): n is a or c or g or t.
  misc_feature (1128517)..(1128518): n is a or c or g or t.
  misc_feature (1128539)..(1128540): n is a or c or g or t.
  misc_feature (1561400)..(1561400): n is a or c or g or t.
  misc_feature (1561477)..(1561477): n is a or c or g or t.
  misc_feature (1561545)..(1561545): n is a or c or g or t.
  misc_feature (1767941)..(1767941): n is a or c or g or t.
VPRGVGMGEMRDGEKFRRAVEEIARAVLAGEIKDRDELNRYKIIVSRKYHLSKIPGNSDILKAIPEEERDRFRELLKRKPTRTISGVAVVAMMTKPFPCPHGRCIYCPGGPSVGSPQSYTGKEPSALRAVQSAYHPYIIMMRRLKQLTDIGHDVDKVEVIIQGGTFPAVDLDYQEWYVKCAFKAMNDFPYFKDIENLEEKLVRLIVKGDKSVFEEDPEFKRAWELTHRKPYYYLEDEQRKNEKAKVRMVGLTIETRPDWAFERQIDRMLKLGTTRVELGVQTVFNFIHERTKRGHGVEEIIKATQLLRDAGLKINYHIMPGLPGSNFERDLYTFRKIFEDPRFRPDMLKIYPTLVTADAPLYAWYKAGKYRPYTTEEAVELLVEAYKLFPKWVRVMRIQRDIPAKLIVAGVKHSNLGQLVFNELIKRGIRPREIRFREVGHMMQKFGVQPEVEHIKLLREDYDAAGGREIFLSFEDVKNDILIGFIRLRIPSEKAHRKEINCCPSAIVRELHVYGPLVPIGGKPKYEWQHRGYGRELLAEAERIAREEFEVKKMLVISGVGVREYYRKFGYRKNGPYVAKRLDKDYAEYKKSKEFDAHLNT

SEQ ID NO: 233 - protein, 34 aa, Thermococcus kodakaraensis KOD1
  misc_feature (414542)..(414542): n is a or c or g or t.
  misc_feature (786890)..(786890): n is a or c or g or t.
  misc_feature (786907)..(786907): n is a or c or g or t.
  misc_feature (786944)..(786946): n is a or c or g or t.
  misc_feature (839139)..(839139): n is a or c or g or t.
  misc_feature (1128488)..(1128488): n is a or c or g or t.
  misc_feature (1128499)..(1128499): n is a or c or g or t.
  misc_feature (1128505)..(1128506): n is a or c or g or t.
  misc_feature (1128517)..(1128518): n is a or c or g or t.
  misc_feature (1128539)..(1128540): n is a or c or g or t.
  misc_feature (1561400)..(1561400): n is a or c or g or t.
  misc_feature (1561477)..(1561477): n is a or c or g or t.
  misc_feature (1561545)..(1561545): n is a or c or g or t.
  misc_feature (1767941)..(1767941): n is a or c or g or t.
VVRIKKATKAYMRALPLELEWAENATPIVKKTMK

SEQ ID NO: 234 - protein, 169 aa, Thermococcus kodakaraensis KOD1
  misc_feature (414542)..(414542): n is a or c or g or t.
  misc_feature (786890)..(786890): n is a or c or g or t.
  misc_feature (786907)..(786907): n is a or c or g or t.
  misc_feature (786944)..(786946): n is a or c or g or t.
  misc_feature (839139)..(839139): n is a or c or g or t.
  misc_feature (1128488)..(1128488): n is a or c or g or t.
  misc_feature (1128499)..(1128499): n is a or c or g or t.
  misc_feature (1128505)..(1128506): n is a or c or g or t.
  misc_feature (1128517)..(1128518): n is a or c or g or t.
  misc_feature (1128539)..(1128540): n is a or c or g or t.
  misc_feature (1561400)..(1561400): n is a or c or g or t.
  misc_feature (1561477)..(1561477): n is a or c or g or t.
  misc_feature (1561545)..(1561545): n is a or c or g or t.
  misc_feature (1767941)..(1767941): n is a or c or g or t.
MRFKPKPFTEPVGFRCLYCLDCCRGRHVYLTLKDIERIARTGKDPQDFVTFSIEGEKIRFVLSVREWDLGCVFHDPETGKCTIHKARPLICRIYPFMVSKKPLGVEGEKSFEYRGERLWLYYDESCPGVNAEEPETTITPEEIAELGLEFEKELEETDMDGLAELLERL

SEQ ID NO: 235 - protein, 301 aa, Thermococcus kodakaraensis KOD1
  misc_feature (414542)..(414542): n is a or c or g or t.
  misc_feature (786890)..(786890): n is a or c or g or t.
  misc_feature (786907)..(786907): n is a or c or g or t.
  misc_feature (786944)..(786946): n is a or c or g or t.
  misc_feature (839139)..(839139): n is a or c or g or t.
  misc_feature (1128488)..(1128488): n is a or c or g or t.
  misc_feature (1128499)..(1128499): n is a or c or g or t.
  misc_feature (1128505)..(1128506): n is a or c or g or t.
  misc_feature (1128517)..(1128518): n is a or c or g or t.
  misc_feature (1128539)..(1128540): n is a or c or g or t.
  misc_feature (1561400)..(1561400): n is a or c or g or t.
  misc_feature (1561477)..(1561477): n is a or c or g or t.
  misc_feature (1561545)..(1561545): n is a or c or g or t.
  misc_feature (1767941)..(1767941): n is a or c or g or t.
MAKGKTQKPGQTAEVRAKSREKLRFLAEMEPKKMITYPLVVFIVALLLLAVHFPPLGIDLKGGVVVTGEGISANPDQLEKELSGWLGIEAHVESFTSVSGSKGIRVYAPAGTDPQKIIDILKEKYPNADFTHSDVQPTFGEMAKKQGTRAIIFAFIAMAIVVFLFFRNPVSSLAIIFSALSDMIIAVAVMGIFGIQLTTATIAALLMLIGYTVDSNILLTTKLTKRKEYTIEEAYLSAVSTGFTMSTTTLGALLMLWIISTSPVLDNIAAVLIFGLLADFMNTWIFNAGVLRWYLSRGVEL

SEQ ID NO: 236 - protein, 103 aa, Thermococcus kodakaraensis KOD1
  misc_feature (414542)..(414542): n is a or c or g or t.
  misc_feature (786890)..(786890): n is a or c or g or t.
  misc_feature (786907)..(786907): n is a or c or g or t.
  misc_feature (786944)..(786946): n is a or c or g or t.
  misc_feature (839139)..(839139): n is a or c or g or t.
  misc_feature (1128488)..(1128488): n is a or c or g or t.
  misc_feature (1128499)..(1128499): n is a or c or g or t.
  misc_feature (1128505)..(1128506): n is a or c or g or t.
  misc_feature (1128517)..(1128518): n is a or c or g or t.
  misc_feature (1128539)..(1128540): n is a or c or g or t.
  misc_feature (1561400)..(1561400): n is a or c or g or t.
  misc_feature (1561477)..(1561477): n is a or c or g or t.
  misc_feature (1561545)..(1561545): n is a or c or g or t.
  misc_feature (1767941)..(1767941): n is a or c or g or t.
MEDVIKRIVEAEKEAETRIEKAEHEAKEIIRKAKEEAKKIEEETIKKAEEESQNLIEKARLEGETEAKKILEEGEKEISALRERAESNFETAIQEAIELVRGA

SEQ ID NO: 237 - protein, 161 aa, Thermococcus kodakaraensis KOD1
  misc_feature (414542)..(414542): n is a or c or g or t.
  misc_feature (786890)..(786890): n is a or c or g or t.
  misc_feature (786907)..(786907): n is a or c or g or t.
  misc_feature (786944)..(786946): n is a or c or g or t.
  misc_feature (839139)..(839139): n is a or c or g or t.
  misc_feature (1128488)..(1128488): n is a or c or g or t.
  misc_feature (1128499)..(1128499): n is a or c or g or t.
  misc_feature (1128505)..(1128506): n is a or c or g or t.
  misc_feature (1128517)..(1128518): n is a or c or g or t.
  misc_feature (1128539)..(1128540): n is a or c or g or t.
  misc_feature (1561400)..(1561400): n is a or c or g or t.
  misc_feature (1561477)..(1561477): n is a or c or g or t.
  misc_feature (1561545)..(1561545): n is a or c or g or t.
  misc_feature (1767941)..(1767941): n is a or c or g or t.
MDPIVYVVLGAALAAGIAGIASAFGIGIAGAAAAGAVAEDEKNFKNALILEGLPMTQSIYGLITLFLIMLSAGIIGGGFKFAEATTENLVKSAILFGAGLTVGLTGLSAIPQGIIASAGIGAAAKNPKTFTQGVIFAAMAETTAIFGLVGALIMIATGVGF

SEQ ID NO: 238 - protein, 203 aa, Thermococcus kodakaraensis KOD1
  misc_feature (414542)..(414542): n is a or c or g or t.
  misc_feature (786890)..(786890): n is a or c or g or t.
  misc_feature (786907)..(786907): n is a or c or g or t.
  misc_feature (786944)..(786946): n is a or c or g or t.
  misc_feature (839139)..(839139): n is a or c or g or t.
  misc_feature (1128488)..(1128488): n is a or c or g or t.
  misc_feature (1128499)..(1128499): n is a or c or g or t.
  misc_feature (1128505)..(1128506): n is a or c or g or t.
  misc_feature (1128517)..(1128518): n is a or c or g or t.
  misc_feature (1128539)..(1128540): n is a or c or g or t.
  misc_feature (1561400)..(1561400): n is a or c or g or t.
  misc_feature (1561477)..(1561477): n is a or c or g or t.
  misc_feature (1561545)..(1561545): n is a or c or g or t.
  misc_feature (1767941)..(1767941): n is a or c or g or t.
MEGAELIIQEINREAEQKIQYILSEAQKEAEKIKEEARKRAEDRAQWILRKAKTQAEMEKQRAIASARLEVRKKRLEVQEEMIRAVLSALRERLASLPADEYFQTLVTLTTEALEELNIDSAVVRSNEETLKLIVEKLPEFKKSVSEKLGKEVEITVGEPISTIGGVLVESSDGSVRVDNTFEARIERLEADLRARIAKALFG

SEQ ID NO: 239 - protein, 260 aa, Thermococcus kodakaraensis KOD1
  misc_feature (414542)..(414542): n is a or c or g or t.
  misc_feature (786890)..(786890): n is a or c or g or t.
  misc_feature (786907)..(786907): n is a or c or g or t.
  misc_feature (786944)..(786946): n is a or c or g or t.
  misc_feature (839139)..(839139): n is a or c or g or t.
  misc_feature (1128488)..(1128488): n is a or c or g or t.
  misc_feature (1128499)..(1128499): n is a or c or g or t.
  misc_feature (1128505)..(1128506): n is a or c or g or t.
  misc_feature (1128517)..(1128518): n is a or c or g or t.
  misc_feature (1128539)..(1128540): n is a or c or g or t.
  misc_feature (1561400)..(1561400): n is a or c or g or t.
  misc_feature (1561477)..(1561477): n is a or c or g or t.
  misc_feature (1561545)..(1561545): n is a or c or g or t.
  misc_feature (1767941)..(1767941): n is a or c or g or t.
MADSTSRWAEALREISGRLEEMPGEEGYPAYLASKIAEFYERAGRVITLGSDERVGSVSVIGAVSPPGGDFSEPVVQNTLRVVKVFWALDADLARRRHFPAINWLRSYSLYIDAIQDWWHKNVDPEWRKMRDTAMALLQKEAELQEIVRIVGPDALPDREKAILIVTRMLREDYLQQDAFDEVDTYCPPKKQVTMMRVILNFYEKTMQAVDRGVPVDEIAKLPVREKIGRMKFEPDVEKVRALIDETNQQFEELFKKYGA

SEQ ID NO: 240 - protein, 217 aa, Thermococcus kodakaraensis KOD1
  misc_feature (414542)..(414542): n is a or c or g or t.
  misc_feature (786890)..(786890): n is a or c or g or t.
  misc_feature (786907)..(786907): n is a or c or g or t.
  misc_feature (786944)..(786946): n is a or c or g or t.
  misc_feature (839139)..(839139): n is a or c or g or t.
  misc_feature (1128488)..(1128488): n is a or c or g or t.
  misc_feature (1128499)..(1128499): n is a or c or g or t.
  misc_feature (1128505)..(1128506): n is a or c or g or t.
  misc_feature (1128517)..(1128518): n is a or c or g or t.
  misc_feature (1128539)..(1128540): n is a or c or g or t.
  misc_feature (1561400)..(1561400): n is a or c or g or t.
  misc_feature (1561477)..(1561477): n is a or c or g or t.
  misc_feature (1561545)..(1561545): n is a or c or g or t.
  misc_feature (1767941)..(1767941): n is a or c or g or t.
VVEMAELLNVKPTRMELLNLKRRITLAKKGHKLLKDKQDALVMEFFTIYDEALRLREELNEKMMEAFKALQRAEIDVGTLRMKEISLSVKPNREVEVKTRNVMGVPVPLIEAESFKRSAGERGYAFVSSSARVDLAAEKFEEVLDLAVRLAEVEETLKRLAKEIEVTKRRVNALEYIIIPRMEATVKFIKQRLDEMERENFFRLKRVKALIEARSGS

SEQ ID NO: 241 - protein, 241 aa, Thermococcus kodakaraensis KOD1
  misc_feature (414542)..(414542): n is a or c or g or t.
  misc_feature (786890)..(786890): n is a or c or g or t.
  misc_feature (786907)..(786907): n is a or c or g or t.
  misc_feature (786944)..(786946): n is a or c or g or t.
  misc_feature (839139)..(839139): n is a or c or g or t.
  misc_feature (1128488)..(1128488): n is a or c or g or t.
  misc_feature (1128499)..(1128499): n is a or c or g or t.
  misc_feature (1128505)..(1128506): n is a or c or g or t.
  misc_feature (1128517)..(1128518): n is a or c or g or t.
  misc_feature (1128539)..(1128540): n is a or c or g or t.
  misc_feature (1561400)..(1561400): n is a or c or g or t.
  misc_feature (1561477)..(1561477): n is a or c or g or t.
  misc_feature (1561545)..(1561545): n is a or c or g or t.
  misc_feature (1767941)..(1767941): n is a or c or g or t.
VVITLDQAIPNVEFVDFSHLVETIQPGETVLIEHRTSYVPEFTLKLVADYTKENGVPLVIDDNFDTLYTLILHLRLMGVEVDLDHAYVIKTGGTHNIGGKVKRIEFHPDPRVFLRNYTNASSEILVEGKTPAINLVLGLENILMIMRDSRDFYRLLLSLQRYVGNKNRIALYLINRNIVESMMPGFFLPELERIATTVIETNSYPTGAILTFKKSINPAVIGTTVGIDVGGIVSGERNQNP

SEQ ID NO: 242 - protein, 180 aa, Thermococcus kodakaraensis KOD1
  misc_feature (414542)..(414542): n is a or c or g or t.
  misc_feature (786890)..(786890): n is a or c or g or t.
  misc_feature (786907)..(786907): n is a or c or g or t.
  misc_feature (786944)..(786946): n is a or c or g or t.
  misc_feature (839139)..(839139): n is a or c or g or t.
  misc_feature (1128488)..(1128488): n is a or c or g or t.
  misc_feature (1128499)..(1128499): n is a or c or g or t.
  misc_feature (1128505)..(1128506): n is a or c or g or t.
  misc_feature (1128517)..(1128518): n is a or c or g or t.
  misc_feature (1128539)..(1128540): n is a or c or g or t.
  misc_feature (1561400)..(1561400): n is a or c or g or t.
  misc_feature (1561477)..(1561477): n is a or c or g or t.
  misc_feature (1561545)..(1561545): n is a or c or g or t.
  misc_feature (1767941)..(1767941): n is a or c or g or t.
MLLEGKERKAGDVVRVSSKAITLPKVPFAALCYLTGLALFDSLELVDKKRLAEDYDGLEAFKKKLLASKLGESLKPYLTNPGLFISPFERLSFDWLEFQKRKEKVEPHLKRLRELIRESRSRKEYLERTSFVRELTVDEGLLLGYLAESEKERELINSALGKHNHDYREMAKMYFKALRG

SEQ ID NO: 243 - protein, 173 aa, Thermococcus kodakaraensis KOD1
  misc_feature (414542)..(414542): n is a or c or g or t.
  misc_feature (786890)..(786890): n is a or c or g or t.
  misc_feature (786907)..(786907): n is a or c or g or t.
  misc_feature (786944)..(786946): n is a or c or g or t.
  misc_feature (839139)..(839139): n is a or c or g or t.
  misc_feature (1128488)..(1128488): n is a or c or g or t.
  misc_feature (1128499)..(1128499): n is a or c or g or t.
  misc_feature (1128505)..(1128506): n is a or c or g or t.
  misc_feature (1128517)..(1128518): n is a or c or g or t.
  misc_feature (1128539)..(1128540): n is a or c or g or t.
  misc_feature (1561400)..(1561400): n is a or c or g or t.
  misc_feature (1561477)..(1561477): n is a or c or g or t.
  misc_feature (1561545)..(1561545): n is a or c or g or t.
  misc_feature (1767941)..(1767941): n is a or c or g or t.
VTILGKVQIMFTGKALIAVKVMKPFGDWKSGDIVLVEDWKARELWEAGVVEIVDETDKIIGEIDKVIAEERESEPLTLLPEGLYERAEFYAYYLENYVRLNPRESVDTINVKLTKLANLRKKLRDLKLIRFNKILKAVMLRPNSLELLSRLAPEERRIYLQMSKIRNEWLGDA

SEQ ID NO: 244 - protein, 174 aa, Thermococcus kodakaraensis KOD1
  misc_feature (414542)..(414542): n is a or c or g or t.
  misc_feature (786890)..(786890): n is a or c or g or t.
  misc_feature (786907)..(786907): n is a or c or g or t.
  misc_feature (786944)..(786946): n is a or c or g or t.
  misc_feature (839139)..(839139): n is a or c or g or t.
  misc_feature (1128488)..(1128488): n is a or c or g or t.
  misc_feature (1128499)..(1128499): n is a or c or g or t.
  misc_feature (1128505)..(1128506): n is a or c or g or t.
  misc_feature (1128517)..(1128518): n is a or c or g or t.
  misc_feature (1128539)..(1128540): n is a or c or g or t.
  misc_feature (1561400)..(1561400): n is a or c or g or t.
  misc_feature (1561477)..(1561477): n is a or c or g or t.
  misc_feature (1561545)..(1561545): n is a or c or g or t.
  misc_feature (1767941)..(1767941): n is a or c or g or t.
MEHVIALHQVYAELIFRGLKTVELRKSRAFGEGDIVFLYVARGNPYELRDTLRRLGLHEEQTLTQRGTIAGGFEVGEVIKADLETLWEMTKEASGLTLVHGENGRKWLGNYIREYGYAFTIERPFLFKEPMSREEMKERYGIHVEGIIHLSRKTRKPWVRALIEDLLARDVVYL

SEQ ID NO: 245 - protein, 640 aa, Thermococcus kodakaraensis KOD1
  misc_feature (414542)..(414542): n is a or c or g or t.
  misc_feature (786890)..(786890): n is a or c or g or t.
  misc_feature (786907)..(786907): n is a or c or g or t.
  misc_feature (786944)..(786946): n is a or c or g or t.
  misc_feature (839139)..(839139): n is a or c or g or t.
  misc_feature (1128488)..(1128488): n is a or c or g or t.
  misc_feature (1128499)..(1128499): n is a or c or g or t.
  misc_feature (1128505)..(1128506): n is a or c or g or t.
  misc_feature (1128517)..(1128518): n is a or c or g or t.
  misc_feature (1128539)..(1128540): n is a or c or g or t.
  misc_feature (1561400)..(1561400): n is a or c or g or t.
  misc_feature (1561477)..(1561477): n is a or c or g or t.
  misc_feature (1561545)..(1561545): n is a or c or g or t.
  misc_feature (1767941)..(1767941): n is a or c or g or t.
VVIVEALKNAPSNASLGVSAKKERKLLMGNEAIAYGALESGVVFATGYPGTPSTEVIETIARLKPEVFAEWAPNEKVALEEAAGVAYTGLRALVTMKCVGLNVAADPLMSLAYSGVEGGLVILVADDPGPHTSQTEQDDRYYGKISLLPVLEPADPQEAHDLIKYAYELSERYKVPIIFRTTTRVNHTTADVEVGEFVELNRKPVFKKDIERYVRASMEGNRKRHKWLNETLRKIEEEFNEMPFNWVEGKEDAKLGIIVEGAPYNYVKEVLPKINAEFKVLKLSTPHPLPKKLVVEFLKTVEEAIVIEDGAPFLEEEVKIAAYEAGLNVPIYGKRTGHLPLEGELTPSLVRNALLKVIGEESEEYVKPEEVAYAENLAPKRPPVMCPGCPHRGSYRAVLDALRDLKLGRYKVPIHGDIGCYALSLLPPLEAIWTEYVMGASISLANGQSVVMDKKIIATIGDSTFFHNGIQPLIDAVYKNLNVLVMILDNRTTAMTGHQPHPGTGGSETGRKFNEIDIEALVKALGVKYVKTVDPYDLKATREAIKEAMQIEGPAVIIAKRECVIPVIRRGEIGELPVVIEDKCTGCKACILLTGCPALVYDPETKKVRIDELLCTGCGVCNQTCPFDAIKFPSELKKGA

SEQ ID NO: 246 - protein, 269 aa, Thermococcus kodakaraensis KOD1
  misc_feature (414542)..(414542): n is a or c or g or t.
  misc_feature (786890)..(786890): n is a or c or g or t.
  misc_feature (786907)..(786907): n is a or c or g or t.
  misc_feature (786944)..(786946): n is a or c or g or t.
  misc_feature (839139)..(839139): n is a or c or g or t.
  misc_feature (1128488)..(1128488): n is a or c or g or t.
  misc_feature (1128499)..(1128499): n is a or c or g or t.
  misc_feature (1128505)..(1128506): n is a or c or g or t.
  misc_feature (1128517)..(1128518): n is a or c or g or t.
  misc_feature (1128539)..(1128540): n is a or c or g or t.
  misc_feature (1561400)..(1561400): n is a or c or g or t.
  misc_feature (1561477)..(1561477): n is a or c or g or t.
  misc_feature (1561545)..(1561545): n is a or c or g or t.
  misc_feature (1767941)..(1767941): n is a or c or g or t.
MMSLKLASSFAGSIRDVINWILTLPLPEDARTFILNIKAEATTRIAEYVSSRAFSIPLYVIQLTVFFLAFYYGLAYSEQIARTIRELLPEENRELGEEILTSVHKTLSALVRAWLLLNVAKGILMTLGYIVFGVSDVYTAVIAGFLTFAFSFVPLFEGWMIWLAAAIYFALNGMYLHAIGISVYGAFLVSPMPDYTIRPMLVARDTELDETLVFIGMVGGTWAMGLKGIIIGPIVLNVLLVLIKEWKKLTESSHQLSSSPQGPSSRPRG

SEQ ID NO: 247 - protein, 328 aa, Thermococcus kodakaraensis KOD1
  misc_feature (414542)..(414542): n is a or c or g or t.
  misc_feature (786890)..(786890): n is a or c or g or t.
  misc_feature (786907)..(786907): n is a or c or g or t.
  misc_feature (786944)..(786946): n is a or c or g or t.
  misc_feature (839139)..(839139): n is a or c or g or t.
  misc_feature (1128488)..(1128488): n is a or c or g or t.
  misc_feature (1128499)..(1128499): n is a or c or g or t.
  misc_feature (1128505)..(1128506): n is a or c or g or t.
  misc_feature (1128517)..(1128518): n is a or c or g or t.
  misc_feature (1128539)..(1128540): n is a or c or g or t.
  misc_feature (1561400)..(1561400): n is a or c or g or t.
  misc_feature (1561477)..(1561477): n is a or c or g or t.
  misc_feature (1561545)..(1561545): n is a or c or g or t.
  misc_feature (1767941)..(1767941): n is a or c or g or t.
MKLLVLGTGGTIASAKTEMGYKAALSADDILQLAGIRREDGAKIETRDILNLDSTLIQPEDWVTIGRAVFEAFDEYDGIVITHGTDTLAYTSSALSFMIRNPPIPVVLTGSMLPITEPNSDAPRNLRTALTFARKGFPGIYVAFMDKIMLGTRVSKVHSLGLNAFQSINYPDIAYVKGDEVLVRHKPRIGNGEPLFDPELDPNVVHIRLTPGLSPEVLRAVARATDGIVLEGYGAGGIPYRGRNLLEVVSETAREKPVVMTTQALYGGVDLTRYEVGRRALEAGVIPAGDMTKEATLTKLMWALGHTRDLEEIRKIMERNIAGEITGS

SEQ ID NO: 248 - protein, 29 aa, Thermococcus kodakaraensis KOD1
  misc_feature (414542)..(414542): n is a or c or g or t.
  misc_feature (786890)..(786890): n is a or c or g or t.
  misc_feature (786907)..(786907): n is a or c or g or t.
  misc_feature (786944)..(786946): n is a or c or g or t.
  misc_feature (839139)..(839139): n is a or c or g or t.
  misc_feature (1128488)..(1128488): n is a or c or g or t.
  misc_feature (1128499)..(1128499): n is a or c or g or t.
  misc_feature (1128505)..(1128506): n is a or c or g or t.
  misc_feature (1128517)..(1128518): n is a or c or g or t.
  misc_feature (1128539)..(1128540): n is a or c or g or t.
  misc_feature (1561400)..(1561400): n is a or c or g or t.
  misc_feature (1561477)..(1561477): n is a or c or g or t.
  misc_feature (1561545)..(1561545): n is a or c or g or t.
  misc_feature (1767941)..(1767941): n is a or c or g or t.
VMGQRWPIERLIFAQYFIVEKYFVNLRKV

SEQ ID NO: 249 - protein, 45 aa, Thermococcus kodakaraensis KOD1
  misc_feature (414542)..(414542): n is a or c or g or t.
  misc_feature (786890)..(786890): n is a or c or g or t.
  misc_feature (786907)..(786907): n is a or c or g or t.
  misc_feature (786944)..(786946): n is a or c or g or t.
  misc_feature (839139)..(839139): n is a or c or g or t.
  misc_feature (1128488)..(1128488): n is a or c or g or t.
  misc_feature (1128499)..(1128499): n is a or c or g or t.
  misc_feature (1128505)..(1128506): n is a or c or g or t.
  misc_feature (1128517)..(1128518): n is a or c or g or t.
  misc_feature (1128539)..(1128540): n is a or c or g or t.
  misc_feature (1561400)..(1561400): n is a or c or g or t.
  misc_feature (1561477)..(1561477): n is a or c or g or t.
  misc_feature (1561545)..(1561545): n is a or c or g or t.
  misc_feature (1767941)..(1767941): n is a or c or g or t.
MFERIKPTGELKAREIKIEFFEDDASDAERPKVKLLHEIKRYSLA

SEQ ID NO: 250 - protein, 267 aa, Thermococcus kodakaraensis KOD1
  misc_feature (414542)..(414542): n is a or c or g or t.
  misc_feature (786890)..(786890): n is a or c or g or t.
  misc_feature (786907)..(786907): n is a or c or g or t.
  misc_feature (786944)..(786946): n is a or c or g or t.
  misc_feature (839139)..(839139): n is a or c or g or t.
  misc_feature (1128488)..(1128488): n is a or c or g or t.
  misc_feature (1128499)..(1128499): n is a or c or g or t.
  misc_feature (1128505)..(1128506): n is a or c or g or t.
  misc_feature (1128517)..(1128518): n is a or c or g or t.
  misc_feature (1128539)..(1128540): n is a or c or g or t.
  misc_feature (1561400)..(1561400): n is a or c or g or t.
  misc_feature (1561477)..(1561477): n is a or c or g or t.
  misc_feature (1561545)..(1561545): n is a or c or g or t.
  misc_feature (1767941)..(1767941): n is a or c or g or t.
VGIPMRDPISKLVSLTGKRALITGAASGIGKATALRFAEAGAALELVDIDELGLKGVKKEAEEFGVEVNTHRVDISRKVEIDALWKALEGREPNILVNNAGVYWFKDFTEVNEDFYERVMNINLHSVFWTCQHFVRARKDEGGVIVNVSSIEAFLPFARGLVHYDVAKLGVVALTRAIAREYGKKIRANVVVPGGIETEGVKRLKKEAIMKFDTEKIGISFHFNARLPMGRFGEPDEVARVILFLASDLASYVNGAIVPVDGGFLST

SEQ ID NO: 251 - protein, 663 aa, Thermococcus kodakaraensis KOD1
  misc_feature (414542)..(414542): n is a or c or g or t.
  misc_feature (786890)..(786890): n is a or c or g or t.
  misc_feature (786907)..(786907): n is a or c or g or t.
  misc_feature (786944)..(786946): n is a or c or g or t.
  misc_feature (839139)..(839139): n is a or c or g or t.
  misc_feature (1128488)..(1128488): n is a or c or g or t.
  misc_feature (1128499)..(1128499): n is a or c or g or t.
  misc_feature (1128505)..(1128506): n is a or c or g or t.
  misc_feature (1128517)..(1128518): n is a or c or g or t.
  misc_feature (1128539)..(1128540): n is a or c or g or t.
  misc_feature (1561400)..(1561400): n is a or c or g or t.
  misc_feature (1561477)..(1561477): n is a or c or g or t.
  misc_feature (1561545)..(1561545): n is a or c or g or t.
  misc_feature (1767941)..(1767941): n is a or c or g or t.
MKKFGAVVLALFLVGLMAGSVLAAPQKPAVRNVSQQKNYGLLTPGLFKKVQRMSWDQEVSTIIMFDNQADKEKAVEILDFLGAKIKYNYHIIPALAVKIKVKDLLIIAGLMDTGYFGNAQLSGVQFIQEDYVVKVAVETEGLDESAAQVMATNMWNLGYDGSGITIGIIDTGIDASHPDLQGKVIGWVDFVNGKTTPYDDNGHGTHVASIAAGTGAASNGKYKGMAPGAKLVGIKVLNGQGSGSISDIINGVDWAVQNKDKYGIKVINLSLGSSQSSDGTDSLSQAVNNAWDAGLVVVVAAGNSGPNKYTVGSPAAASKVITVGAVDKYDVITDFSSRGPTADNRLKPEVVAPGNWIIAARASGTSMGQPINDYYTAAPGTSMATPHVAGIAALLLQAHPSWTPDKVKTALIETADIVKPDEIADIAYGAGRVNAYKAAYYDNYAKLTFTGYVSNKGSQSHQFTISGAGFVTATLYWDNSGSDLDLYLYDPNGNQVDYSYTAYYGFEKVGYYNPTAGTWTIKVVSYSGSANYQVDVVSDGSLGQPSGGGSEPSPSPSPEPTVDEKTFTGTVHDYYDKSDTFTMTVNSGATKITGDLYFDTSYHDLDLYLYDPNQNLVDRSESSNSYEHVEYNNPAPGTWYFLVYAYDTYGYADYQLDAKVYYG

SEQ ID NO: 252 - protein, 246 aa, Thermococcus kodakaraensis KOD1
  misc_feature (414542)..(414542): n is a or c or g or t.
  misc_feature (786890)..(786890): n is a or c or g or t.
  misc_feature (786907)..(786907): n is a or c or g or t.
  misc_feature (786944)..(786946): n is a or c or g or t.
  misc_feature (839139)..(839139): n is a or c or g or t.
  misc_feature (1128488)..(1128488): n is a or c or g or t.
  misc_feature (1128499)..(1128499): n is a or c or g or t.
  misc_feature (1128505)..(1128506): n is a or c or g or t.
  misc_feature (1128517)..(1128518): n is a or c or g or t.
  misc_feature (1128539)..(1128540): n is a or c or g or t.
  misc_feature (1561400)..(1561400): n is a or c or g or t.
  misc_feature (1561477)..(1561477): n is a or c or g or t.
  misc_feature (1561545)..(1561545): n is a or c or g or t.
  misc_feature (1767941)..(1767941): n is a or c or g or t.
MLKPVGEDFVKRYRLEYNLEALKRVRRDIGEIAHTRLRALIEYRLSGKDFDRSPTGAKVAVAFSGGSDSTATLKVLRWAGFDAIPITVKLPQMGEKTLEKARNYGAVFIEIPEYLDIIRPQIEKGAPICGRCHALVMSAVEGYARKSGIKIVASGDMLSSGLISIYQKEDLVILNLPAFLALDKAEIIEIIGGDYDLKFGCPLLWELFRKAPSTKRLSIQRVLRETRARALRPGMARELILDILSR

SEQ ID NO: 253 - protein, 63 aa, Thermococcus kodakaraensis KOD1
  misc_feature (414542)..(414542): n is a or c or g or t.
  misc_feature (786890)..(786890): n is a or c or g or t.
  misc_feature (786907)..(786907): n is a or c or g or t.
  misc_feature (786944)..(786946): n is a or c or g or t.
  misc_feature (839139)..(839139): n is a or c or g or t.
  misc_feature (1128488)..(1128488): n is a or c or g or t.
  misc_feature (1128499)..(1128499): n is a or c or g or t.
  misc_feature (1128505)..(1128506): n is a or c or g or t.
  misc_feature (1128517)..(1128518): n is a or c or g or t.
  misc_feature (1128539)..(1128540): n is a or c or g or t.
  misc_feature (1561400)..(1561400): n is a or c or g or t.
  misc_feature (1561477)..(1561477): n is a or c or g or t.
  misc_feature (1561545)..(1561545): n is a or c or g or t.
  misc_feature (1767941)..(1767941): n is a or c or g or t.
MAWKVSVDVDTCIGDAICASLCPDVFEMGDDGKAHPVVETTDLDCAQEAAEACPVGAITLEEA

SEQ ID NO: 254 - protein, 173 aa, Thermococcus kodakaraensis KOD1
  misc_feature (414542)..(414542): n is a or c or g or t.
  misc_feature (786890)..(786890): n is a or c or g or t.
  misc_feature (786907)..(786907): n is a or c or g or t.
  misc_feature (786944)..(786946): n is a or c or g or t.
  misc_feature (839139)..(839139): n is a or c or g or t.
  misc_feature (1128488)..(1128488): n is a or c or g or t.
  misc_feature (1128499)..(1128499): n is a or c or g or t.
  misc_feature (1128505)..(1128506): n is a or c or g or t.
  misc_feature (1128517)..(1128518): n is a or c or g or t.
  misc_feature (1128539)..(1128540): n is a or c or g or t.
  misc_feature (1561400)..(1561400): n is a or c or g or t.
  misc_feature (1561477)..(1561477): n is a or c or g or t.
  misc_feature (1561545)..(1561545): n is a or c or g or t.
  misc_feature (1767941)..(1767941): n is a or c or g or t.
MKKQGAGSRKRPWQSTTITPTTSNSTGGRPLEYDRDRVTRLMGEAKNALFNIHELAELDEEEFLRNKHYISSAKYNLLVAIEACIDIAYHLISKNKLRLPKDYSDAFKVLQENNVISNELARRLILMARFRNRLVHIYWDIDDRMIYRIITENITDIEKFLEHIRKILGGDNK

SEQ ID NO: 255 - protein, 415 aa, Thermococcus kodakaraensis KOD1
  misc_feature (414542)..(414542): n is a or c or g or t.
  misc_feature (786890)..(786890): n is a or c or g or t.
  misc_feature (786907)..(786907): n is a or c or g or t.
  misc_feature (786944)..(786946): n is a or c or g or t.
  misc_feature (839139)..(839139): n is a or c or g or t.
  misc_feature (1128488)..(1128488): n is a or c or g or t.
  misc_feature (1128499)..(1128499): n is a or c or g or t.
  misc_feature (1128505)..(1128506): n is a or c or g or t.
  misc_feature (1128517)..(1128518): n is a or c or g or t.
  misc_feature (1128539)..(1128540): n is a or c or g or t.
  misc_feature (1561400)..(1561400): n is a or c or g or t.
  misc_feature (1561477)..(1561477): n is a or c or g or t.
  misc_feature (1561545)..(1561545): n is a or c or g or t.
  misc_feature (1767941)..(1767941): n is a or c or g or t.
MTESLKLRLIKNAGWLFGAEVISKLLAYGVIVILSRTLGPEGLGQYSFIFYYVGLLGIFSDLGVGYYFMREVARDRSKAEELLPDVLGLKIALALINFGIIVALTLQLPKPEWMKVLIVLAGAEAVLGWIAYVFVNMMYAHEVTKYEAIARTIERIWAFFIGGTVLYVCRSLSPFIITLLIGYVLRELLRIKWGKRFVREIRIHFEPQKWLSLLKKSYPFWFIGLFTLIYYRTDMVMLSLMRGDYETGIYRAAYTLIEVSLFVPNIVVPTTMPSMARLWQEDRKTLEILLKKSSRILSGLGVLGTIGYYVFARWGTILVFGEGFLASVPMLRILAFAVPFMFLNSLFGSFLNATGRELTFTKITGFTALLNVVLNYFLILNYGARGAAMATVVSQGIASVLSFRVGIKNGKYNGA

SEQ ID NO: 256 - protein, 409 aa, Thermococcus kodakaraensis KOD1
  misc_feature (414542)..(414542): n is a or c or g or t.
  misc_feature (786890)..(786890): n is a or c or g or t.
  misc_feature (786907)..(786907): n is a or c or g or t.
  misc_feature (786944)..(786946): n is a or c or g or t.
  misc_feature (839139)..(839139): n is a or c or g or t.
  misc_feature (1128488)..(1128488): n is a or c or g or t.
  misc_feature (1128499)..(1128499): n is a or c or g or t.
  misc_feature (1128505)..(1128506): n is a or c or g or t.
  misc_feature (1128517)..(1128518): n is a or c or g or t.
  misc_feature (1128539)..(1128540): n is a or c or g or t.
  misc_feature (1561400)..(1561400): n is a or c or g or t.
  misc_feature (1561477)..(1561477): n is a or c or g or t.
  misc_feature (1561545)..(1561545): n is a or c or g or t.
  misc_feature (1767941)..(1767941): n is a or c or g or t.
MVKSFRAFILARVRMDRVTKQLIASRLLSLANVIPKDENKLLFYSTPDVSDNALALFKYVSRKTNDYELVWLLNNPSSPSVKVLKGRYSEAKTVPLYSIKGLKELLRAKFIITTDVLPVTPHLGQRVIQLWHGLPGKKTGYEHPLGIRDLYLYMDRWTTDFVTTSELVVGSFVRQFMINPRKFRILGQPRNDGLFDHMKDSKDTLSSILGIDVEAYDGVVLYAPTYRYTSYLKDFEASVRAVESLFRRDFIEFIREENILLVIKPHKLVAEAVKSKVKVSSNVVLLTDEPLQSHLLNINDIMGAFDILITDYSSIFEDYILLNRPIVFYLPDREALEQKSGFLLPYEFFAPGKKPETVEDLKRSLREYIDDPQIDAEWRETIKNLLYEVGQDNKSSERVYKHIIKGEFE

SEQ ID NO: 257 - protein, 359 aa, Thermococcus kodakaraensis KOD1
  misc_feature (414542)..(414542): n is a or c or g or t.
  misc_feature (786890)..(786890): n is a or c or g or t.
  misc_feature (786907)..(786907): n is a or c or g or t.
  misc_feature (786944)..(786946): n is a or c or g or t.
  misc_feature (839139)..(839139): n is a or c or g or t.
  misc_feature (1128488)..(1128488): n is a or c or g or t.
  misc_feature (1128499)..(1128499): n is a or c or g or t.
  misc_feature (1128505)..(1128506): n is a or c or g or t.
  misc_feature (1128517)..(1128518): n is a or c or g or t.
  misc_feature (1128539)..(1128540): n is a or c or g or t.
  misc_feature (1561400)..(1561400): n is a or c or g or t.
  misc_feature (1561477)..(1561477): n is a or c or g or t.
  misc_feature (1561545)..(1561545): n is a or c or g or t.
  misc_feature (1767941)..(1767941): n is a or c or g or t.
MRILWLNWKDIRHPEAGGAEVYTHEIAKRLVEKGYEVTLFTSYFNGAEKEDEIDGVKIVRSGKIVGLFDTVYSHAKRFYRDNKNDFDVVIDEINTRPFLTPKYVDKPIIALIHQLAVEFWDYKTPFPINTLGKHILEPYWLKHYVNVKTITVSESTRNDLEKLGFKDIEIVYNGLDRNILEKVPEKEDEFTALFVGRLTPTKKPEDAVIAFKMLNKGKMWIVGRGELMEKLKKRHNNGNIEFRGFIPEKEKIELMKKAHVLLVPGIREGWGRVVIEANALGTPAIGYNVPGLRDSIKHRYNGLLCDPNPKAMSEALRVLHEDEELKRRLSENALKWAKRFSWDESAEKFERVLNSSVGE

SEQ ID NO: 258 - protein, 321 aa, Thermococcus kodakaraensis KOD1
  misc_feature (414542)..(414542): n is a or c or g or t.
  misc_feature (786890)..(786890): n is a or c or g or t.
  misc_feature (786907)..(786907): n is a or c or g or t.
  misc_feature (786944)..(786946): n is a or c or g or t.
  misc_feature (839139)..(839139): n is a or c or g or t.
  misc_feature (1128488)..(1128488): n is a or c or g or t.
  misc_feature (1128499)..(1128499): n is a or c or g or t.
  misc_feature (1128505)..(1128506): n is a or c or g or t.
  misc_feature (1128517)..(1128518): n is a or c or g or t.
  misc_feature (1128539)..(1128540): n is a or c or g or t.
  misc_feature (1561400)..(1561400): n is a or c or g or t.
  misc_feature (1561477)..(1561477): n is a or c or g or t.
  misc_feature (1561545)..(1561545): n is a or c or g or t.
  misc_feature (1767941)..(1767941): n is a or c or g or t.
MKMPSEYSIRGYLLRALNSFRIPQELMRFEGIIYASTEHWYDVIPGALIKRKNPQNRFAIVAHWVAPLIRKGTSAINSILFYINQRVGYFVGKRYSDVFLAVSKPTGNDLKRIGIPESKIRVVEAGVDYERIRQISSKIKEKQFDGVFMKRFDGTKGVFDVVEIWEHVVSEIPDAKLILIGHGTKTNVNKLERMIKDKKLEENVKILGPIYDFEEKFKTLAKSKVFLLPSYEENWAIVIGEAMAAGLPVVCYDLPEIRPIWKDNVIWIPRGNKKEFAKKVVELLENENVGKRVGENGARFVKRYDWRKIAGKELMIIQRGV

SEQ ID NO: 259 - protein, 594 aa, Thermococcus kodakaraensis KOD1
  misc_feature (414542)..(414542): n is a or c or g or t.
  misc_feature (786890)..(786890): n is a or c or g or t.
  misc_feature (786907)..(786907): n is a or c or g or t.
  misc_feature (786944)..(786946): n is a or c or g or t.
  misc_feature (839139)..(839139): n is a or c or g or t.
  misc_feature (1128488)..(1128488): n is a or c or g or t.
  misc_feature (1128499)..(1128499): n is a or c or g or t.
  misc_feature (1128505)..(1128506): n is a or c or g or t.
  misc_feature (1128517)..(1128518): n is a or c or g or t.
  misc_feature (1128539)..(1128540): n is a or c or g or t.
  misc_feature (1561400)..(1561400): n is a or c or g or t.
  misc_feature (1561477)..(1561477): n is a or c or g or t.
  misc_feature (1561545)..(1561545): n is a or c or g or t.
  misc_feature (1767941)..(1767941): n is a or c or g or t.
MDSYLSTTLFVTPNAPNNRPEKSWATDLLSWYINPSIAIAPLYGENTVLTWAPPTADLPENMPISNLIASWDFTSQDQVKAWENVTPKIQFSAIQTISWDESVQALRAELYNSTWVWKTIRSPLIPVKYDHVYRFMFKVKGQNTNVVHAYVKEYDVNKTLIKGSFLYYPFIGDGTFNWKTISFNYQPQSEDTRYIQLQIWHGHETDKPLPNIIWIDDVKVYDITNYTKPVTLDIPFKVDKTDNYKLFIRYFKNQKGGAIRVYLDGTPIYIKTKDQLNKFVWEDLGTFKLEKGKHKIVLENVRGFNAVNLFALIPEKEYNKARKEAIELLQNKTIIYLFEAESDLYRENTEIIKDFNASNGEAIKFDQKGKAWQNVEIVKNSTYRLALKGNGTFNISIGDYKYVLTVNNSTFEYTPLFYLRNGEYKLEITPTSKDALLDVVWLYSTDKNETLEELFQTNETPATVQDYTKVNPTLWKVKVNATKPFMLTFAESYDPLWEARVYKDGKLVEKVSPVPVYGVINGFWINQTGDLEIVLRYTPQDWFERGLMVSLTTFLLSVFYIFYDWRREKGDKWAKRLEKKFKKLTSKVKRKLSP

SEQ ID NO: 260 - protein, 333 aa, Thermococcus kodakaraensis KOD1
  misc_feature (414542)..(414542): n is a or c or g or t.
  misc_feature (786890)..(786890): n is a or c or g or t.
  misc_feature (786907)..(786907): n is a or c or g or t.
  misc_feature (786944)..(786946): n is a or c or g or t.
  misc_feature (839139)..(839139): n is a or c or g or t.
  misc_feature (1128488)..(1128488): n is a or c or g or t.
  misc_feature (1128499)..(1128499): n is a or c or g or t.
  misc_feature (1128505)..(1128506): n is a or c or g or t.
  misc_feature (1128517)..(1128518): n is a or c or g or t.
  misc_feature (1128539)..(1128540): n is a or c or g or t.
  misc_feature (1561400)..(1561400): n is a or c or g or t.
  misc_feature (1561477)..(1561477): n is a or c or g or t.
  misc_feature (1561545)..(1561545): n is a or c or g or t.
  misc_feature (1767941)..(1767941): n is a or c or g or t.
MGDALHTLGNLLFRGKAPYSISFNGLGLLCEGNLAHNVSFLFGVRVEKKEKRVLENSDDLGISHSIEFPVYSIDQCIPKSHRLQCARHIKWGARYIVLRLARSWLEFSVAYVLIVVGFIYGTKHDKTHRDILLMILPSVITLNGVNGFILNGPFERYTFGPLALMSIFSGYGIIELYNNFKSKIKPLNILTVEKWIALFLIVQLILLNAAVLKLSDIGAKGIQDYGYWYDRKVFNILKERAAPEEFFVGTPHPALIGFKNWTWADRNIKKAVELDPDWLITFKSWVNFRENPQEIRELEIYSVGPYLLIHAEEKGAIKKYVVSSDLKLWKFRK

SEQ ID NO: 261 - protein, 157 aa, Thermococcus kodakaraensis KOD1
  misc_feature (414542)..(414542): n is a or c or g or t.
  misc_feature (786890)..(786890): n is a or c or g or t.
  misc_feature (786907)..(786907): n is a or c or g or t.
  misc_feature (786944)..(786946): n is a or c or g or t.
  misc_feature (839139)..(839139): n is a or c or g or t.
  misc_feature (1128488)..(1128488): n is a or c or g or t.
  misc_feature (1128499)..(1128499): n is a or c or g or t.
  misc_feature (1128505)..(1128506): n is a or c or g or t.
  misc_feature (1128517)..(1128518): n is a or c or g or t.
  misc_feature (1128539)..(1128540): n is a or c or g or t.
  misc_feature (1561400)..(1561400): n is a or c or g or t.
  misc_feature (1561477)..(1561477): n is a or c or g or t.
  misc_feature (1561545)..(1561545): n is a or c or g or t.
  misc_feature (1767941)..(1767941): n is a or c or g or t.
VMLMDKVYLTWWQVDRAIFALADELRKNFMPDVIVGVARGGLIPAVRLSHILGDLEVKVIDVKFYKDIDERMEKPVINIPLHGSLERKKVVIVDDVSDTGKTLEVVIEEVKKAGAEEVKVACLSMKPWTKVVPDFYVFRTDKWIVFPWEEFPVVVRE

SEQ ID NO: 262 - protein, 184 aa, Thermococcus kodakaraensis KOD1
  misc_feature (414542)..(414542): n is a or c or g or t.
  misc_feature (786890)..(786890): n is a or c or g or t.
  misc_feature (786907)..(786907): n is a or c or g or t.
  misc_feature (786944)..(786946): n is a or c or g or t.
  misc_feature (839139)..(839139): n is a or c or g or t.
  misc_feature (1128488)..(1128488): n is a or c or g or t.
  misc_feature (1128499)..(1128499): n is a or c or g or t.
  misc_feature (1128505)..(1128506): n is a or c or g or t.
  misc_feature (1128517)..(1128518): n is a or c or g or t.
  misc_feature (1128539)..(1128540): n is a or c or g or t.
  misc_feature (1561400)..(1561400): n is a or c or g or t.
  misc_feature (1561477)..(1561477): n is a or c or g or t.
  misc_feature (1561545)..(1561545): n is a or c or g or t.
  misc_feature (1767941)..(1767941): n is a or c or g or t.
MRAFIAIDVSDEVRDNLLRAQERIGNKAAKIKFVERENFHVTLKFLGEIDETTAEEVKRALAEIAKKHKKHRVRVKGIGVFPNPNYVRVIWAGIENDEGIKAIAEDVEKAMRKLGFKKEKDFVAHITIGRVKFVRDKLELAMALKDLANEDFGEFEVEAIELKKSTLTPKGPIYETVARFELAD

SEQ ID NO: 263 - protein, 1065 aa, Thermococcus kodakaraensis KOD1
  misc_feature (414542)..(414542): n is a or c or g or t.
  misc_feature (786890)..(786890): n is a or c or g or t.
  misc_feature (786907)..(786907): n is a or c or g or t.
  misc_feature (786944)..(786946): n is a or c or g or t.
  misc_feature (839139)..(839139): n is a or c or g or t.
  misc_feature (1128488)..(1128488): n is a or c or g or t.
  misc_feature (1128499)..(1128499): n is a or c or g or t.
  misc_feature (1128505)..(1128506): n is a or c or g or t.
  misc_feature (1128517)..(1128518): n is a or c or g or t.
  misc_feature (1128539)..(1128540): n is a or c or g or t.
  misc_feature (1561400)..(1561400): n is a or c or g or t.
  misc_feature (1561477)..(1561477): n is a or c or g or t.
  misc_feature (1561545)..(1561545): n is a or c or g or t.
  misc_feature (1767941)..(1767941): n is a or c or g or t.
MIREPEFREYNPGQLEEKIEAFWKENNTYEKVKKLRENGPKYYFLDGPPYVSGAIHLGTAWNKIIKDMIIRFRSMQGYNVRRQPGFDMHGLPIEVKVEQALKLKNKREIETKIGVDNFIKKCKEFALNNLKIMTEQFKQLGVWMDWDNPYMTIKNEYIESGWFTLKRAWEKGLLEKDKRVLHWCPRCQTALAEHEVRGEYKMRKDPSIYVKFPIEWKEKEYLLIWTTTPWTLPANLAVAAHPEYEYAKVKVETENGEEYWIMAKALVERVLSEVGVKGEIVETFKGEELEGIRYTHVLLEEYPAQKEFREKYEWAHRVILGEHVTLEDGTGLVHTAPGHGEEDFEVGQRYGLPVYSPVDDAGRYTEGKWKGVYVKDADPEIIEYLKEKGYLVKAGEIEHKYPHCWRCKTPLIFRATDQWFLKVSKVKDQIIKENDEKVTWYPEWVKVRYDNGVMNSGDWVISRQRYWGIPLPIWESEDGEYYVVGSFEELVKLAVAIEVNGERIDLPEGYEEKLKIIEEKLGPEDLHRPYVDAFIIKVNGKEMKRVKDVVDVWFDSGIASWASLDYPRNKELFEKLWPADFIVEGEDQVTKWFYSQQAASVIAFDTVPYRAVAMHGYVLDEKGDKMSKSLGNIIRPEEVVQKEGRDPFRFYMLWATNPWENLRFSWKGLEQVKRMLNILWNVYVLSATYMSLDNFNPTKVNPEELPFREEDRWILSRVNSLIGEVTDGIETFRLTRATRGIYNFVVEDLSRWYIRLIRKRMWVEGDDPDKLAAYYTVWKVFDVLLRLMAPFTPYIAEEIYQNLIRPFVGVESVHMLDWPEADEKAIDEELEKEMEYARKIVEAGSSARQKARIKLRYPVRRIIIETEDETVKKAVERINRILRDQLNAKEVVVGKVERELIIKPNFAKVGPEFKGDAKKVIAWISEHGRELYEKGEMDVEIEGKTFHITREHVTIEEKLPDFFVAEEFDGGRVFVDKTLTRELLAEGLAREFVRRIQEMRKRLDLDVNDRIVVTIETTDENRELLQENLDYIMRETRAVEVRFEEAKGYVVEWPEVQAKIGIEKV

SEQ ID NO: 264 - protein, 252 aa, Thermococcus kodakaraensis KOD1
  misc_feature (414542)..(414542): n is a or c or g or t.
  misc_feature (786890)..(786890): n is a or c or g or t.
  misc_feature (786907)..(786907): n is a or c or g or t.
  misc_feature (786944)..(786946): n is a or c or g or t.
  misc_feature (839139)..(839139): n is a or c or g or t.
  misc_feature (1128488)..(1128488): n is a or c or g or t.
  misc_feature (1128499)..(1128499): n is a or c or g or t.
  misc_feature (1128505)..(1128506): n is a or c or g or t.
  misc_feature (1128517)..(1128518): n is a or c or g or t.
  misc_feature (1128539)..(1128540): n is a or c or g or t.
  misc_feature (1561400)..(1561400): n is a or c or g or t.
  misc_feature (1561477)..(1561477): n is a or c or g or t.
  misc_feature (1561545)..(1561545): n is a or c or g or t.
  misc_feature (1767941)..(1767941): n is a or c or g or t.
MVEFTLKLDIEIFKLAIVTLALFILYKYHRIFETALPPNLLRRGTYVTVIFWLGFLADVMNDMYPTPFTKILDDIIISFALVLGSYYLIDYMRKVRVNVTPSKALSGDSNLPNGAHIITDPNIPAVPELIRGKKAIALSRNPDPFKKMGVPYLWLSKVPGENTIDPLRLPAILHKLVESADRDTVVIVDGLEYLILENGFNSVIKFLTTLKDNLLLKGATLIVVADPKALEPSQMAILRREFREIPKEGQKS

SEQ ID NO: 265 - protein, 149 aa, Thermococcus kodakaraensis KOD1
  misc_feature (414542)..(414542): n is a or c or g or t.
  misc_feature (786890)..(786890): n is a or c or g or t.
  misc_feature (786907)..(786907): n is a or c or g or t.
  misc_feature (786944)..(786946): n is a or c or g or t.
  misc_feature (839139)..(839139): n is a or c or g or t.
  misc_feature (1128488)..(1128488): n is a or c or g or t.
  misc_feature (1128499)..(1128499): n is a or c or g or t.
  misc_feature (1128505)..(1128506): n is a or c or g or t.
  misc_feature (1128517)..(1128518): n is a or c or g or t.
  misc_feature (1128539)..(1128540): n is a or c or g or t.
  misc_feature (1561400)..(1561400): n is a or c or g or t.
  misc_feature (1561477)..(1561477): n is a or c or g or t.
  misc_feature (1561545)..(1561545): n is a or c or g or t.
  misc_feature (1767941)..(1767941): n is a or c or g or t.
MTLPDSILFDATALIKMHTASRRRLLEVTLAKFNVFVPIISVYKYLVSKAYINRNVEDEFRILNEIYTILPLTEEIVLHGAKIEAKLLKKGLRLDVDDILTGTFAIKHRMLLVTADPERYRALTEFGLDVMELDHFLREVERIVASSLS

SEQ ID NO: 266 - protein, 120 aa, Thermococcus kodakaraensis KOD1
  misc_feature (414542)..(414542): n is a or c or g or t.
  misc_feature (786890)..(786890): n is a or c or g or t.
  misc_feature (786907)..(786907): n is a or c or g or t.
  misc_feature (786944)..(786946): n is a or c or g or t.
  misc_feature (839139)..(839139): n is a or c or g or t.
  misc_feature (1128488)..(1128488): n is a or c or g or t.
  misc_feature (1128499)..(1128499): n is a or c or g or t.
  misc_feature (1128505)..(1128506): n is a or c or g or t.
  misc_feature (1128517)..(1128518): n is a or c or g or t.
  misc_feature (1128539)..(1128540): n is a or c or g or t.
  misc_feature (1561400)..(1561400): n is a or c or g or t.
  misc_feature (1561477)..(1561477): n is a or c or g or t.
  misc_feature (1561545)..(1561545): n is a or c or g or t.
  misc_feature (1767941)..(1767941): n is a or c or g or t.
MREKPKYLPPTLRDKNRYIAFQVIGERPFKKDEIKKAVWEASLSALGYLGSARAKPWFIKFDEKSQTGIVRVDRKHVEELRFALTMLTEINGSKVIFRTLGVSGTIKRLKRKFLAEYGWR

SEQ ID NO: 267 - protein, 415 aa, Thermococcus kodakaraensis KOD1
  misc_feature (414542)..(414542): n is a or c or g or t.
  misc_feature (786890)..(786890): n is a or c or g or t.
  misc_feature (786907)..(786907): n is a or c or g or t.
  misc_feature (786944)..(786946): n is a or c or g or t.
  misc_feature (839139)..(839139): n is a or c or g or t.
  misc_feature (1128488)..(1128488): n is a or c or g or t.
  misc_feature (1128499)..(1128499): n is a or c or g or t.
  misc_feature (1128505)..(1128506): n is a or c or g or t.
  misc_feature (1128517)..(1128518): n is a or c or g or t.
  misc_feature (1128539)..(1128540): n is a or c or g or t.
  misc_feature (1561400)..(1561400): n is a or c or g or t.
  misc_feature (1561477)..(1561477): n is a or c or g or t.
  misc_feature (1561545)..(1561545): n is a or c or g or t.
  misc_feature (1767941)..(1767941): n is a or c or g or t.
MMGRKRSEMLKSFVLTLLAIFIMFIILFPVYYIFTVSISPKSTLATTELELIPKQVTLDSYREVLFGFSGDRLMEDFEGRITGKGTIQNGKLYVTDGTLIGTVKYGPFTGLKFEIPVSRATFTVNGGSGSGDFSGNVKGTIILTRINDDGTIGFGIVRNVTLTEGTINGVKVSGQMDGYIRARDTGKAEFTALGKFVNSNFFKYLKNSLILATLTVVLALIFVVPAAYAFSRLQFFGREHILYFYLMFTQVSGGLGIAGLIALYGMLVKLGLYGKLPVLAFIYAAGSVPFNTWLLKGYIDSISPDFDEAALVDGANYFQIIRHVLLPMALPGIATVAVFAFIGGWTEFILASLLLGQESQPLAVWIYSLLGGIGRGIDWSYFAAAALLFALPVFVMFILAQNYIRSGLTVGGLKE

SEQ ID NO: 268 - protein, 1100 aa, Thermococcus kodakaraensis KOD1
  misc_feature (414542)..(414542): n is a or c or g or t.
  misc_feature (786890)..(786890): n is a or c or g or t.
  misc_feature (786907)..(786907): n is a or c or g or t.
  misc_feature (786944)..(786946): n is a or c or g or t.
  misc_feature (839139)..(839139): n is a or c or g or t.
  misc_feature (1128488)..(1128488): n is a or c or g or t.
  misc_feature (1128499)..(1128499): n is a or c or g or t.
  misc_feature (1128505)..(1128506): n is a or c or g or t.
  misc_feature (1128517)..(1128518): n is a or c or g or t.
  misc_feature (1128539)..(1128540): n is a or c or g or t.
  misc_feature (1561400)..(1561400): n is a or c or g or t.
  misc_feature (1561477)..(1561477): n is a or c or g or t.
  misc_feature (1561545)..(1561545): n is a or c or g or t.
  misc_feature (1767941)..(1767941): n is a or c or g or t.
MKKLVSLFLTILVLGSIIGANAKFALAEEPKPLNVIIVWHQHQPYYYDPIQDVYTRPWVRLHAANNYWKMAHYLSEYPDVHVAIDLSGSLIAQLADYMNGKKDTHQIITEKIANGEPLTVEDKWFMLQAPGGFFDHTIPWNGEPVTDQNGNPIRDFWDRYTELKNKMMNAKAKYANLPLEEQKVAVTNEFTEQDYIDLAVLFNLAWIDYDYIMNTPELKALYEKVDEGGYTRDDVKTVLNAQLWLLNHTFEEHEKINYLLGNGNVEVTVVPYAHPIGPILNDFGWESDFDAHVKKSHELYKKYLGDGRVTPQGGWAAESALNDKTLEILAENGWQWVMTDQLVLDRLGVEKTIENYHKPWVAEFNGKKIYLFPRDHALSDRVGFTYSGMNQYQAVQDFVNELLKLQKQNYDGSLVYVVTLDGENPWEHYPYDGKLFLEELYKKLTELQNAGLIKTLTPSEYIKLYGDKAKELTPKMMERLDFTTEDKVNALLKAKSLGELYDMVGVQEEMQWPESSWIDGTLSTWIGEPQENYGWYWLYQARKALMENKDKMSQDAWNKAYEYLLRAEASDWFWWYGNDQDSGQDYTFDRYLKTYLYEIYKLAGVEPPSYLYGNYFPDGQPYITRALDGLGEGDKKEYSSESALAKGVEVYFEGDGIHFLVKGDLNEFEVSLSSPDERIGNTFTILQKRPTELRYSLFPLSKDSVGMLITTHVVYKDGKAEVYKAKDYETSEKVGDVTAKKTDAGVEVVVPFDYLSNPSDFYFAVSTVNENGELEVISSPVELKLPVQVKGAVIADIADPEGDDHGPGTYTYPTDSVFKPGVFDLLRFRMLEQADSYVMEFYFKDLGGNPWNGPNGFSLQIIEVYLDFKEGGNSSAIKMFPDGPGSNVNLDPFHPWDVALRIAGWDYGNLIVLPNGTAIQGEMQISADPTKNSIVVKLPKKYFPGVSDYGLYASVLVGSQDGYGPDKWRPVAVEAEQWKGGGADPQAVIAGVAPRVYDMLVPEGFKPTQEEQLKSYDTENGKLATVVMIPLVEGTGGEKPTETETPTKTTTTTTSSTETTTTSTTETATNHHDYYNHIPRRRRKWQRIHHYQHLPRHRRW

SEQ ID NO: 269 - protein, 450 aa, Thermococcus kodakaraensis KOD1
  misc_feature (414542)..(414542): n is a or c or g or t.
  misc_feature (786890)..(786890): n is a or c or g or t.
  misc_feature (786907)..(786907): n is a or c or g or t.
  misc_feature (786944)..(786946): n is a or c or g or t.
  misc_feature (839139)..(839139): n is a or c or g or t.
  misc_feature (1128488)..(1128488): n is a or c or g or t.
  misc_feature (1128499)..(1128499): n is a or c or g or t.
  misc_feature (1128505)..(1128506): n is a or c or g or t.
  misc_feature (1128517)..(1128518): n is a or c or g or t.
  misc_feature (1128539)..(1128540): n is a or c or g or t.
  misc_feature (1561400)..(1561400): n is a or c or g or t.
  misc_feature (1561477)..(1561477): n is a or c or g or t.
  misc_feature (1561545)..(1561545): n is a or c or g or t.
  misc_feature (1767941)..(1767941): n is a or c or g or t.
MRLFGTAGIRGTLWEKVTPELAMKVGMAVGTYKSGKALVGRDGRTSSVMLKNAMISGLLSTGMEVLDADLIPTPALAWGTRKLADAGVMITASHNPPTDNGVKVFNGDGTEFYVEQERGLEEIIFSGNFRKARWDEIKPVRNVEVIPDYINAVLDFVGHETNLKVLYDGANGAGSLVAPYLLREMGAKVLSVNAHVDGHFPGRKPEPRYENIAYLGKLVRELGVDLAIAQDGDADRIAVFDEKGNYVDEDTVIALFAKLYVEEHGGGTVVVSIDTGSRIDAVVERAGGRVVRIPLGQPHDGIKRYKAIFAAEPWKLVHPKFGPWIDPFVTMGLLIKLIDENGPLSELVKEIPTYYLKKANVLCPDEYKAEVVRRAAEEVERKLSSEIKEVLTISGFRIALNDGSWILIRPSGTEPKIRVVAEAPTEKRRDELFEMAYSTVSRIVKEAEKK

SEQ ID NO: 270 - protein, 121 aa, Thermococcus kodakaraensis KOD1
  misc_feature (414542)..(414542): n is a or c or g or t.
  misc_feature (786890)..(786890): n is a or c or g or t.
  misc_feature (786907)..(786907): n is a or c or g or t.
  misc_feature (786944)..(786946): n is a or c or g or t.
  misc_feature (839139)..(839139): n is a or c or g or t.
  misc_feature (1128488)..(1128488): n is a or c or g or t.
  misc_feature (1128499)..(1128499): n is a or c or g or t.
  misc_feature (1128505)..(1128506): n is a or c or g or t.
  misc_feature (1128517)..(1128518): n is a or c or g or t.
  misc_feature (1128539)..(1128540): n is a or c or g or t.
  misc_feature (1561400)..(1561400): n is a or c or g or t.
  misc_feature (1561477)..(1561477): n is a or c or g or t.
  misc_feature (1561545)..(1561545): n is a or c or g or t.
  misc_feature (1767941)..(1767941): n is a or c or g or t.
MEEYLNLIPVRNEKIKLRKIDGKYYLLIPMDSMLDFLARKLHGDYRRIELDEVGAYIWELCDGRRTVREIGKALKTRFGDEVEPLYERLLVFLLNLHKRYLITFIKPNEEIENGDYHERSS

SEQ ID NO: 271 - protein, 426 aa, Thermococcus kodakaraensis KOD1
  misc_feature (414542)..(414542): n is a or c or g or t.
  misc_feature (786890)..(786890): n is a or c or g or t.
  misc_feature (786907)..(786907): n is a or c or g or t.
  misc_feature (786944)..(786946): n is a or c or g or t.
  misc_feature (839139)..(839139): n is a or c or g or t.
  misc_feature (1128488)..(1128488): n is a or c or g or t.
  misc_feature (1128499)..(1128499): n is a or c or g or t.
  misc_feature (1128505)..(1128506): n is a or c or g or t.
  misc_feature (1128517)..(1128518): n is a or c or g or t.
  misc_feature (1128539)..(1128540): n is a or c or g or t.
  misc_feature (1561400)..(1561400): n is a or c or g or t.
  misc_feature (1561477)..(1561477): n is a or c or g or t.
  misc_feature (1561545)..(1561545): n is a or c or g or t.
  misc_feature (1767941)..(1767941): n is a or c or g or t.
MRRTVLLVTVLLVFIGGCLGQMENPRPTNNPSTSHPSDSYSTLPTTKYDVLKEGQEKPVVNAINSFTFDLYKELAGNNNNVFFSPFSIETALAMAYEGARGKTAEEMKRVLHLPEDDDARWTGFRYLLLSLKSPEGSPFILRSVNALWVQRGYSLREEYLGIVKEFYLGEAKEVDFQGNPAEAAREINEWVEEQTNGRIKDIVSGLSPLTRLVITNAVYFKANWSSRFRASDTRNETFHAPNGTVIVPMMHQTGEFPYFENDDLQALELPYEGERLGMLIILPKEGKFEKVEGNLSAGSIENILKNMREEKVKVALPKFRFEASYKLRDVLMDMGMKRAFLVPDFSGISNGENLAIEDVVHKSFISVAENGTEAAAATAVTLTMNAPMQEKEPKIFKADHPFIFFIYDRETGTILFMGRMMNPKDG

SEQ ID NO: 272 - protein, 102 aa, Thermococcus kodakaraensis KOD1
  misc_feature (414542)..(414542): n is a or c or g or t.
  misc_feature (786890)..(786890): n is a or c or g or t.
  misc_feature (786907)..(786907): n is a or c or g or t.
  misc_feature (786944)..(786946): n is a or c or g or t.
  misc_feature (839139)..(839139): n is a or c or g or t.
  misc_feature (1128488)..(1128488): n is a or c or g or t.
  misc_feature (1128499)..(1128499): n is a or c or g or t.
  misc_feature (1128505)..(1128506): n is a or c or g or t.
  misc_feature (1128517)..(1128518): n is a or c or g or t.
  misc_feature (1128539)..(1128540): n is a or c or g or t.
  misc_feature (1561400)..(1561400): n is a or c or g or t.
  misc_feature (1561477)..(1561477): n is a or c or g or t.
  misc_feature (1561545)..(1561545): n is a or c or g or t.
  misc_feature (1767941)..(1767941): n is a or c or g or t.
MHFEVVKEFLEDIGADWIEIEGEIHLDPEVFYEVWKYVGQPELKTYVIEDEVVEPGSYDPPEMKYTDVKKVKIKKVYFETLDGKKIVTDYSEFQKLVKEKSA

SEQ ID NO: 273 - protein, 349 aa, Thermococcus kodakaraensis KOD1
  misc_feature (414542)..(414542): n is a or c or g or t.
  misc_feature (786890)..(786890): n is a or c or g or t.
  misc_feature (786907)..(786907): n is a or c or g or t.
  misc_feature (786944)..(786946): n is a or c or g or t.
  misc_feature (839139)..(839139): n is a or c or g or t.
  misc_feature (1128488)..(1128488): n is a or c or g or t.
  misc_feature (1128499)..(1128499): n is a or c or g or t.
  misc_feature (1128505)..(1128506): n is a or c or g or t.
  misc_feature (1128517)..(1128518): n is a or c or g or t.
  misc_feature (1128539)..(1128540): n is a or c or g or t.
  misc_feature (1561400)..(1561400): n is a or c or g or t.
  misc_feature (1561477)..(1561477): n is a or c or g or t.
  misc_feature (1561545)..(1561545): n is a or c or g or t.
  misc_feature (1767941)..(1767941): n is a or c or g or t.
VRPVSKLLREVTPEERRLYYSGEWDAKKLPEFIVESIERREFGFDHTGEGPSDRKNAFSDVRDLEDYIRATAPYAAYSSVAFYRNPQEMEGWLGAELVFDIDAKDLPLRRCQNEHPSGQVCPICLEDAKELARDTLIILKEDFGFENIHVVYSGRGYHIRVIDEWALKLDSKARERILSYVSAAEEVTFDDIQKRYIMLSSGYFRVFRLRFGYFIQRINENHLKNIGLKRSTAEKLLDEKTRQDIVEKFVNKGLLAAFPEGVGYRTLLRLFGLSTTFSKAYFDGRVTVDLKRILRLPSTLHSKVGLVATYIGSDEKRLEKFDPFKDAVPEFRKEEVQKAYQEWKELHEG

SEQ ID NO: 274 - protein, 233 aa, Thermococcus kodakaraensis KOD1
  misc_feature (414542)..(414542): n is a or c or g or t.
  misc_feature (786890)..(786890): n is a or c or g or t.
  misc_feature (786907)..(786907): n is a or c or g or t.
  misc_feature (786944)..(786946): n is a or c or g or t.
  misc_feature (839139)..(839139): n is a or c or g or t.
  misc_feature (1128488)..(1128488): n is a or c or g or t.
  misc_feature (1128499)..(1128499): n is a or c or g or t.
  misc_feature (1128505)..(1128506): n is a or c or g or t.
  misc_feature (1128517)..(1128518): n is a or c or g or t.
  misc_feature (1128539)..(1128540): n is a or c or g or t.
  misc_feature (1561400)..(1561400): n is a or c or g or t.
  misc_feature (1561477)..(1561477): n is a or c or g or t.
  misc_feature (1561545)..(1561545): n is a or c or g or t.
  misc_feature (1767941)..(1767941): n is a or c or g or t.
MYRVVTIEEVWDVAKDVKAFRFNENIEFAPGQFIMAWLPGVGEKPFSLAWEDMIVVKRVGPFTTKLFELKEGDRLWIRGPYGHGFIKRGEKVALVGGGIGIPPLYAFAKKNQGKFRQMTLIYGARSKDELSLLDIENYVDDAVITTDDGSAGRKGFPTEVLAERREEFDQVYACGPEPMLKAVLKVMNYKNVQISAERYMKCGIGVCGSCNLGKYLVCRDGPVFEGEKLVGLL

SEQ ID NO: 275 - protein, 42 aa, Thermococcus kodakaraensis KOD1
  misc_feature (414542)..(414542): n is a or c or g or t.
  misc_feature (786890)..(786890): n is a or c or g or t.
  misc_feature (786907)..(786907): n is a or c or g or t.
  misc_feature (786944)..(786946): n is a or c or g or t.
  misc_feature (839139)..(839139): n is a or c or g or t.
  misc_feature (1128488)..(1128488): n is a or c or g or t.
  misc_feature (1128499)..(1128499): n is a or c or g or t.
  misc_feature (1128505)..(1128506): n is a or c or g or t.
  misc_feature (1128517)..(1128518): n is a or c or g or t.
  misc_feature (1128539)..(1128540): n is a or c or g or t.
  misc_feature (1561400)..(1561400): n is a or c or g or t.
  misc_feature (1561477)..(1561477): n is a or c or g or t.
  misc_feature (1561545)..(1561545): n is a or c or g or t.
  misc_feature (1767941)..(1767941): n is a or c or g or t.
VRLALLEVIVKNRIPLKRVAIEGEDEEIKRFMEFLMRARAGG

SEQ ID NO: 276 - protein, 204 aa, Thermococcus kodakaraensis KOD1
  misc_feature (414542)..(414542): n is a or c or g or t.
  misc_feature (786890)..(786890): n is a or c or g or t.
  misc_feature (786907)..(786907): n is a or c or g or t.
  misc_feature (786944)..(786946): n is a or c or g or t.
  misc_feature (839139)..(839139): n is a or c or g or t.
  misc_feature (1128488)..(1128488): n is a or c or g or t.
  misc_feature (1128499)..(1128499): n is a or c or g or t.
  misc_feature (1128505)..(1128506): n is a or c or g or t.
  misc_feature (1128517)..(1128518): n is a or c or g or t.
  misc_feature (1128539)..(1128540): n is a or c or g or t.
  misc_feature (1561400)..(1561400): n is a or c or g or t.
  misc_feature (1561477)..(1561477): n is a or c or g or t.
  misc_feature (1561545)..(1561545): n is a or c or g or t.
  misc_feature (1767941)..(1767941): n is a or c or g or t.
VVDMEDVKELKSVLEKVEGKLIAAGKMYAAMNFAGFLAVMTLFYVILRFFNGGPAFSIAYWTAATIVVITFTSKVWRRIVTISGIKRNSGKKIGLEIAGAWVIGAALGWVLIPSLNPGINEEAGLAVGFLSFISVSLLGQWAVLKKCCGAENEMVPAFLIPALAIPLAWGMGSGAMLWAGYVVSLGFATTILLYLHSAFKAVKR

SEQ ID NO: 277 - protein, 206 aa, Thermococcus kodakaraensis KOD1
  misc_feature (414542)..(414542): n is a or c or g or t.
  misc_feature (786890)..(786890): n is a or c or g or t.
  misc_feature (786907)..(786907): n is a or c or g or t.
  misc_feature (786944)..(786946): n is a or c or g or t.
  misc_feature (839139)..(839139): n is a or c or g or t.
  misc_feature (1128488)..(1128488): n is a or c or g or t.
  misc_feature (1128499)..(1128499): n is a or c or g or t.
  misc_feature (1128505)..(1128506): n is a or c or g or t.
  misc_feature (1128517)..(1128518): n is a or c or g or t.
  misc_feature (1128539)..(1128540): n is a or c or g or t.
  misc_feature (1561400)..(1561400): n is a or c or g or t.
  misc_feature (1561477)..(1561477): n is a or c or g or t.
  misc_feature (1561545)..(1561545): n is a or c or g or t.
  misc_feature (1767941)..(1767941): n is a or c or g or t.
VEVTMKLYRTGKASELLGISKPTLLRKIKTGEIKAYKIGKEYRIPESEIKRLLEGKVPDKVVIYARVSSRDQKEDLERQVEYLKNYCSAKGYQVARILTDISSGLNENRKGLKQLFKLVESGEVTKVVITYKDRLTRFGFKYLEQYFNSHGVEIEVIFNDEEKTPEKELVEDLLAIVTSFAGKLYGARSHKKKRLVEAVKNALRDD

SEQ ID NO: 278 - protein, 48 aa, Thermococcus kodakaraensis KOD1
  misc_feature (414542)..(414542): n is a or c or g or t.
  misc_feature (786890)..(786890): n is a or c or g or t.
  misc_feature (786907)..(786907): n is a or c or g or t.
  misc_feature (786944)..(786946): n is a or c or g or t.
  misc_feature (839139)..(839139): n is a or c or g or t.
  misc_feature (1128488)..(1128488): n is a or c or g or t.
  misc_feature (1128499)..(1128499): n is a or c or g or t.
  misc_feature (1128505)..(1128506): n is a or c or g or t.
  misc_feature (1128517)..(1128518): n is a or c or g or t.
  misc_feature (1128539)..(1128540): n is a or c or g or t.
  misc_feature (1561400)..(1561400): n is a or c or g or t.
  misc_feature (1561477)..(1561477): n is a or c or g or t.
  misc_feature (1561545)..(1561545): n is a or c or g or t.
  misc_feature (1767941)..(1767941): n is a or c or g or t.
MKPAMNAIAPYRKLNIEKASPRISPIRRDITKYSAARKLMLAEYRNSS

SEQ ID NO: 279 - protein, 357 aa, Thermococcus kodakaraensis KOD1
  misc_feature (414542)..(414542): n is a or c or g or t.
  misc_feature (786890)..(786890): n is a or c or g or t.
  misc_feature (786907)..(786907): n is a or c or g or t.
  misc_feature (786944)..(786946): n is a or c or g or t.
  misc_feature (839139)..(839139): n is a or c or g or t.
  misc_feature (1128488)..(1128488): n is a or c or g or t.
  misc_feature (1128499)..(1128499): n is a or c or g or t.
  misc_feature (1128505)..(1128506): n is a or c or g or t.
  misc_feature (1128517)..(1128518): n is a or c or g or t.
  misc_feature (1128539)..(1128540): n is a or c or g or t.
  misc_feature (1561400)..(1561400): n is a or c or g or t.
  misc_feature (1561477)..(1561477): n is a or c or g or t.
  misc_feature (1561545)..(1561545): n is a or c or g or t.
  misc_feature (1767941)..(1767941): n is a or c or g or t.
MKARKAWRVVREVVDEADIVVEVVDARDPIGTRNRKLERLILEEGKPLLIVMNKADLVPKEWAEEYKRKSEVPVVFISARERKGTGILRKEIKKLAKPLLDEKEKVKVALIGYPNVGKSTIINTLKGKRAVGTAPIPGYTKGKQLIRLSKKIWLLDSPGVIPIDDFDELVIRGGFPADKIEEPVKPAVKLIGRILETRKEAITEKFGITEFESEEDILRKIGERRGLIKAGGEVDIEETARWFLREWQTGRFTLFGSEEEGKRDFIWDFEDVLNGVEKDLLLDPRRILWKYGDELREKLDGQKRAGVREIEGITVGIATGFKKCDSAVKFLEELTGKHALASECFGKKWKGVVAVLD

SEQ ID NO: 280 - protein, 282 aa, Thermococcus kodakaraensis KOD1
  misc_feature (414542)..(414542): n is a or c or g or t.
  misc_feature (786890)..(786890): n is a or c or g or t.
  misc_feature (786907)..(786907): n is a or c or g or t.
  misc_feature (786944)..(786946): n is a or c or g or t.
  misc_feature (839139)..(839139): n is a or c or g or t.
  misc_feature (1128488)..(1128488): n is a or c or g or t.
  misc_feature (1128499)..(1128499): n is a or c or g or t.
  misc_feature (1128505)..(1128506): n is a or c or g or t.
  misc_feature (1128517)..(1128518): n is a or c or g or t.
  misc_feature (1128539)..(1128540): n is a or c or g or t.
  misc_feature (1561400)..(1561400): n is a or c or g or t.
  misc_feature (1561477)..(1561477): n is a or c or g or t.
  misc_feature (1561545)..(1561545): n is a or c or g or t.
  misc_feature (1767941)..(1767941): n is a or c or g or t.
MLFVYFTNALPALHRYGLDLYLKNVWRAAEEPSEEVYGIAAAIWGSVYTSLIAILIALPLSVAYSVFVVDYAPKRLKNAFIILSDVMAGLPTIIYGIWGAFFLVPFLRDWIMKPLYDHLSFIPLFSYPPVGGYSYLSAGVLLAIMVTPFASAIIREAYNMVPFTYREAIYSLGATRYEATKLLLGYIKPAIVSGTILAFGRAVGETVAVSLVIGNTFNLTTALFAPGYTVSSLIANQFGNAFIYEYMTSTLFAAGLILFVIGLAVNVVGLKMLKRWERNVSI

SEQ ID NO: 281 - protein, 253 aa, Thermococcus kodakaraensis KOD1
  misc_feature (414542)..(414542): n is a or c or g or t.
  misc_feature (786890)..(786890): n is a or c or g or t.
  misc_feature (786907)..(786907): n is a or c or g or t.
  misc_feature (786944)..(786946): n is a or c or g or t.
  misc_feature (839139)..(839139): n is a or c or g or t.
  misc_feature (1128488)..(1128488): n is a or c or g or t.
  misc_feature (1128499)..(1128499): n is a or c or g or t.
  misc_feature (1128505)..(1128506): n is a or c or g or t.
  misc_feature (1128517)..(1128518): n is a or c or g or t.
  misc_feature (1128539)..(1128540): n is a or c or g or t.
  misc_feature (1561400)..(1561400): n is a or c or g or t.
  misc_feature (1561477)..(1561477): n is a or c or g or t.
  misc_feature (1561545)..(1561545): n is a or c or g or t.
  misc_feature (1767941)..(1767941): n is a or c or g or t.
VNFAIETVNLNVYYGQNHVIKDVDLKIPNKGVFALMGPSGCGKSTMLRTFNRLIELNEDARVEGEVRLFGENIYSEDVDPIEVRKKVGMVFQYPNPFPHLTIYDNVAIGLKLNGLVKSREELDERVEWALKKAALWDEVKDRLNDYPGNLSGGQRQRLVIARALAMKPEVLLMDEPTANIDPVGTAKIEELLLELKEDYTIVLVTHSPAQAARVADYVAFLYLGELIEVGPARKVFENPEHELTEKYVTGALG

SEQ ID NO: 282 - protein, 129 aa, Thermococcus kodakaraensis KOD1
  misc_feature (414542)..(414542): n is a or c or g or t.
  misc_feature (786890)..(786890): n is a or c or g or t.
  misc_feature (786907)..(786907): n is a or c or g or t.
  misc_feature (786944)..(786946): n is a or c or g or t.
  misc_feature (839139)..(839139): n is a or c or g or t.
  misc_feature (1128488)..(1128488): n is a or c or g or t.
  misc_feature (1128499)..(1128499): n is a or c or g or t.
  misc_feature (1128505)..(1128506): n is a or c or g or t.
  misc_feature (1128517)..(1128518): n is a or c or g or t.
  misc_feature (1128539)..(1128540): n is a or c or g or t.
  misc_feature (1561400)..(1561400): n is a or c or g or t.
  misc_feature (1561477)..(1561477): n is a or c or g or t.
  misc_feature (1561545)..(1561545): n is a or c or g or t.
  misc_feature (1767941)..(1767941): n is a or c or g or t.
MGKASTVILTLILILAVGLGINYAVNHYGSFNYEWKRGFTNYNTYNLAGNSVLNGYIKADGDVSVYILTKENFKKMKNGEPFSYYKAWEHVRSVEFDGIKIPDGDYILVVKNEGEGMRWISAKIVNKKE

SEQ ID NO: 283 - protein, 130 aa, Thermococcus kodakaraensis KOD1
  misc_feature (414542)..(414542): n is a or c or g or t.
  misc_feature (786890)..(786890): n is a or c or g or t.
  misc_feature (786907)..(786907): n is a or c or g or t.
  misc_feature (786944)..(786946): n is a or c or g or t.
  misc_feature (839139)..(839139): n is a or c or g or t.
  misc_feature (1128488)..(1128488): n is a or c or g or t.
  misc_feature (1128499)..(1128499): n is a or c or g or t.
  misc_feature (1128505)..(1128506): n is a or c or g or t.
  misc_feature (1128517)..(1128518): n is a or c or g or t.
  misc_feature (1128539)..(1128540): n is a or c or g or t.
  misc_feature (1561400)..(1561400): n is a or c or g or t.
  misc_feature (1561477)..(1561477): n is a or c or g or t.
  misc_feature (1561545)..(1561545): n is a or c or g or t.
  misc_feature (1767941)..(1767941): n is a or c or g or t.
VMAMEAVLIAGIARRLLDELLRNPYRTIELRSARNVLAVERAMEDLRRLFLTYEPFEDVRTGTEGLITELIEARELNMRVPWEESDEREVTVCRARVKLLGLGRVVEMERRDSITVVKVREMLPQEMQIG

SEQ ID NO: 284 - protein, 264 aa, Thermococcus kodakaraensis KOD1
  misc_feature (414542)..(414542): n is a or c or g or t.
  misc_feature (786890)..(786890): n is a or c or g or t.
  misc_feature (786907)..(786907): n is a or c or g or t.
  misc_feature (786944)..(786946): n is a or c or g or t.
  misc_feature (839139)..(839139): n is a or c or g or t.
  misc_feature (1128488)..(1128488): n is a or c or g or t.
  misc_feature (1128499)..(1128499): n is a or c or g or t.
  misc_feature (1128505)..(1128506): n is a or c or g or t.
  misc_feature (1128517)..(1128518): n is a or c or g or t.
  misc_feature (1128539)..(1128540): n is a or c or g or t.
  misc_feature (1561400)..(1561400): n is a or c or g or t.
  misc_feature (1561477)..(1561477): n is a or c or g or t.
  misc_feature (1561545)..(1561545): n is a or c or g or t.
  misc_feature (1767941)..(1767941): n is a or c or g or t.
MKVAYVQMEPVFLDPEANYSRAEKLIREAADQGAKLVVLPELFDTGYNFRSREEVEEVAGQIPDGPTTEFLVELAKELEVFIVAGTAEKDEKGNLYNSAVLVGPVGWGYIGKYRKIHLFNREKLFFRPGNLGFHVFNIGIAKVGVMICFDWFFPESARTLALKGADVIAHPSNLVMPYAPRAMPIRALENRVYTITANRIGEEFGLRFIGKSTIASPRAEVLAMGSEDKEEVGVVEIDLSLARDKRINEMNDIFKDRRPQYYTL

SEQ ID NO: 285 - protein, 33 aa, Thermococcus kodakaraensis KOD1
  misc_feature (414542)..(414542): n is a or c or g or t.
  misc_feature (786890)..(786890): n is a or c or g or t.
  misc_feature (786907)..(786907): n is a or c or g or t.
  misc_feature (786944)..(786946): n is a or c or g or t.
  misc_feature (839139)..(839139): n is a or c or g or t.
  misc_feature (1128488)..(1128488): n is a or c or g or t.
  misc_feature (1128499)..(1128499): n is a or c or g or t.
  misc_feature (1128505)..(1128506): n is a or c or g or t.
  misc_feature (1128517)..(1128518): n is a or c or g or t.
  misc_feature (1128539)..(1128540): n is a or c or g or t.
  misc_feature (1561400)..(1561400): n is a or c or g or t.
  misc_feature (1561477)..(1561477): n is a or c or g or t.
  misc_feature (1561545)..(1561545): n is a or c or g or t.
  misc_feature (1767941)..(1767941): n is a or c or g or t.
VITTQRKKYSLMSEEPEAVLRVLLRGVANVQAP

SEQ ID NO: 286 - protein, 216 aa, Thermococcus kodakaraensis KOD1
  misc_feature (414542)..(414542): n is a or c or g or t.
  misc_feature (786890)..(786890): n is a or c or g or t.
  misc_feature (786907)..(786907): n is a or c or g or t.
  misc_feature (786944)..(786946): n is a or c or g or t.
  misc_feature (839139)..(839139): n is a or c or g or t.
  misc_feature (1128488)..(1128488): n is a or c or g or t.
  misc_feature (1128499)..(1128499): n is a or c or g or t.
  misc_feature (1128505)..(1128506): n is a or c or g or t.
  misc_feature (1128517)..(1128518): n is a or c or g or t.
  misc_feature (1128539)..(1128540): n is a or c or g or t.
  misc_feature (1561400)..(1561400): n is a or c or g or t.
  misc_feature (1561477)..(1561477): n is a or c or g or t.
  misc_feature (1561545)..(1561545): n is a or c or g or t.
  misc_feature (1767941)..(1767941): n is a or c or g or t.
VAGMKVKMKKKHLAMLLSRLRGFESPKPELEQYRTPGDVAAELLWLAHSLGEVEGKVIADLGAGTGVLGIGAVLLGAENVYAVERDKEALEIARENARSLGVEDKIEFVNADVSEFSVNVDTVIMNPPFGSQVKHADRPFLIKAFEVSDVVYSIHLAKPEVRAFIEAFVRDNGFVITHRLTLPFEIPAQFHFHRKRLERILVDVYRFERKIEKAIL

(The sequence listing continues in the following parts.)

1. A method for targeted-disruption of an arbitrary gene in the genome of a living organism, comprising the steps of:
A) providing information of the entire sequence of the genome of the living organism;
B) selecting at least one arbitrary region of the sequence;
C) providing a vector comprising a sequence complementary to the selected region and a marker gene;
D) transforming the living organism with the vector; and
E) placing the living organism in a condition allowing homologous recombination.

2. The method according to claim 1 wherein in step B, the region comprises at least two regions.

3. The method according to claim 1, wherein the vector further comprises a promoter.

4. The method according to claim 1 further comprising the step of detecting an expression product of the marker gene.

5. The method according to claim 5 wherein the marker gene is located in the selected region.

6. The method according to claim 1, wherein the maker is located outside of the selected region.

7. The method according to claim 1, wherein the genome is the genome of Thermococcus kodakaraensis KOD1.

8.-51. (canceled)

52. An RNAi molecule having a sequence homologous to a reading frame sequence wherein, when the reading frame of Table 2 is f-1, f-2 or f-3, the reading frame sequence has a sequence from the position of nucleic acid number (antisense strand, start) of SEQ ID NO: 1087 of Table 2, to the position of nucleic acid number (antisense strand, stop) or a sequence having at least 70% homology thereto.

53. The RNAi molecule according to claim 52, which is an RNA or a variant thereof comprising a double-stranded portion of at least 10 nucleotide length.

54. The RNAi molecule according to claim 52, comprising a 3′ overhang terminus.

55. The RNAi molecule according to claim 54, wherein the 3′ overhang terminus is a DNA having at least 2 nucleotides in length.

56. The RNAi molecule according to claim 54, wherein the 3′ overhang terminus is a DNA of two to four nucleotides in length.
